United States Patent Application Publication US 2014/0057251 A1 - sequence listing, part 117

SEQ ID NO: 218864 - DNA, 5056 bp, Cannabis indica
tgatgttcaactcatatagaaatgtattgtatgtgatttaaataagtgcttaatatatatgaaagataaaaaattgagaaattaagttggagtaaagataaaatggtagttcacaatttgcaaaaatatagttctactagtagttattaaactttcaagagttttctatatatttttagagaaagtactttaataatgatttatttcctacttttttgaaaaatatttaaccacttactcttaacttcctcttatatgattttaaagtcgttacaaaagaaaagaaaaaattataacattgcgtaaaaattagaaaataagatatgatactagtatttataaatacacttttcatttttttttttcacgagactttaattgtaatttttaaattctatatgatattaataattttagcacaatatacttttttttgctattatgacataataatacatttcttataattttaaatatcattcatagtacaatgagtcttgtcttttgacatggtatgatattctctttacaattacatttgattgtgtcttatgtttgtttgatttgttaatcatggaatctgagaatcatcatgcaactgatattgaggatcagtacgcaagttttcgaatagaggatgaagaggaagatagtttggtgtaggaggggggtgttgatgatctgcaggagattgatgataggtagttgttggtgggcagattcttaaccaatagaggggtggatttccaagctatgcaaaataaaatggcaactctatggcagttgggaagaggtatgtatgttaaggaacttgacaacaatttgtttctttttcaattttaccataaggttgatattgaacgagtgattgaagggagtccttggacctttgatcgggtgcccttgatatttgaaagagttcagcaaggtcagaacccgagaaccatcaccctgaataagcttgatttttgggttcaaatacataacttgtcaactggattcatgctagaacgtgttgtgcgtgatctcggaaactttatagggatctttaccaaggccgatccgaacaactttattggcgtttggcggcattacttacgtgttcgggtcaaaattaatattgattgcccattgaaaagaaaaaagaaggtggaaaaacaagggagagtatgttgttatgcacatttcaaaaatgaaggtttgcccaccttttgttttatatgcggcgttcttggccattccgaaaggttctgtgagcaacttttccatacccccattgaacaaattcagaagccatacttgttggaattaaaggcagctccaagacgaaagaattatgctattggtgagaaatggttaaggtctggtgttgccacaaaaacgggaggcgtcgctttctctgagaacatggcagcggagaccaaaaacagagcaagcgtgggcggtccggcaaggtacgttcagggcaccaattcacagcaaagtcatttacttcttacaattttgggatcatcttccaatcaaccaattatggagagtaatgataagaataaaatgatggcagattctttgccattatcaaagtaaaaagctgttgaagttgactatacgttgatagaggaggttaatgttgaagatactattggagaggaaagtgttatagataaggaaacaagtatcctgattttggatactaaaaggaggagcactgaaggggggtgaccaatgggcctggagacgtgcatggagtggagattaatgggtgtatagacaattgtgatgttaatgggccggagcatttaattggagatgaaattgatacagatgtgatgaagagtaacacaaaaaacttgtttggggcaggttctgttttacaggtccgccaggaattatgaatgtcttaagctgaaattgccgtgggcttaggaaccaacgggctattcaattcctaaaagagattgtttctcaaaagaatcccaattttatattcctatgtgagactaaatgtaacaaagtgaaattagaaagcatgggccgaatgttaaagtatgaaggagttttttgtgttgaggcccaaggaagctcagagggtttggccttgttgttgaaacatcaggatgatggaagaattcttagctattataatagtcatatagactttttagtagaagcatctgagagaggaacatggaaactaattgggatttatggcgaaccagttcagggactttggcatcagtcatggaattcacttcgtgctttggctactaatcttactcttccctggtgtgtcattggcgatttgaacaatattgtcagacatgaggacaagcgtggtgggagaccgtattcgcaaagtcttattaatggattccaacaggcattaaacgactgcaatcttactgatttggagcttttgggtcatccattcacttaggagaaaggcagggggtcgagaaactgggttgaggtgaggttggatcgggacttggttaactcttcatggactaatttattccaaggtgcttctcttactaatctggaaatttcctcttccgatcattgtcctatttttttagaacctgaaccaagtagtatcttcccttcaaatcgtaaattcaaatttgagaatgcttggctcaaggagcctttgtgcttcgagatcgttagggactgctgggaaagtggtagtggggatgagttttcaagaaaattagcttgttgtgcagaaaaattaagtgtttggggtaaggatgtgactggtaatttcaaggtgagaatcaatcgatgcaaaacagagctacaacggctgggtaacaaaagagatattgcctccattcaaagacacaaggaggttaaggaggaattattttgggttcttgaccaaagagaagctttctggaagcaacgtgccaaacaactttggttaaaggaaggggatcaaaatagcagttactttcacaaggcgacatccactaggaagaggaataaccaaattgtaagcttgaaaaatgagagtggggtacgggttgattgggaacatggcctttctcaagtaatgattgattactttacatccctctttcaagcttctaattcttcatgtcctgaggtcattgattgtgtgcacaaatcgattcctgactttgtccatgctgagcttcgggttcctatcgcttaggaagaggtcaaaaaagtcgttttccaaatgcatcccgataaaagtcctggtcctgatggcatgacgccggcattttaccaaaagtgttggagtatagccggtcgagatgttgtaggtgtggtttggaatttcttctctgtaggggactttgaaaatggttgcagcaaggccaatattatgttgattcctaagaagaagaatccggaagacatgacccaacttcgcccaattgcgctctgcaatgttgtgtataaaacaatcacaaaggtcatggtcgtatgaagcctttcatgaatgccattgtagctgacactcaaagttcttttattccaggtaggctcatctcggacaacatcctaatttcgtttgatgtgcttcactatttaaaaagaaaaaggaaaggcaaagaaggctttatggcgctaaagttggatatgagcaaagcgtatgataggattgaatggttgttcttggaagcaatgctaaggaaactagggtttgaggaatggtggattcatttattgatgaaatgtgtaacttcggctaattatatggtggttcatggaaataaagagatggggccgattgttcctaccgggggtattcgacaaggggatctgttatccccgtatctttttatcctttgtgctgagggtctttcggccttgcttcagaaatatgaaagaagaggtttcattcacagatgcaaggtggctaatggagctccccatatttctcacatgctatttgcagatgacagctacctctactgtaaagccactatgttggaagctttaagaataaacgaaattctgcacaagtttaaagcggcatctcgtcaaaaagtgaactttacgaaatcatcgattttttatagcaccaacactaatcttgctactcgggatagtatcagtacctttcttggcatgtctatagcgggggaaggaagtttgtatttggggtttccaagcactttaagcaggaacaagttagcagttttgggctatctcaaagaaagagttcgaaagtgaattgaaggctgggagacgaaattcctatctcgcgccgataaagaagtgttgatcaaaacggttgcacaatctcttccaagctatgcaatgagcgtattcttgttaccaatggagatcactcgggatatggagaaaactatgaataaattctggtggcaagggttcgacaatgcgagaaatggaattcattggttctcttgggatcggctttgtatgcataaatctaaaggaggcatgagtttccgctatttgagagattttaatttgtctatgcttggaaaacaagggtggaggctgactctttggttgcaaaaatcttcaaagataggtactttcctaatggcaccttccttacggctaagttggggaataatccgagctttgtgtggcgtagtctcctcgaagctcaagatttggttagaaaaggaacttgatggtgtgttggtactggggaagatattgatgtcctttatgaaccttggctaccaaatgaagagcaattgtttgttacttcaactcatcctagattgattggaacaaaggtgactaatcttatggtgataggaggtggaagttgggatgctaaaattttaaatgacttgtttgaggatcgggacaagaagcttataatggacattccattgaatattagtcaaggcaaagacaagttgaattggatttatgaaacttcaggctttcactctgttaaaagtgcctacaagctacttcagaaattaaatggcaggtggcatcaagatgaggatgagcaaacaaagttctggacaaagtttttgttaggttatttttagtattaattttagattaagtttagtatatttttaat

SEQ ID NO: 218865 - DNA, 12025 bp, Cannabis indica
gaatccatgctttgaattgagatctccaaatactaccaataaaactcctatcaatcgttgctatattcatctctttaaaatcgccaaatccggattcaccttactagtagttgccttaattgattttctcttcttcttgtctccatttcctcttacattccaagttaagatcttcataataaactctgtggggcccctccttttttctaacttttctcatagtttatgttgaaagctagatttttgagttctctcttgtacttccttcatcccaattcatgtctctcctttgattctgctgtcttctcatctattatcaacttcatacccattatagccagagattcctctaggtcggagtcatcttttaatactaatccatcctccaccattcccatcgatattgctgacctttcaggttgattgctctcttctgaagacatttgattatgacaagattcctgccatagcacttttatatccctcagtatttcttcagcttctacttcttcctcatcatcgaagtagtctcttcttcagctgaattatcactttctgaactaaagtcaattatttcttcactcatagagccctctccctcctttaacgatttcttctctatcaaaattccacaaaacttcttctttgctccttgtgattgaagttctctttctgaaataaactttcatcctttttttcacagaggttcctcctcaaatgacatctgatcggattcttgcagcactgaattcgggtaagtttttcctttcgtctcaaattcttcccaaaaattaataatagcactactaaaatcctttcactgttttggtttaactgactaaagaatgccttccaaaaattctgaaattacgagttctcacaactacctcccaatttggttggtaatagccatttgtaaacccatctggtccaggggtcacacttaaaactgcatttttgatctcttattcttcgaaaggtctttcaaggtttaagtctagaaagttaggtatttttttccacttcacccattcaattctatcattacccgctcttgggagtgcaccattatagagtaaaaagagataatcacatctacactatatccctctttctctaaaattaatccacttccagtctcaattcttgaaaagaaattcttaatactcaagaactcatggaatagctttgagtttgcatccccttcattgacccatttgcagcttgacttcagccaaatctttcttcttcaatcacaatttgctgccattctattttgagccttctttcttccattaactgtgaattccactcacctcgttcctccattctgtctagcatagacacccgtccttctagtgattgctttttagttgtttactcccccatcttctttctgactccgttcttttatttttccttcgttgtagtttctccatgtatctaaaacccattcaccgaactcgcacactacaccacaagggaaactcattcttgaaattcttgtgtttcaaccacatcttgtcaaactgaaacgcaaaaggtccccacgatggcgaattcgaatcgagaacaatggggctatgatctgacacaattctcacatgaacatcttgtatgcagtaaggaaacaactcatttcacttgctggggtttcgtctaaaatttgaccttgcgaatccattattcaacttgggatcaattatcctcaattttctaactagctcatcaaggagcctcatatcaaacttagtccaagttactcatcccaaaacattccttgtctctatatttacttagatcatatactcttgtaaagtctatgtttacttagaccatatatactctagtactgtctcgatggcatctttcctactgcctcgatcaaaactgaaacagagaattctcttaataacgactctataaccttaattattcttgtatccacaattaaatctgggataattttacaaatggttactttaatcgctctccttttctccactgcctcacccctcacattacaagatagaatgttcattttaaatccttcatctccctcctatcatttaaaatccaaactacaaatgttccaccagatctccctagtgatgggaaagtcattttcttgactttcttctaacttattcgattcttcaatcatattttccatcagatttgacttttttacttttctggctatatacttccaatattgtgtccacttgcccactttcctctagttttgattcttcacatctagctctttattactgttgtttgatttactccccctctcaatctcgttccagaaattaatcattgcctacttaaaattctcctgatccttcggtcttattttttaaaatttctcccacaaaggtcttaactattgaaattgaatccaccacttcataagttgactagttgtccatgggcttaacttcaagccctacaactaattcacttaaccccataatttccttaagtggagtattattatgacttctaatcattagagggcctgttaaacttggatccaaaatgaatctttgggctccattcagccccataaagtttccaagactcttctgaatctagaacacttattacataagctaaaataaatatttaggtacaaagccttgatcatctccctccaatttaaattcttaaatgatgcaaaatattcatctagccagtctccttcaatagctaattgtccaccacacatagctcctattttccttaagagtttacatattccataaattctagggaaggctttcaacaccaatccaggagcctctacaatcaaccgtaatatccaggaaccgtcatctaacagtctttccttttcctcctcaacacaatattaatgttttagtattctatcatcaaacatttcgctgacctccaatctctttcccagttctccactcctatgagttctttttttcttgcatatattcatagaacttctgcttaattcttctttcaaggtaaaaattctttcgtccaaatgctaaattaatttcaggtaagcactcccatcttccaagtttctcgactccgtttcttcacacctggatagtttctgcaattccttttttttcttgtggtttcaattattttttcaccacgtttgcctaagtttgttgcatcctctttcctttgcctgatcttctcatcatactactttttcgacttgtcttttcccaagtttttactccactattccaaacaaacagttactaaaaagctcttccgtttgagtctctttcttcaggtataataaccaactgtcattttgatatttttcagcattaacactcccatcctttacgaagtacgaacactccctttctattctagaaactctacataaactgacaaattatcctgagatttttttaagctcttcccaagctgctcccttttttaatgaaattcttccattgtttcatataaccaagccgttgaatcaatggttatggtgatctcgtagccgatcaatctagtcattttgcatattttgatcgaccctccatgctattgataacgtgagcatgaacaccttatgatgtgttctaaaactacagtagtgttggtgactattacagccataaaaaaaaaaacgatttttataattaaaaccagtggggtttaaagatagatatcttcccctagccagtagggccagcatgcgaaatcggtcaatctagtcatttcgtatattctaatcgatcctccatgctttgttaaggtgagcatgaacaccttacgttgtgttctaaaactccagtagtgttggtgactattacaaccatcaaatcttgaacgatttttatatccaaaaccagtggagtttaaggatatatctttccccagccattagggccatcatgcaggctccttccatgtccattgggacgatgaaagctagggacatgcatgactttcccgctcaaaagaaagagagaagagagcatattacaggagagaaactcgggtaattttttccactcaattcctgtcattacccactctaaggatcgataatctcctttgtttagaattgatccgcattcagtctcgattcttgagaggaaatccctagcactcaacaactaatggaatagctttaagtttgcatccccttctctagcccatttgctgacttcacctaagtgtttctttcttcttcaatctcaatttgcttccattctattttgagtcttcttctagagattgtttctttagttgtttactccctaatccccacttctttatgattccgttcttgtatttttcctttcactttgtatgaatctatatcccaaccaccctcgaactcacacattgttccaccataatggaaactcattcttgaaatgataatctcctttgtttagaattgatccacattcaatcttgattcttgagatgaaatccctagcactcaacaactaatggaatagctttaagtttgcatccccttctctggcccatttgctgacttcactcaagtgcttctttcttcttcaatctcaatttgctcccaatttacctcccaggatggttggtaatagccattgtaaatccatctggaccaagggctttgtaccagaaagatgtcctcctcgggttttcctaaacacttccattaattctttcttcacaactacctcccaatttggttggtaatagtagccattgtaaatccatctggacctgggtctttctcccaaaaagatgtcctccttgggttttcctaaacacttccattaattatttcttcacaactacctcccaatttggttggtaatagtagccattgtaaatccatctggaccagggtctttctcccagaaagatgtcctccttgagttttcctccttgggttttcctaaatacttccattaatactttcttcacaatcacctcccaatttggttggtaatagccattgtaaatccatctggtccaagggcattcttccccttcacacttaaaaactgcatttttgatctcttattcttcggaaggtctttcacggtttaagtctagaaactcgggtatttttttccactcaatcccttcaattctatcattacccgctctcgggagtgcaccattatagagtaaaaagagataatcacatctactatatctcactctttctctaaaattaatccacttccagtctcaattcttgaaaagaaattcttaatactcaacaactcatggaatagctttgagttagcatccctttcattaatctatttgcatcttgacttcagccaaatcttcttcttcaatcgcaattttttgtcattctattttgagccttctttcttcctcgttaactgtagcatagacacatgtccttctagtgattgcctcttaagttgtttactcccggcctctttctgactccattcttttattcttcctttcgttgtagtttctcaatgaatctaaaactcgtccacccttgaactcgcactctacaccataatggaaacgcattcttgcaattcttgtgtttcaaccacaaattgtcaaactgaaaggcgaaaggtctccacgatggcaaattcaaatcgagaacaatggggctatgatttgacacttgttggggtttcgtctaaaatttgaccttgtgaatccatcattcaacattggatcaattatcctcaattttctaactagctcatcaaggagcctcatgtaaaacttagtccaagctactcatcccagaacattgctctatctctatatttacttagatcatatactcttgtaaactctatgtttacttataccgtatatactctcgtattgcctcgatgacatctttcctactgcctcaaccaaaactgaaatggagcaatctcttaataacgagtctataaccttaatgaatgtatccacaataaaatctaggataattttacatatggttgttttaatcgctctccttttctccactgcctcacccctcacattacaagatagaatgttcattttaaatccttcaactccctcctatcttttaatatccaaactacaaatgttccaccagatctccctagtgatgggaaagtcgttttcttgacttattcgattcttcaatcatatcttctattagattttggcatgttttctaaccttacttttttacttttcaggctatatacttcaaatattgtgtccacttcctcactttcctctagtttagattcttcgcctccagctctttattattgttgtttgatttactacccctcaaagtctcgttccagaatcattgccttcttaaaattctcctgatccttcgatcttatttttaaaaattttcccacaaaggtcttaactattgaaattgaatccaccacttcataagttgactagttgtccattggcttaacttcaagccctacaactaattcacttaaccccataatttccttaagtggaataattattatgacttctaatcattagagggcctgttaaacttggatccaaaataaatctttgggctccgttcagccccataaagtttcggcccaagactcttctgattctagaacagatattcaataagctaaaataaatatttaggtacaaaagccttgatcattttgctccaatttaattcttaaatgatgcaaaatattcatctagctagtctccttcaattttccttaagagttttcatattctataaattctagggaaggctttcaacaccaatccagtagcctctacaatcaaccttaatatctaggaatcgtcatctaacaggctttccttcttcttcaacgtctaattgtccaccacacatagctccaattttccttaagagttctcatattccataaattttagggaagactttcaacaccaatcaagcagcctctacggtcaatcttaatatctaggaaccgtcatctaacaggctttccttttcctcctcaacacaatattagtgttttagtgttctatcatcaaacatttcgctgacctccaatctctttcacagttctccactcctatgacttcttttttgcttgcatatattcatagaacttctgcgattttccttaaaagttttcatattccataaattttagggaagactttcaacaccaatccaggagcctctacaatcgaccttaatatccaggaactatcatctaacaggctttccttttcctcctcaacacaatattagtgttttagtgttctatcatcaaacatttcgctgacctcgaatctctttcccagttctccactactatgagttctatttttgcttgcatatattcatagaacttctgcttcattcttctttcacggtgtaaattctttcgtccaaatgctaaattaatttcaggtaagcactcccatcttccaagtttctcgactctgtttcttctcacctggttagtttctgcaattcctttttttttttcttgtggtttcaattattttttcaccacgtttgcccaagtttgtggcatcctctttcctttgcctgatcttctcatcacactactttttctacttgtcttttcccaagtttttaccccactaatccaaacaaacagttaacaaaaactcttccatccttttgagtctctttcttcagatataataaccactgtcgttttgatattttttagcattaagactcccatcctttgcgaagtacgaacactctctttctattctggaaactctccataaacagacaaattattcttgaaagattttttatgctattcccaagctgctcccttttctgttgaaattcttccaatgtttcatataaccaagtcgttgcatcaatggttatggtgatctcgtagcctccaatcatattctgatcgaccttccatgctttgttaaggtgagcatgaacaccttatgatgtgttctaaaaatccagtagtgttggttgtggtgatttcatataacctagtcatttgcatattctgatcgaccctccatgctttgttaaggtgagcatgaacaccttatgatgtgttctaaaaatccagtagtgttggtgactattacaaccatcaaaaccaaaacgatttttatatccaaaaccagcggggtttaaggatatatcttcccctagccagtagggccagcatgcaaaaccggtcaatctagtcatttcgcatattctaatcgatcctccatgctttgttaaggtgagcatgaacaccttatgttgtgttctaaaattccagtagtgatggtgactattacaaccatcaaaaccagaacgatttttatatccaaaaccagtggggtttaagatagatatcttccccaagctagtagagccaacatgcagagatccttccatgtccatttggacgatgaaagctagggacatgcatgactttccctctcaaaagaaagagagaagagagcatattacaggagagaaattatgggattacaaatcaagaaaactagctacaacttctataagagttgggagaaaatgaattgccaaaaggagtaaaaagattattttgagaaagaagataatttggctagaggaataaatattattcagtaaaaataaagttagaagaaaaagattattttagaaaaattaaagttaaggaaaaaataaattatttggaaaaatagagtttgaagaaaatgattttacaataagaataaaatgattattgtgagaaaatacagaatttggtttaaaaaatgaaatgttatttggaaaaatttacttaatgaataaaaaggttattttgagaaaataaagtatttggctaaagtattgagaaatttatttggaaaaaatagagttaagagaaaatatttttactaaagaaataaaaaaaattaaaaaataaaataaaattgttggcttcatttcgaaaaacaaagttaagagaaaatgattttactaaagaattaaaaagattattttaaagagtagatgtatagctaattaaatgtcttaaactacctctcacacaaaacaactctgagtttcaaggtttaaagctagaaacttgagtttttttcactcaattcctgtcattacccgctgttgggattgataatctcctttgtttagaattgatccacattcagtctcgattcttgagatgaaatccctagcactcaacaactaatggaatagctttaagtttgcatccccttctctggccatttgctaacttcacccaagtgcttctttcttcttcaatctcaatttgctgccattctattttgagccttcttctagtgattgtttttttagttgtttactccctacttctttctaattccattcttttatttttcctttcactttgtagtttctccatgaatctaaatcccaaccaccctcgaacttacacattgttccaccataatggaaactcattcttaaaattcttgagtttctaccacatgttttcaaaccgaatgggagagggtccccacgatggcggattcaaatcgagaacaatagagcatgatttgacacaattctcaatgaacatcttatctataataaggaagcaactcattccacttgttggtgactagaaatctatccaacatacgttagatggggttttatctaaaatttgaccatgtgaatcaaccattattcgacttgggatcaattaacctcaattttgtaactagctcatcaaagagcttcatgctcttagtgttaatacaactatttagtttctcttgaacttttctagccaactcatcaaacttagtccagccaacttgctctttctttatatttacttggaacatatactcccttaaaccaccatggtatctttccttctgcattaaaactgaaatagagaattcacctactaacgagtctattaccttgattgttcttgtatcccaaactaccaaagttcctctaaatctccctaatgatggtaatagaatccaagctttgaacttcaatctccaaatgcttcttacaaacctcctatcttacaccatcccttttaacttcttagagaacaattattaaatcagggttccaccaaactaccaaagttcctccaaatctccctaatgatggtaatagaatccaagctttgaacttcaacctccagatgcttcttacaaacctcctatctacaccatcccttttaacttctaggagaacaattaaataaaggttcctccaatctacaaaagttcctccatatctccctaatgatggtaatagaatccaagctttgaattgcaaatgattcttacgaacttcctatctacaccatccctattaacttctaggagaacaataatcaaggttcctccaaatctccctaatggttgtttaatagatctcttatccactccttactgccccgtcacattccaggatagaaccttcacataatatccttcgactccctctttgactccaaggctatatcataattgacattgaatgcaaaattattcagctcctattcctctaagctcttttcatgattatcgtcatcccctccatagcttgtgtcaagaataccaactccgacttattctcttatttctttattggtacctattgtctttttttgtttgcttgttcttttgtttcccattcacattcattcaataggttccttacatatggcactagctcttcaattccctccttgaatttaatgaaataataatcctcctcagagctacaactattttaacttgtgtcatcaaagtcttattcttgactttcttcaaatttactcggtttaatctgacattttctcttcctgattccccaccttcctctaattctaattctttgcctccatctctgagtataggctgtttatttacatagtttgattgtctccccttctcaatttagtaattaattgccctttgtagccatcttcttcaacagccagagtcacttttgatgaacccccagtcatcataggtgtttgccttaccttcttcctttccctggttcgttcaaaacaaccaattgtgcctttgttacaatccccttcctcaacatctcttcccctcagtcttctccatctgcttccatcttcgtattgcagtgtcttgataccaaataatccatgaaatttctagctccaatcatttagtttgaaaagcttaatacaatctttaattttcatatggcaataacaaatattcaggtacaaagccctgatcatctccctacaatctaattcttaaatgatgcaaaaaattcatctcaatagtcttcttgtcaacatctgataatctactacacatagctccaattttcctaagagttttcatattccataataagttcaagagaagtccttcaacaccaatttaaaagtgttgaattgaaacttgatccaccaccttcataagttgtgattagttgtccatgggcttatctttaggcccaacacctacgtcacttaagcccataatttccttgagtggagtattattctcacttctaattattagagggcatgtcaaacttggatctaaaatgaatctttacgctccaatctgccccattaagtttcgaaccaacacttctatagagggacacttatttaacttatctcttcttttattggagcatgtgttcagttgcggatgtttcaaaagcagccctccatataatcgtttaaaaattccttgtaggttgatcatattctccacttgtgttggatactcaatgacttgaaggctcataattgtgaagacaatcaatctcgatacctgcacacccttatttagtaattaattgcccttcatagccttcttctccgacagccagagtcactttcgatgaaccccccagtcatcataggtgtttacctatctcttttcccttagttcgttcgaaacaaccgcttgtgcctctgttacatccatgtcctcagcatcgcttctaccattttctcttcttcgtcaaattctttccatcttcctattgcagtgtattgaa

SEQ ID NO: 218866 - DNA, 5440 bp, Cannabis indica
aagaaaaagtatagtatgtatagtcttttaatttatattagccttttagcttcgtctttttgttttttttattccgttttggatttgtggttggatttggtgttgtaattcggtaacacctgcctagtgcaatattaattttcttaggtaatcaattaacaatttacaattgtattttgattattacggagagtattttacctttttttttttaaaaaaattactctacaagatcataatttgaataaaggagaatcctatttatttaaatatttataagtatacaggctaaatttgacacattttgcattattggtgtattattttctctttagaaaatgagtataaatagtgctacaaaaagtactagaccacttttataaaatagttattttatactagtctcaataaaaatgttaaaaaatactattagtgcctaacaccttccaaaatatcgtatcgctagtgatacaaataaacatcgagtctcatataactcaagatagaactttacttatctgataaacttttatcggagttttacatgagtattttaatctatatatgttaagcttgatctacttttaaacaagcttacatttatctataaactaaaatctgggaggaattggtaattttaaaacctcagtatggactacagtttagctcaaataggtattccttctcttatttctaaggtgaaggttttacaattttaaaaagtaacactccctaacccctgcagatctaaagcaatttataccattatgaggtgtaaagaagtgaaagaatttacaagaaaatagaaaaataaaagagaagtaaaagaagaaaagaatatgtatgttatctctcatggtgttcatctattgggtcaatcttgataatgagaggcttttggagatccaaaggagaatttgatgaaattggtagagtctctggagccgacatgccttccacttcaccattttcagcaagtgccttatccagagaagctttggccactttggtaatgaaaaccagtataataactgaagaacaaaccagaagaaaaacatgttaaacaggaaaccaaaagtataaacatgaatccagctacatattcctattgctgatgatatatcaaacttaacccggttttataaataaagggaatctaacaggtcattttgcgctttcctgaagaacagacatattaacacagcaacaaactaatttgaaataacatgttatgcatggaatgaaagaaagtcagaatagccgggagcaacttgagtctcaatatgtgcttaagtggacatgcccttcaatccttgatagactaacaatttcgtcgtctctataagtttctaacaaataagttaagttctacataactaatatagcatggttcggacagggagggtcgtgaacaagctgtgttcaatcaaactcgcacttgagcacataaacaggtgtgatgagtaataatacaattcagggaacttactggatataccaaaacccagtgctataaacacctgcaagcacaagcaaataaaataaaacatgactaaaatgtaaaggcctcaacagtttaaaaaataaataaagtagaaacacatacaaaaaggacaacaaaataaaagtgtgaacaatgcgtacccaattggaggttgacaactcattccatccatgtgtaacatcagatagatccttcaaagtagttccaatatataccagagtaaatgttatgggctgtgaggcaaaaaataattcttgttagagtatacaaataaataagatcacagataaatcagccttgacttgattgttaggaataaatgacataaattgtttcttggaatagcctatataaaattatccctataggtaaacgatcatgagctctcacataagatagtttttgaggtgtaactaagattagttcaaatgccttggcatcacataagtattatggaggtatgctaggatgtacttcgtcaatggcaataattgaacaagaaaatcatgaataatgcatttgtaaatcaagcttgttgtctattatacttcatattaagcaacataaaaaatgggaaacatgtaactgctagtcatttgaagagaatacgcaccatcattcctaaccaggttgccaccacatactcttctatgcgaacaggagtcacagacagaagataattcaacatattaaatggaagcaacggaaccagccgtagcagcagaactatctgttaaataaacccagattaaaaaagaattaggatttgtgcaatagtgattgatgtgcctggtatgaaacatcaaatagagtataaacaaagcttctatgaccactacaacgtacacagaacaatctgaaaatgttccaaaataaagaataccttaaagccagatctctgaattgcgatagcaacagcttcaaactttggataattttttaacttggagataacataagatcgtccaatctaaatatcaaaataactaatttagataactttctaattgctccaagcctactaaaacaagtatataattagtacttgagtttattcaagtatattggctacaaactatgctgcttttggattagtataacataaagcggtgcatctattattccgtttaactaaacatacacacaccctgcaaaactatggtctacaatactcactgttctaccaagaataaatgcagctgtagcaccaattgttgcaccaatagaatcagcaacaaaccccaaaggcaacccaaaaagatagcctccaccaagctgtacaagagttgaaaaaaaaaaacacaaataaagcacataaaataaataaaaaaatgataatcagatatacttcacacttaaacttaaaaagttgactagacagactttatctgcagagcgactggggaggatcactgaactgacaattgcatactcaatttaaatataaaaactcaaaataatgtcattgttttagctctgcaataagaattagtgacttttaacttgccgtaaatattggaattccagaattaacaggtcctcttgatgatatgagataagagaatgaaaaataatcttaaagcatttacagtaaagatgcatatcttacagtaagtatagaagctggaacagcgaggactgtgagaggaacgtatgcgatcgccctgcaatatttagaaaagtgaggaagcaagaaattctggcatttagctagatgccccaataagaaatcaaacccaaaaacttggccctggccactccggctgtcattttctactgtttttaacagtgaaactcactgaaatttaagtttcataaacatggatgtgatatgaatatagatactgattaaagaatataggataccacttctatgatttctaattaaaagattaaacatatttgaggatttataagtttatggcttaaggaaagcttacaagacaatggggccccaaggtcccagatcctccttaacccatatcaagaaatccttcaatatctgcacagaaaagaagagcaagatgcaaactatgaagaatgaaagggatatcaagagttgttcagtagccaaaaaaaaaatctagtgaaagaaaggagataggtaggacaaaattatatcagattcctggacaaaattcaatcatgccaagtggaatagtttggcatttggattaaacttcctaatatgttctctaattaaatgaccaaaacatatgataaagttgcccaatcctagctctttcctatcagcatgccaaacatggccaaaacaaagagtaaatcttcataagacatataacatataaaactgaataaataaactaagggccagaaactcatctactaaagattccatcataggaaatcaccatttctaaattactaaatcattcattgttttactaacattagataactaatcatatggttttaggtagttaaatttttatttcctaattcactccaaccaaatacttctgtgatcacaaaaacgtcaagctttaacatacaattcaacttcgtcttacaacataaatattggtctaatgactccagtttcagaattagctaaaattcttagcaatggatgtactccagagcaatgtggtaagtgaaatcaaaaacctgaaactaaaatcgcggacatttctagtccaactcccaaccaaaaataccatataagtaatctaaaccgcaattgaaaccaaattaaatacacttgtgcaaataagaagctaaattgtatacacacaaaatgcatataaaaaggtaaacaaagaaaaaagaaaagaaagattgaacggtgccttttcaatagggaggaaaatgcaagcggtggcaatggcggcgagtaggaggaaaagaagggcaaatcttgaagcggaggaacaagataaagggagcgccatgaatctacgaggccaaggcctcaaatgggattcgtcgtcttcgtcatcgtcgtaaattccgatcccgtcttgcctcaacgacgatcgcgccctcaacccctccacctttgccagatttagcttcggattttgttcttttttctttttaacgccaaattcgtaccctccaaaaaatcgctctctaaatttagttcataaacttcactcaatactcaaatcaataataattattattatataaattgcgatttaacagttgtagtcattaaggtcggcgacgacgactaattaataagactacttaataataataaggtcgggtggggcccaaatttttgggccattggatttctgccacggtgaatttctgttgacctgtaattgaatctagcggtgagaatgtttgtttccatattgactcacatttctgtacaatatttatttttcaagaaaagaaaaattagtcttgtgacctgaggattatattaagaaatctttgttgagaattgcactactttgatttgatgaataattaaaaacaatgagaaagtttgtcgggttttcatttgtagaccaaattaaaggagaccaaattgaacaatattggagtaaaactcgaagaggatgattaagcaattatattgatcagtctgttactaaaggtgtatgaacattgataatggctgaagaaattagatggtgaagggctctatgttaaaagaagatataaaaaagaaagaatacaaggaaaacaagaatatagtcatggaaagaccaagaacacatttgaagaataatttgcaagagatagagaagaaagaagaaggtgaggcagatgttgcatgtgagtcaactgatgtagtgtcctattcgtgtaaatagtttataataataaactatcccttcactaaaattgtagattaattaaaattttactatttatttttaaaaatttaagggctggtttggaatatcgtattagctcgtattgtactgtattatattaaattaaattatatatcat

SEQ ID NO: 218867 - DNA, 6551 bp, Cannabis indica
tttttttttttagctattatttttataagatacatttatgggggcatgaaacccgcaccactcatgtacacacctgacaacttgagctagtctcaattggtttatttagcatgtgaatattaagatgcataatcctcatgttaagaaataagaaatggcaaatactgcaagagaaagtaaatcaaaatagtccaacatttctcttcagaggtctccagaacctcatggttctcattatcctaaccccatcataaaatggagatatcttcttacgcctagaccaaaacagaattgcaagctctattttaggtcattcataaacaaaacgaatcaggttagcatgaaatacttgaaggtttaacctgaaactatgtcttaactggaattgaattttatttgcaatgtttgactatgaaaacatgtcaaacatcattcgcactagatagaattcaagaaaaacgaaacttgaaacctacccgacacaaattaagttgtttattttaccccaagaactcatacaatcatccccaaattagtcctatcattgtgaggatcagacagaaatattgctatctacaaaaacaactaaaatactacttacagcaacttacatttggcgttttaacatatcactagcaggaacgcctactgcagctgaagttccctcgagaataagaccttcctaataaattgtggaggaaatgaaaaaggtgagatatttagaggaaggaaaagatagatgtggtgttaaaataataataataaacaattaaataaaaaaacacctttgccaggtaaagattgcgttgatcaagatcctcattcttggtcttgtttatttccttttcgtgagctgactttttatccaaagccttcaagacagtcaattgcctacctttcaggacgatccctaagccagatgcagcattagctgctgaaacagcagcagtagcagcatcctctgttttgaacttaaggaaaccagttcctcttggtcgcctggcacaagcaaaagatgtgtccaattaaaataaattccaacaaacaagtaagaaatgtggaatatgaataacacgtacttggtcacttgatgaagaactgggacaaaggattgcactgccccaaaagcagaaaatcgttctttcacttcttctttgtcaatatcaaatgggaggttgcttatgaaaagtgttttgtgcaaatcctccttttcctctgtttgtttaactgctgatcccttgcttttatcagaactttcaggcttagaaacatctgatggtttcacagactcgtgaggcgactcattaagcacctcaccagatgcatcggatgcatcagatgctccaacattaacttcagtatttttctcttgaagttcaggatcatcatccccagaaggaagggttcctttagaagaggatgctattaagttctgtaaaaccttttttgctatgtctgcttcttcatcaaaatcaatctccggagggttttcttctttctcgatgtcatcagaagccttatcaccatcaaggtgctttgattttctactggactcctcaacatcatcatcagaatcatcactatcactttctgtttccccaccactttcattttcttttcctaagaagaaatttattacaagtacaaattagtgaccattaacctaattattaatagactatcaggaaacagaaccacttgaaatggagagaacatcccattccatagtgtcaaaaagtaatttcttatatttttttaaggattctaaacatttaatataagtgcccctaaagtcgtacacacatgaatatgggtgcatattctaatcatgattcagcatgccaacatacaactaactaaaatccccgacatttcatttaaatataccattgcactgcatgtttgaactagaaataatatcttccagctatatttgaaaacttcttcaagatctgatgtaatgaaaatgtaaagttctgaaaagtaacaacattatgcaattaccattttcggaatcaagattcgcattagtgtcttggctatacactttcttagaacagcccagtcaactgctattggtcttttctgaaacgtctgcccattgaacttttgaattgcctgcaaagaaagagaaaaacaaatgttaacatatgtccgtattattcgactaagaatttgaaatttaagcttagctaaaaagccataccttttctgcctcacttttagaggtaaatttgacaaatgcaaaacccttagaaagcctgcaaaagattatgaaaataaaaagggagagaaagtacttataaaagaactaccaatagatctgaagaaaaaaatatgataattgattattggaatatacccagtgtcagaattttgtggaataaatacatcccagacaaaccctgctggtgagaacatattctttaactcttctgctttcacctgcataagcgtttagtaaaactaattaagagttcaagtttcacccaacaactaagtaatttggggtagcagtgctcagagcaaacctggaaaggaaggttcctaacaataagtttccatttctgagtcttggaaccctggccaataaacacaaacagtaagctattaagatcgatttgcagtgatgtaacaaaaagggagacgaacaacaaagtcaacgtaagctccaaaggacaaaaaaaatagagttgattctctacaaggcaaggaaaaaatttatgaatggaaaaacggaggaaaatgttttccaaccaactcgaaatactacgaacaattcaatatccttgaccttgaactctatttttgtcttgaaaaaaaaaaactttatttttgagcctcaaacaatttctgtgaagcataaaagagctaaacaaaacttgatatgacagtcggtcagcgtgaaatgcacataataccataggagaaacaataagaataaaagaaataaatggcatactaacaaataaattttaaaaaacttcaaatatgatgtaaactctataactcctaattaaaattcacttaaattttaatacatatgaaactttacctccccacccagctgacgtgcccaaagaacaccccctctaatctctttttggtgcagctttgcaacagcagcacgagctgatttgacacttgtataaagaactgctgaagcattcactttgcatccatcttgcataagacctgaaaatgtgtcacactttatgctctatagtccaaaaacaaaacaactatacccaacaatatgagcaagaattcaattggcatttcatatttcaagcaagaaagcatcaataacgttaaaggtagcctatattacaaatcaatataatccagatgctggtttcagtgagtttgggcatctttaaccgcatggtcaatcatacaatacgatctaatcacatcacaaaatctcacccacaatccctcaaatgtatcagaaaagaaatgaaaaagaactaaattgacgtaaaagaatttatattccggaagtgcatgatttctggtacaaggatctcaatttgatgattacaagattaagcattacttgaataatcggtccaaaattaaaacaaataaataaaattaaacagctgaagaaaaacaggcaaacatacatataaaatagagttgaaaaatcacttaccatgcttctcaagctcttcttgtggaagcgggaatgctacagaacataccgtaccaaactttctagctttgctgtggacattcgctgcaatcttggcattaggaagaccacctaatataacagtcctagcaacccttcacattgacaaaaatacggtaagtcagaaatccttgtcaagatcaactaaactcaacaaataagagcatgcaaacaagaaggcaagaataaagaggcaaagacaatagcttagtgaaataagaaacataataaccaaactgggagccagaatgaagtgcgagaatctcatattgcagggacagatgaaaggaaagtaagcagcaaattaaagtctgtactcaaacacctaaagcatgctgcccgccagaaaacaattcaaacttcaaagcagtaggacccaagcatcatgcatgcctcttaatctagatagattttaacataataactgatgaactacgataagctacaataaaaaatatacaaatatctaatacagatagcctaattatgatcaaattcataatctacttggcgtagaatctgtctagattattttgtgttatacttcagttttccaatcccatgccgattttctctctatgatcaaattcatacatgtcacataatctactaggcgtagaatctgtctagattattttgtgttacacttcagttttccaatcccataccaattttctttctatgggtacttcaagaaaggaaacaagtttgtgtaattgagaaaacgcaatagcacaaataatcgaaatagaataatattatgaggccctaaatgctaagactttttgtatccccagctttcctccgccataagtaaggttttcaatatatatcgggggaggccaatctaagacatgtggcctctttctcttttcagaaaaatagaaaaataaaacccttttacactttatataaaaagtgagccacctgtaaactctatgcagaggcaaacattatttactacctttgcttctctgaacagccagttttatcctccagatctttatgaagtgttgtagactttccaaccaccaattttttcactggaacttttttaatagcaacaactggaaataacaaaagaaaatgagatcgcaaaaatataacagaacattacaggtgtaaagcatacataaagtctaacaacctttctcctccaagttcgaagtagctgcttcagactttccaaccaccaattttttctctggaactgttttatcagcaacaactggtaatagcaaaataaaatgagattgcaaagatataacaaaacattacaagtgtaaggcatatataaggtctaacaacctttctcctccaattttgaagtatcttcttcagatttggaagcagtaacatctttgacatttacttcttctttatcatccgattttggagctatagaagaggggaggaacagaatgtgaaaaaactaagaatgaaatgagccaacagcaacaaacaaagcgtatacatgacctctacgcaaagtagaagaaagaatggtatctcaaagttcaaactcaaaagaggcatttcaaccttgacttgtctttgatcgacgctgctcaagggaaggtcggtgcatagcatgtttaacggcaatttttccgacctccaacagaagagccattcttcacctcaatagcacggttagcatcttcagtacagcactgcaaacagaggcaaagtgcccagaaagttatactataactatgacatgaaatgtaactctttatataaatcattatacacatggtatatgactaatgtcatgttcgtaagatagctcttaaaaatttgtaactttcaatccatcttcaataatgagttttctcttactttattgtttagtaactctccttttatgttctattccctaacattttttaatcttgtccaatgctctatcacatcctacccaccaaacatggttgaccagaataataatctaaaggtcctctcacaactgaacccaatccacacaacaagattaaacttgaaaactactctatcaaaccctagaatttctgtccagcattgaacctgtagtgtttgcaatgaaagcgatttaaataattgatacttatagcaactcgaaagcttgaacacacaactaactctaatggtttaacaatatttaaaaatcagtcatcaatataaacaattgtagttggtagtgtggaaagtgcagttttagttttttttttttacaggctatgcctatgaccatagagtgcagtttaattactatgttagtatgcatacttcaagttcaatgttgactgagcagacaagacttgaaggcagacattcaagcatgtctaatcactgtcttttcttgaaagaaataatattggtcatgtatgaaatggtcaataaataatatttgacatacgaacaaaattatttcaagaaaagacagtaacacatacacaacagaaaaaaaaaatctcatctccgcacagctattataactagataaagagcttcaagaatctctaaaaaatagagtcattacaacatgagtggaaatctagttataccaatttctagaaaaacatttactctgctcacttcagttaagttaacaacactattagtagtgatctaacattattctactcccatggaatcccattatcttgcaaacttcaatccaaaaaaaagaaatttaaataaactttaacttgatagaggaaaaacaatcacaatgagtaaacttacaaatgaacaaaaccaaagccccggtgctcagttgatcctatcaaaaagaaaaaacagagagagaaagattaacaacattccgcatgattgagcacaagtataacaactcttctatacataaaccaat

SEQ ID NO: 218868 - DNA, 5197 bp, Cannabis indica
taatgagtgaatcaaagaactcaatgaacacaaataggaattcatgtatactctagataagagtctggacaagacttcttgacaaagaaggaagaaaaaagaagagaaaggatctccttacctcagcccctactaggaacaattttcttcaaaagacttccattgaggagaactgaataagagacaaaagttacacaagacataatgtgtttgcaactcttcatatcaaagccatttgtaatcaaaacccgatgcagcagtgcccattccatcctaccataagctttatgcatatcaagcttgatggccataaggcctcctttaccttttcttctcttgatcttgcgagctatctcctgagtgagaatagaagactcttctatccaccttcctggtataaaactagattgaaggggagttactagcttttccatgtggggactgagtctaatgaacagaatctttgttattaccttgtaaataaaataacaaagactaatgggtctaaactgatccactttctctgagaaatatactttggggataagacaaatataggtatagttaagcttctagtttatctcccccaaagtaaagaattctttcacagaagaacaaatagagggcccacaatatcccaaaaattccaaaagaagcatccagaaaagccatctggcccagggcttttagaggatgaagaagatgtacactattacgaatctcttcatcagaagaaattgcacaaaaacttgtattatctgctgcatcaatcttcttttcaaacaaagtctttagttccataggaatattagagacctcagaattaaataaatttgaaaagcattggttgataatacctgagactttatctatgtcctcgcaccttgaaccattactgtccttacgagcccatataagattttgacatcttccaattaaggtggaagcatggacgaagctagtattcctatctcccaattcgagccaaacctcacaaggtttttgacgccaaacactttctctccttttccactcctctaagagtttttcttgaattacttctttctcatcgcataaatcttaagaaatatcctactgctaaatccaccgtaagcgcgattccagcaccttaatgttctccttacaattaccaaaacttttcttcttccatccttgaagcaatttcctcgtattgtcgatattccaaattagacttctactaactctatgattataatttttccaagttttcacaaatacctctctgcatgatacatctctagtccaagcctcaaataatctaaaaggtctgaaccctttgagcttaatcaaggaagagtcaaataaaataggtgcatggtatgaaactcaaatggaaaattaataactcccccctttggatagtctctaacccaatcgtttgaagttataactctatccaatctttctctaattagaccaccttggactcttgtttttccaagtgaatcttcctcccataaaacaaacatcaatgcctcttgtgtcaaaaacaaattcagatagccatttacattctcttatcgcaggattagtacctcctctcttctcttcgagattaagaatgacattgagatcccctataatgagccaagtgaggccacaattgttgactctgacttctaattctttccaaaagttttcctttccttcttcatttggtggagcgtagaccctaaaaagccacaagagcttcttattttgaacatcccaaactgaagcctcaaaaatgttattttcagtcttcactacttgtaaatgcacttctgatttccacataaaacaaaaaccaccaaataagcatgttgatgaaatacatgcaaagtcattatatctgatttttttttgcaactctgcccattctatctttattaaccttagtttccatgagaaatatacaatttggcttgaaatttctctcccaagcacacaaagcttgggttttcgggtcctagctagaccccagcaattccttgataggattctcattgggaaggagggggcttgataagggccgcctcctcactcgattgaaaattttaaatactttcaacccttacctcaaccaaattcatagtctcctctaagtttttaaacacctcctctcccattgaacttcccttcttgagaaaagatttctaattcaaagaacccctaaattgcaatccttttctctattggaacttatgttaccaagatctagatttactaacacgtatgttgataacaccctaaatataaattctttaatacgatgaaataaacacatataaaattagaaaattttacactgatggaagcggaataatatgtctcctttcgcttaaatctataacccttgttccattctatcgcagagtaataacaagatctaagcctggatctccttctccttcagtttggttaaccaccatcttctgcactatgattgagtacttgacttgctatgtgtgggcatggtactctatcattaaaggcttgagttgatagaagaacaacaagaggagttcgaaatcactatgaaggagtctctcatctactagttgtctgacatagttagaaaacaaggtttagataggttggacgagaatgagaacatcatgtttcatttatagtatctcaactagggaaagataaaataataggcaaaataatactaagtggccgaccacacatgtgggcctcactagttataattttgccactttatttcaaccatttatcttttctttcaacaatgccatattttccaatttcaatcctataaatgtcaaaactatttatttaataaatataattaattatcaaataaaattaccatttatcttatttattaattagaccacacatagtctcttaattaacaaataaaccccaaaacctcttttcttcacaattaagccctttcttagtgaaaattcataaataagacattctaattttaaaattataattgattaattaaaaccaattaactgagtctgcaagcaatattatctcaactactaagggaatcatgtgcctatctaatcaagcttccaacaagtagatttagaatttactaaataaattttctaacttattaatttctccttgcaccactatagattaaaaattgcactcttaattatatagaaccctctatatgtaccaagatatagatacactatgaattatccatcgttttaatccaaatagtcaaagattctctatagatgatctacatcaaggacaaattaaccgttctaccctttgatgtattttatccttaaaacacttagctacttataaatgatttttcagtaaactgatataattattgaaatgagatctcaatcatttatctctattaagccaagctcgaaagaaatcatcgttttacttctaaatacttatagaagatataaattctatatctatgattagcgctcccactcaattgcactatcatgttcctaatatgtaagtattctaccgaatgagctttaacgacaactctaagaacataaataatacagttgagatcaaacataaccatatcaagattaagatctaatgacctaagatcaactaactgatattgacttagatagatataatggtaagtttatgatatcttatccaagttcaatatcggtccagtccaatgtatactctatacatccaatcctagcatactttgccaatgctctagaaaggacataacactgatccaaggtataagtaagctcttatcgctgattatcatatcagtctaaatctagtgtactgacaaatcatgggacctaaactttaaacatataattatgattatattccactgtgttgacaacactataatcatgaataattatatgttttggattcaatagaatttatacattaaacatctaatcatgaaataaatcatgtgaaccatgcaacattaaaacgatttttgatcttttattaattagtaaatttgattatattgaaatgtattttatttagtacacaaaacccaacaatctctcactttcacaaatacaaaactaaaagttcatttcaataattatatccagatcaagtgtagtacgtagtattatctccgtaatagcatctgtcaggttgtattcaattaccaaagttctccaccattacatctccttagtcacaaaatccttgatattgtcaaattcctctctatatgcctactcctattgggatactggattctttactatttggcaactatatttgtgttagtcaggaagtaacactagtagttaagctattactggaataacgccaaaaactgtatagaactttccatagggtgaataattatctaatagccttcctggccactttaacatttagtctcactggtacagttagagactcctgattggtttttacacttctctaaaaaatactgctccacacccagagtaatccccatctcataagtagactttttaacattaacgcaagtctaaaatgtctaagagtattaaaataccacccttatcaactaacatatagttcctcttctgatcttaagatttatttgattgtcttctaatgttcctttcctagattaaactgatacctactcataactttcgttcaacagtaggtgcctagtctaatgcattgcaaaaaatacatgagacctcctatttttttttttgaataaaaggaaactttttattcaaacagagcaaacattacaatcaaggcaaacaccaacaactcaccccagaagctaccagctttctacaacacgagttatataattatcacccttttttacattggtaataatccccaaaatacgccacttaacaagagatttaatctctttactaaccacttttaccaagctacaacaactatcaaatacacatatattacgattcttccaaatcatataaatcgtcgaggcaataacggttttatcactttttccttcagccccaaagatggtttcaagcaccaatcagctagatcaagtctagtcttcggccaatccacaaatcctagccaagagtaaatatcttcaacaactttctttgtgaagatacactccatgaaaagatgatcatgggattcctcttcaatctcacaaactggacaaagagaagaagaaatgtaaataaatttgatcaagtggttt

SEQ ID NO: 218869 - DNA, 2501 bp, Cannabis indica
aaaaaaaaaaaacaaaaatgaagaacggtttggacgggttcacccgactaaactgacgaaattattggacaggttgaactttttctaatttttaattgggtgggttacaattaaatatttgcaacccgatatttatattggattattaaaatatgctatagcccgaccaaaccgtgacgtagtattttgcaccaacccatgaatccgctaacagctgaactgatcgctattcgagaaggtctgaaggttggtattcaatggggatttcagcagtttgtggttgaaactaattgtcaataagtgatacatttgatcaatgaaaaagaagaatgttgtagagaggtggacgcactggttcatgagataaaaagacttaaaaaatagagaaaaaggtttttatggatctcagctcaaattcagctgagtgagaatattgcatttatataggcaaatcccaatagggtagagaatacaataacagagcaaaagatgctcaagagtacagctggcagagatcataacagaaaaagggaatattcccatacaatgattacattctaatggtacaattattttagaaaatccttattctgaaattgcagcaggatgttgacaactgtccttgtagggatcacactaaaacgaattcacctctgcattgaaaactttcatttcttcacatcccctctcaaacgtaggggtgagtcagccatctcaagtttgtcaattaagaaatggaatcttgaatttgatagtccttttgtcagatagtcagcaacttggtctgatgaaggcacatacctgatgtccaatttcttgtttagaaccttgtcacggaagaagtgtatgtccacttcgatgtgtttggttcgtgcatgaaaaatagggttcaaagcaagggcacttgctcccatattgtcacaccaagttactgcaattggtgtttgaaatttaatctccttcagcagtgattcgatccatgatatcttagctgcaacataagccagagctcaatattccgactctgtgctagaccttgctacaaccgcttatctcttagaggatcaggagactaaagtgttgccaaagaacacacaatatcctgcaacagaccttctatcgtcaaggcaacaagcccaatccgcattagaataaccggtgatactcaatggttcatcacaactgatgtgaaggcctttgtgaattgttcctttgagatatctcagaactctctttgctccactctaatgaacggtagtaggagctttcaagaactggctgagtttatttacagcatatgagatgtctggccttgtgtgacataagtattggagtcctcctattatgcttttatattcagtaggattagtgagaaggtctccatctgtgaacgacataggttttcctgcagtggcaggtgtgggacacgactttaggttggtgagtttggttcttttcagcaagtcttctatgtacttggactgagtcaagtaaatgccagtttcatctctatacacttctattcccaagaaatagtgtagtggcccgagatccttcaagtaaaggccatttgaattctatgagtacatcattattgtgtgtaagtttagaaacactcaacagatttttagatatctcagggacaagaagcatttcttttaatagcagagattaacaagaagcatttcttttaatagtagagatttccctgtgttagtcattaacaaacctttaccaagatgtgaaatagatagttgtgtaccattaccaatggtgaccttctccttaccaccataatcttgtttgtgagtcatggaagatgtatcggatgtgatgtgattgctgggaccactgtcagcaaacgatgcttcactctccgagacttctggtgtagcaacaaaagcataatggttgctatttttggtttgagtgccattgttaggattaaatcccatgtaatgttcattgaaacggttatagcacacagctgcagagtggccatacttgccacaaacttggtaagtaggtttggaaccattagatctgcccccaaatctgcctctgcctcgagttctatttccacctcctctgctggtgtgtcttcctccttgaccaccatattattgagagtactggtttgagcctcttccttgtccactagtgtggggtttttgagcaaagttggcttgaggatctgacagattatgggagattttattgttggaagacatggcctgaagtctttctattttgctatcaaagctgagaagaagctcctggagttctaaccattaggttttgggtctggctttgatttgaaggatgatggagagatagttgacatcaagaccagaaagcacattagtaataagttgagattcagggtacggttcacctgctagggccagtagatttgcccagtttttcttctgtcgaaggtactcagtcataggtgtagttcctttccttgtcacctgaattagagtccttgtctcatccat

SEQ ID NO: 218870 - DNA, 3257 bp, Cannabis indica
taatcttaggaaatacaagaccttgcatgggcttgagagtgttctagggctatactgggataggctctctgttcacagagagaaaccaagcaaatatgcagatggaggctttggcatctagagctgggcccatgtggagatgggtgaacaccttccgctaaggtgttacttcaccaacttttgtacagttcatcctgcaagtgtatcgtcttttatctggatggtacattctttgttcctagcacaagaaagaagcaccaacacctgataagatcttgtatttctacaatattaaatgttaccccatgatagatcacaaggagaagattggcttttacaagctggaaagatactccaagaaagtggcctgtcaaatctatttcgtgaagtatacacacgacttctaggattattggttctatacttctggcttcccattgaggagagtttaaacactcagcatgaaattcaacatagccactaagtattcaatctttgtccttgtttcatttcttgtcttttccaatcgtcatatcctgatgtctattttattctttttagattgcattctccaatcacctctgactccgaagttggaggaaaaaattacttattacaattctttgtcacctaatgagttacaggtggctcaacttgtaaccactaggagcctttgggaagttggccttattgctccccaccaaagcattgacacgatgttgttgaaggagaacatctaggaacttcttcaaggaaatattgatgacgtgaatgaggccattgcagccataactgctgaagaggccttaaaggtagcaaaggctaacaaaaaatggttagctgactggagaagcaagtttctagaagagctaagtgaggctaaagaactcactatttgttttggagacgtggttcaaaacgagggtactccaggaatgagtaccttcaaaagtggtgagacacccttttgtgtaattagagctccatccttagcaaatttaagtaactttgatccgggtgggttgaaccaatacttcttaaatttagaccaagataagtaccctagcactgattacatagatagattgcatagtgagaagtccaaaccactttgttcctccaatgcaccatcatgttagagtggatgttcttagcataatttattttctagggttcttccaatacgaaactaacttaagtcaagaagacattgttcttttgctagaggaaagaccaattatgctaagataaatagtttgaatgttgtttgataatttttattatgattacattcgatgtaacttgatatgttatctcctttattttttttatgcagaacaacctgccactttccagatgttcattctaaacaacttcttagattccattaactccacggccaatgaattccatgaagtggctaaagatgacaagagcaaaggtaaagctgaacaagtctctcggagtggatcttagaagccaacacatccaacatccaatcaagatgttgctttgaaggctctgaccacaaaatcatgtatttttctcctattattgacttgatggagcctaatttgaccgtcgtgccactgcaacaagtgcctattgaacaagttgaaaaggattcttcagactgtgatgggccagtccttatttccaagaagcaatctggaacttcgaatggtgggatgaataagaaggcaaaagtggacatcaaggagacgttgcaatagttggttgccttaaggaaacaagcttttaatcctcattcttggaagggatatgatgtcacagatggcaaaaggtcttccaggaggagtactcgatcaagcaaccagacttaggatttgcctccaccacctttatcaccttaaaacatttggggtacttccattcaactatctacggaaaagacaactcttcctcagcttcctcctccacgttttaatctttgtgtcaagtctatgttgctgctcgaagaagtaaaagcgcagatggaggccattaaacaattctattcgaaaaggcaaagatttgagtacgaggagatgaagaaattggtttccaacatatccactaggagcaatgtagagtttttagattatgatatgtgggatgagtccctccctgatattttcaatcgagtagaagtggcagagaagctttgtcctagggttgggactgatctagctccattcccatctaatttgctagatcaaagtgcgaccactagttggaagctggtgggtgctgataaattttccatgatggcgagtggagacccgatctacatggaatattgcatgaggatccaagccaatgttgtaagttaacttttgcttccgttgcattggagaagaagtatgccctttttaggtgtttaattcttcttgcatgttagtttaatggcagagaggaattgtgctttgatcaaaaaaatggcttatgagctttaattgctaaggtcagagtgcaccaatgctgaaagaaggcgacaaaatgttgcccaagctctgacaaaagctaatgccaaaatggaatttgtcatcaagcaaagggtgaaggaatctctgaacaaagttgttctcatgataagaaggaaaccagggttgagagagagcgtggagacatgtacaaggaatcctacactcagtctatgactcgaatcatcgacataaaacaaaacttagaggaagctaagtaggacctcatagacttagagcgaaagacaattccttgtcttaagaatatgacaagaaaactctccttttgaaaaacaagatcgtttctactgcaactctggataaaaagataaaacaccatttggatttgcagcagaaggtggagaaagctaacaaatacgctcttaagaagttggaggatactaaaattaagctaatatgctcctcattgaagtcgtcacatagaccttggatgactagatccttattacaaccttcttcctctaaggtgccaaccttttgtgtttgaatggctagggtctcggcttgggaaatcagcctggcatcatctttttccttctcttctcgggcttggcaaacttcttccctggctttgtgtagttcttcctggataaatgtcacggttgattggattttttattcagcttcgaccttatgatcctcatatagcttctagtacttggcactaatttccttctccctcagagtcaacttggtgtcacactcatcctgggcttatttgatatcaagggcagattgagttatgcttgtttt

SEQ ID NO: 218871 - DNA, 7813 bp, Cannabis indica
aatgtgttcatctaatccccgaataaattttgcttttttagcggcctcagtagctacttcatctgaaccaaattttgcccgtcgatcgaacttggtagcatattttgtcaccgtcatactgccctgagtcaatcgtataaactctttcgctttagccgctcagatagattcattataatatttctcgaagaataatgtccataaagcatcccaggtcatgttattcaagtcatgaccctgtgacacaatctcgtaccaaatgcgggcaccctctcgcagcatataaatggcacatttgacccgatcattactctcgacccgcataaaatcaaagatggatgttattatacccatttattattctgccttgagtggatcagcaaccccttcaaacactagcgggttttgcttcctgaactactcgtaaaatggctccagacgattccctatgtcttatggcactaccaaaggtgccggaggatcaagatttagatttggaacagcctgagctcgttgctccctcaactctcgaatttgatcactttgttgctggatggtcttctgcatcgcggcatatagctcttcccaattcggtggtggtggaggattctcaccctctccgctaaccccgagcccagcaagctcgcggttaccccttccagatcgccttaagtgcatgatctatacacttgcgaccataatcccattgtttaacatactctaattcataacaatactaataagtatttctagctactcacatccacatcaacctttactgtacttttctaacaacaaacatatttcaaataagcatgtaattaacaaataaactagcaattaaaacttactgaaccataagtcgaacgagtcttcgcagccaatgtacctatcaaatcagtctttagaatctttaaaccttggttgctctaataccatgttgcaacgccctgtcccacaaggacgccacgtgtgtgcttttataaaattatttttttattctaattatataataaaagtgtggataattaaaaatttgtaatcaaccaaacacattctttgtaaaagttcactattaatatttacggggaccctttgtttggaaaatatttaccatcagttccaaaagtgactttacaaataagtttatactccaaaatacattaaaagtgggatatcatgttcactgggctgtggcaccgcgactgataggtacactgttgcagagacctcaaactcatggctactcaatcttgctcttcactttacgcacactatttagcacccgtgagtcacagagactcaacaagaaaaatgactaatcccataaacaatataaaatcaaataaatcacacaaaaaaaaatgtacgcaattataacatattacatactaacatgcttacaaaatttcacgtcattataatcatacaatatcggtgcttcataaagcacccttaccactcgttattcacgagctacgtatgttactatcgttacccgatacagcgagcgataagtaagaaacctatcggtagtatcaagagtaattactcataacggtaatgactatttctaaccctcgatcataatcgaggcataacaaacacacacacaagatctcaatcataattgaaactataataagcataaccgctattcatttaaccgtaagtggtgcatatcacttttcttacctcagtccagaaatcagtcgtgcgggccgacctgagtggaaacaaggcttgacgatctcgatcttatgtcatgacaacaaaatttggtaaataccttaatcaaattttagggaataaaccctaattcccataactggacaaaccctattttccactaattcaaactaacacaaatatcactataaatgccctgatttaaactccgaaaacaccccgaaccaaaaccagactaggggagaaaactcaagatttacccctgctagcaaaccggttgacttgtttgccagttgcttgtaaaaccggtcaattggttttctgggcagccatggggaaatctggtttttcaccctgacatgcaatctaagctccaccaaacctattgtaccctttcaaaacagttcaataccataaatacaatacattcagatcaaaaattcactaaaattcatgaatttatccaaatcaccatgttagaaccaagaaattgagttataaactcaattttccaattccatcaccacagccataaaattcgctcaaactaagctctaacaaaccctaaatcaaactttaaaatattatctaatttcagtttaacatcacaacctctaaatcctaaaaccccaaccaaaacttaatctaatcttaagaaatccaaagaaaggagtgttaagaacttacttctagtataatcactcttaaccttgataaaccttgcttaaaaccagctaaaatggaaaagaaatcccctggttgcagctgcttcctagggcttcaaatggtagagcaaaagaggaaggatgaagataatgattttcttttaattttcctttattaattttttttcttctttcttttttttatacttaacctaataatactaaatactcagccactaaactaaaccatataagataaagaaatcaaatattaatctcacaaatgaccattttgccctttaagtaacccataaaccgaaagcacacctaggggtaatttggtaattctaactaattcgccaaactgacaacttaaacttctaaactaatctggcctaatctcaaatcgatccatatcttattatcgtgatattttgaccactttgtcaacctcccacggtcgccgagcccgataacattttatttcaaaaatggtatccacgatacccatataatctaataaaatctccataattaataaattacgctttatttaattatttattaatttcacactaattaacctaagtaagatcataatcttacttcattattaggattattatatatttaataaaatatgcctaattaaataccatattattttctgggatattacaatatgcatttcaaagtacttaatgtgagacaaaggttcttctttgcttgtatatattttctatttgggcattttgaacttgtgcggaagatcaagggcattgatttgtgatgaaaattgtgaacctcatgtccgatcaagctttaggtcgatgagtttttggtaggtcaggctttgcacgaggctcttaagttgatctaatttttcttgcaccgctagattaacttgacctgcttgttgaccggcttgtgtaatctatggaacttttagaacttcaccgggtacatagttatcaacattaattggttgaatattaggggggattaagtgtccatcctgttctcttctacatttagagtgtctcttaaattgtgtatgggccctaaccttttgaagactaactcacctagtggccttcttgttcggaagttaccagcagttgattgtttcagtatatctatttgaggacagaaattatactgaccattcccccaagataataggtcaacaaaacttgctcgtctatcgtgtggcccatagtttgaccatgtggcctcagattggacggtccattacgttgggtcttctgagtgtagtttgcctaacgttcttctggcgcatactatggtcttttagagatataggattctttccctctatttagatctcgtatgagcggggtatcttccattgattgctgtctgattaactgataagctcgttgaatcagcatggtctcctacatggagcaattatcaattgctgcttgttggtctctcatgatttctatttgtcgattcatccccacttggaattggcatttttattgttcgaatgccagttcacaactgctcgggtatcctcctattcatggtgaagagtgttggtatgttcttgtatattccctaaggcatctcacaggttttacaactcagtatcatcaccgatcattacccaaggttctccaacaagtggatttccagtactcaggctagtctatctagtatgagtactagtggttctagtttcctttctgttcagagtgaacccagccagagtagttgtcactccctgtcctactaatggtggaactcgtggaggcagacaggtgattggatcaagatttgccaccattagatcgctcctattaacatgagtttgcacattaggatctgtagccgtcaaattagttgtttcattggtttgagacctcttggtagttacaaccatctttggagaggatcaaagtgataaacactgctcttttctattcttaatgagagtaccaaaatgttgaccttaattttagctaacggcatcgagtcaattaaaacgatgagaatactagctaataataatgaatgattaagcaaataagaacataaagatttatagtggtccgaccccatgataatagtaatagcctactccccttttacttgtattacttagaggaattaataagatcacaaggagctgaccaagtgagttttttaagaattcttaggaaaaagcttacaattcttttacaacataagagctttctaaaaagtgtgattttcaaatccctgtataatggaatggctcaactatttataggagaaaatacaataattaggtttttcaaaataaataaaactaaaaatagaaactaagaaagtttcctataatttattgtcggtgcaagtcaatcccacaaaattagggatgtgatcgagacctgaatgctggaatattcatggaaagtatctctgaagatcttcttatgctgaactaccctgctcggaagactcaacatctttagataatcaggatttgttcagaaaattacgtagagattctatccagatgatcactgctaaagatgtaactttaacaattttaagtagagagttctctggttgggctgcttaagagaaaattacttgtgcagacttttcaatgttcttcacgtgtcaccatcctacatatcacaccaccctatgtggaatttgggataacaaggatcagtaatgatgggtaaatacacataatacatgactttgaggccaactagtaggtattcagcttgttgggtgaatgatccatgtggacaagggaccatttgattcaagacatgtgttgcatggaggccactcctgcagacaagaatgttagaggcgctgttagataaaaaggatgtatacttttggtggtgtgcacactaccatgactgacacaagggaatatatctgattctgtgtcaaaaaggtggccacatcattttatggtaaacattcggtagtcatcctacagtaggcatctgagagtcctcccgtggttgacatccgggagtgtcccttggtgttcccttctggatgtgccccaatgtccaccctgagggctttgtttgtttcatttcccggaaggctaggagggcttccgagtatggatggacaatatctttggggtgaagccttcgaatattcgatgggctcgggcccatcttaggtctgagctaggcttcctcatgtggaaaggcttagcctcgggtttaaatgacaattatctctttgttatgcctcatgtctcttgttcaaaaacacagataacactctaaaagggtcatcttgctagaaattaactctcaaaacccatttttagcggtaaaactccaaaactcgtgatctattagttgtttactatttccatctattttttgttgttaactgccatattagactgtctatgtgtacataatgtattgtacacatggacatagtatgcacatgacgcaatcttattagttcacgtaattaataatttttaaaaaataattaaaattcaaaaaattatataattattaaaaaaaaattaaaatttgtttctttttccattttcttctctctccctcatgctaactccttttctctcctcgaaatacctattcccacaatcaccatcaccaccactagttctgtaccaccaccacaaggtggaatgtttcatcaccatgaacaaaaacataaaagaagaaaaattaaaatgaacatcaagatctggaacaaagtttacacaatctggaacaaagtctacacacgatctagaacaaaatattttagagaaaaaaaataccaaaaatccaaaatgtcagatcaaaagtaccaaaaaatccaaaaatatctatctaaacacttgcatcaaaaaatcataagtttaattttagatcgtgacaatatctcaacaaccacaaaattattcaaaaaaaaaatcaaacatcataaaaaagattcttacccaaatccagattttcgaagtgatgaaatttgttggttcgatcaatgttggagactatgaatgtaaatcgtccttcccatagccaatcacatcctgtcattgtcacacactgtttctttgatcagagctctagatcgtcatatgtcattgatgtcattggtttccgtttgtagagaagaaaggagtcgggagagagaaggtgaagaaggttcaatggggggaatgaagtactcattaagcactagaaatggcaggagagagggaaacaaacactaccccacctaatgaagaaggagaaggtcgagagattacagggtcactggcatcggagctactactaacctacccatcgttaaaagcagcagaggagttggagccaatcagcttcgagggtggcaccactctttgagaattattagggtttcattgaggtggtaaagaaggaagtggcacaacaaataaaaagaaaattagggtttattttttatttttattttttattctcttattgatttagtaaaaaaggaaaaaggaaaaaataattagtatataattttattttctttttaaaataatttattttttattttaatttgattaatttttaaaaattattatctatgtgaactaataaaattatatcatatatactacccagcatgtagccaactattcctgtaattccagagcttccacaacagacaaacaaagaagtgataatttccagaggcaaactcagtggctgcaagatataataaatccatacaagttaatgaagaatgtttagtgatgaaagcatgaaaactagttaatttccattaaacttctttgtttgtctgttgtggaagctctggaattgcaggaatagctacatgctgggtcatcttcttcccccgaacaagttctatgcgaggttataaactacattgatcaataaaaaagctgcaacaagaaggttctcaccacaacacaggttcaagaagatgcaatgctgcctactggaagtagtccatctgcttcaaatttcacccagcggctctatgtggatgcagcccaagattcacagcttctcaaaatgggttttggtatgaccattcattccaatacaagggaggttcttttaaacttggttaaaccttggagtggtattacttcacctttgttaatggaagcacaagctcttcattttgctctttcatggtgtcacgctcactccatttatccggatagtattgtttcagattgcaaggttctggtgaattatatttgtaataatgacactcataatctgtatcttaacccttttgttactgaaattaagagcttgttatcttatttccctaaagtttttcttagctatatctcaagaggggcaaatgaagctgcccattgtttagctaggacagctttaggcttagagcaggaagctttatggaggaattcatctttacaattgtaattgtatcttgtacttgttggtgttatctaatggatataggttttt

SEQ ID NO: 218872 - DNA, 4793 bp, Cannabis indica
atatatatgtatatgtttttgaatcttgatcatccttggacgacagctagctgaccatgcatctttaatatgttgtgagaatattagagaaaaagatgagcaatcatagaatacagattatatatattcttttctcattcatcacgtaatcatgcatgcaggtcttaatttgtattttctcatgcatcattttattccatctgcgaatcaattttcccacgtccatgtgaccaaattttttaaatagataaatatatatatagctaaattatatattaatttgtttgccaaatatatttatagtcgttatgttttgtcatgtcttatgtgtgtgtaaagtttcgtttagcatagcacatctatttttctttttaatatttgaatcagagatgtgtaatattactcttaagaattgaattaccttaattagcatagcactttttaagagagtgtttagtaaaactagtcaatatgagaattttcaatagtaaataactttttttaaacaattattggattagttagaaaatttaaaatctacatttaactgatcaaattcaattaacataattatatattttttttaaaaaaatattatatatacaattaatattttaatgtagaaaatactaatttaaaaatataatatgtatgatacaaatatattttaaaacataaatcaaatatatttaatttatttaaaaaaaaaaaaacataatttaaatcaaaattaaatatttctttatacatataatttttgtttcattttcctttgagtttgttattgttgaaaatttgcagttttccaacacctcaaagagacaccattaatacagatgcaaaagtggtattttttaaattcttcactattctatgcgtccataaaaaaaacgtatttttgaaaacacacacaacaattcggcccaacaattcagcccaacaacacttgattgagcccaacaagagtcaaagcacaagactcacttaaataaaccaaattggttcaatccaaaacaaaaagagatcaacccaactaaagtgtaaccctgaactactaaccttaatataaaaggaaaagtatacacgttaagacccaaccctaacacctctttctcctttcttttatctaaggatttttaagtgtctaggattccttcttcttcaaacaaaatcacaccaaactagggttagggttccaactcttcttcttcctctctcaaatgtagctagggtttccaaagggtctagggttcctttcttctctctttcttaccgttgcactcactcacggcctaacccaaaaaacagagatccaaaaccaaaataaaccaagaaaatcgaaccactcaaactctcgaccaaacccatgaaaaatacttactcaagaacacaaacattcaaaactaaccaagaaaaaacacaaaacgagttagggtataagaaatacaaaaagtgagaatattaaagaaggagtcaccaaagtttgatctcggagttaacccaatgttaccagctacttcttcgtcaagctacctcaaagcttgattttcattcatcatcaacaagttacaaactttgatttacaactttgatttctctcttagtttctctcttttgttttctttacatgaacaacaaaactgagctacaaaggctctctctttctctcttcaaatctcttgcggagggattctctcactacaaggctgatctaaaaactgactttgaaaaaagaagcttgtgttatgatctatctgagctttgttccttttataacattttatttttgatatgtgatgttcctttgtgacttgaaaagaagtccaacccgcaaataagaaggcttttactacttctaccgattcagcctatacatatatagaaaatattaccaggagtaaatgcaacctttaccatcaagagtacttctatactcatgttcttccatcgagacacataaccttccaaaaatttggccctttcaaaagattttctcctctaattgacatgaagagaagagctaatgccatgatgtttgagattgatgcatgggagagaaatgggtaatctctgttaagtactcaaaatcttcagaaggttggattgattatgtcttgtcaacgagtgtatgcagacactgacatcactaatgaatcttggacaatgtcactcaagccatatgatgaggatgcttgatgtgcaactgccatcttctctcagacagtgtcagaagaagtgaccttagtttcaagtaacacacagtattcaggaagaatatatttatgttcttaaatcaagaggatggagaagttacctccactcaaactgctctagagaaggaaggggaatcaacaggtggttaatgctccatgatatgcagttagctttgctgtttcgtttctcttttattgtactaacctcctatctttttttctttgtagataatatgagcttcctggcttctatgacatcttgttctaacttgaagaggaaagttttggtgctaagggaaattgaacctctagtcatggaagtgattcagggcatccctgttgtttctactgttttgaagaagaaggtcaggaagaggggtaaaactgttgatgcccctcttcttggtcaagactctaaaagggagaggtgttgctgagagatctctgatcgacctctctccagatgaagctgagcatggtgctccaaactcagatttacgcttgatggagcagctgcatgagcagggctcctgacttcttgcacatggtgatgccttgattaactctaaggccgagaacatcctattttagaagttgattagcaccaagcctccgcatgtcattgctcaaagatgcttcactgacatcttcaggataatttttttgtgttgtctccttatagcttaactttcttttgtttatcatcacttaatattgttctcttgtcttcaggcttgtgttggttatgcttacaccatggataatgaacacaagaaggtggttgagcttgctaagaagctcgagactacaaaagatcgtgttgttgctgcagaagatcatgtgactatttgaaggggaagatcgattctctagagagtgagctgactagtcttcaagaatggctagtgttggcaaggctcgagagagtagcctaaagaagaacttggcagctgctcaaaagaagactttggatcttgaagagtcttctcgtcttgcactggatgaacaaacttcagtagctgctgatcttagagaccaagtcaaagtcttgaaggagagtgtgactgctcttgaggatcatgctctttttgatgtcactttgtacgatggcttatgtttttatgccatctgtagagcttggtctgccaatagaggagcaaagtcattcagttggaagggcttcccagacttagaggtgcccaagtttataaagcaatgtgatataaaaaaaaatgaaagtttgtaaatggttataaaataaaaattatttatgtcctattcaaaaaaaaattatatatgtttgataaaggtgcttaaaattataaatactagatattaatagttttaatgttgttaatgttattgtagaaatggatttgttaggatttttttaattattgaatgtaattaatatattcgaagtgttattaagaaaatgtggagcaattaattaaaagaaatcataaatattgacagctagttgaaaaaaatcactaacaaacaaaaccacaaacaaacaaaataatttaatcaaattttaaaccaaaacctactcttttttttgaaacaaagtgttcttttattaagaagagctatcgcccaaaaggatagacaaccactccgaaggaacactgttaatagggaacatacattcagctaaggacaaagagtgtcgggcaataaaatacgcggcacgattcgcagaacgtttgacaaaacataaagtaacatttgacaaattttgaaaaatagacttgcactcttcaacaatgaatccgaacccagaatggagcctctctttgcttcgaatagcatccacacagaccaggctatcggtctcgacagcagcacgagagtatgagcgacttttcaaccaacttaaggcttctcttatgccaataatttcagcaatttctggagccactttgccttgtttaacaccagaaaaaacagcaaccaactctccttctgtgtttctgatgacacacccgaagccatgcttgaattcatggtcaaaaatcgctgcatcaacattcaacttgatgcctacagtcggcttagtccaaaccactgaaccatcaccaggtttgagaggggacagagcaggtaagttacctttgccttgggcttgcagaaactgagcaaggctagattgagcaaaatcgattacatctttgacacttcgaacccgacccttccagagcagatcattcctggccgaccatattgcccaacacaacacaacaactcagcaaagcttctcattatccagacgagtagcattgaaattaagccatgacagcagcgagttggagtttctatctgctgcagaaaagccagagaactcccagcaggcccaagcgaattgacaagaaactagcagatgcatttcagattcggcaaaaacaccacacataggacagttattatcagtcaacaccttcttaatgcagagatttaccttggttgctaaacagttcgatgccgctctccacaccaaatctttagtcttaggaggcaccttaagtgaccacaactttttctaaaacagatggcattctgaagaaactggagtaatct

SEQ ID NO: 218873 - DNA, 1702 bp, Cannabis indica
aaaaaaaaaatcaatatataattaaataatatttcctaattttcttttctattaataaaaatgaacaaaaattagttattaattattacctcacccttagttacagttatgtgatgaggagtaaaactatctccatatgagtgaacagataaagtagctagagacaaaaacagaataattaagaaaaagattaataaaaaaattgatttgtttaaaattaattaagattaatgagaaagaaaattaataccatcatctgaatacataggctgcttatctttattttggaaagatgaatttcctagtgacaaaacaagaaatacaatttcagaaaatatatctatatataattttacatttcataagaattaatagattggtttttcttggaaattaattaagaaaataccttcagctagcttcgtttccatggcctttgcattatgattatcagtagccattttctttaatttgttctctctctctctctctctagtaaattttgtctctataatatgttaagaaacatttcttatatagataatagagtaaatatatataagataattctgttatattcgttaaagaaaaacatttcggagtttagtaatatttgggcttattaatttgttaaactattggtagaataacaagagtgaaaaaaataaattaatcttgatatataaaataataataataaattaatatccattttaatttaggattggataaattattaagaaatgaatataattgttaaataaataataaactttttttcttttcttttcaagaagtgattactttaacattaagaattaatacacgttaaatatagcaatgctcaagctcaatatttagccaaaaaaaatgtttaattaaccaaatctatggactacaaagaaaaattttgagccaaaaattactctcgaaaaatttaggtaagtaaatttttatcagtgaaaattaagcttaataagaacgtatattaaattaattatgtgctttgctttgttaagtgggtagtgattttttatactaattattattaaatttaaatatgtttggtaggttgtcatatattaaaaagggattttacaagtggacagagtccaaatgagataaaagtctaaaatgtactatcgctattagtataattcaatatgaacctcttatttattttacttttttatatattatatgaaattgctaattaattataatactaataattacaataaccaagcataatactaattagtacagaaatctaattccttttggtttatcatcaatgtatatatttctcctaataattatttgattttgaagtagacaaatttagaaagattggatatagtaatgaatgtagcaagtcatacaaatttccacaaaagtagatgttttctaaagtgtttatgattacagatgtttatagagaaattagtaaaaaggaaaattagaagaacaagtcccaccaaaccaattggcattaatgatgctagtctgagtctatgttattggatccattgctgctttgatcgtgttcactgctgatattatgctcatcttctggtaagggtggtgttgctggtgctggttctactctttcacgttgctcttctggttctggttctggttcttgaaatagatcacgtaagaatggatatacaattctgtcatattcaagcattttttgctc

SEQ ID NO: 218874 - DNA, 2664 bp, Cannabis indica
ggggaggactaaatttaaatcattttgtagcccttccaacttattttgcttcacatattaggattcacaagaagttggtgaagtagaatgagaaagaattaagaatgatggttgttttattgaaaggagtgataggggtagagaggagtcatttggtctcataggagattgtttgtagaccaaagagtttgatgggttgggtttagacaacattttgaattggaatagttttagtagatgttagtttgttaggaggctaggcgtgctgttggtgttagttatgacaactttgacataactatttccagttgtaacatatgctttctatacacttgtataaaattccttgtggtatcattcattcttcattcaataagactttttctttcaagtcacgaactctttcttttctatttctattcctttctctttgtttcattatgtttaagaggccaaatgtgatatcaaagccttttctgccattaatggtgaacatgctgttaggtccttgtggtgagcttctcttggcactcaaggtaaactcaagactggtgaatcagaatagtatagttccgagagtggctaaaccaacaacgagtgatccaattgaggtttatatagtatattttaatataatctgttggttaaactcagtgaccataattttctaatgtggaaacaacaagtctttgctaccattcgaggtttgatttcaaagctacatttaagaaggttctttatcaccaaagttccattctgatgatgatcaacaaatcaagcattgaacaccgtcaattcggccttcattgtttgggttgttaaagattaactccttgtttcttggttactgtcctcgatgactgtaagtattctcacaagaatggtgagttggaatacttcaagtggaattttgagcactttgaagaagtatttcactttagaagtttcaacaaaaattttggagtttcatactaatctttagaaattgaaaaaaagttcaatgtctctcaatgagtatttgctcaaggtaaaataaactatcttttaacctcaataggataagtctttctttagtactagagatcttgttgctgccatttttaaaggcttacatagtgaatagcatacttttgttatctcttctaatactcaaattgaaggatattaattttagaaatagaagctttgcttctgacatctcgatcttgaattgtggagtcttcaacgtaaatcaatcttagtgctcaaatatttgttgaagaatttgattcttctattgaagccaatatcaccattgtggttggaggcaaccaattcgtcttgacctcttcattcccaatatcaagctaattcttctcgactctctactacacgcggttgatatcatggaggtcttacttgaggaacaagctattcattttctcaatttcttgcttatcaaggtcaaggcaatccttgttttggtggaggtggtagatttcctagtaataatagtcgacctctgtgtaagctgtcttcggtttggccacactggtcaagattgtttttaccactttgacaagagtttaacatgtgtgtctcccactgtagttgattcattagttcctcttggacagtcttttcagatgcaagctcacgttactttagtttcgaatgagctagatatcattggtatactgattctagggctacaaattaatgcactccgaattttcatgtaattgttttaacctagatggcttgaaagggttgtcttgcaaatcaatgttcaagaaattaaacacatgaaggggtttaaccatttaacctcgtgtacatttgtatggaaaccttctaaagtggaggtgtttgggtggtcaaattgaacacacacaagaatttacaaagtcgcaagttatttgagttgattttatttaagtttttttttctaaattatgcgaaaagatttttctttttattttgagatgtatgcagaaagaacttggagtttagcattcatttattttctacattctctttgaggggggtgcttggcaatttttttttacaataaatagggataaaattgggtacagtcaacacatcgctaagctattgtgctgcaagtggagggttgaggtaggaaaaggggacttccagaaaaagaagtagaatattgatgcatgtgggaggtatatttgctgtcctttatgccatatggctggagagaaatagcagtatttaacattatagaagcaagtgctatttaggatagagtaaatttatcggtggcatatggatttttatcaccaaggatttttaagtttttttttcatggtagaatttagtaagaataaagatctgcgcacctctgatcgacacttagctctcaagtcgtgagttcttcctaaacctaaagtgaggtctttgcctcgtagagggagatcggtaccaagtgggtcactcttccaagattcaatcttccccctgttctttcttttctttgagttagtttgtgctagggctctgctccccacttattgtataagcgagccatattttcttcttcttcgccagggctttcacaacgtgtagcttgctactatcactcaaagagaaaaggcgaagagattcttctcaaataaaaatcatttaacaaagaaactctttttttcttgaacttaa

SEQ ID NO: 218875 - DNA, 4989 bp, Cannabis indica
atattaccgttaaatatcaactggatgaccactgtatacacctttgtatatgtaacggtaaaacctcgaagtcgatacagtagtaatccaattagtatttaacggtaatatttaactaaaactttaaatttgcaaagaaaagtaaactgaagggttttgccaccaaaacaaaagatagaggggttaagtgtataaaaattaaaacataagggggttttgccaccaaaaaaaagataagggggttaagtgtataaaaattaaaacataagggggttttgccaccaaaaataaagataagggggttaagtgtataaaaatcaaaacataagggggtttcgccgcaaattgctcttttttttttaaaaaaaaaaaaaagtgatctgaattacattatgacaattgtcgacgcagagaaattttcaatcaacaaattaattgtctggtcaaatatatacaaagtcagaatatgagtcacaacaaataaagcgacttatataagaccaaattatctcagaaatttagacaaaataactcaggaccacctttaagaggcatctaaaaaaataatgtacgaaaactacctacaaaataaatagatatagaaactagattagcacactatacaacgataatattgtgaattttaaattaaggataaaactcaattattattttaacaagaaaaaacttatctttaaagctttttttcctcaacatattactattatatcgaaactaatttgttatgtctaactattagagttaagtcttctaagacaaaaatatactagacaattaaatatgcaccatatataaaatttgagagattaattaaatttaacaaatcaaatcccaactaaaattaattattttgtcaaaatatatattttattaaaaatgttaaaaatacaaacggtgccttaaatatattatattgttattggtataataaaaatattagacttgtacactaatggtgaccaacaccttctataggtagttaagaatattttttttaaaattatttttttaagttatatgagactcaatacgtaattacatcaatgacactgagaatggtactaagcaccaataatactttttagtatttttcttatataatttaaaataataaattttatagaatattattaattaatcgtaaaatcttatttttaagtgatgttagatagtattgtattatagattgctattgtttaatagtactgtactcaattatgagtgtaatacattgtatagttgaatatatatatattttttaagtatccaatgagccatatttgacttataagacaatacttaaaagatctagtctctcaaataatggtgaacaagctacctcttggtactgcataaaaacaggttcttgtgtgtaaggtatagttgacatcttttataataaatttattactataaattatttatttttattttaaatattttgatttttaagtgaatagatccattcacgcaactatatagttggcaattgattaatatttaggcttgataagatgtcattgtcttccaattagagttgattgttacattaatcaaacaagataattaaatcttcttgttattatcttcaataggtcttggccatgatttttgatcaaatgaaaacattatgataattacaaagagatttaaagttatttacaaaattaccaacatattcatccaccttctcctcctttgcctctacaatattttttttttttgccacaatgaaaataataaacccaatagaaaaagaaccataaaaaaatgtaaggcagagtagttgaaacttgtttacatatttagttcaccaagttcacaacaaaaacatatccaagtggctatgtcttctatttttttttaagctaaaggaacaaatagcccctaaaaaaatcacaggggagtctctctgtttcttacttttagctcttttttctttccttcataaaaagtcaagccaccaccaccaaaagtcttggtccaagtcatcacaaggcaagagtagaacaaagaaaagaaagacctcaagtgattgtggaccttcatcattcatgggtaatttttcccctttctttttactttttacatgtaaaattatatcttactaattttgattaactagaaagaaccctttaaagccttctcttttcttttttttttttcttttttctcatcatgaactccttccaatgtctttgccactatattctccacctccaaacgaagctgccgcggtggctacatctaaaccgccgccaattgaagtaatcaatgctgataaaccgccattttgggtacccccggcagccattccaagtcctagaaaatcaagtgttgtttgcttaggaccaaacattgaaggagttcccatcattagttccttcaaacccgaattttcatcacaaggaagaccaagaccaagtccgggaaccgaattactatcttgttccacttgcctctgaggccattgcaaattctcttgatgcccggatgatgatgaagacgatacgatccctaaaccccgaagcaatgaggcatttgttgctgcagcgcccatttgagcagctttctgaaggagtgcagtggcagacatagcaggctgtggtggtggtgcatactgcctgcgctcttgcccggctgtaccaaatatggaagatccgtggctcgttgagagtccaagagaaatcggtaattccatggaggaagttggtgcgagatcagcagggcaatccgggcgccccatgccacggattagatcagtaaatccatgagattgagtagtagcttgtaagctcgctgaagtagttgaggaagcgaataaacttgcgaatacactactacttgtactgccattgctgcttgaactagtggcgctactactcgagctcccatttaagcctgttccggcagatggggcggtggctgtggcggtggcttcttccaaagtgcgtggtggaggattttccggcaactctgctgttagtacaaaaccaagaaaaagtgttaaaactaaaagggtcttgctcaaaacactcaaaaaggatagaaagtttaagacttcacttttatgagagctttttattttttgaagcaaaaggaggagaaccaataatggtttcctttcctttctctctaaatgaacttcacttctttacagagatcacaaaactgaatcccacggtttcagtaaaaagtttgttttttttacttatgtaattattattagttttcttaaaacatacaaaaaaatcccagattagtagccaaacaataatagtaactatatatctatgttcaataaaagatcagtaacagacaaaaacaacaacactccaaagccggagaaacaaataaagagagagacaaaatagcatatttatattttagacaaaaaaagatgataatactaaaaataaacacataagcaactgaaaagattgaaccgaaaaaaataaaaatccaaactttgggtcataatcactcacttggtgtttgaattggcctagtggaagatggtattacaccagttgactgaggaggaccagatgggacagaagccgaagcttgagccgccgatggtgctggagccggcgccagagccggagccggtgctggtgctggtgaggacttcaccagctgagctttcgattccgattccacattcatattttcagctaattgagtttgatccttcttttgaggagcctttgcagcctgagccggagccggagccggagccggagccggagcctgagctggagccggagtatgggtttttgcgctttcttcagccaaagcatcacagaacgctctatgagtaataaagctatctctccttcaaaaacccaaaaacaacaaacaatttcagaaacccaaaacccaaaattgaaataaatttgaagaaaaaaaaaagaaaagaaattaccttgaaaataaggttccacaatcgcatttatactctctggtaccacaaatcttggaatgggctttccaatcagactgaacagcgtatttcttcgaacacttatcgcatttccacttcttctcgccgtgtttccggcaaaaatgtttcttgattccggtaagatcacccaaagctctagacggatcatggtggacacaagaagcttcagggcacacgtaaaccctcttcttcacttccttactagtcctctgtctaagcttccatggaagattatgacctcttctatggagttgcagattctgatctctctgaaatcctttattgcaaatttcacaaatgaatcgatttgtagccataagggtcttcggagacagagcaattacctctgcatctggatctgaaatgtaaaaaaaaaaaaacccatgaataaaaaaaaccccaaaactccaaaactcaaatcaaattcatatatatgaataaaaatctcatctttaactacctggcattcccggtaagtttcgctttttcttagcagtagatttaggaggagcaggaggaggaaccacagtatgattcccagaagaagaaacacttgcttcgccggaaaccgtagaggaattttctaactcggtcgccataaccaattctttaacaaaaacactctttttttcttttttaatcttatcctttatttttagggtttcttctgaaacaatctactgaagagtactactagacaaaatagaagaaaatccagagagcatttatctcaaaaattccaaagaagctttttgagagcaaagctttcatttttattatttttctttttctttttagggttccgtcccaactccaactatctcagtctttttctcttatctaccagtcaattcagcttttttttttttttggaaagacctaccagctctctaaaatgggtctgactaaaattcacattaccccataaacacaatgattaaacccaagactgtaaaaataaaaatacaacctttttcagttccacgattattttttttttt

SEQ ID NO: 218876 - DNA, 3885 bp, Cannabis indica
tggaagttgtaatttctatccaatcaaagataggaacaaagattgaggcattatacaataaatgatgtcgaatttattttttactttgagagctaaaacttattgatgcatggaggacaccttgtttagatgactaatggaccttacatatattcatttgatcataacagttttgagataagtttgtagaacaagaaatgtctgtattggagcatgatgttgtcccttaattgcaggaggtattgtcaataacacattaagaccacctgtgccaagctattgtgattccgaatggagattactaatggagcaatgctgggcccctgatccagttggccgtccatcttttacggagattgcaagacgcctacgggtgatgtctgctgcttgccaaagcaaaccacagggtcaccagcaacaaagtcaggtacccaaataagaactctgcaaattcaactgtacaattttagctcttttattaagtcatgttggcaagaaaagtttgttttatacttataaaggtgtgtgtaataatacaagtaaagaacagatatgtgtgtgtgagagagaggctacaagtgaatgggtgaagttttagttcacaattgggttgtaaatcatatgattggatggtttcgtggaaatagtgagaaatttgtttattatgtaaagctattatttgtgttaatagtaaattcgaacttcggttctgattattacttttgtgaacgaaatgtacgaagggtatacatcttgtgtatgatactgactttgaacattggggggcaaaaatctcctattctttcgtttttgaggcactttacctctgaattttttctttagttattttttaaagtgaacctccttcaatttctgttgaaatctatgtagttttgcttgtcttctgccattatggacacatgtggtcatcagttgcctgtccacatcatatattcagattttaggtcctgacaaaaataatgataggtgcagtctcacatcatgtcacatggctttttaatgttttgctgcatataatcacaataaaaaataattcattacgtgttctaattaataaaaataatatcaaaaggcccattcttttaagtcctaaaataattcgctacgtactttcattagtattgaaaaagttaatttggtgaggatttgtaggagtgttcatctaattctgaattattttatttatagtgcatctttttcgcattaagtatagatttatattttagattcaatataactcgcacaatagttcaattttaatctaatttaatttgcaaaagtgtggattggatcagttattttggattggttattattttcttttacaacaagaaaaataaattttattccaacaactactaaccaagtacagaacaaagaaattctccagcaacacaaatcaaaatctgtttattatttggattatatctctttccccaattttatgtttggaatgattacaataaaaaactctagccttgagacttggtttgatcttcaagctaaatctcacaaatcccttcaaacacacatttatttctattacaccaaatgtaatagaccactgctgcaatagcagcaaatattgtatcatcatcaagttgctctgcttccctttcagtccattcagccattcctcaagatttaatggccaatcaatttgaccaagccaacttgtaacttcaagaatagcacttttagagaaagcaataaaaaaaagatagttgtgagattcaagagcgctaacacaaatcggacagagcaaggagtctagttgcacgaacctagcaaggagatcccgacttaagagattggaattcaggcctgccacaaaaagaatttgtgctttgggactttaagtttgtatcacacatctttacggtaaataacctttgaaacggagatgagagagtgataaaacttcttagctttaaaggtacccgtcatcctctgcatcaaacatggtctgcctactaattttatctcaaagattaacaagcttacggaagtaccagcatatattcaagctcggtttgaacatctaaatgtcctcttccttcaaataaatggcattcacccaaccaacctagagattatcttgtttcatggaaagagcccaaatgtatttagccatatgagtaatattttatttttttcccttctctaaacccgaaacctacatacaccttaggtagggaaacacactttttctcaggaggcaaaatggagcttgcatcaactaccagagaatccccagagaaaatctctgcataacttgtcaatttccttagtaaccctttgaggcaagataattatgctcacctagcaattcttaatgctcattaaaacagaatggactaatggcgcttaacctacaaaacaaaggtgcctactattccacccatgcagctttttctgaatcttatcaataatgccaacacagtcagcatgcttctattttgtaggccgtagatttaccccaaggtaattcaaaagaaataaactttttttgatatcaataatctccaataagtgctttttgatatcagtcgaaatacctccaaagtagatagaggatttagacttattggctacgaaacccgcagcatcacaaaagtcagaaaaagtccttatggacaatttgaagagaggaacacattgcccttgcaaaagatgaccaagtcatcattaaaacagagattaatgagcctagagacttacataaggggtgatatccgaatcctttggtacctgagtaatatcttagaagtcgagtaaggtaatccatgacaagaacgaaaagaagaggacaaatgggatctccttgtcaaagcccctttcttccttgaaatgaaccatgaagtctaccattcagattggttactttttaatattaaattatttaatatttatcaattttttttttcacataactaacaataaaataaattatcttacaaaagaaataaaaaataaaacaaattattattgttttatgtctccaacatcgaattaaataaataaaattaaaataacaaattcaaatgaagaaaaaataattgtttgtacaaagaaatgtttaattttgcttaaatttatgtaaaaaaaaaaataaattatacataaggatggaatatacatttgatttattaagttttggaatatatttgtattatatgtgttagatttttaaattgctattttttttacataaaatattagttttatatatatttaaaattttatctaaatatacgtgaatttaattagatcggttacttttacatgtcaatcaacattcaatccgcacaagtgtagattttggatttttcaatccaatccaatccgcataagtgcggatatccgtattttgcgaattaaatcgtgcaaattgaattgtattgactattttatgaacacccctagagttctccttcctcattgtccttgaccaaccttcatgtttttctcggagaacatgaggtgattttaaatagagatgaaatggaatttttttggtcatgctttggagaaattggttttgtaggaaccaatggattcataataagaaatttgtcaacactgaaggggttttggggtgggcttccgagtcacaaagaatttttagactgttaatgcaaagaagtctcaatctaatgtgtgtctcgctctgcctattatgtgtctgattactcctgcttgggtgttgcctggttgtaatttgttgaaactgaacattgatgcggggcttcggggtgcgaaaaaatgtgtgggatacagggcattggtgcattatcagttgggaaattatttggcttttgtggctttctagctttgggctccctttcccatccagtggcagaa

SEQ ID NO: 218877 - DNA, 4801 bp, Cannabis indica
cactaatcactcttagggttcttagtttaggtagtgtaatgctgtttctgtttttaaaaagcattcttcttttagtgaaatttgtgcttttttataggtgtatatataaaagtttagtgttctcgttctgatcagtcttgctttttgtagtaccaaatcaatttgcatttcttcacttttacgattccagaattttttaagtctgcattgtctagctgcctcatattgctaggaaagtgttttctttctgatcatgtccttcgaagatgcatgtgatccccatgtgcttctggctttgcatgttatctcgtgtctgctttgattaatttttaaatttgatattatttctcatggttattgaatcattgaaaggtatattcttttatcataatcttttcagacatgaccagtgattagtgatttctatgttattttggaaagattactgattcatatgagttatctgaggattgaagtaaataactcataatgtgcttaatcttactattgatcttttaattagttgaagttcattagtctatctaagaaaacttcgttatatgtttcattattttaagtctaaaggagtagagacttttggataatctttctcggataaggaactctattacctggattttcttacttattgccatacgattttgtttggttttgctgtgcgtttttggttgaggggagatcctaataatcatttgattgattctatggttttttcttcgtacatttcaatttaatggtcggttcctaatttccttaattctgatatgccatcaggttctaacttttttctgaccagaccttagatatcatgatctaaagtagtctcaggtgatgttagtttagtgatgtgcatttgctagtcataaagttattattgccatgttaaataaatttattttcttgctcaggtcttctagtctggtttcttcttatattctattatggagggagagacgtcgtggattagccattgcctcgatgacatgtctagagaaattggggagctcgattcatactcagagctcagtgacgaaggcaataaagaagctagtggaatttctgtggatttgatcctgcctgatgacttgttagaaaggattcttgcgtatcttcctatagctagcatcttcagagcaggttctgtgtgcaaaagatggaatgagattgtcagttctgaaagatttctgtggaacttttcgcaagtgctatcccaaaagccttggtattatatgttcacaagctctaatgaagcatttggttatgcctatgatcccattcttcgaaagtggtatgggattgaactcccctgcatccgagcacccaatggggtcattgcttcatcatgtggactggtatgctccatggataacgatgggataagcgagttatgtgtgtgcaatccaatcacgaggcggtggaggaagctggaggagccccctggttcgagaacttgtgagtacagtgcactggcaatttcagccaacagggtgtcacttgcttacaccatctcaattgtgaaatctaagcaaatcccagataatttcttccaatgggatatctcaatccatttatacgagtctgaaactatgatgtgggtgacctctctgaccgaagttttgacaggatggagagctggggatgagagtgtaatctgtgatggggttttgtacttcttgatttattcgacaggaggtgcagctctggaaagccgtcatggtttgatttcgtacaatctttccacccgtcattcccatggtttgctggcaaggagttttgtccccgtaccttgtgctcttacctgtggtcgcttgatgaacctgaaggagaaactggtaatggtggaggaattggtaaacatgatcgacccgacataatcaaaggaattggcatctgggttttgaaagggaaggagtggcaagagattgctcggatgcctcataagtttttccaaggatttggggagtttgatgatgtttttgctagcagtggcacggatgatctcatatacatacagagctatggagctcctgctcttctcatttttgacatgaatcagaaacaatggaaatggtcacagaagtgcccggtcacaaagagattcccacttcagctcttcactggtttctgctttgaaccaaggcttgaatttgctccctaatctatttcttacgtgcatatgaaagtggtggtagtggtgatattgataatatcatctaattttctgtctcatcttttcattagtgtttagttatattgaattctctttcaaaaaatttgatacaaaatgtacttgcagataaagctgctcattcatgaatcatgacttttaaaaatggtctttgcattttggaaaaagaaaaaaaaaaaatcccaaagtattagatgttcgaaaagccggaggcttgtctaattgaaatatatatataaaatatacatatatacatttgtcctgccgtgtgttatttactttttctagctgtcctttatatgtttttaacaatacttcatacatacgaaaacctggactatttgtcattttttaatacgaaagaacagacaaacgtccttaatttctgtagatctctttcaattccaagaaatagttcatcttgatttggtaatccttccatctccagaattggaatctagagatgggaagctttcaaaattgagcaaagtttcaattccaaagtcaatatgtggagatgggcttccatgctgttgtgatttgagtgcatacaatgttactttccctgttctgtcccttctcatagtttcgtttttgtttcttctaccattaaactcatgccacgataaggtttaatggccccatagctgtagtctgtagtagacttgacctgtagtgtacagccatatctacacttgttccaaatccaaggaatattattgttttcaggtcttaatctacagtctttgcactccactccaactatacatagtgaaaattacaggacatccaatgaattgtctttgtgagaaaacaagtgccactatatattgaaactagtttaacatagttaatctataaagattatgaatcatctttagctaatattttaaatggtgtgatgaagaaatactaggattagaagattcattgtgagtatcattatttctggttttaatattatataacttgagggggttaacctagtgttagttggtctgatgagttatattttagcactaggtttggctgctgcaatgtgtgggttggtggagaagtgatgaggtccacacttgtgctttaaaccaagtggattttgcttggtggagatgtgacatttaaagatcatgtaacagcttttccaaaatagctgtcaccttaaacaaattaaataaaaataaattatattaaaaatacaagtacccacctccattactattatttataaggtaatttaatagtatactaactaaattaattctttctatatagtatttattaattttgacatttaaaagagttttgtatttataaatttttttataattatatatattgtatttataattttttatatactattttagcacttgtgctgacttgattcgggatatgttcaatcaacatgatagtgatttaattctttccattcagctgagtagttctagtggtattgattgctggtattggtctaaagagacaagcgggatatactcaattcgaagtgcttataaacttctggaatttgttaatgggaattggccgagtactggaggaatgaaccattggaagcaaatctggaatttgaatgtccctgctaaggttcaacacctgctttggagggtcattccaggctgtctcccaaccaagttacagctctctatcaagcatgttccagtcgatcttacttgtcccatgtgtaatcttgaacctgagaccgtgtcacatgttctgttcaggtacaattttgcacgttcttgctggaatttggcgtcggctgacactgctggtgctgatgatattgagttcagcagctggttttgtgacttgctgctgcattgcaggaaggcagttgtcgaggaagcggctatgattatttggcggatttggacggctcgaaatgatctcttgtggaataacaaatcaactactgtttcgaaggtgattcgatcggcaaaaactaatcttggcaattggcaaaatgctcaatcaaatggttccacacctttactaaatttgaattttagtaatggtagagagcattggacaaaacctgtttcaacaaagttcaagatcaatgtcgatggggctatccttgcagctgagaattggcttggaataggcttccttcttcgggatacgaattgtaagcttattgaagctttctcaagcagtaaaattggtgtggtttctcctgagattgctgagattatgggggttaaagaggttttaagtttgatcaagacgaaagcgttaactgaagtggaaattgaaactgactcattagttgttgttcatgctattaatggctcggttcaaatgccatctcaatttgggtgacttattcatgattgtcgtttgttactttctgaattacataaggtttttctttcttttgttaaacgatctgcaaatagggctgctcattgcattgcaagacagtcttatttcacgccagatcgtatatttgatgaggcttctgccacatctgatttactttctattgtaagggaggattgcttttcaagttgaataaaatttccttcttctttcaaaaaaaaaatattacttgaaattttttaaaaaatttaa

SEQ ID NO: 218878 - DNA, 2863 bp, Cannabis indica
tgaagtagtacttataattaatttgctatatcatcagagccaaagagcaccagcatctttgagaagaggaacaagagagccattgatatgtgaagccataacacggtctataccaccaatgagttttccaccgatgaagacaacaggaagaggagttgaattgccgagtagcctcattaaggctctctcaatgtcatttcctaatactgtgtcatggtcaagctcgtacatggtcgggttcacacccatcccacaaaacaacctcttcacagcatggcacatacaacagctactaacactgaacaccaccacagcgctctccgccgcaagcctcgccaccctctctaatgggtcacctccacccatgcatcttccgctagccacatagtaaccccaaccatctgcttggtattgcatttttctcttttttctttatctttacgttatatatacgtttttataaaagagagaagtagtatagtagtagtagtggtgaaaatgttggtttgagggtgttatgtttgttttggtttggtaaaattagagattatatatatatagatagtatagaagtagtgaaaagggtagtttggtaataatgaggagtttgtctgttcttgtcgcaaggcgtgggtggaggatgtcgtgggttttcgctttaataggattgttgtctgtactcacgaggtgttatagttcgaaacattacatgcatattcgccaaaagtggctagggtttatgtcagatgtatacatatataataaatatatatagaagacggctatgtacaggtttaagagagtaatatattgtctaccaaagagagtatccggtaattaataaatatattttgcctcttcaattttactcttaaaaaatcataattataatcaactattacgatagtaaatattctcctaatttataacagttagagtttaagtgattttctttaaatatataatcagaaattttattcctaaattgagacaactatattattatattttgtaaattttgatcactttcaaaattttcatcttttattaaaaaaaaaattgacaaatggtaaaagtttggaggggtatgagtcatatttgaggagataaatttattaattatatagtaatagaagtctaacgaaatctaacaaaaatccctttcttcgctaacatttaaatttatggaaaaatatttaagattgctaacaattcattgaggagatacatattattagagtattgttattgagtattagtggtgcttagcacccttaaaacgtatcgtcttatgattagttagcgatactccttaaaaattattatattaaactatatgggacccaatactaaattacaccaatagtaatattgacatgtaagagggtgcttccttttagcatttttcatattattattagtgacaagttaatataggaaaaattttagttattctaaattatatgttttgatgttttttattatttttgagaaaatattttgtgttgtgttgactaataagtaatgactgttgaatctaatagcttagcctttgctttagtcagaccaaatttgggtgtctttaaaatttttattttttggcagagatgtacgtcggctaagttggtccttgttgtcgggtatataaaagtagtaactaatagtaacccccatataagacaatgaaaaagatcacttttttttggggactttctgacgtgacccttacgcgcatatgtttgtttgggagtttcatattacatattttcatttctctggattctcaaacggtaaacatgatgatgataatattcatcatcatcaatgcttctcttttgcttcgtcatgtctttggtttgaccttatagctatccctttaattttttttttattaatgacaatatagcgtgcatcttttcttattgttttttttttctttatatctacacaatacaaaatgtaggtagtaatgaataatgtttggggtatagttattaagtttttttggggggaagatcaagatgagaattataaacatatatatggcgtggaacttaggtaaagtagtgcaataatcaatcatgaaccgtgacacgttttgaacgacaatataccatagtggataataatcaaatgcatagcattataatccaatagcacacatattcctgtatacttggttatattctccctaagctagctatttatgtgttatatatgtatattgacatgacatgtcatgaggtgatgtattagtaaaagccatggtgcactgtaattggtcatagagaatatatatccacgtaagcactacaaattggcatgggaatatgggatttcgttacgtatataaattaaagatataaatatataggaaaagaaagagagagagagaggaacaagaaaagttgaataatataaacataatggagaagaatgtgggaaaagcaaagacaaaaggtgcagtagtttggggcattgaaaagggcgaggcgtggcctgcattgcattgcatgcagcagcaaacattagcagcagcagcagcagcaacagctgcagccatagacttgagtcgggcggcgcgacgcggcgcgggtgggtacggtgtccagcgccgaataccggcgagatatgagggtctatactcagtattctgttccattatatttttttattactaatattttgtttatttatttatttgttagttcttaatttggttcttccaccattagctacctagctttttcttggtcagtaaatgtctcttgtatatgagacctggttttctttcctgacggtttctctttacgcatgcaatgtatgctatatatgcaaccccctcccctctctctctctctct

SEQ ID NO: 218879 - DNA, 2234 bp, Cannabis indica
atatatatatatatatatttgcacagatgttcctcacctacccccaagtgattaaagggtgtaggccttgagtcacttgctgagttttgtcaagttaaattagcacctcttatgaaagtattgttatcagttcattacattatcaaaaatcattgtcttggtcaaatgacttataagccttttaaaaaattctaaagatgaaatcgaatactgaactcctaactattgatagtaatttcggaggtgatcaacattctaggcttttgggatttgggatccatccatctgtttgaggcgataagtttcggcgcatatttcattttcaattttgtaaggtccttcccagttggggcctaatacccacactctgggatctcttgatgtgaggaagactcatcatagtaccaaatctcccaccatgaattttttgtccattaccttcaagttgaagtatttggcaccttcctttggtacaatgctaggcgcatttgagactattctctgagttcttcaataaagtcaagagactcttgaagcaaggattggttgatggccaaatcataagcggtccttctatgagattgtacagtgtgttccatcgagagcatggcctggcagtcgtaaactgttgagaatggtgaatgtcctatagacatttggtctgtggttcgctaggcccagagtactcgtggcgattcttctggccaattgtttttgcaagcttttaatttttttttagggtggttttcagaattttgttcacagcctctgcttgtccatttccttgaggccttgtcactgcatagaagattttaacaatccagtgctttttgcaaaactctgtcaagtgatcactatcgaactatttagaggattattttagattatttaggtgacatttgataatatttttttttaatcaattttctttttttaaaattagaaaagtaaaaatatttttcaaaatcatgttttataaaactattttcatttttaaattttttaattgagaatcaaaattttgaaaacaaaaaaaaaattacttttaatatttttctaaacaattttttaattaatattttagactccgattagactcggatcgaatccaaacgcagtcccgacccctaacctagaccccaactcgacctctggcctaaatctgacttaaataaaatcaaaaaataaatatgaaaataagcttttcaaaatatatttttgttttctgttttaaaattgaaaactaaaatagttatagaatgcatttttatttttcaaaaataaaattttcaaaaacaaaaatttatttttatttttgtaattaaaaattaaaataataaacaaaaatattactaaacagttacagagctactataaaaaaaaaattacaaattactccttttaaaccctctccctctctcggtttcagggtttaactcaactcatctttcaattgtggaatgcttcttaataatccgccttcaactctgcctcttcaatttccatgctgtttttctcttccagtctcagactggctttcccaagcaaacttttcgttccacaaaagtttcttcgttttatgccagttgtccatggcggtggggcttctttcaaatggggttcttcccttttctctcaaatggcggtttcccagttgaactcaagctccgcttcctctgatgaagataaccaactggattcttcttctttgtctagttccattgcctcccacgaaactcttcatttgtcccctgatcttgatagcttcagagttgtagaaatccttcgtagtctcagggccgaacccgatcttgctatcgcgttttttcaccggagcaaggaggaagccggatttcgacatgaaatctctgcctatgttgagcttgtcaagattttatgctactggggtttggacaggaagttggattctcttttgagggacattattcttccttcaaaagaacaacctggaggccccgaaaacctgcctttcctgatatcagagtttcttttgaggctggaggaggaacttgaagttgggcagtcgttatttcgagcttacaatgcgttggtcaagagttatgtcagtgttgccatgtttgatgatgccatagatgttttgttccaaacgaggaggaagggctttgttcctcatgttttcacatgcaattatctttggaaccgtttaattgagcatggtaaaatggatatggctgtggccatttcaagcagct

SEQ ID NO: 218880 - DNA, 5053 bp, Cannabis indica
caaaattttgccaatgcttctaagccaagtttctcaaggaatctactttccatgtcatctctaaatgaacttctcagtctattgcaactcgtacgaatgaggctgttcaatcatgtctgattcaactcatatttcaaagttgttggaagttgaaagaagattttcaaagtcatgcttcatatgaatgttgtagcagatgttggaacatcaaacaagtgcccaggccgcagagaaatcacatagctctctcacttcatgcttaactagcagggcattgctatagctcttggcttgatctagagtaaagtgcacctcccataagctctctttttggtaaaatggtccttctgaagtaaagtggagctctcacaagcactcttttctagtaaaatggccatcttgtagtcattggtcagttgcagaaaacaagtttcttattattttcgacatctaagaaataattttgtgtaatgagcaaattttcagttataaaacactggttgaagataattaaattaagaaatcaatgataatacctaataacttcctagaagatttgttctgctgactacttcactgcgttgctcgcgaacaaacttccattcttggtctcgattataattcccttcttattaagaggctttggaccattaactagaaaagataacagaaatctggcaggagacagcatttatggaaatgattattctgcctcagtttccatgtcaatcaatgtctgttcgactgtgaagtcatcatcaatatctctatcaggattaaagaattcatcatttacaacagccgattcaaatctttggcgtctttcccttatagcttggatcttcttttcgaactcctcatcagttgttcccagcatgtaccgcaatttcatattgatcctattctccaccagaatcttgtgtcttggaataattctaccttccaaagagtagctgaaaaacctacaacagagtttcaacttaatcattataaaggaggaaagaagctgtgaaattaaatggtgaaaacatatgcagaacagttaagaaaaagcaaggatgaaaggccaacaatttagtaggatttaaaaaattaaaaatgtcatcttgactacaaatttggtcatccgaagtgtcagaaacgccatatagaaataacactaaattatattcatttgggcagcatgaatgtttcagcagttagtatgtcagctagatatgagaagcagataatactgtttagaccatgataaattgttaagcaatgtccaacagcacaaaagttaggctaaaggccactgcagctaccttggaaactcaattacatcttccaaaggccggaccatggtcctccgtaagtaacggtacttaggacgcagaacatctatattataccgcagcagcatggggaaatcagcaatcatttcacccaattgttgaagacgtatgcctagtgagagataatatttcatattaatatcaagcttatgaacgatactgcatcccaagagctctgggcctgaggctataaccttcgcaatatccctcttagaaactcctgctctggtcatcaagaaaataacctgcaggacagttccagttccaaccattgcaataagattctaagtatcgagataccaacatagatctaatgattgaccataatatatataaatttcaacaatatgagggaaaataggattttttactaacttaaaatatgaaacaacctcaaaagaaataacagcaatagagcacatcatacatctttttacgcaccaccaacaaataaaaattgcaatggaaaaatctatgaaaccttatttgagaaatggtcaaagaacgttgcaaggatcaaatggaatcagcgactaagccaatatataaattttagaataaaacgaaataagacacacaccaaaaaaaaaaaagcagcaaccccaacctaatatatcatattgtgtcttactgcaaaactaaaataattattacgaaaagaaaaagatatgcaacattgtgtgcactactttggagcaaatgggcagttacgtcagttaaaaattaaagttaataacaaggaactcaaaacaaatgctactaatataattcggaatgtttcccatcatcccaacccaaaactatgtgtaatgtcctgcactcaaaggagagaaatgaaggtaagcaccggagactaatattaaattcaaaccagaatatgaaagagaaaaagacaaaccactggccggattttcttatggaggctataagttagcagtggagggaactttacaagcatgcttcctatagtatcatctcgaatgccaatgtccttaaaaaattgtaccttcacaatgaagaaatgcaaatcaatattgcaatttggaacaatgacgaaaattatccatattagaataaggacatacaagcaataacttcaataaaagagggagggaatgacactaccaacaggaacttgttggtaactgaatctaaagatggcacctataaaggcatctatacgtaagttaaaaatatgagtgtagttttatataaatattatatccagtacggcatacctttggcacaatggtcgtctccaaatctacacagaaaaccattggtttaatagtaagcattctcttcataccatctcgtgaaattccatggtagtataaatacttgacaagaggcttccaccttttctcaatgctacagctaatcaattctggtttaaatgcaagcaatttgccaacttcctcaatacttaggccaaactcctttaaatagttaacctagattagaaggagctgcatttcagtagatgtctatgtagattggtgaagtagtaacaattgaaaaattaaatctgctcgatgatccccatatcagtataattataatagcagtaagagtaatgctagggatactcacaactatcactcaaactgaggatcattaatatcaaccaattaatatttcatgtcagatcccagtatttaaaaatgtggggttgtacatatgagtttccttagcaatagtgaactttttttattttttgagatcagcattagtgaacatgtgctgttaagatattagaggaatcaataaatagtaagaaacaacactaaaatattccaggaagcagaatgagcatagagagggtaactaccttttcgttcatctctgttaaagtaaagtagccaagtactctcggataatcaaataccattgtgccaaaatccttgtcattcatgcccatatctaagaagaactctacccgagttttaatttcttcaaaactgtaggacaacagttgcgggcatcgactcaaaacatagcctgtccactctttcctgactccatttctctccaagtactcaaaaatttcatcaagttcttcactcccacgttcaaaaacactctctccacctttcaacatggcaagtcctatgtatcttcccttaacatgcattgacttcaaccagtttgctaaacggataatggactccagatttcccttagacatgcaaataagctttccaatttgagggtaagacaatgaattatgctttaaccacctacaaattatgtaagagaaattttgtttgattcatttaagcaaaaatcaattccaaagatagcaaaagaacagcaccacattagttccttaagaaaactgtttaaggtacaccctggtgacagttacatataacaaaaagaaagaacaaagaaattatagacttacgcacatatacatacatatatgcatacatatacacataattaaggcaaaattacaaaatgcataagttttactcaagataacctgatcagtggcacaacatttgaatcatgtatgacagtcttggcgcgaacattgaagttggagtttgaaaattccggtaagcgcttcaacgaagcagcttcaaccataacataatctatgaaatcattcaacttgctcaccaaattcgagctgtaagtaatcccaaacttcccctttctcatggcttccatgaaaatctcagccgtcactttcctccgaatctcaaccgcacgcattatcatctcctgatcattgtcctcatcaaaatcaccatctcgaaacagagtcttcaatgggggaagggaactggccacgtcagcatcgctgggggactgtacgtagacggagccagggaactgaggcgttctgttccgtacgagggacagttccaatagcctcactctctcttcggcggacaaccgagggtgttccaggtcctctggtttaaagttcaaagattgggactgggattcgtttaagaggtggtggaggagggccattgacttggagttatggttccgaggattgagttccggggtgggctcaccggaagctctggtttggattcgtgagactttgaaaaagtagaaaccgccaccattggagtccgagcggtggaaaaaggaggagcgtggagtgtaaacagtggtgtagtagtggcatggcgaaggagaagagagcattttagttgtgaatacctgcctagtgcctacggtataaccattaaccatggataaagtggtgcaatagatgttggggaaagaaactttgttattttaaaatatttatgattaaaattatcaaaacggttccatggtctagtggttaggacattggactctgaatccagtaacccgagttcaagtctcggtggaaccttttctattataataatttatgttttttatttttccctcttcgtaaaaactatctcttctaccgcaaatgatacaaaactaatcatatctttatttaaccaagttaactaagaaaaagtaaaaacgtatttgcactatattaactggaaactgctaccatttcatgcctacagtacaaccagaaaaaagaaaaaacatggtacaagtcttaaacactttccctttctttttctttcttagtaaattatgaaatcagatttgaattaagagatctttaacaattacaatttacattccacaagaggatcagaaactaaacaataaccgaaaaaaaaaaaaaatcaatcgca

SEQ ID NO: 218881 - DNA, 11336 bp, Cannabis indica
actgccacgttagaatacctggctgcatctaacacgcatcactgcctcaaaaccttggggccttgtaatattccatctaagatcattgtagatctttgcaggatcagatacaactgagaatggataataataataaacctgaaagacgaaaaccagcaaattttttatttagtattattatttaaccaaacaccacctagttgtactattgataagcgtggaaatgaaagaaatgataattaaagggatgaaactatataaacatgcttagagacgacagcgtatttgaatatattagtgaatccaagcacatttggtgtattttacagctgacagcatgaactatgtgaacatgcttaaagagaacacttgatataattctttcacaagctatacacaaaacattaacatgcttaactaatatgaatatcaatttaaaagaactcagaatattaaaccgttgttaagtgacgtggtatcaagttaaaagataagccataagtgatgtttccataaaaccctagacaaattaagattagtacctgccctcctgttgttcttgggatgacagcaatagatgcaatatccacatatgtgtgggtagtgataaatacatccacgcaaacctgaaacatgccatgatagataagttacccgtacaaaattatactcatcaaatacagtgcatcgagtgcaaaaaatctccaccagcaggtagaacaaagtcatatctttatttattttttttttgaaacaagccatacctaaattattaagtgatatgaaattactggaagtttacctgatactccgcaaattcaatagccattgtcttaaaagttttgtcaactggctgaagtaatttatgggcttcctgcaaagatgttaaagaagaatcataatctaaaggaaaggcagttttgactaagacaagtactagcattactttatagaaactctacaaagcattaggttcttatgcttgagttattgattaacattaacgttttcatttctttaaatctttatccaatctcccagtcttcttcttgtgattattattgcttttagtactctatatgcccctacagattacaattatcaccatctcattctcttaggaggcctataggtgtatcaaattggaaatgggtacaaatgaaccagagtcctatgagaattatttctttttccccttctaccacatgtcaacaaaaaaaaatgttgattatcttatatactagtggaacaatcattccagtttgatcaataaagccatcaaaatcttccaacaactttcattaagttccaaatatgaagaaaaaggatctaggaaaaatgtcatgaagttcaggatcttcaattagatttacataaaaagtagaaaacttcaatgaaacaacccagtgatgtttaactccgccaatctaagaagattacatacattacccctaaagaaaacaaattgaacgaacatcggactcatatccattatattgtctgaaaacagtcggatagaaggtgtaaaaaaacattatttccataccttctctcccgcagatacattagctcttccttcagcttctctagcagaaagagctccaatgccagttgatggcaaaactgtaaataaataaatcacaaatacaatacatgtcatgagagagccaaaattccctatgagaaaaatatagatgctaagcccaactggggtttcatatatgaaattggtttgtcaaataaatttcataaatacagctaagctaatacaacacatacacagcaacccaaaccaatccacatcatgtaatccaatccaatccgccactttgcatttgagtgtcattgaatttgaaataaagtacagtattcatgaatttaaaatacaaaagtaactaaaaaaaccggtgcatcttcaccatgcagaaatccgactgaaagtcagtgtcacattctctatttctaatcatcaagacctaaaaagactgcataattatgaagcataattggtggtagcggaaacaatttacacatttaaatgcaaacatgcaaacatgaagatgtatcatattctaaacttgcctgattgaaataccataagtttccctccagtgctcttcatagctaggaaagcagcctaaaaacagggagcagaagcatattaaaatgcatgttttaatgtaccaatattaatagatgaaatatcatcatgtaaagcatgcaatattccagactcttatattctcattttggttaaatattttgaactaaattcagaacaaactgtctgtaactcaagatacaagatctcagagttgttttcaagccaaatgatcaatgcatgtgttaaagtttcccccatgactctagcctaattagatgcaaccgtctaactgcatcaattttataagaaacaccagcactgaaaagttagttgattccaaatttgcctacccttcctaaaacaataactcttcaagaaaataacatatccaatcttggaagcattcatccaaacattccatcatctgcatttaaacaatactttcacatatttacaatttactatagttacacaaaagcaacatcatggatagattttacccttcgttttgtccttttctattttgacaaaaggaacctaacacacagacataatgtaacaatttattgaagttgagatgaccttcttaatctcccaagtatgtttgtcattgtacacgagaaagcaaaatttaggccttttttatgtatataaaaatatgttaattttattataatcctagaaagcaaagggaacgacaaactcccaaaaccaatgacatcaactcaaaaaaagtataagaaatgtgtttccagctgtaacaacataatcaaaacaccaagaaccataaactgtcttaataaaaatagcaaaccttaattgcagcaccaaacgctgattcagcagttttactattctgaaacatggttggaataacttccagcaatacctctaaatgctgtcggcactatatcaacaataaaaaaaaacaaaagatcaactattattggcaggaaaaatattgcctaaaaatcaacaagataatagtagtgtataaaaactaatggaaaataaaggtccataaagcaacagccttggatatttacctcggatagaggcacaagaacatctgtctgtaagggagtataaacatcttgtacatcaggaactattagcattagtggctgcaaaatataattggatgtcagaatcaatgtaaatgtagataaccattgagaaaattataggtcaagaatattcaacaaaaacaacataaatgtaattatacaaaatatcatttagcgaaaagaccaatctatattaacaattaaaacggaaattatgtaaatccacaactgaaattatgtaagaaaaaataaaggaaaaaaaaaacatgtaaaaaaataggagagatcttgtgccctgtgtgcaaagtcattgaaagacgaactctgttctttaaactgcctactgagtaccattaaagtaaagatacaatcgaaatcatattttgctccaagatactccattaatgtattttctagcatgtcatattcttcaagcaaatctagtaattgttcttttcttcccaatattcatctcacaatgacaataactcatctttgttaccaaatttataactatttatatgcagcttaaatgatgtctttccatccatcccttctaaaagcaaattctaaaatgcagaatgctatctaacagtaagatttagctgtagcaaacacatttatacttttctataaacagtgtagtcagaccaatctttctcatcttctagttgataaagcgattactaatacacaatcaggcaccaaataatggccaagtccgtaaagcaggtccaagagactgtatgtataaactttatctgaaaaccatttaggaaccagataccttatgcttgtgtagtcattcaccttaatatgacattaatcctaaatcctaattgcagaagaatgcaatcattccaatgttcagacaaatcactctcagatagattcaactttgtgaacgcaatatcccgatccatgtaacataaatgttgtgtataacatacaaaacctaggaagtttattaatttaactggagatttaaagataaagctccactttactaactgaaattatatgaaagggtcaagataaatttgacctgctgtaatgcacgtttcaaattgtaaaaatggattgttgagtcaaaggttgcaattcccacaattgtccgaggaccttcctgcatcaatgaaagcaccaagatctcagtgaaaaataaaacatgttttccttcccatttgtttctctttatagaaacacaaagtataaattatcccaatgaaagaccaaggaattgtttaaaatatgactggccttgaagctttagtaattataaacaagaaggaaaattcatgagagaaagactggagaataaaatcatcataatgaaatttgtattttcactaaaatcaagcaaggaaataagtttggtaggttttgtaggacaaattattgaaattttctaaagtcaaattggtcttttttaaaaatgttagagacctaggttccttcctggttcaataattacagagaaacaaaatgaagagtcaataaatgtaacaaacaaagaaataaacaaaaatgatgtaaaattatttagtcatgatagaaatacattgcctatatacaaattagcgaaaatgaaacagtatttgtcccatcaaaagatactgtagatctttacatagtttcctatgtttacaggttacaaacaccaagaaatggaaaaccaatgaacccaaaagctcttccacttcctgaacagcgtagctaaaaactctaaatctgtcatgcaaaaagaaaaaaacttacagggagatcagaaatgacttgactaattgcactgcaagctgccgcagttgcaccagtttgcatcgcattcatggatacatcaatgaggaaaaagtatacagccggcatgggatcacgcacctagaatcaaacaatcatcgcttaaaatgtagtcactcagaaatgacaacaaaacaatatagcacttaataacaaatttggaacctttccaaaaaaaagagtatatgtatagtgtgctaattcaaggtcatgctaatttacagctgttactaagaccaagtatgggcaaccttttgcaaaaaatctctacttcaaaatataatacaatgaaacatcattgttgataagcactgacgtaactaaccaactttatgaacaattatgcaaaatgggttaacaaaattatatcactcagataaaatgttggagactcgtctttattagtgatattgtccatattagtcttgtgactgatttctaagaagtatgtacgagtattttccataagatcgtgggcatgttaaggtaagattttgaagaatcagagggggcaactgtcactggcagtaagattcagatgtgacactggctgctaatgaagttgtggaaaactatagatatcatagaaggaaaggtcggtcttcaaaattgatattgaaaaatactatggccatgtatatttttaatggccgtattttcctatatgattttcattaacaggaggctaagagaaaatttcaagggatctagggcttatacgatccactgtccacgtatttattattattttataattaaacttaaaacagaactacttatagatggaattaacaattttgataatatatccaattgcattccttcttgattgaattgagtgaacaaaggaattcctataactccagatgtattaatataaaagaaaaataccggatgtggaaaatccaaaagtatcaccaatacaaacgtgtgtgtgattgataccgacaaaataacataaaacaataaactagaaacaggaaaaagcgaaaaccaaaacgatattacaaaaacaaaatgatgtcccattctcttaaaaagacagggaatggaaacacaagcatttgattggtatatagcataaaatctaaactggatgaactgtaaagggaaagaaaaaacgatgtttagatttgtaagattttgtatcactaaccatgtactcttttgtagcaacaaattcaactgttcctctacataactcaggtctttcatctgcatctcgacgcctaccatctggcccaagattacagtggtagtcacggggagtctcatcagtaaatcctgcaacagccaaaaaggtgaatgttgattagtgactagtcgtatgaataatattaataccattttcctcccattgtgcaaaataaagatggaagaaattgtgccttttgcgacaaattacaggctactcatgttatcgtagaaaaatgaatatacactaatacttaccacacaagttacagataaatcgctttccctgatcaataaacttcatgaaaggatttatgtagcctttgcagcgagaacatcgaactggaccactttcaccaaagtccacaacctataacacagcataatcagcacatttacactcaagtcaaaattcaatagtatcaatttcatgttggatgaatgggggaatttcattccttgtccattactttccagtatttttcataacacaaaaatttggattaggacttgaaatctatatcaacgaaaggtctaattgttggtgttggaataatgggctgtaatggcaattacatgtcacagaatataattcaacccaaaaagaaactatctccatgctattgttgccctcagctttaaattccatataggttccatgatgatcaataattaatttaacaaatcaattttcttcaaataaaaaactgataatatattacaaattattgtatctgtctgcaatagcaactagtaaaacacttcaaagacaaaaggtttacatgtatcggttcctctgatgggtgaggaagtgcaagaggttggaccagcaaagctaaaggcatccctgacgttgtcaaaaggtcagcagtgcatggtatctgtcaatgtttgggaaaaatgaattacaataaaaaaaaaagaataaataaaccaatcaaggttgaagattgactggcaaagctaacttcaatacaataaaatcaaaatctaacctgatttatggtgcacctcatgtaacgtggactacagtttccattgtcattaacaacgtaatcacttgtagcaggctttaagaaattaaaagcagtcagtcagaagagcacaaataacaatcagaaagattgcctgcaaatttcaaaaaaccaaaagtaatatggtaaaggataagcaccggaggacaattggcctgatttccatgacgagttacatgctggataattgaagagcttggcaagggccttggaatttgattagggtcaattttagttgatccagcaacaggagctcctgtttgaccgatgccagattgtattgtagtcatggattgatttggatacattcggggcggctgcatggaaccaggaactggtggaggtgccatctgaagaaataaaagatatgagacaaaataactcaaaaaacatgaagagctttgaagcttgcatccaacatatcttcccccataattgtcagcatacattatttcatgaacatatgcttataaaattcttatgtatttgataaaccttttcattacttatgataaaagaaagagttagacaggatacattatttcatgaagagctttgaagcttgcatccaacatatcttcccccataattgtcagcatacattatttcatgaacatatgcttataaaattcttatgtatttgataaaccttttcattacttatgataaaagaaagagttagacaggataacaatcctactggaccattcaatagccaccaccacaaacgtgccttcagcattgtcatttgaatttccttaaaaatctctatcattccttaaaacataaaaaccaaaagtataaaaaggacccacactctggaatacattgtctttcttttatttggggaggcaaaccatctgaatctttccttttatgcattgaaactatttgcggggatcatgtgtataagtaagtaatcattaagatacattaaaattaaagatgcataataattgtcaaaaactctgaatagtgattttgtctttagtgctgcaataaacaaactactctcaaacgcatgcctttacttggtatctataatttttacaacggccatcatttcacagatgcagcacagaacaatggggatatatcaaaaagaaggcagtgttaaccaaatggtgtatcctaatcctatcaacagattccaaatcctagcaaaacaaaattcaaacaagtggagctcactgcaactaaagaaggtcaacaactaaaaatgaacaaggaagaaatgacatggagcaaaacaattttcattgtttttgcatcattgagtacgcataccaaaaaaatttcttaaaagagaatactatatttccccagtaagttatgtaaacattaatgtgatgcatactaatgcactatataagctgcaatacattgtaaaaccaagaaacacaatgcataccatacctgtccaggttgcattggccacgtcggtgagccaaaaggtgaccctgctggtggtagtgcgccctgagctacacccgaataaggtgaggatggttgcatggggggaggtggtggaccgctggctcccataccaccaagatcattgctcatggttggaccacgaggaggcacaggtcccattgtctgtggaggcccaagaggtggttgtggagcacttccaatgggcggatatcggggaccacctggcatggcaccttgaccaaaacttggtggaccattgctcatcaagccaccaggtgccctagatggcagtgcaaactgaccagtagccattggtgaagatccaggaagaggctgagcaccaggtggcagtgactgtggtgctactggaccagaaggaagaggcccagaaccaggtgcaccataaccacccatcgaaggggggaaagaaccaggaggtcttgatgcaaatggagaaggttggcctacaggtggtccagtaggtctcactggcgccccaccagtttgtaacatggcttgtgggggtcctgatggtggcatcacaggtcttccaagtgcacctggaggaggaggcccagggcgagaaaaaggtgcttgtgcaccaggcaagccatgagaagtggctggcgaagcaaaaggcggtggttggccaaatggggaaggtacagggctagaattaagcatagaaggtgggcggttgagattcatattctgcaaattatcagccagggaatcgggagctctttgggcattaggaatgtaattaggaggtggcaccataccgggcctaggtgcccctggaggaggcacattagcagccattgatcaatcaaatacaacacccagatcccctttatctccttctgtataccaaaaatccaaatttcaacaatccacgatccaatcacataacatcaaatcaaacaaaacaaaacgaacacatttcagaaacacaaacgaaaatcaccatcaccaccataaacaaataatcaattacataaaagttgagcattaattccacaaatttataacgtagtaatttatccaaatccaaaacaaaaaacaaaatcatatcaagccagatcactcatattcctctttctcactcaacctcaaatcccaatcaaaacaatacagattcgtacattaccgcactaacactaactcattgatcaaatttacataatatagtccgtgcttttacaaatatataaggagatctaaaaacattttcactaaaaagaaactgaattatgagtttagattaaaatcataaagagatgaagatgaaccagacaaaaatggtggatcgcctggtaacggtgatagcttcttcttcttcttcttcgttcgacaacgaaaatacccactgaattgacgagaaggacccaaaatacgaccactctacagaggtggagctttttttattttatttttatttttattattattattattatatataaatgacttgtaatttattttatttattttttacttctcatatttttttttcttttctttttctttttctttttctttttttaggtgtatgatttattgatctttaatcaaaaaaaaaaaaaaaaagatttattgatcggtgacaacgaacagccaattacagattgccacgtagtgtttttaacgtcacctcatcggctgaaatgggaacttccgacttgaacgacatgtcgtttcattatttattttttttttttaatttatgattgtgaacatgttaccaattttttccttcaaaaaacacacatcttctttttactcccttgataaaatatattaaaattaaataaaaaatggcaaatataaataattagaaaaaaaaaaaatctttccattgattattttcagcacccaattatttttgcttttatttgtgaaaggaaaaaaattcattcaatcaaacaaaatatatatatatatgtctcagacataaacccagtaaaattgatttttcaaagaagatgcaaaatatcaacagctagacggtaagaccccgtgcaccttaactatagcttcgtagtgacaacattgattgaatgtgtaggataggtgagaggtggtgacacacaacgaccaatcctgaaagaccactctttcgtctaaggatgcataaccgacgcaccaataattcgaggaggatgagacacttcgaggtgggtagtttatctgggttggatgcttccaattttacgtaaactttttcttaccagtcaagtagtacaacagctgtatcttatagcctagcgtggcgggtcgccttttgaactcaataagaagatagaataatctattagatagataaggagtagggcttttcttgcttgtttagtaaagtaacactttttattttgataggagtaggtgcttgctagggcaggatactcttgattcttcatttgaaactaatgaatgtcgggtcgggccttgttctaaaaaaaatagagttgcgtaaagcaaactccctttttggacgcacggggcttagtcaagtagaaccaggttgtgttgcttgatgctctgatcgaaaacaaaaaagtagggccatgccagtacgactgaatatgcgtagaaaagtcaatcccttccctacggcaccaaaaaaaaaatggggtcgaacctctcccgcccgctaaaggacaataatacaaaaagaaagtgagattttttcaaataataaaa

SEQ ID NO: 218882 - DNA, 3895 bp, Cannabis indica
gtcaaaaaataaaaaaaaaaaaaaaaaaaaagatggcacaactgccacagccgatgccaattttaactattttcttaccctttatgtactgtgtcgaatctaagccattgaattctaaaaattgctcattttataacatcgaagggtcaatattctttagaggttttgaaaacctcaaacaggttttacataaaaagccttcattattattgaaattttttagatgtaaatttttgtcacgtcattctagagacaaattcgtgataatttgtcatgatacagagcactgctctttcctttatgtctcgttcgctcgctcttcgatgcgcaactccaggaagctaaaggcacgtaatctcagtttggagcctccatttttcagatttagtccatgggttctctactgtcttctactatttcactttgagttatgagatgacaataacgaagacgcattgtcgtttcacacatatgcctctcgccgttgcccccattgttgccctcctactttgcttttctctacctcttgtttattcttctatagaggcttgttcttcgaaatctgagccctttagatctccatctctgtgccctccgttcacttcaactcctacgttcccgttctcttcctcacctggttgtggccacccttttttccaagtcaaatgttcaactcctcactctctcatatcaatcaatcacctttcattttcagtcctccgctacgaacccaattcctcttctcttcttctctcccctcttcccctcattaactcaactgggcgatcttctgaatcttctgcaaataattgctcatcttttcttcaatttctctcgatcccgaaccgatccattaatctttccgggtcgccgtttcgggtttctgacgtttcttgttctaggctttccttccttaggccttgcgccggtcctgttctcccaaactgcagccattgtccttgggaatgcaagctcattaaaaacccagcacggcttctgcacgactgtggatcggttcaccatcgagtttctcaacaaggttgccacagtgatgttttagggtatcttgacaatattttgaaattggggatcgagctcgagtgggacgaagttcaagatgcttacttctcacattgcagagattgtcgtgcccaaaatggagtgtgcggattcaattcttcggacccaaataaacagtttgtctgttttcgatctcgaggtcggttttcgccgccatggattagcgaagacaacccgaatcgaatagctattttgagctcagttttcgttttgtcttgtgctgttcttttaactctgattgttttagcgattttccggtccaaacggctcaagtcctcggaaacttgggaagacccgacgacccacttccttcatcgccatcgctcagctagtcttcttccgctggttttcaccttcgaagaactcgaagcctcgaccaaccggttcgaccaaaaacggaaaatcggcgatggcgggttcggttccgtctatctcggtcagctctgcgactctcgcatcgtggctgtcaaataccttcacaaccaaatcgcttctgcaggcagagccttctccaacaagtccttctgtaacgaaatactgatcccttcttccattgatcacccgaatctggtaaagctccatggctactgcagcgacccaagaggacttcttctggtttatgattatgtcccaaacggaactctttctgaccacctccatggtccgaaaagcttgtaccagaaaggatctttgacatggcaggtaaggatcgacatagctctgcaaactgctttggctatggagtatctgcacttctcagttgtaccgccagttgttcacagagacattacgtcaacaaatatatttgtagagaaagatatgaggatcaaggttggtgattttgggctgtcaaggcttctggtacttccagaaaactcttcctcgtcagctgggtttgtctggaccggcccccaggggactcccggttacttggacccggattatcaccggtctttccgattgacagagaagagtgacgtgtacagcttcggcgtcatcttgttggagctgataacgggtatgagagcggtcgatcagcgaagggataagcgggaaatggccttggcggatttggtggtatccaagatccatacgggtcagcttcaccaggtggttgatccggttttagcaatggagggcgacgccgttaacggtgtcgaggctgtagctgagctggcgttccggtgcgtggcggccgacaaagacgaccgtcccgattcgaaggaggtggtagaggaacttaggcagattaggagccgcgcacgtgggatccaacgagggacgaactcgaatgatgctggtgatggtgacgtggcaaagggttgatttgattttgattggtgaggtgggtgagaggtcaaatgcacgtgtgtaagcattgactgatgactggatatttgtgccagtaaagtgtttttgaactccatacaatatatatagaaagtttccaatagttgtgaattcattcatttttctgtcgattttgcatttactttttattacatctttcaaaattcaagtaaaaattttttggtgggaataatatgtaaattagtccctccagaataaataaaatatatttaagccctcacgtttaggtattaggtatatgtaccttttccctgttactgatatttggttgttgacccaactaagactatttttcacaccatttgacttagttgctcaatttttgtttgaatttgctgtccaaaaacaaaagctttaatctttagttctttgattctctgctttgctctaatcattttactttagcattagtcaacccaaatgaataatgggtttcactttttggtttttacactgacaataaaatagtaatgattatgatgtgcatgtttgtatcaaatgggaattatccttaagtttgaacaagtgaaaaatgaaattaatgtccattcatttgttatatgtacacactgattattcaatgattatcccgagaaaggaaagcgaacgagagatttcacaatcacaactatttgaaatatgcagtctccaaaactttggccttctcacctacaattggggcttctttgctaccaactatggtgtaagctctttcctgaaataataataatggtagtagtaatacataggtaaataaataagggactatggtttctgcataagctgaaaactaaacacttcttatacagtaagacattttaccagaagcctccacaagaaagggactccttctctctttttaattctttctccaagtacttcaatcactacatttccaagggttattagaagaaggaataaaaaatctcgagatatctttgaaggagatagaaagtgaacagcctacctttcaaagcttgtccagtattcagcaacatggagtaccagacttcattgaacacatcaacttgctcatcagatgccccaataatcttgcacaaaatttgttccaagtttaagtttttgatggctagtactacaacgggaaaacgctgctaggatttggtacataacataacgcataccttatagtcaacagcgtcgaaatcaggctctagaaattccagtgcttgcttgtaattgcctctaccgtactcatacatggcttctgctaactgatatataaacataaacccacagttaagagagtaattctggcttaagtgatatagttcataaatgcaaaagattgtaaagtatgaccaaaggcctcttagacctttttctgtgtcaacttttacccaaactaatactgatttttgatgtcctctagaacgtaagtctattgataaagtatcaacaaaaatggtttttaatttcgcct

SEQ ID NO: 218883 - DNA, 3437 bp, Cannabis indica
acaattttttttacttttagtctcaagttttgttgtgactaacttgaaactaaaagtaaatttttttgcatgaataacatcataaataacatcaaataaggattatattattttttaaaaaaaaacaatatatactcatttgctaatataaactatttggtatatatatattttttttaattttattgtaaattattaaatttaaaatatattaaaagtaatgtaaaagtaccatttacgaccctaataactcatttattagcttcaaaaattcgttatttcctatgacttaaactactttcaccagtcatgtcttttgacatgtgtgctgtctctctgtgattgagagtttcgaatgtttgtgtgtattagtccttgctgattttgtttttgtgtgttggatttgtcctattggagagttttgttttatccactatggcctcaagcagtgaaactatgaaagatgttgaaaaacaatggtcaaacatttgtttagatgaagaggaagagtttgtcacagagttagaagaagatgcttcggatgaggttgagtacgacgaccgatggtgccttattgggaaacttctttctggaaaaatctcagattatcaagtattccaaaacatcattgttgatctgtggaaaccagggaaagggatgtatgttaaaatacttgaacagaatcggttcttattccaattctaccatgaaattgatatcgatagaattatcactggtagtccttggacttatgatcgcaagcaattgcttattgagcgtttaaggcctggcgataatccaagaaccaaaccgattaaccacctcgatctgtgggtccagattcataacttacaacctggattcaaaacagataatgtcgttcgtcaggctgcaaaatacatgggatctttccttgagactaatcccaataattttaaaggtgtatggcgagagtacttaagagtccgtgttcggatgaatactgatctaccgttaaaaagacgattgaagttcaaaagagtaggaggagaaacattctatgccaatttcaagtatgaaagagtccccactttctgcttcatatgtggtataatgggacactctgaacgcttctgcaaaaagctctatgaactcccagcagaccgcattgataaaccgtacagcatcgaaatgaaagctccctccaggcgccagaatttcttggttgcgtctccatggctgcgttctgcaaaacagcatgctcagtccggtgttgtcgacggagaaggcagtgatcgtggtgctggtgcttccccacaatccaaggatgcattcaattcagtatccaatcacggtaaatctgtgtattcagatcatagtgtgccagctaatcatttccgtaatgatagggatgctgatatcactatagtcaatggtgttaatggagataaaggtccatcaattgttatcaatgataacgattctacatttatgtctgatgatgaacttaccatattggatcttaaaaggaaaagaggagagaagggttccagtacaaactcatttgtggcaaatacggttgacatggaacaggctaatgagatatatattggtatttctgctgatataaaagagatgccaaaaaacgatgttatggtgggctctggtgttcaggcccaccgcccattatgaatactcttagctggaattgccgtgggcttgggaacccacgggctattcaattcctcacagacatttgtgtccaaaagaaacccaatttccttttcttatgtgagactttgagtaaaaaagacgtaatggatcgcattaaaaacaagttgggctttgacagttgttttgttgttgaagcccaagggaggaaaggtggccttgcccttctttggaaaaattctgatgatgcccatcttcttggatactcggacaaccatattgatattgaaattcattcttctggttctgcacgatggagactcacaggcttctatggtgaaccgaacagaacccttcgtgatagaacctggcaactcctcaaatctattgctccctcttcgcccctaccttggtgtatcataggagatttcaacaacattgcttctcaagatgaaaaacaaggtggccgatcttatccttcatacctgcttactggttttcaagatgtcatccgtcactgctgcctctttgatctgaagcttcatggttatgctttcacctgggaacgtgggagaggtactgctcatcatgttgaaatcaggttagataaagctcttgtaactcaacattggcttgatcttttcccgaatgctattttatcaaattgtgatttttcttcaagtgaccatacgcctatctttctgcaacccgaagtcagtagctgtgttaaccaactcaaactttttcgatatgaaaatgcctggagccgtgagccatattgtaaacaaatcgtgaaaagttgttgggaagaccatgctaattgtactctatttgataagattaagcactgtagtaaagctttgtctggctgggggttcgaactgactgaaaattttaaacaaaggctgaagagaagtaaaaaacgtatggctgttatgaaaaattcaaccttccattcggatactactgattttgatgaggagaaaaacaattactttgagattttggcacagcaagaactctattggaaacaaagatccaagcaacactggcttcattcgggagacaaaaatagtaaatatttccatgcctctgccagcactaggaaacggggtaatcaaattctgagattaaaagattcgaatgatgattggaaggactgggattcaggtctgatttcggttattgttgattatttttctaatctttttactgctgctgggactacttgtaacagtgtggtggaaaacatccgatgctctgtcacccgtgaacaaaatgatgagctgcttagtcttatttctgttgaggaaatcaagcatgctctctttcaaatgcaccccgataaggctcctggaccggacggtatgggaccgggcttctatcagcatcattgggatattgtaagtgccgatttgattgcattagtatctgattttttcaatactagtacttttcctagagagtataacactaccaatttggttctcattcccaaaaagaagaatttttctaccatgggagacttgcgccctattgccctatgtaatgtagcctacaagattagtgctaaagtccttgccaaccgaatgcgtcctttgattggtgatgttatctcagaaactcagagtgccttcatacctggtagactcatttccgataatatcatggtagcttttgaagtcatgcactatctcaagtggaaacgaagaaggtaaaaaagggttcatggcccttaagcttgatatcagtaaagcttatgaccgtgttgaatgggactatttgcg

SEQ ID NO: 218884 - DNA, 3831 bp, Cannabis indica
aaaaaaaaaaaaacttaaatttataagtgttatacaagtcaaatcctaattttccacatatatataaaaccatgcagctaacaaaattgccgctcacgtattaatttatagccagtttctgactaaatttcatgaatttgaccatgtcaattgtcagtatgttaaacatttagctagctttctttttctaataatcagatgatgatcgatcttaattaatacccaccaccaacccacccttacctaataataaaacgacactggcaatgaatttttttcaacccaattaaaaaatatagtgcaactaaaatctctcaatacttatccaaatatagtacaactatataggtaggtcaacaaggcactgactaaattaagaacacctacaaaagtctagctagtttcacacatctccctattttatttaataataaaatgaaacgaaaatattagaccatcctacactatcctaccagtgagtacatttaatttaaactaaatcataattacgaaatgccaattcactagaagagtaacatggccctaggtctcatatgactaaacactaagccctagatggaccgtcacagtttccacaggtaaaataggtttacaaccagcttttatgatatatcattggatttagcaaacactttttcttgaaataatatatataaattcattaaaaaccaacattaattattcatcttctgaatcttaatttgttacataaaatatagaaaatccacaaggtagataaaggtataacacgaattaagctcacttaccatgcttttaaatcgatagcagaaagctccataaccatgactgatccattcttcaatatgtagctagctagcttctctcctacaacaggttacttaaagagacagaaagaaaaaacaaataaaaaaaaaaactcacaagttgatgaatgatgatacattattaaacacatgcagtttaaaacctaaattagaaaataaaataacattcacgaggggaaaaatgaaaaagacttaaaatgatcaaaacaagctctacctagctatagctactactgcttacaagatcaaaacgatcaaccataacatttttcaaaatgaccaaaaaaaggaaaaaagtcggcataaaactcttctctaacttatataatattatctaattctcatacgagggatcaataaggaggaggtggccgagcaggaggaccccagaacatgtcatggggcacctgaccattattaggcatcaaatttggtggcaaattgaacattggaaccgaaggatgttgctgctgctgatgatgatcatgaccacccatagcctgagtagtactaggattactgctgctacttccaggatttactccagcttgctgctgctgctgttgttccactagttgagtcccttccccaccgcctgcagcggctggggcctcctcctcctgctcgagtggcaaccgctcaaatgtagcattcataaaggttgcaccaatgacaatcacaggcccagacgccaccaaagctccggtgaccgtcccaccaaccacctgcccctgcccgccagccaaataaacggtcaaaccggttgcaccaggtggagaagggctaggcaggaatgccccggatagcgatagaatctcgaacctcccttgcagcgtgatgacaccccctggagcagccggctgccggagtgtgacgttggtgacaatgccgctgccgctcaagacagaaaccccacggtgtctcctttgagcaaaagtggctatgctctcaactatgtcacttccgctactgatttccaaaacgtggcttctaagagcgtttgggctctcctttgtgatcactaccggaggcttaggcttgttcttggaacccgggggtctgccacgtggcctgcgattgctgcttcctcctcctcctccacttccacttggctcgaagctttcgtgaccggctgagttggggtcgtcgccgctgtcgtcgtcttcgaggttttgatggtgatgactctgcttttgggggctgatgttcttggtaggaggagttgttgttatggtaagattgttgtcatttatgaactcttgctctcttcttggaccgagtttgttggcatcttcatctgtgtttcttagctgaagcgatggaggtgaagacatagaatcgactcctctcatggccacattacctgcccaccatcgattcgtcatattgctctgaaactcgttagcttaagggaaagaaagaggaaatgaaagatgaaaaacaaattcaaagtacttcatttggttatccctttctctaccttcttgttattcttttgtcttttggactctttctctctctctctctccctaaagaatttttagtgacgaataatgacaaaaatagaatagctagctaattaaagatggtagcttgtatgcaccaaacaaggaataataatgatacagattttccctctctagcaagctctctctacgtttcttttcattctatcttcttgtttcttttgtttcgcttgatgttaataaataattgagatgccaaataagaactcccccaaatctaccatatataataaatccaaaaaatcttatcttttttcaactcttttcttttcatcaacccaaactcagcaagaaagcgatcgagaatatattgttattatgacagaatcggacatttaaaacatgggttaccttgttttttcatcaaaaccctaatcctctttcccaaaacccaaatactcagatcaagtaccaaaacccctgtaaacccataagaaaaataaaaacccagttatctagacactattccgaagctccaaccactttctatgtgcttcttttttcttccttagctatgaagacttaaactattatacgacatacgtgcccctaaacagtaataaaaagagaggaagtacagtagagcaatatgcaaaatcggctggtcagtacgggcgaatcagaagaaacaaaaacagagcaaaacggagcagcgtcttcagttatctgaggctgcaacagcaggggcccctccaaggccagttttcggaacctccgcgctttaccagacctgcggttaagtgtgaagcgtacgttaagggacccagtaattctaccctggcgcatgataagaagggcctgtacaattttaataaaagaaaacccaacgatgtaatatagatttaaatttttactctgtaaaatcctctttttttttttcttttctctctgtgtaaaaaagaaaacactaaaaaggtggttttgcagaagcctggtttacttttgtctgcctctgttgaacggttttaggttgtactacttttcaagttccgagcaagcaagttggaacgagctgttctatcctacactccttcccatcatatttgtgttgtacacttctagacaaatgctaaaaacaatggttgagtgtttataattttgggtataaatatgttactttaatttttaatggtaataatatcggagttattattttgaaatttttacaggtacttagttattaaggattaagtaaattgttacgtgacaattattaattagtttaaatcattaaatttctattttcttaaaaaaaattaatttaaatatactaagagcacctccaaagaggcagtaaaaattcaaaaatggagtagttaatgctccaaggaggcaccatcatccactgcaaaatgaagatatatctacagtgcacggcttatatgccgtgcactgtagccactgctatttttttttttttttattattttttaattaattaattaatatttatatatatttatattattatatttgta

SEQ ID NO: 218885 - DNA, 1352 bp, Cannabis indica
actttgatatattaaattaattaaaataataagaatttgatttaatattactacaaataaatattctaacaagttaaagattagttattatacaaaacaagacaatatgatcattaaaatattaaggaaatggtttgtcaaaaaaaaaaaaggaaatggaatggactcaacttgccttattttgtataatttaatgatattgtggtttttgattgaggaacatgaagaaattgttacatattagaaaataaatatttggtgctgtttttagtgaatgacattctctattcaaaaaaaataaacaacaagtagtttcgttaagtaaaagcaaaatttgacaaaatcattaaacaaaaaacgacatgaagtacatttataagtttccacaagaaacgacattaattggttacatgcataattatatatatatatatactaaatatattcttttgcatatacaataacatatatgtatattattataataacacaggtgagagtgccatcatggactgatcgaattttgttcaagatagaagatatgaatcatgatatggatgcaactttgcactcttacgaatcaatggacgatatatacggctctgatcacaaacctgtcaaagctcacctctgcttaagaagaagatcataaatacataataactatatacattcttataacccaccacaccaatatatatatttacttatttaattacaatatcatctcttaattcattaaatatttttttttataagggtgtgtttggaaagccataatgtaattggatttgtgtgtaattggaagtattatacaatttggcatgtttgtttgaccatgtaattacactgtaattagaagtaaatgtaattacactgtgtaattacatccaattctcatgggggccataatatttgtgtgtaattacctccaattacacacaaatcaattacatagtggctttttaaacgtagtaattattctacttagtaattacacaattacttccaaacacaccctaaaaaaattaatattagatgagtacttgtttgccgataatttgtagctgagatcgacttgaaatttcaacgtatccaattatcgtgtgtgtggacatgaagactttaatttataattaattgaaaaagaaaacattaatttccgtttggttttattaggcttttgtattatatatgtacatattatgtaaatatgatcattcacctaatatataaaagccatccttgttgacgtttgaccataccttcccaccaatgtctttaattccatttttggaagaattaaaccggttttgttcaatcatgatttattattaatatgagtattgtat

SEQ ID NO: 218886 - DNA, 4158 bp, Cannabis indica
tctcgatctaggtctgggtccaggtcccaagggatttgagtctggggtctgagtcttgaattaaatttttatttttaaataaattgaaattgagtcagatccaattcgatccagaaaaaaattaggcgagtggagcggatctgatccaagattcaataagtatgtgaatgtttcggatcagaggtgattcgtcggatcggagctccaacccgctccaacgaaatggatctttttgacatgcctaatagtaaaatgtttatcctggtgtatttttataatttttcaaatttctaatggtgaatttgttcatattaaatcataaagagacatgtagatagagttacatacgtgaaacactgttctaatttttaatgcttcacaacagttgcataaacattttgctaacatgtatttcgtctgattgaaaccttcgtctgatgcaactttcggccaaccacccagaaactttcgtctgattgaaaccttcgtccgatacaaccttcgaccaaccactcagcaaccaccctgcaaccattgtctgattgaaaccttcgtctaatgcaaccaccgtgcaaccacgcatcaatcaccctgcaagcattgtctgattgtataagtgatagtgtaagtggtattttggtaattaaaattacataaaaatgtataaatgttatccttaccttatggaagtatttttgtaaataaaatgtcaatatatattttatatgtaataatttcaatacaaaattaaaatgtgatttcttaatattctaatatttttttttgaacaaaaatattctaatatatattttggatgagaatgtattacatcaccgcatgtcccaattgacaatgttgaccaaaataatatagagcaacaatattcccttaacgattctccaaattgtaattaaatctaattaatgacctctaattacataagcaaacttgtcttattataatatatatatatattgaaatgaataatattaaaagaaaatgaataatttgatcatagcaggaagacatcattgtcatccaataatacatcattagagtgctcaactagacttcagatgctaattaaagaaaggtacttatcttctttaattaattttctctttaattttttaaataaataattaattatatatatgtaaagctatatatccaaggtgttccccacagccttttgttctcaaacaattaaatttatatgttttataattttttattattaatttttgtttgctggatttattaaagacaagttcacttatcttattaataagctagctagatctccatttatgatatcaaggttacaaaaacagctgtttaattagttgtaatttatcacaaggataccaaaagttgtcttaatatatagtcagggagcaaataattttgttttgtttgtgtacgcattccactggctttacaattattaattttaattaatacttgagtcgatggaataatttttagtcattgaatccaagtagcaagtttagatcatttggccgggagatataattttttttttaaggtaaatggtaattttatttaaatagaaacttcaaccattacaatagaaagaaaattagcaggagcagtactctcgctaaaaatatgatttggatataaataagaattacgagcaagacagtgtgcaactttatttacagaacgtttaacaaaattaatattgactaaaggtaaagaggccaacaatgaacgacaagcagtcacatgttggccaaaaggagaaggtatgttcaccgagagcctcggattgcctgaacaaactaaagaatcagtctcaacctgaaccgaaccccattgtttgcacttatccaactcaaagcctccttgcccccactacctctgccatagttgggtccacacgccccaccaataaaacagtgaagccttcaacaagtcaaccatgatggtctcgagccacaccagccgctctatattttttgtcatttgcaaagattacgccatcgatatttaccttaatcgttcccataatcggtttcacccaatgctccaagttcgtatttgaatccgaaggaacaaataaagaccccattctcctttgttgagcattttttcattgattaaggactactcttgccaatagaataacctcatcagctgacatagattttccctgccaaaccaactcatttcgggcatgccaaattgcccaaataaccatcaccaactcttcttaagccgtggttgagtgctacagcaacatctggctaaaccagtcccaaaacgccactgtagacccattgccaatgcttgatatcgattgctaccagcaagaatttgcaaaggggcaatgaactaaaagatgtataacggtctcaggcatttggttacacataggacatatttggtcaagagggatatgcttggtagtgagttgaacttttgtagccaaacaaccagtcaaagcacgccacataagttggtgcacttttggagggacatgtaacttccaagtaattttccaaatcttcatctcaaagtcactagtattagtgacatcggcttggtgcatcaatctataagctttcttcatagtataagcaccatgaagatccaagtgccaataccaagtatcaatactagcctcctgactaatatttattttcaatattagctccttatccctatcattaaaaatgtcagcaactatttccaagtcccactctctttcgcccaacaccatgacgttgttaaccttccaattctccataccagcaacagtagttgtaatccacgaattagagacatcttcaagccaagggtccaactaaacgctaatattcgtacctgggccaactagccgtctagcacctttcttgatcaagtcttgtgtttcaagaatgcttttctaaataaagctaggatttgggccaatagaagcagtcaaaaacatacggtgggaatagtattgggctctataaacccgactaacaagagaagattcattcgttactaacctccaggcttgtttccctaacatggctaaattgaaatcccttaagtgacgaaaaccaatcactccatgatgcttatgatgacacaaattcttccaactagaccaactcactccacacttttaattgagagatataaaagttaaactatatatttagcacaaaagatgatttgttatatttttacttccacttttattgttgtgattcattatataattgtaaaatataaaatttaacatttaacattttatttaatgcatgctcacttaatatttttttaaaaaaggctaattaggttttttgtcccttgaactttgacatgtattaaatcatgcctcctgaacttttacggtcgttaaaaatgctccctgaactatggagattgttggatttaaggtacttttttttttttttaattttagtaaaaaaatctaacatggataaaagttaagggggcatgatttagtacatgttaaagttcgaaaggcatgatttggtagatatcaaaatctgaggagtatggtttagcacacaaacaatcattgaaatagtaaaattaaatgaaattagacaaaaattcttaaatctaacaatctcaatagttcaggggtatttttaacgatcttaaaaattcaggggcatgatttggtacaaggggcaaaaatcttaactagcattttaaaaatataaaataataataataataataataataataataataataatgcaaagataaataaaaaagtagtaataataataatgaaaatatttaatgttaattaaaatttaataataaaatattatactggtacaaatataaaagcataacatttattgtgatgtaaattttacatcatgaaatgttgtgatctaaatttagattattttttgttatgtgacatatttgcatcacaatttggcacaccattagaatagacttttggagacgctcttagagtacataaaattttgtcgagaaatacaattttaaaaagcatgttgtcaaggatcgtcgaacaccatctatctttatatacttggtattggtatgatattgttcactttaagcatgagaaatgaaacttcaattgaatgattaactagtcacctgtaaagggaaatttgattttct

SEQ ID NO: 218887 - DNA, 6077 bp, Cannabis indica
tatatatttcttaagtgttttataaaccctaacataatttggtttcgcatgtaatattttgtcttatttcattaatgataattgttattgggatactgataagcttagtgcctttttgatgataatattgttaatgctattctcagtgttcctattggtgactcttctagtgatgactgtctcataccatccttcgggtaatgtcactatttaaatttgcttattatttagctaagtctttctattttcctccttcttcggatgcttctcatattaataacttctggaaagttctttggaattttaaattttctcttaaaattaaacatttttttgaacaagaggaaaaatttattcaaaaaacaaatcaattacaaaaatggttgagtaaaaaaccacagcacaaaacgagcagttgaacctgcaacaagcagcagcaggcatgaacagactaccgattcgtaattacttcaagtaaatacatgttctttttacaatctttaaaggaaccttactcaacattcttaggtgaataacattcctcacttcatgacttagacttctagtagaagcacaagccattttgaagatgcaatagttcctgttcttctagatctggtaaaaagttgcagcaaccacaacattaatcacccgattttggagatcatgaggcttggttttgagcctgttatgcagatcagtgactgaagttggccaagccaagaatttatgatttcgaacacttgcttagtgtagatgcaattaaagaaaacatgaacatgcgattcctccattgaatcacacacaaggcaatcgccattctgtaaaggtataaccctacacaaattgtcacgagttggcagctgggagttggcaattttccgataagcatttcgtttggaagactttccatcatattttaccttgttccctaaatctttttaagaaaaatgttttgcaaagtcctctttgttctcctcgtgctaatagaacaaaatccgtgtcacataccttttagagtgtaccagagctaaaaatatttcgagggatagtgttttttgagaattctatgctagaaataaaagatgtgatattgaagagtatttgttaagagattttgaaaacttgaacaaaaataatttggggctattttttggtattctctagggatatttggaataaacaaattatgtcctatttaaaaatggcaagtacactcagtctaatgtcaatttgtaagtctcttcatttttgcacgattatccaaaagcccttaaaatagaaaatattaaaggttgttataacaatgatttagctaattcaagtgaagtaatggaaaataactctaatttaatggaagcttttccgagtcagggttccttcaaacttagtgtaaatacagctctagatgaaaagaggagaaatattggtgtgggagttatggttaaggctagctcatatagggaaagtagttgttgcagatttatcttcatcctttcatgccaaatattcccctttgtttgctgaagctgaggctgatgtgttatagagttgcctttggcttttgagtgatagtaaggtccttgttcataaaagtaggaatagatggagtcttctgttgcatattattatggactgtaatatattataggacagtattaggacagaatggagaggttctttgaaatggttgtatttaaaagaatacataattctaacccctactggctactgctcggtgattttattgaagttactgtatgttttttacaaaaaaaaaaaattggctggatgcgagaccaagccctactagaatattccaagactactgaaaccaaaagaggaaattttttatgcatatatttgtagtaattatcattgttattgtggacaatgtggctctggaacgtcactgtcaataataacatattcttgaataatgtgatagcttatttatggggagaaaacaataataattcttatatgattaatatgagtcttaaatagtattaattgggatacgttgcttgcttttggaatgactaaaacttaacatgggaatggatgtagaagtttggaaaccgatacatctaggatacagataaacctaggattacacacaaataacatctgtctaacattgaacaatgcatctaccaataatatacgtcttcgtatatttgactcaaaaacaaaaatataataaatcgcatctaccataatatacgtattcgtctatttgactcaaagcaaaattattattaatacaattaacgaactaatcttagattgcttaaagaacattttgtgtcaaattagtgatagattgtttttatattttattatttttttaaaaaaattcaacaactttttttaaaccaaaaaacaactacaccattctaacgctgcaaagattttttctccccctctccaactgggcatcactagcccatttttgggcttgacttgaggccatggtctggggggtaggtttgctttcatcttgagtctgggtagaatggtttctttgtaggttctccttcgtctcggtgttatgtgccaggattcagtttctctttggatggttcgagttgtggtttagaaggtgggtggttgctgggagccttgtcgggttctgttagtggtttggtctgctcgttaaggggtttttccatcggtggatgttctcagatctgactttttctcaatggtgcggtgggggcttctccaggtttgacggtggtggtggatcttgggttcgtgtctatggctggaacatttagggccatgggttgctctcaaggttctctcgaactctaactaaagagtgtgttgtcgtgttcggtgagggagtgggcgtggaggaagattctttggtgattaggtccattgcatttcgttctcatgtttgttttgttttacgtttcattgttatttgtttcattttaataacggtgggctttcacccttgtttcatctctagttctttttggatttggttgcacaggttatttcgggatctatctcggtgttgtttgacacctttttttatgattcttcaatgtttaatatcaaaaattttaaacatggtttatcatattcttctcctttattctgttttgaataaatgaggtgtttctactaatttttattggaagatctttaataattgattgtcattaataaatgcaatttgacacatgttcctcaagttggaagtctagtttcattcacaatgttttgatgctttattgttagcagcttatggatcatttagttgaaggtgttgttaggattttcgtcatttctaatgtaaatagcttgattagcttaattttgttaatttcgttcggggtgcagtattttcatgtaatggactatgtcaggtttacctattaatggaatttctatttaccttttaaaaaaaacaaatataccaagcttagccaatcagctaaaaacacagaaacaacactaggtgaaaaatatgaaaacaaacataatcaccctttggtttggaggaatgaaaacatatgattaggaatgagaataaaaataaaatcgaatataatttataatgtaaaaaaattgataaaaaaatgagatgctttattatgacagaccagtgaaacacacgaagacaattatcataataactttagttttattatgatatatatattttgtatgactataaatgtcatgtttatttactttcatgcgatttttattatttatttattttatgttatcttttttctcaacaactagatggagttgttgtttaaattttatttttatggattgagcattgactgcatccctttgatgctcttagcaacagtgttacttggtctactatataattctttttgtctcataatgaaattgtgacttttataaaaaaaaatatatatatatttaatattacatgtgttatcctaatttttatccacatgacatggtaataggtgaaccaagtcatcaagcacaacttaccaattgacagagggatagaatgctcaaacaaaacgaggacacaataaactagacaactaggagggtcttgccggaccacccttgcccaacaaaggaagatgatgtgtcggccacccctatacaaagggtggatcgaccagattcagcaatgatagccagaaagtagcccaaataattagtgttgtagccttcaccctgtatgcaccatgactcattctcagctatgaagccactacaacaacccacgaaaataggggttcaacttcaaatatctacctatcttttggaacaattaagtggttatttttgtatacttaaatatctaaaaaagaggtaatatctccttattttaagggatattagtctattttgaactagatcttttgtaagctctaacctatataaacatcattaggccaaaccaaaaacctaagttccaagtcctgagttctgagttctaactctcgaaaccgtagctctctttctctcccacacgccatttgcactatacaagaaaccaagactatttttcatctcagtcatttgagatctgccttacattgctctcactattgtaatattcatagagagcaacactagaaattataagggaaaagcaagttttctgtgtggtattgctctcaaattaatacaactaaaaaggagtaggccattactcgctaatcaagggagcccaacctttataaattgatgtgtctatttatttacttacttttattgttcacacatggtgattctaatcatacataaggctccgctgttagttgaccaaatttgaggtcaatattttggttcttttcattaagaacgttatttatcagttcaatcaatcatcatggatgtaacaaggagaactctggctacaacttctactcctttgcgtcttcctcaagaccccattactgttgatcctaatgttcgtgttccagccaccactgaatttccccaaaccaaacagatgtagccaacccagttaatttgacaagcccaacaaacttgcgaccaacacaactagtcctgtcgactttgctaacccggttgatcctaatgaacgaccattaccacccagagtagatccacaactggcacctctaatagaaggttttctcaatgtggaacagccccacgcaccacaactgactctgttcccaggtactatgcaagggaaataaggccaagaatcggtaaaccaactattggtgagcctcatgtagacctaggagaagacattgaatttgccaggcttagagagatcgtaggccgagtcgaccaaactgaagaatcacacgttgttggttgcgattcttttgcccagagacgtgaattcttgaggtagatggatgaacaggagccaatcctctaggcccatcaggcggacttggacaaccgtaatagggaagctagtaacctaataaggaggttcaatgagagaactaccgggagaggacaagatttgattagagatcctctgtaatgaaggctcatcgataaattgggcagagtctacagccaagtagacaacgggctaacagtccaaccaagttcatcgagagcaaggacagacttccccctgcctaaagatataaaattctaccgaacgaatcttatggttggaatagccagtcgctgggaccttgtggtataggggcccagccagatattgctagcttaataacaacaccattcggccagcctctggccgcccaacaaaatgatattcctctctgaaatatttaagagcaagtcgttctaaggcctatctttgacaggcccagcctgggaacaagtggatcacccaaaacaacatcaactcaaggagtgagaattgaagtgactttgttctaccaccgaacaataacttcagacagttagatccatcaaacccgagcaatcggtgtgattaaccccctttaaacacacggggcacatcggccaattaggggtgaacaatcggcaagaacggacccaacatagagttggctgaccatagccaattgcctaaattagggctagtcggccatggctatagttacctgatctagggttggctatccatg

SEQ ID NO: 218888 - DNA, 4945 bp, Cannabis indica
ttagtgattgagtgtatgcccacccgtagcaagttagtcctcaatcatagtgtgtaagactgtaaagaattcaaacaactgaaggagtgtcgggctcagatcttggtgatactgtgctatagaaaggatacaagggttagagatctgagcggaaggagtcatttaattttgcggcgaccaatgtaaggtttctcataccttttatgtgtttattttatatcgttttagaagttcatgtttaggatgttaaaaacatacttgttagtaaatctaggtcgtggtaaaatatattcccaagacatctatcatacactggatgtatttcttcaagctttctccttatttttgcttgacgcttgtcaaggagctagcttctaagtcataaggcttggctactataaactgtttctagaacatcacctgtagatctttccagttatggatcaatcccgtagataatctcttccaccagtccttcacgaacttgctcaatgttaataaaaaacacatacacttaacatcatcactttccttggcaacctacatgatgcaattgtaattggacagaaggtccctggggtctatccgtccctcatacagttccatttggggcatcctaaaatgctctggcagtggtgcatcaataattcttttcacacaagccttcgtgtcctcttcctcagaatcagatgcgacaccactttgcctcgtagagatcttctcagtgatatttcttcatcaagtcctcaactttacgctcgagacattgagttttattactagaagattctcttatgcaaacacgatcgttgatgtggttcctcaaatcatttttacggggtcttgcttgtcgaccttagccttttccttttttgcatctagctttcttcgaagatcattggtcaatagacttccgccactgtcctcggatacctgatacacttcttcaacctcttcatcatggtaactggactcactaagaggaggcgtcttctttcaagactttggcttctaggttccagcatctgccttgtccttttacatgaccctgcctctaaaattgggttggtctccacgccctaaagcgcagtttttgttcctcttttatagaggttggtcagcagctttagacttcttaggtcgttgcgtggaaggagtcttttttggctcctcgataacgacccttgcctttatctttatgtacacccaaagttccaggttccttcaggtctaccttcttaggttcattcatcgttggtggagctaccacgtcgagagtcgtcttagtcaacgtagtcattacagcctccattctagtcatctttccaagaaatatctggttgaattgatcttgttgagataacctttgtttgatcagttttagctgtcgcgccattatgaccacaggatccaactcgtcaggctagctttttcctccagtagcagtctcgggggctctatcttgtgggacgtcttcctgcctattctctggcataccatcattgtttacatccacatcctcggaactactatcctctatgttgtccataataggagcatcatcatccagtcttcattctgacgaccctactggtgactggtgacttctggaggatcactcgtatctcttgttctagtgtcagggactgcgtaacaaaggccagactaggttctggtgagggccataacttcgtgaacgtaactagtgagtggtccatactgcttccttcagctctcaatgaaagcaccaaaaggtttcccgacaagattggaagaagaagaaaaaaaataagaactaaagaaataataactgacagagaaagtataataaggaacacataggtttttacgtggttggggtattaacgagtcttagtccacaagtcacttctattcagtaatgtattgctgacaataatctcccaagtacacagagtgtatattcgtacattcgcctgggcaaaagtacgtaagagaattcaacccctaatccatgaaattagttaggtatttatagtggctaaagaattacattaggattttcccttttccctttattggagagttttacaactgaacaatgtccatgggctcactcatgatgtccagcccatgaaggatacgatttgctgactaagcgaatcgggcttgagttgatcaggtcaaaactgtatccgattataatgggagaatattctgaaataactgtcatgtgcttgttatgggaagtttcctctttaatcgcgatgtgatattatttcccaatctgacaactcttatgtccttatttataggaggaaacaaatagaaaaataggaaaagtctttcgggaatgatctatcttcccccttcggcttcatgactccaaaattgtcttatggactcgatttgtagaaggcaaaaggtatcttaagcacgaaactaaggtaactctcgaaaggacacgtctggatgggcttgacccactttgccattaatgagtgtaccactaatgggtatgaaaagctgatatggaattcacgtgtcccattccggaaacacggatgatatattttataatagtgaacaataaattaataacacatgcaataataataaaaaaataaaaagatgattatataaaattgaataaaaaaaattcaaaaaaaatacataatttaaaaaagtatctgaatagtctcatgtaatttgataatttgatagtgtatgatacctttagaaaattatgaggtgcttcaaatatactaaatgatcaaattgctacccttataaggacatgatttattttattttatttatttttaatttaacttttaaattaatttaataatttaattttgttttaaaaaaataaaatatatggaacagttcttatacaataaaaatctaaagtttaaaattatcatggtgggaagtcttacatttttcattgttaatatacattgatagttgtattacataaaatataatagtgaacaataaattaataaatgctttaataaataatatcaaaatgaaaagttattgctctttgtcaaagaaaaatatgcataacaaatagatgaaaaaatttacactagaaaagatcagaatgatctcgattaccgttgatctcatctaaatttgatctcaacttaacggcgagttgtcatctggtcaataggagacaacaacctgatagagaaactttttggatacttgttatattgaaggattgatatatgctttaccaatatatatattttaataaggtaaatggttcaacgagtagttgtttctttagttcccacaaccccttgacgatgacattcttaatctaggccgactaaattagttcaggatcccacaaaactcggtctttattatttgttttaatgcaagattaattttaattaattaaacaattttaaatctatgtgataatatattaattgatcttgttattatatatgaagtattttttttctcaaatcttgcaattgttgtgagcaataacataaaatgtaatgaatattaaaaactaaccaattcaaattaagatgtgaaaaaaataataaatattaagagcatctccaagtagtacactaaatttagtgtcacactatcaccaaatttagtgttaaaaattattttcactccaaccataacacaaaaattacactaaaaaatatttcatattattatattatttttaataatattaaaaaattaatattatattaatttaataaaatcaccacaattaaagataataatactgtaaaattggtaaaacttaataatgtctcacaagattatagtccatgattatatcggtggatcaagaaatgatattccacattattgaattgttgatcacattttaaatttttgtaactttattttcgacgtgttaaatttttctgaatttgtcaaatttttcaggatatcttaaataactataatgtacacaaccataaaaaaaataaaaagtctctcgaatgctaaaacaggtaggagaacatcagtgcaccacttttaaagaggtgcactgaaaaattatttttattaccataaaaataatttatggtattcacatttaaattacacacaataaattaaaatgtccttctataatgcaccttttaaataaaagagttatgcgcgcaacagataatttgaaccttatttaggcattttaaatttatctgaatttttgaaattttacaggatgtcttaaataactataatgtacactacaatggtacaaaaataaactaaacaaatctctcaaataccgaaacaagtaagcgtacatcagtgcattattattaaggatgtgcattgtaatttcataaatacaattaatataacatatataaatattaattaaatgtatataaaaaaaaaatatgccgtgtgtacagtgcacaacatatatgacgtgcaatgtagcacacacgataatttgatgttgaatttatagttacattggagacatattcacacgccatcactaaatttagtggctccttggtgatgctctaagtaattcaatattaaaaactaaccaattcaaaataattgatctaatatgtacttttgtagattggattttagttattatttggattggattgaattcaaaatataaaattcgcacttagtacagatcaaatgcactatgaacaaaatattacaaaatgaattggattagcactgttattgagaatgataaagatgaaataaaaaactcttcaaaaaaataaacaaaattaataaaatataggcaaaaaataaatggaataaaattatcaaatgaatgtatcaaggactgaactcatgtcacttaataagagataggataacttattaccaaatatgctagaataactttgttatgtaaattgattcttattgatttatattttgttgggtatgaaatataaatataaatatatatgta

SEQ ID NO: 218889 - DNA, 5273 bp, Cannabis indica
tcatgtttcataaaaagaatgcaaaagaaagagtagaaatatatgtttacaatacaattttttcgttcaaaaatattggttcacagaagaagttggcttaaagtaaactatattatttttggatcaatgcaggagtttctggcattgccaagggctgatgctattcatcttcttgctcagtacaatgggaacgctgagatggtcattcagcaaatttttgcatagcttgaatcgtaccactaaaaatgtacccaatggcgtgctttgtatattaatcattattacattatctctttccctctcttgttgtgataaatttatttgttgattcaatttagcttcagtacagagcccggttgaaagggtaagcatgcaaaatacagtatactagtacagtagaatcagctgacacttgtattctagtttgtacaatatcataaggtttttccttgcccatataatcaaatcaacggaataaaaagaaattgttttattgattctgaattttttccatttaacttaattatcctgatatttctttgggtatgcatgatctaattcctgtcgcaccatgacttcattgaacttattttttagaatctctagtctataggtagagttgccattatcatgtgacactaatcaatctaaaggcaataatctcattttgttttgtcgtgactttctagttaattgtcattggattaatcaaatattcatcattgcttacatgatttacacttttagagatgtttcgaatttttacgatagccatggtactattacagtggatgaagagtgactttattagttttctgtagtgtaggtttgcaatttattttagtgttttgactttttcttttggacactattttagtgttttattgtaattttttttcaatactcattttaaacatctaaaaacatacataaaaaatttcttaaaaataaagctttaggcattgaacatgttggtgcttcgagaggccgactccttcgccattgatagtctatgcaacattagtccatgaatgttacgaactctcgcttcggttatgtacagttccatcatcatgtaggatttgaagctattggtattttgatctatctcccagatggagtcattgtaaataataggcgcagaaagtgaagcttaggtctttccttttgcccctgatcctctctgcttccgcggttggggcatcctcaaggataacctcaaggatggggtcatgttgaaactgcagatgtcattgtttgtgcatcctcaatattgcccgccttaaggttgaacttgtcatttgaattagtcactggaaaataaaaagaaatgagaaacctagcaattaaaatacttaatatcataaggaccgtgcgagtattggggaaagcctcccctaaaattgcttggagaggtctccactggactcatcactcgaaaagcttcatcctcgcaaaatgatacctcaaagtgactaggaacctaaagaaaaatgaatagaacaagcccatttagagccctaacaactccagatgggcagaccgaggcgaaattaacccaaagtttcacaaaaatttcccactcaagctcagttcatattctatcaccaattttccagaaacatgcaaatacgctcatgattcaacattatccactctaatcgattcactaccatacaccatcctaaattttttctctaggcagtcgcatgcgagggaattcagagtaaagctcaaaaatacaattttatcctagcataaaatcaagaatattgaccagttttgaaattcatacttgtgatacgactcagaagaggagaatgatcgttgatggtgattcaaaaaccttttgcccagtcgataatgcgatcaaagactacttctgcaatgaaccctttgtctggctgggggtgaatggtgtcaaggtcaagaggcaatgtgggaaatgtcgtgtcctgattcgtagcaagaaatttatgagagtgtcaaagctttcgcgcattcactggtaatggtttaagaaactttaaagttactcggtctgggctttggctctagttcgaggatgttgagaatgaagaaattttgaaaacgtgagatggtaaaaagaggaagatggcttatttcgtgtctatctataatcgagatcaatccacacaatttgaaaattgacgacccaaatctcattctcaaaggactcaaagcaatctaacggttaaggaagtgaaaagatggcatttaatttccctcgcctcgatcaaagcactcgcttttcatcattacatgcctcgagcgcagtgtgcattaaagagttatcacgtcaatgaccctaatgccagtagggttttccatggaaaacacgctctcagcaaacgcgtattgtctacatactcattaaagaaactagacgcgtaaactgcaagttataccctgtagagaatttttcgaccttttagttgcttaaggccagatagaaaggatacttcgatattctcaaatgtccctatgtgtcacattatatttcaatggttcgaaaaaaggttgcaagcttctgccactcaagattcacaaaagcttgggggtaaatgttatttgtgttttcgaatagaggaacgtgtcataaaagtgagtagtatcgatttaaaggatcactaattaagtctccttaattagtcagggtttgcagagaagctatacaaaaaccgggaacagattgagcctaagggctgcacaaagacttgtcccgcaacatattgccattcgagacccagaagccttactgtctctctagaactcgaagaaagtcaagctccacatgtgtccctccgacacctggaaggcacccgaagagtccaacacggacactaactgcctaaaagaagtcagacgtctaatgtgaagagagacccaaatcgtcccagccacagttattcctttttctgacataggatcagatcttgtcccctgcgttagaccatggtagtgcgcacaccccaccttttcgcttgatggtttgtctaggcgtcttcttttcaaggtaaaaaattttgttgacacgtgtcatgtgccaacaatagtccccattgtccaactgcctttccacatgagcaaaaaccttctgggtagtcaattctttacaagtattttaccccaatagtagacttattggaaaaatccaagcatgtcatgggcatgtctatacccgcaccttagcctataaatatctcttcattttccttcaaatgggagagcgaaagatagatagccaaagctctgttgaatttcctctaagctttcttcttctaggtagagttagggtattcttgtaactattactataaaatatcatataagtctttcaaggtcaatatactcatcactcgtgaactagggtttattaacgattaaatcacataaaaaattttgtcttctttattattgctttatttatttcttaagatcttgtttagttagtttctgaaaatttcggtaaataataataacaatttataaccaatatccttaaataaataaaataaaacacaaaagaattagtagctccggttatatgtctgttggcttttttagtttaatatttattttctagcataatcattttagaatcttcttcgatatgattcataattaacttaaactcgcctcaattagattaaaaataaaaatatataaaatacgaaaccttaaaacactactaatgctttctaaataaacggatctcgtcctaaaacactttgaaaagcctttgtagaaatcaggcatttatttctctggtcaaaaatattccccaaccgtacaaaataataataataaaaaaaacaatgaaattagtataatttcagataagaacaaatcatatatttaatgaatatgcacaccacgttaccatataataagtataatgctttccatatatgcacgtgtcttggagtacgtatacatatattcatataaaaaccatgcagatgaagctttttcccccaaataagaatgaactcttaaccaagtactattataactgcatgtctatactataccacatatctttctaatctctcttctcaattaattattttctcaaccaagtattaattaagccaagtagttcctctctgttgtctgatcatataatgatactttaattaatatataatttccttttctaacatatattcctcctagctatatacgtatatcacttgatcgaactgactaatatatattcataaataaataaacaaattaaaagagaaaaaggtagaagaatgaaaataccagtcggtagtaatgatcatgatcatcatgatgatcgtgattataagaagaaaggagtattattagatcaaataagagaaaataacaatagtgatgaagaagatgataggaataggatgatgatgaggataaatatggagggcgggcaacaagtagtattagaaaggatgatccacccagtgattttaccaccattcttttcaagtggtgagaaacttaagcacaaattgtttgagatattcttcccggatgatcctcttttcagtttcaaaaaccttacagttcgggagaaactgtacagagctattcggagcttcttctatatcttacaatggttgcctaattacaatttcatcctctttagatctgatctcattgctggcatcaccctttctagtttggccatcccacaggtacctacttattaattacttatataataaattgtgtttaattaatttattatattaattctttgatgatcattattattattattatttcagggtattaactatgctaaactagcgaaattgcctccaatagttgggctatgtgagttgagatcattatttttaatttaaacattttcttctcttcttaattatcatttcttaattagtagtttttgtgtgttgatgatgatgattagattcaagctttgtgccaccggtgatatattcgattctagggagttcaagacatttagcggtaggtccaacgtcgacggcaacattggtgatggggacaatgataagccaaatggttagtgaaccacatctccatctcagacttgcattcaccgctaccttttttgctggcttgtttcaagcttctttcggccttttttaggtaataatattatatttaaaaatttgtattttggtaaaataagataaatgtattttttttaatatataatatatatatatatatatattttttgaaacttgaaaataaaatattattaaaaaaaaaaa

SEQ ID NO: 218890 - DNA, 1204 bp, Cannabis indica
attttaatatccaaaaaaaaaaagataaactgaatttgtacggatgaaggaagtgctcaaagagccattttctgagtacggcaacagcgtgttcagggagtcctctttgggatcgccaagcagaacggggaaaatttgttaagttgtgaattgggttacgagctaggcctgttttagaagcccaaactaatctcgaaatgcgatcatctttaacagcattagtattattattattattattattggagtaatcaaagccagctgtactagcacgactactattacttgcgttgtttttggcattattggcagaggaggagttgatgagttggtccataatggaatttttcaaggaaccaaagtggtttgaaatggctctcgtagcagaagagacaaatggtgctgcgtttccaagcccagccactgtttcaaacgacctaaccactgattgtatctgttggcagtatagcttgcatctcttgtaaacctaattaacaaatagttatcattaataattattaatttatagagtgtcccatcagacatataatcatgagggacctatatctatatttatatccatagctagtggtagtggacaggagagcgtctcacatttcgataaccttctttaacaagtaatgttgttcatctcttcttcaagagaaacattaataataatggttttcataatacagataaaacaaatagatatgtataaaagtaaaaaaaaagtagaactgggaaatttaaaattgacaagacaatacatcttttttaatttctttttctgtagtagactactgcatcagatcaaatcaaataatctatacccgagatatggattccaaactgacactactgtaaccatcaaatcatcattatttttcttcaactaaaacaaatgaccatctccttgactatactaaactaggaaaaaaaaaatatacatattttcgacagtaaataaaatattaatattaaaacgaaaataataaaaaataaaccaaaaagctaagtcacgagaagatatacaagattattagggtttggaatgaagtgttatataagagtattcccctcaattatggaatataacaaaatgattttattttaataaaaatatgtacaaaaaattaaagaggctaaaatatcatcagactcatatttaggatcaactattgcgagagtaattgatagcaag

SEQ ID NO: 218891 - DNA, 4936 bp, Cannabis indica
ataatacaacttacacataaaaattttggtcgtaataatttatacattactttattcaagcatagtattatttattatttaatacaatacaacccttatacaacctaccaaacgagccctaagtgtataaaatcgaaaacattaagtatttatgctgtaaataattctaagaaaaatatggggaaataatttagggtaattaattatctttttatgctgtaaagagaaacacttatcactcttcaacaaggtgatgattccgttagttcatacttttcaaaacttgaatgtatgtgggatgaaattcaggaattaagaccacagattccttgtacttgtgctgcctctgttgataatttggctttcctaaattaagaacaggttctccaatttctcacagggttaaatgaatcttattttcctgttcgagcacaaatccttcttattgatttgtttccatctttgtccaaaattttctccatggttgtccatgaagaaagacaaagaaaactcaaaaatcctcaactcccacttctggcttctatccaagattccaatcaacaacttgctgttcttgctcagaatccatcagcttctgcaatatctaccgatcctcgtcccaataaaaagataaggccctattgctctaattgtcacaaaccaggtcatttaaaggaaaaatgctacttcttgattggctttcccctggttatggagacaagaagaaaactgaccaaccttcagtccataatgcctctacttctgtcgatcaatatggtgttcttgccaatcttacaaacaaaaagatatccaggccatcatttctctcctaacacagaagttgcagccaactcctactgctacatatgcatctaaacccttcgcatctcatatctctggtaaatattctaataaccacttatggattgttgatagtggtgcttcacaccacatatgttgtgatttttctctcttttctaatgtgcataagaataatatagccaatactattactcttccaaatggttccactattagagtacataactcatgtgacatccaactttcaaaggatcttttcatattcaatgtactctatgctcctaccttccaatttaatctttttagtatttctagcttcttcactaatatctctaacagtattcttttcaacactaattcttgcatattatagggtacacagaacaagaggattgggactgctaaacggattgacaacttatacttcttaatgcagtctgtcaattctcccagatcttcattttcttgtaatcaatacaataactcttgtaacagtgtccattcacgacactctagaattggacaccctttcatgtccataacgaaattgcttaataaataattacattttgaacatgttgatgtttccccatgttctatatgtcatttagctaaacaaagaagattaccctttcattctcaaaataacattgctaaatcttgttttgatttaatttatcttgacatatgggtccattccatgttcaaagcattgaaggttatagatattttttaactattgtggatgaccacaacagacatacttgggtttacatgttacaatcaaaatctaatgtgcaacatttaattccacagctctataaccatgccttcactcaattctctaaaaacataaaatctatcaggtgtgataatgcaaaggaacttaatatcaaatccttttatgttcaaaaaggcattcaagtgtataattcatgtgttgagagaccttaacaaaattcatttgttgagagaaaacatcaacacattttaaatgtggcccgagctttggcttttcaatcatctatagccttggcatattggccacatctgatacacaatgctaattatttgataaatcacacacctacccccttgttacaacatttaacaccctaccaattgctgcataataaatcaccagcatatggccatttaaggaattttggcttcctagcttatgcttcatccatagcaagcactagccacaaattctctccccgagcacacgcatgcatattcattggttatcccaatggcatgaaagcatacacacttctcgactttgccaccaataaaatttttcactctcgagatgttgtgttctatgagcagatttttcctttaaaagggtctctcaacactaagcttttggatctattacgtcctgctcaatgcaacaaaactccaacacaatctgtcaccacttccacatctgtatcaaaccctgttgatcctatacatcaaccatcattagcacctgctgtacctacaccaggaaaagcatctgttgaattcacaccagcaactgcatctgctgatttattaccaatataggcatctgctgatttcacaccagcacctgcctatgctgatccaataccagcaaatgcacctgctgttaatccaccaacacaagcccctgatgcaccttctaaagtactacaacaccattcaatcaccaaagcaggtcgaataacatctacacctgctcatctaaaagactacatttgtcagtcttcaactgatcatcccttggttagatacctcagttatgatagattgaatgttgcatttagaaatgccatattgcatgcatatactgagttcaaacctagtactttcaaataggcatctaaattcattcaatggtttaaagccatggcaagaaaaataaaacctggtctgttgtttcattaccaccaggtagccaaccaattggtaacaaatgggtctataaaataaagtataatgaacaaggtgaagttgaaagatacaaggcacgcctagttgctaaaagatattcacaacaatagggcattgattacactaaaacctttgccccttttgtaaaattcaatacccttaaacttttcttagctttgactgccatcaacaactggacacttcatcaaatggacatagataatgcctttttatatggggaccttcataaaaaagtctacatgacacttcccaaaggttatgttcatgagggggagctgcctcccaaccctgtttgtctcttacataagagcctttatggccttaagcaagcttcttggcagtgatttgccaaaataagcaataccttgattgagcatggttttcaccaatctgcttatgatcattctctattcataaaaaaaaaaaaaacctaacaccagcctccttgccttgttagtctatgtcgatggcatagtcagtgcaagcacaaatgattcagaggcaacaaattttaaagcctttctcaactttcattttcagctaaaagaccttggccatttgaggttctttcttggtctcaaaatatctagatccatagcagggatctctgtttctcgaagacctttcactctgcaactcctcaatgaaacaggcttcctcggctcaaaggctgtctccacaccaatggatgacaatctctttcttagtaaagatgttggtcatcctgtcaacgatgccactttctatcgcagcctcattgaaaagcttttgtttttaaccatcacacgtcctgatattgcttatgccgtcaatagactaagccagtacataagttaccctcgacaaccacatctcaaagccgcttattgaattgtccaatatctcaaaggcactcctggccagggactaatgtttcactccaacatcttgccttaacttcctgcagatcaactattccacctccaagccttttcggatgaagattggggtacctgccctgatacacgacggtccatcactagtttctgcatatttctaggccactctcatttcaatccactatttccaagtcatctgctgaagctgaataccggtcccttacaaacacaacttgtgaaattctctggcttcacaacatcgtaactgactttggcatctcttcatcacaaccaacaaaaattcactgtgacaatcaagttgcaatacatatctctgagaatgcagtcctccatgagcgcaccaaacacgttgacatcgactgtcatatagttcgagaacaaatcaacaaaaaacaaaatcaaactatcctatgtcccttcttggcataacattgcatatgtcatgaccaaggctctcttctccactcaattcaagtctttgttgtccaagatgagtgtctccaacctttatactccatcttgagggggagtcttagacgtagtcgtttattggttgttattagttaagccttgttagttagttacattcataactgtttcggttatgttctgttattttacaacatcttattttcctcttgtataaatactgacttttcattaataaagattaaagattctactttcactaatagttattggagcagctccaacacatgaaatatgtgggttgcttatatcaagtggtaattactttaaagaatagctattatattggagaaattttagtggacatactattactatacattagcaatggtaatattcctaatttttcaaattttaaaaaattaaaattaaaattgaaataaaaaagtaagaatttaaaataaaatatattaaaaaatagtgtgttggatcttaaagtggtttagtattgaattattttttgtgaataagatttaaaaaaaaaaattatattttaagatgttctataataatattaactattatttgcattggaaatgctattagggacccgtactaacgtttaagaaagaaatggacaacactcttgattaagccaagtaattgtctcatagaagcaaacaaaaataattctaagaataggaattggttcttctacgtcattctttcttgtaagaatggataaatgctgaagagttattctttatcatatatctttttctttcctatatcaatttatgtagggtccaaattaataattcatcaatttacttactatt

SEQ ID NO: 218892 - DNA, 5490 bp, Cannabis indica
aaaaaaaaatacctctactagatgagctattttaactcaagttttaaataatgatacggtgtttcaagaagcactatttattttttaaatagtattttaataatattttattaatactttattagtgtattttatatatattaaaaaaataatatttaaatgaatgtagagaaaaagtaaaaaatatatggtgtaaagtaaaagtttgaggtataataaataaagtagaattctggtaaaatattttaaataatagagtaaataagacgtgaatgcacatgagatgatgtataagtgtattttcttcattttagagtagagaagaagtggggaaaatataattgtacatatatcgaaaagtatattatattagtagggccgacaaatgagtcagacacggtaacatgactcataacctacacaaaagttagcgggtttgaatataccttaaatagatttggaccgtgttcgagttaattcatctaacccatttaataaacggttgacagagctaacacgaaactgacttgttaatgacctatttaaaattaggctaattagtaattttttccctgaactttgacatgtactaaatcgtgccccttgaatttttttggccgttaaaaattcccccgaactattgaggttgtcaaatttaaggacttttgtctaattttagtaaaaaattctaacatggatgaaagttcaagggccatgatttagtacatatcaaagtttgagggacatgatttggtagatatcaaagtttgggagcatggtttagtacataaacaattcctaaaatagtaaaattgaatgaaattagacagaagtctttaaatttaacaatctcaatagtttgaagggaatttttaacagcaaaaaaagttcagaaaacacaatttactacatatcaaagttcagggagaaaaattattaacagacaaataggtcatagatatattattaatatattaataggttgatatgctaaacaaaatttatttataaacgataccggtcgcgtcaatccatttataaacaaattaagtttggattttattttttaaaataattattaaacaagtcggatttaagtaaaatatatatttataatacatgtgtgtggacactacaagtgaaaaatccgctaacacaaaatgtcactcagaagtgctcctagaaataattcaaccacgtttaactcttatctctagaagcatcaaattctattgactagaaagaagtgacatgtcggtaaaattattctactcactgactacgattgattttaaagaccaacaaagtctcgacaacaccaaacacaccacttcaaaatgaacacaaccaataaatagattaatattttaaatcgaattaaatatgcagcagggcatttccagatctggtcacattgtatttcaattttttgtttgcgtgaatcccaaaatattttgctactcacacttgcaccaatgataaaagtgtgaagtttactacaatttactaccaacctcgaggacctgaaaaagactgaccaaattcccattcatactcttacatacatcaacattcatttattcctttaaagcatgactgatactggtgctgaatcagaaaaagaaacaagaaaagtaaaaaaaaaaagtacataatattgtaaaacattgtttcattcaatgcaaagatgttaaaagagtgtgtgtggtaatatgtagagatatggcatcagaattcaattcagacccttcaagtaaacacatttgagattgaagattttaacgagtttaaaagtgtatggttcttctactctataccaagaaccaaaagccaaaggaattcagttttcacctcctgtggctattttggtgatttagctatatatcagcatcaggaccagaaacacatgtggctctcatcacaagtcaaagcccaaaaaaaaaaaaaagaaacagaaatacattccacattccctataagttggtactgcaatattttgcataatttgatatgccgtggcacaaatctttgccgcccgccctaaaaaacaaacttttaaaccttaacgaaatttcacaccggactttagccttacaactcaggaaactaaaaccttttccgagaatcaatcagaatcagaatcagaataggctgtctaggagccagagaagttgggaaagcaccttatcatgtacaaacaccatctagttagaaatataagtgtcactactgaagccgtcgtcttgtaaggacttcagaaagatcaatctatcgtgaaagcaggccgtaggaaggtaactcttcaagtcgtgctacgtcttcattcagaagttccttttcaagctgtcgacgcgtggctttcatcaccgtctgtcaaaaacaaaagaaaacagagtaaggtccgttcagtaaccaaatctattcaactaaagggatttacccccgactggcctctactgcatgtacaaagtcatccatctacaaagcacaagattactagtatatccctataagacaccaaatataaaaatccagctcaatctattgcacaaaagggcaccatctgatatgatgaatatactctaaaagcactatcaccacaatcagtacataaactttgtgagaagtacagaagcgagaaccaaatcaaaattttcaataaattgggcacatacattgaaatccatatatgatgcgcgcatagaaagccattgatggtccattagcttgaatgtaatgcaatatagaaggtcaaaagccgaatcactatctgccatgagaaaattaaaaaaaaagttttagttataatttacaaacaggtctatgaggtcaaagatagcaatggtggtatatctcagataaaagtacctgctagaaacttcaagaaagttgctccaaccagggtccttggttttactgcaaaattaaaagtcttcattaactaatgaacaactaagtggaaacaaaaccaactgcagatctaaacaatgcaagcattatacaaggcagtagtatgaacaaaactgacaaatgacagatattggacagacactgtcattacaacttccaacttattaacttacatttggacacaaagattaccatcaccaacaataggaaactccattgcgatggaaaggagccaagacaaaaattattgtaaaattctgccttttgaaacaaatgaaaaattatacacgcataaattaaagaagaaaggaaataatacctgcttcaagatcaagcatctgtataagcatgaatgtgatgttcacaccagccacagcaaatgggtattcccaaactgatcgatcgccctcctgtttccgcagaagatcctggaaggatttctgcattcaatgatttcacattttaatgcaagatgacacagtacaacagtacaattagaaatcacacaccaactagtacatccaagatgttaaacaactctacaagttcccaaaaataatttagcaatcaaaaattatacagaggagggaatactacacacaataacagaataacataccggaaagttctgagcaaaatacaataaattctccaatgatataaaaccaccacccctgtcagagaaagaatatttgatagtaagtaaagtatgagcaagaaaaaagaaatccatagcacatgattaaatactagtaatgcccaaataaccatggaaatacagtacctacctaaaatctgttgatgggtccttcccttgccatcccatttccttccattgctcagatattaaaccacgaagctcttcctcaggataggcagatttccataaagcctttaaagcttcctgcatcaaagcagacgttcaaaacagaaaaatataattcacctttcataaatattgtataaattaagccacgcgagaaagatatatatagatcaaatatcatgtaaattgcacccatctccaattcaaacatgcttacctcaaaagttcaacttatatcatttaaacaaagtatgcaaaagagaaatacagctccagggtacctgatgctcaggaactgaactatcataggatacatctatacggttttgtagtctttgcaagcattcctcctatgtaagaaaataaaatattaaactgcacacataaataaaaccagatatatttcaacggatagcaatctctgaaatgaaaattacctgaacaggggttaagtcaaatgaaggacgtgcatcactttctctcctctgggcgcaaacacaagataaacctcgaccgagccatgcagcagatcctgccacaacctcagctgtaccaaatgaaccacccattaataaaatctctattgattgggcattattgcaggtcaatccccaaaacattgtgagatcaattcatgaatgtttatgttaagcaaaaaaagaattcaacattctcaaattcccatccaagagcaaattaaccatatgcaattaaattacttatttcaagctcaaaaaactgctataatcatgaaatttatacctaacacttttcaaacaatcaagaagagaaaggaaagaaagaaaccaatatataccagaagaaattattctaatcgtttaaatcggagaaaaaaccccaaattagatattataacaacaataaaaaagacaacataggtgtataaagcaattcacccaccacaacacattaggatatcagaaaacatcatcataacgaaaacttccgagataatccaaagctactcatgcacgtaaatcatctgagttcgagatctaaaattaagctatcaaaaaagtactgtggaatataaggtaaaggatagagtcaatatacatataaatatacatttacatatatatgcaaaaaaaaacataaatagaaaaagtgctttatagagtaaatagaaaacgaaggcaaaagaagaaaagaaaagaagagagagagagaaagagagagagagaataataacaccaaaggaatcgagattaaagaactgaaaaaggaataaatgaattaaattaagataaaatgaaaaggtacgaaccagaagatgaatggcaggtgttgcctcgttccaaaccttgagaaattcttctcacagccacaaatgagccaccgccacctcctctctcatccataatgcttctcaaatattacactactaccctcccctctcccaaatcacaatcctaacaatttcatcctcgacaattcaataaagaaagcaaagaaaaagagaaagaaatttctcgaacgcgtttaaccaagaaccgaaggcggtgaaagatgcggcggccgcgaagaagattcgaaatggaacaagaagccttgtggctgttgatctttatgaattaaaaaaaaaaaaaaaaaaagcaataagcggttcttgaaagaaatgagagagaatccggtaagaaaatggttagggtttgtccaagatctgagcatcaaactccattagaaagtcagttacgaagctttttcggcttttttttctttctctctctctc

SEQ ID NO: 218893 - DNA, 4983 bp, Cannabis indica
cttccactatcagagacatcataccccttctgagataggccttccatgacctacctcctaaaagctaccagctgtaagactttatccttggtctctatccttgcctttttattagctctgctgtttgaggagccagactattttttattgataacgacttcccatcgcaattagagttgttccctctagtgttctccaaagaaaccttctgcaagggttccacgatcagaataggttcagtcagatcaatgatggaagtggacaagtcttccatgcttggagccttagaagcagcccctgaattcgaaaccagaggtgctgaaaactgagatccacttttggaagtttggcctttctttcccttgtccttaccttccttggctatctcccaaacctcttcagatctcgattggatgttgcccaagaacctgttgagtagatccatctgcaagatggctagttgatctacaaagaacaaacaaaatataccttagacaagactatgttaaaagatatgatttttggaacaaattatcaaacaacacatcaagaggatccaaactgttaattttagcataattgactttacctctagcaaaaagagcaatgtcttgatgacctaagttagtctcatgctggaagaagcctgataagtaaatcttactaagcacatccactctaaaattatggtgcactagtggaacaaagtgattaggactccttacgatgtaatctaccttatctatgtatccactgcaaggatatctactctagtctaagttcaagaagtatagttcaaatccacctaggctagtattatctaagtcagtgaaagtgggagccctaattatattaaagggtgtctcaccactaccagaagtgctcgctcccagagcaccctcattttgcactacctacttgaatttgatagtgagttctttagcctcgctcaggttttctgggaattgtctcctccaattcgccagtcattgctcattgagctttacttcctttaaagcctcctcagtagttatgactttgatagcctccttaaattcttctagaaccccttggagagattcctaaacattttccttcacataaagatgttctaagtcttggtgtggagtgatgaggcctactctttgtaggttctccttattcacgagtccttctacttgcaactctttggatgaaaaagatttgtagagggctaacctctcttcaactctggagtcaagggcgactgggaaagacaatttgacagatgtaaaaaatgtatctgaatatagcacacaagaggagaaacaaaatcctaaagttcaaggaagggaatgacacttacttttagtattgaaatctaaactatgggtgggaaccctcttcaacaggaagccgaatgtgtagaagtactaatctctaaagtcatatgtgtacttcgtggagctggtaggacaaggaacactcctagagtagcattctaacctgtcgaaacctactttctccttgtggcctctcatgggttgagacttgatcttgtagaaatacaatattccagcgtcagcacaagcctattatgatgagcacagaaaacctagcaccctgacaataaacggtaagcttggggaatgaactgaaaaggtgcttctccgacaacaacacagaagttaggaacaaatgcgcacccattttgatatgagtccatctataagcactgaagcctcctttcgcgcaccttctaggcctttccctatgaacggagagcttgttccagaacaaccttagaacacttttgagccctcgtcaagtctcgtacttcctcaaattattatagatcctaaacttatttatgtgttggtccatctcccatggacggataaattttggagcattttcctactccataatttcctcctccgagtcagcttcatcttgatggatccatctaggaatgatttctttacgaaagaagaaaatccaagtaatcagccaccctaactacctaacatagaaagcgagttgggggtcctccctcatgaactacttggagatgtcccaactagattaactatccataaatgagaactctcaggattcattcgttccagataagaagttaggaacgaaaaagagaaaaagcataacagagattaatggagagcccaaaacccgaaagattttggacatggggaatatttttcaagcatgtctgctgcaaaatgctcgatttcaagacttctaaattaaaaaaaaataaaatggcttgtgatgcttaaacctatttacgatgataatcacacgaataaaaaaccttaatcgcatactagagtaaaacatgcaaaacttataacagcaaactcagaaaatacagttcaaagatgaataaaccacatacctggtatcgaaagcggagatgttagggtaatcatcgctgagtctggttggggaagttgattgaacgtttaacgaagacgagatgctaaagcaatcagtgaatcaatttttgcaatgaaatccaggtttgtgattctcctactgtaaaagtcttgatcactgggggttgatgatgtgggaattcttgtgccctaatcctcaacatcaaatgaaggaaaaagtctacggcgtgttctaggttgaagaagatgattgggttttgaatttgggtttcaacctaaaacgatgcagagaagattatgagctttgaagggtaaaatttgaaaataggagaaaagtggtaactagagttcacaaaaggtatttatacctagaaagaacaatccacgtgaaagaagatggatggtccacgatctaatttccagtaacacaagttacatccaacggccatggagttccacgatccactcgtatctctataattaatgctccacaagatcaaggcataaattaatgataaaggtgtcattttttgatttttgcaccaaaaagtgaacaaccatcagaatatagtcatttttgaaaagtgacccctcgatagtcgcacccttccatcaccacgtgattaccacgtggatgtattacattcaaatgtagaagccaactttgcaaccgaatagcacctagaaattcatgattttatccatcagcctccacatgtctatattgaagcagtgaagcaagcttccaccatacgcaacattctgaaagcttggggtaaatgttattcgcattttcggcagtggacacgtggaatctaagtcaacatccaaggcccatcaatgggtccctcaatgaagataaagtgggccaagcccatttagacaagtccttctaggaatgtatcccagctctgcgaccatagagccttccgccactggcgaatcgttcccggaagcaagtctagtaccatgagaccggaggagtgagatagcgtgttcccagaagactcttcaagtttcctttttattcctacacacaaataaggaaataacagctgccagatcttgactaagcatcgtatcagattaaatggggaaacttcctgtgacgaatatcaagcaactaatttacacttaatttcccacaatcgaagcacacggtgttgactaaatcaacccaaatctgatctgcctagttagcaaatcctctccttcgtggactgaacttcacgagacaacccaagtgtgttatttattatagactccccaatagagagaaaaaaaaaactaaatataattctcaaactactataaatacccatcagatcctatgggttagggattgaattctcttgcaacactttctcaagcaaacttgagaacatatattctttgtattcctaaaggcttttcaagctaagaactactgaataacactgactcgtggagtaagaataattaacgtcctaaccacgtaaaaaattatttgtctcgttttactctttcttttttaattatttatttcttcagttcttatcgtttataatcagttttcaaaaatctcagtaaacaatttaagataatatttagtttctattttaggatatataatgattatatataaattttttttggtatgtttacatattttaatagtggtatgtataattttgttaatatgatatatatatttttttgagtattgttgtaatttttttgtggtgaattttattactacggtatactaatttcaatgatacaatatatcaaatactgttatatatatttaatgatctaatatatttatttgtttttattacaatatattcatatgtaatactaaaaaaattatattacttaatttaatcattatatatttttttaaaaaaattaatatgtagtaaatgtatttttataatttttattagctaatttattatatttggtcatttccttaatttttttttttaaaaaaagtaacattaactaacttaattatttgcttaacaaaatatttttagagttttttcatttttacatttcaaagaatttttttttttgtatttttacagaaatgcatatagtaacctacatagcagccaacagagcaacttaaatcgcaaccaaaactcacgaaatctacgtaaaaattaccggaacaactcaaaccataaatttgaaaaaaaaattaaaaaatagtatataaaataattttttttacattttcttagtcaagttaaattaaaatctaatttatataatttttaaatttaaattttatataatatataaatttaaattatattttaaagggttaattgtggcaaaaacctctaaaactttcattttgcttgcatataacccccaaaactcaaattttgacggcaaaccccccaaaacttagcattctgttaacatttagccatttccatccattttatacagttaactgccatgttggactgtccacacgtacataagatttatccacgtagatactattaacacatggcacaatttaattagcccacataattaattattaaaatattaattcaattaaaaataaattacaaatatgtaaaaa

SEQ ID NO: 218894 - DNA, 1424 bp, Cannabis indica
aaaagggtataccatctaatttcttctaaaattagggtaaaaacattaattgcttattttcaaaaaaaaaagtaaaaataatttttaacgataaaagaaatagaacttaattgaagtcacataattatgtaatgttatattctaggaaaatttttcaataatgtaatgttatattttagagggtataatcagataatctcgaaaattcagagacaaatatactaattaaatatacatttctgtggtgaacatgtgttaatatagctgtcatgattatgttgttaacaattatagagttaatggagcatgtttaagctaattatttgaagccccaccaccactaaataccatttttggttaattatatacttgatgatgattaaacagctttcgtaaatcttttttatcgatcaaactcatgatcatgatgaatttgacgtaaatgaagaaaatttaagtttatatatattataaatatatctcagtgtcaagttaaattccaatcacctaattgatcaaaagagtttatgttatagatagagaccctaacttgttatgagttaaatttcaatagtatcaatatatttggtaagattattgtaagacttatcgtaagttttttatgggtagggaaacttttttaactattaatttaagatcatgtggttctacttgtatacaattaaaattttatatatattataataatatttaggaatattggtggtaaaactacataaattctatgattagctagtgacatttaatcatataattgattttttggtggtaaaattttccaaacctcacttctgttagctatttagccattccattcaaaaagcactgttaagtgccacagtgaacaagccacaatatatacaagggtacacgtgacatatttttagtagggatattggcagcaaaactaattgaactctatgattagtgacacttaaccacataatttgattttttggtggtaagactctccaaacctcacttctgctatttacccattccgttcaaaaggctctattaagtactccgagacttgaaccattagatctccccttcccccattccttcttaaatcatgacaaatccagggacgaactagcaaacccttcaactgctgtggtatcagcgaagagttgcgggagagagagaatcaaatccgatgaggtcgaggcgagaaagagaaacttcaaagaagggtcaggtctcggagcttagagggatgctgaagggttgggtttgtaaggccgagaaatcagttttggggttcgtttagattgaaggtggccggaggtgacttgtcagagctgtgtgagaaggagaacaaaagaaagagggagtgcggttggaaattagggttacatggagaaaatttaaaagaaatagcagtggaaaatagaaaaaag

SEQ ID NO: 218895 - DNA, 3630 bp, Cannabis indica
tgagctagcctcaagtggttcatcattacacaatactaatatatatattcccttgatgggagaaaattcagtatgtattatacacaaatttattatggaaagtagactttataactcatttttttaaatgtctatacataatcttgtaccaaacaaacataaaatttaaataaaaaaagaagtattgcaagttggtaatttggcatataaataacaagctagctaggagtaggactagggttaaaaaaataaataaaaaaaggtaaaaaataaacaaactgacatagtatgggaatgggaaactttgcagcttttgttataagaaattatttaactaactttatttgtaaatataaaaatggcaagtactatacactatcacctaattaaacaataatacaattcattcatttgttttttagttattgaatactattgaaaccttttttttttgggggggagacatttctttattaaggtattatgttgaacacattattgagaatccaatgcatattgaaaaccaagaaattttgagtcttttttttttttgcataataattttgttttgatactttttataaaatggtcttccaaacattcctaatatttcttggcactctatcctaataaaagtcttttttacaaaaacaatagaagaaaaaaataacattataaattggttcattttcattaattggtcataaataacattatagaaaaggatatagatcaacttggacattcacaaattaaaccaaagttgtttaaccttactgcccacattgaattcaaatgaattcaaatgtcattttctaaaaaaagctgtcacatttaattttaattacatattaaagttagagttcctctaataattataacattaaaaaaaaaaaagaacttaaataatcaagtaagaagctcagcaccacaacactttcttgcaatcctcagccgtttcacacaatctacaaattccctgttaaatgtcaaagaataagactttttaaaccaataaggtcaaagttgtaattttgtcggtaataattagtaaaaacacaatttttaaataatattagtggtataaatttacaataaacgtacttccatgggatatcaccgacacttctccaattctcatatctgtctttatagaataacgtaaattcagatctatcttgaaataatcttaacccagatactgtttgtctacctgcaaaaacgatcaatattataattcattcaatttttcattttcaaaagaaatcttaaaaaaataaaaatctaatttttatgtgcttaccaaacatgtcctctagttgaagtgctaggcttgagtagctaccatgatcaagtatacaaacttttctaccaacaatgactccatccatgttaaccttcacataaacccacctctctttgctttggattccttccccttcttcctcacaatcttcttggaaattatttttatttggttgttgtgtattattaatgtttgaacatttcaagttcaagtttgattgaggccactctaaaagatcatcatatccctccaagctcactactattaatttcattcaaaaaaataacaatgataatctcaactactattatcaccaaataaacaaaaacttttaacaagaacttatgttacaataaatgtttgaaaaagaaaaaagtatacaatatatcattcttgactttgatcattttcaactttcttgacatggaagcaacataattaatagtaatttttatccaaaaataaaaataaaaatcaacacccttttagtacttagaaattttgaacaaatatgaaatattgtgataacatttgtaatgattgaaaccaagtacttcatacaacattttttatacttttcttgacatggaagcaacataataaccctaacaaaaaatcaacgctcatttataatacttaaaagttcgtcgtttgttaaattctattagctatatttgtttactttttattaaacgatctgctaatatgattgttctatgctttatttaaatttcatatattcttatctaaatcgagttttcattagggttttcgatgtctttattgagttacaatcttattttgagttacaaataaataaagttctaaattcgctttacaaaaaaaaaaaaattatattgaagtgaaagaaactatttggaccccaaaaatgaaaagattaataagaaaaacatacaatgtgcagcagagggatgatgattataagcctcaggttgcaaagttctcaaactaagaccaagatcaattacaccatcatgaccctccttagcttgatgatgataataaacagattgaagagttgaagggttaagaagaaagcttgaagagttagaatccatacttattaataagaaataaaaaatatatatatagtcttgtattgggtaattgggatatttggattggacccaattgagtagtaatatttgaaatgaacaagttttaggacatgtatttatgtaaattttgttagagcacaaaaaaaagttgttgaagaagaagaagaagaaaaagtgggccctttgttatttaacatggaagacaaagaaagccttctccccactactaatcattcaatgttgcttatcttcattctgctacaaagaacatgcaaagtacataaaaagtatatattgcaacaaagaacaagggatggccaatgtgattttggtataacttgggttggattttgcaaccccaatttgatacaagggttcacacttttcagaatccaatggtactaattacaacatttgtttttatatttatacatatagttagttatatatataacaaaggtttgattgaacttattcctctccattaatattatgtccactaaacaaattattgggagtgtgtgacaaactccaacattagtactataagtactatataagagaaattgttttcttagtgtaggatcttattagcaatttataagtaattgtaagtggtgtgtagagcttataaatatataagcgtgtaatgattaatgaatatgaaatgataaaatagaatcttagttaatttgggagattgatattgtctcgaatagtgtattttaagatatttgtcctgtttcgaaatagatctgcattaattatcaggggtcaatcgtttggttgactgtataaaggtcgtattgtattaaataacaagtaatattatgtttggataaaacattctattgtattaatatgaatcgtattatttaatacataacaaatgatctatctggagttggggaacccgaaaccggaccctagacctagaccccggatccaaaccctaagccgaacccagacttggaccctgaatttggcttcggccctagacctcgagcggaggtcggagttgggctcgagcttatgattaagataatataattttacaaaaactattaatacaaataaataccgaacataatattatattaaataatatttatactatacattaaaattaaataatgaattggtaagaaagtatattattgtattgtaagaatatctgtataaaatcccattaatctgacaaaagaaattgaccataaggtagcactcacatttttcatattatat

SEQ ID NO: 218896 - DNA, 4673 bp, Cannabis indica
tttttttttctgtttatatcaattttttgatatatttaattaaaagttttattactttgaagtagcatgaactccaaaataaactattttcccatattttggtaagagtgatgtagctaaaatgatgacatgtgatataaggttagaagagataaaccggtgacgaagatataagatttccttagacaaaggataactactaaagtgcaaaaggtacaacccttatacaccaaaggtgaacctttactatgaagggtcctcgaaaatggactaggacacactcacccctttatggattagcctaggtcgagtacccccctagtgatcagcttaggcggagtcccctaggctgagtcccccactaatggtcggccgaggctcagtccacccttaacaagaggtgttggctcccatctcgtcctcatacaactgtagtacaatgccttgtctccacttgcacatcgtttgtgatttacttgctcaaggtccatattcacccccccccccccattagaggttggcctaggttgagtatccctttaggggtcggtttaagacgagtaccccctaagggtcagcttaagtcgagtcctccgtcaccaaaggggtgttggacccatcctcctacaactttggtaccaaatctaatccccacttggataaggggtgatggtctatttgctcagggccccaaggatcgtcccgtgtactcaacatctgtttatgcctatggttcaatctccatacaactacaagtgtcaaagtaacacatgaaaaagaccgtcgagtcctagaatttgatcaaagtaagaagcaaaggtgtatgtcccgagggtatgacacaaggctgagtgtccctctaggggtcaacctaggctgagtgtccccctagggcggaccttgtcaagtcccatacagacatttgcctagttgattattttcccaacacctgataaggacacacgctcacaatgtccaatcccactcaaagctcaaaagtggttacaatccacaaaaatagttgtatatcaccaaaataatcgggtcttaatacattccgagaatcaaaaaaaatagttgagatattctctgatgtagttgggattcaactgaaccttaggatgtgcctcctgagcgaagtgcctcatccttctccctatataaggggtcatacttgacctagagaagggatcaaaaatccattattcacaagccaaaactctgcgattttaacttcttgttgcaactcagattaataaaatacaaggggagtaggctattaccaacacttggggcagaacctttttaaattatggtgttctttattaacatttattacatgtttttgttttattctcattaattacgactctgtgtcgattggcgaaaaaactagtcaacattttagtttggtgctttcattgacagcttaagccaatatctcgaagctcttacccaaaacaatggtgtttaccagacgatcatctgaagaatgacctgacgagggtgttgacaatgcccaccaagtcctattggtgagcaactttcctggaaactgtggcgagcaactgccacatcctagtagtggaggaaacaccatcattgggcataccattgcccaaactaaagctgatgggaaaactatagcttggtgtacagccacagctcccaccatgggcaaaggcacaattggtggtgcaatcgatagggacaatacaagatattttcattttgactgatgaaggcacaagtcattccaatgccttaggggtattggcgcctttaggccaagacgtaacgagccctatatgtatattcaagagataaatcctaatatcgatcagttgagggatgcaattggctaagtgcaaggaccatgttcaaactgtgcaccaatacaaagcctaggctcaagcgactcttcttgagagtcttggcaaaaaaaggagagaactccaatctttgttggatgaacatgctcaagagatgagaaggtgtcaagaaactatgaattgacatacttgggaagtggctgacttgatttggagttatgcaagcaagacaacaaaggtttaggcactcgtgccatcaaccaacaagcccaatgaccaacagatcaatagcaaggagctgcctatccctagggaccaacaacaaagggtggtctatgaaccataccactgtcttaaagatagggaacatgcatgtaaggagtcatcattctaatagagaccctggcaacaataacaacaactttccactctctatagatgaccaagtcctttcaaagcaccatatgggaagagaaaacaatcataatgttttgatgaggctgaacggaggaggaaaccctagtaaaaacagtgttagccaacatgggaacaaacgaaggccagccagcaccgagtttggcaaccaaggaataatcaaccaaaaactagaagggaagacctcgaagtcactagttaatattttcctaactaccctgatggccatgaagaagataaagctaagagtaatgctaacaaccaaaacaacaatggtaggagaggctgctaccaaaggccaagattagtctttaaccaaatgggagcctaaggggttgaagatctttggaataccattataagaaattaggcaaattaggaaattagggacaatcgaggcttaaatcacgtagctctgcatgagacgatttgagaagatcaggtcaacgaaggctttagcagcgtccaaccacaagtcgttatagatatggttatccaaccatagttagacgtgctaacccgctgtgttagggaccttaccgcaccaaaaccaacacacttaaagttagacaaaaggagagagtcttccgtctcacaaagaatcaatgaccttccaatcccaaccaagttcaacatgctggcctacgagatgtacacgggtaaagaagatcccctcacccatgttgagaaattcaagattcagatggatctctaaggaataaaggacgacctcagatatcgtgtcttcctcgcgaccttgacaaacatgacacaagaatggatctccaaattagctcgagggaggatcacttcctaggatgagcttgtttaactattctataaattctcttttgatcaacaaatacccacaaaattggctgacttagtggccattaaacaaaggccaaataagccactccaatactatatttagcgctacatgtaagaagcgacaaaagtaaaaactgtaagtgacgatgaaaagctagtcgtggtcatgggggcatcactatgggaggttgactatggatagacatagggagagacctgacccactcctagaaagccttcctcgatagagctaacaaatttattaagtcagaagaggctgaatagaataccaatggccttgaccgtgccaaaacttcaagaatggagcgagttttagcgatcaaggctcccaagttgaaggggcaataaaaataatggctcaaaaaatgggaagagtgccaacaatagtaatgatgttaataactctaatgacaataattgactacagaatagtactgagcaggtaaggcacgaacccatgaccataaggtatcacccaaagtactgacttgagtagcttacttgaaccatatatattaggatcagagaagaggcaagagcaagagcatccaaaggatacttggaagcttcacattggtggctcttctattgaacaattctaaggagcttgtcttaccttgaccactcctaaagggaagtacattcatatcgctatccacttaagattcaccacttccaaataataaagcagaagatgaagaactcatcgctggtttaaaattagaaagggaagataatgcaattgcgaatgctttggccaggctatcaagcattaccaaggtcaacaaggccaacatttttcgcgttaagtatcttctcgaatcaagacatctttacacagtgacatgaagacatggtggccataagtccaaccttcttgagtttgctcttaaattgaaaggaccttacgaagcagtagaggcaattccccctagaacatatatgtttcaacggtatgattccaacatgaacttggtactagggcctcgctattggaacaaagtacacctctgatggtactaccagtaaagttgcttttcaacaactacttaagctatgggacaatcccaccagcaaagtttgttttcttttaggcatgtgtgcccaacttaatgtacttaggcacattttcccattttattcatcaatatatgttttaagttatttttcatataacaacgaagctcgtatgattgttattgaatctatttatgaacctaaaatactcacttatctcgctaactttactgacttagtcccataattttaagagtgtatgtgttgacacaaaaatttggccaatattcgttcgcttgattggtgagaggaaaaataatttttagtaataaatggagagaaacaaacaatttatagtagttcactcctcatgtcgcggcgataatggacatacatctactttcaatttttattgctcacaagagaattataagaaactggccaaggcaaaagctctaatttttagagagagagtgtagagagagattctctaaccttatggggaattagaagaatgtgaaaaaatgagctagatga

SEQ ID NO: 218897 - DNA, 5052 bp, Cannabis indica
tgtgatgctgattgggctactgacccagatgatcgtccatccacaacaggttactgtatcctccgagatagaaatcttgttggatgacaatcaaagaagcaagctactatatccaaatcctcctcggaggctgaatatcgcagcattgctgctgttgttactaaactttgttggatcaaatttttgctctctgagttacatcaaacactctcagctactcctttagtctggtgtgacaatttaagtgctgttcatctcacagctaatcatgttttgtatgctcgcaccaaaaacattaaaattgacatttattatgttggagacaaggtgatgtaaaaagaaatacgagtttatcatgttcctgctgaaagccaacttgcagatttacttactaaactaatttctagttctaagtttctttttttagagataaacttagcatggtttgttctactaccctaagtttaaagggactgttaaagatacttaggtatgctacagtttagtaagttagttagttacaagttgatagttttctattttgctcttacttcttgtcaactaactttctattagtggttgcttagtctttttcagctgattctcatgtatataaagccttgtattttcttaaattaatgagaaaaacagagcattctttcatattgttcatcatttacaaacattaacagagacacccagagagtatatgaagaacttctcacaattgatgttggacataaaggatatactataagagctattctcttttgtagaagggctcattccatttgggttgataatatttgactatataaaatcctaatacgctttattttttttagataataattcatagttcacctttcgatcaggtccaatatttcattgttgtcaaaataagtttgcggttgaactatagatataagacccactcatatgggctgaaactgtttgtacccatcaagtttcacagcacgtggctcttcaatacaagtttttaattgaataaaattttctgtcactgcatgtagacaaaacaaaaccaactaagcttttctttgtaataaatacacttgtgcaacaacaggctgttcgacttgtcatcactacataaacactccactaaatgttggacatatcacataattacgtagtactcggtcaggacactcttacaaatgttcttacggtacatttttctatttattttaagttaggaaatttttttttttttaatttaaacgttttatatattataatcatattttactatggactccaagtttttattttttgaattttttttaaatagcttgaaaatatatcgacatataatttaaagtaattaaaaaattgtaacaggtggttgatctttctttgcatataccacctatatttttgagttgtttctcaattttgacgagtgtttatcttgggaataagcacacagaaaagacaaaacataagtgagaagagagagtaacttaattatatatatatttataggagttgctgcggatttgataatctaatttgtttccaagaatgagaaagtgactgaaaggacttaagggcgtccactcgtctctgttgttggcttccttactaaaccattctctaataacttcgaccttcccaatgggcggcctttggcctttctcaatcacctttcttccaattttttattttacaactctatatcactattatcattattaatgtcataattttttatgcattcacttcaaatcctaacttttaaattatttcaataactaaattaaaaacatcaatactttaaataaatttttaattttattatttttgaaaaaataaatattcatatatttataaatattatttattattactttaaattttaaaattctttttatatagagatatttatatacattaaaagcagtgaatttctccagtctattttttaaaatatattaacaatttttttttttattttataacatatttttacattacatcatacatcactttcttcaaattacatcaccaaaacactatcttttaaaaattttattatattttatttatatcaaatatataatataacactcacaacaatttaaaaaaatttaaatttataaaaaaggtaaaattttaactatttattttaaataaagtaaaagctcgagttaaaataaataaaaaataaaaaaaattgaggtaaaataaaaaaaataaaattttgttgatgtatttcaaaaagataattgttaaaaggtattatctgtgcctagtatttcaaataattattttcccttcatcatttattttagctttctctctcttcataaaaaaaaaataactctctccctctctttctctctctcataattctctcacagaaatatatgaatgtacatctataaataggttgaagtcctcataccaactttcttcaaaatgtctctcttgatggactcgacttcctcacctcttctcttatgtcctcctccatcatcaatggagaataataataaaacaaaaataaaaaaattgataatggagcattagtattcgactccaactcactccagaaacagtcaaacataccaaaccagttcgtgtggccacacggggacttagtggatacacaagaagagctgaacgagccagtgatagatttacatggcttcttgagcggagacgagttgggtacagcgaaagcggtggagttagtcagaagagcttgcttgaaccatgggtttttccaagtaatcaaccatggcatcgatcaaagcctcatccagtcagcacacgacgaaatggactccattttcagcttgcccttagccaaaaagctcagtattcgacgaaaacgtggcagcctttcaggctattctggtgctcatgcagatcgatacacgtcaaagttaccatggaaagagactttctcctttggttaccaaaaatgtgacgaaaacgacgactccttacctgtcgttgttaactacttcaagtcagtcttgggggacgattttcttcacactgggtaagaaaaaaaaaaaaaaatacatgtgacaatctcaaccgtccgatcatcaatttctcatccttaatcttattcatttttcttacaacttgctttgtccacgtcattatatatagtttctaaatattgtatttgtctgtgatttaggttacaaaataaaccttaatcgagaaggagcaacacatagctaatcaagtagttagttaataatataatcatccaagcgacacagatcatgtgatttaactatttctcaccaaagatgtttatgactgtttttgacttggaaaaaaaaaaaggcatgagaggcccaaactattacctagccagccttcctctcgaaatgacttgctttcttttttcttcttaataagtcatttaccctatcttcggtagaggagaaaaatggaagaaggaaaaggagagaaaatttagagattgtttggtacaggagaaaagataatggaaaggaaagatggagagagaaatattagtgagtcacactaaaaaataatatgaataaataatagatagcataaacatataattttcttttcttttataaatatattttattttcatttccttcgtattttctttccttcaatattttccatccatcttactttcattcctctctaccaaacacaaggttaatccgatgagacaagtgtaagttgtaacacacacagctcactaatttagtcactctctacttctctctcctctctcctctctcctctctcctctctcctctctcctctctcccatcaagttgaaacccacggactaagcattttcttcttattatattttggacttgttattaaaaatagctcggaaactagcctcatttacagtatatataaataagtatacacacaaaaaagtacgttctgatttcagatcttgtgacgatctttctatcacgtggtagattttagtttgtatatctaatcgtacaatttactttttgctcaactttatttaggttccctttaaattaaaagatatcaagtcttattgtccattaattttttcaaaaaatctttattttctaaactaatccttttcttagataaaaaaaaatacttttgtttctgcctttccttacaataataataataataattaaatatccattttcctactttgtcaaccactgttattacattacaataattttctatttactttagacgacaaaaacattatttttttgtctctaatttttacagaagttaaaaacttaataatttgtcattatattttaatttcaaggtgatctatatccaaacaatataataaagcctcttttaaaaacaggtgggtctaccaaagatattgcaaagcaatgagagaattatctctggtgatcatggagcttttggcgattagtttgggaattgatagattacactacagaaaattctttgaagatagtgaatcaacaatgagatgtaacttctatcctccttgcaataactctgggctaactctagggactgggcctcattctgacccaacttcattgaccattcttcatcaagaccaagttggaggccttgaagtctttgctaataacacgtggcaggctgtaaggcctcgccttgatgccttagtcatcaatatcggcgatacattcatggttggtatttcgtatatacagtttatatatacaatttttctgcaaaaatatttatatatattttaactacactgaacacagcaattaagttccataaaaaaaatacagtaattaagacttaatagttcttaagtttaatataaactttaaacaaagcatttacttaattatcaaaactatgacggtgaaacattcataatagatgtttcgtatagactagtttacactaaaaaaatcttactagtcacaacaaaacttctggttaaaagcaaaaaaattgtgattaattattaattattatttttatattgtgattaaaaggtccatggttaaatgtattagtcacaaaaattacaatttatcgtgacta

SEQ ID NO: 218898 - DNA, 3596 bp, Cannabis indica
ctgcaccttgataattataaaccatgtcaacgtggtttcactaaaacacaagcattatttatacaatccgaatccttacctcataaatggttctctcatctgattgtcctaactttgaccgttccaattcctatattccaaaatatgatcagttgatgcatataaagtgaaagaacacattgcattacttgcatcatagtgcccatcaacgtaaaaaaaaaaaaacaaaaattttacactttaacagctaagcactaaacagtaatgttcttattagccaagaaaacgccacagcaaaaatctaagctttctttttctctgtttaattagtactgaaagaaccaacaaactatacaaccaataaatcttacacgacataggatacaacatgtaagtataaatatgtgtgtatatatatatcaaacactttgtacaccaaatcgttaaaatttatcaaaataaaacaatcgttaaattttaatgtcaagaattccgcaaataaagtgtgctgattatttagacctaaaacaaaatcaaatacacgaaaccaaaaaacagcaatacaaccattaaatcccttggctcatttggcaatcaaacaaagtcaatgccactaggcaatcaagacagaaaaaacaagtacctcatcgccgacgtttcgaaccgaatgatggtctgagacagcgcgccactctttccgagactgttgagacgaaatcggcatcggagcaccacgtgcggctgctgtggcctccatcgaagagaaaaagctgtgtcacagcttcaactcttcttccgctatagtataactactttccgtcaaaatgaaaccctaggtttcgatcgatagaaccaaaacagacctggaatcggaaaaaactgcagttgtagacgaagcgaagagaatttccgagagaatcgagaaaatggaagcgaaaatcgaaggagggagaagaaatgagagtgaggagaggaagaagaagtacctggatgaagattttgggagtgaaaagtgagaggttttgtgataaaagggttttggaggggttgaattgcaattattgaagagttgacgctagagaaaaagagagagaaagagaaatctcgagtgaagggaggcctcccgccatttatagggcaattttctctactcacgcttttctagtgacgcgtgtacgaaacgcttcacacgtatttactgttttgtcccctcaattctttttttttttgagtattgttactaggcatgcctaacacctttatatattttatcttgcgattgaccggtaatattttttaaaagttattatgttaaattatatatgaactgacacttagttggaccaatagatattaacacataaaaaagtgttatgcaccacttggtatgaggtttagattgatgagaatgataatgtaaaatttaaattaaatttgaacgataggtttgtgtttttaagtaaggtgccatttttgttgcctcagtgaataagatggatctatattcaagtggagatggatgatatttgggtcaatcccaactatatgtttaaatggctccaaaaaaattgatcatggtttgacttcaagaagtaaattaattgctattggatttattttctcaatgccttacctattttaaaaaccttggtaggaccgagtggatctaaaataactttattaagccaaaaaaattctttggtgatgtggacattaatgtttcacatgtagcaaaaaggatgacatcacgaagttgagtagacccgagtcatagtagtcgacctgggaggggacactagtcctgcgcccaggttgactacgagagctccaagatggaagttcaaactttaataacttgaatctaactcattatctttcagtattttgtaccatgaagacatgaagcaatcaaattcaagtacgctttaagagatttccctggttgttgttttatgttggtcaaagatgacgcctctagtcgatggtctcttgcagcctgaaattgctttttgaagtccctcgacaactgttcccaggatgttatggaataagtgaggaatttatcaaaccagctgcccgcggctcttgttaaggaggttggaaataatatacaatgtaagttatttgaaacatttcttactcgcataatagtattaaaattatgaatttaagatatcaggatggaatggctcgatttcttcatcagagtcgtatcctggcaatttgtcatattctccatcttgatattttctaaacttatcctctaattgaattactcgtaattgaatgagatccacgggttgctgatttgcatttttgttaagttgattgcgcaaatcaggtgcatttcgatttaagtgctctcaaaggtctggctgccttcattttaatctcttatgtaaatcgggttcgcgatgcctttgttcatagttgcttacggacttggtctttgagtagctttcagattggtaactacgtgagttacttatactctcctggtcaacataataacgccgagatctacttccatctcacgtttgtctacttgacctactgtgcccacgggatcgcgattctcctgtgcttgaacttgcttcatcttgcagtggtcttcttctttgaaatatattagacacacgtttcctacttaagtaagtgtgcatattttctctatccgcacgcgaaggctgttgtggatgtctcgggggaagaccactagacctaggttggtttccaggatttctttcattatcacgaggaattccttggtttcctagtcaagtttgcctcacctcttcattcatgcgagatgattctggcattttagtttgttcattctcttggtttgcaaattcatggaaagttcgtggaacatcacatcgttgttcttgattccttgaattgtttgggttaggttgattatctattggcacttcccttgtattcccaggttgctcctcctgggtatttgggggattcccttagttattatcctgccttctggtcctggaaccctgagatcttcttcgtggtctccttatagtaggatcaggttggttttgaggaactgtcccctatgcagctctggctgttgcgacttctcgctccaactcagcgttttgtcagtttgattctgccaagcgttgtcaaagttttctgttctctaactctatcagtggtacgtatctggtaggatcataggcatctccactccttctttctaggatttgatcaccagcagcattgaagttgccatcgttcctccctgaacgtggtgtttcagatgtgttggttctctaagatcccagagttctttgccaggacgatgagttgtttcctcaagacgattacagtcgtgttgattgttatcaaccatttaatatgggtaggtatttgtgtttatgaggaggaatttttgtgaatttttatcaccaaggctctcaatgaaaacaccaaactgttaacgcatattttcgttaactaaatgataataaataacaccagatattttacgtagttttgtagttaaaacctacatactccccgagtccttattattagggatactttttgaaatacaaaatacaatctcaata

SEQ ID NO: 218899 - DNA, 8740 bp, Cannabis indica
aaaagttcaaagcgtaaaaataacattttttccgtgtggatgtattttagtaattcttttcaggccatcgaagagtgcagaacaaaatgatacgggttttttcagagaattcatctgatccaaaaaggtttcactgctaataaataatagtaggctccaaccatagatacatcaaacacatttctatgggggataaaaagaactaaaattgtaagatataaagagtgaaacttactgcaggggttttatcttttctggggaagtgaggtagacttcgatctatgaatccattaggtgcacgtttaccaccaaccgattgctgaccaacacacgcaaccatctgactgatattaataggagatcctttggaaccacactgagacatgatcaaaggactatttctccaatgaagctctttcatgcacagctattcaggaaaaatgggggaaaaatcagttcttctatagagcaaatagaaagtaaaacagaatatagaaccaattgagcaggagcaaagccggtatgctctaacttgaagcaatgttatgtaagtgaaatgataataagataggtctcactttaatgaacaaatagtttattactaaattaagatcaaacattcacacttgataaaacaaataatacacacgagaataaagaaccaataacatgtgcatcaagggcatagttatactaagagcatgaaagatttctaccttcccagttgcatctcgaataccatttaatatctgacttatccttgcctccagtgattgagcagcatcacaaccaggttcaggtggtaaattcccctcattaaacaactttattttctcatcacatgtgttagcgccttcattgattatctgttctttctgagcatgcaaatttttactcggttggacatcatcaatcccaattgaaaatccatgattaccaatccatcgagcactgcatagcacatattacaattaagtcttgctaaccattgtagcatcgataaaagggttctgcttctatacacaagtgatggtgattgaatcaaccacctaatgcgaaacacattctagactagtgtttgtatgttattctcacattacacatcatattcaagaaatggaaaaggaaatataggaatacatataccacagccagtcaaccattattctgaaagaggaataaaaaaggcataagtgtggccatggaaacagggcaaccgacaaaatatccattagtatgataagtgtccgtgcacaaaaaccaagatgggtaagaacaccatcttgtcactatgagcacttgaaagtggctaagccaccatttgctaaaccgcattgggacaaattttatcttgcaaagagtttagtaagaatacaaagttaaacaaactgggtagaaatatacctcaatttagctaggcgattcatgcaagcagcagcagcatgagctttgtagtctctcaaaagaactgagtaaagtccatccttgttaccatttcctagtgtgacatcatggatacaagatataacattattgtggacagagaaagctaaatcaaaagcaaaagcaaaagcggaaagtcaaatagaactgttgcaagaaatgacaattgaactaaacatttaaacatcagaaaggcaccatagaaagagagttattttgcccttttctcgaagaaaaacaagatttaaggaaactttttttttgcgtggtaggaaactttgcacgtgaaataaatattaagttataacttataaatatattttccttttataggcatgcttcacggttcacgcagcaaatcacgaagaccattaagcagaacaaagtaaaagagcttcattccccctaacaaatcacaaagatgaacacattaaaaagtaaagctagaaaagaaattaaaagacttgcccaaagttgctttcccaagttgcccagatatcagttcactattatagaaacagacaaacccatcacttggacacattgcttcaatttctcttccatttacttgtagtttggtgtagtttttctctcggacagtaagattcaaatagactctcacatttgcattgggtcgcactaggacactaaataattgttttccagtccaaagctctactggctgtaaaacaaataaattgattctacattaataataaatatcttagctgaatattagaaaaaacctttaatggtaaataatttacaaaatgcatcattttccccattatcagaaaaaaccgtgttagattgataaacattctcccaataaaataacaataaatagcttccaaattgcatttgaaagtaaacctttagaactcagaagacagcatcaaccaaatggtcaaatgacttatataaatcagcaaaaaacaccatagtatctcctttaaatgtgtgaaatgataataaaaacaaatcttaagttaaacaacaattaggattgaaagtcgtagtggagtcaaaggtgaaagctactaatgagaaaatcaaatacaaataagattacaaaacatcactttaaaacagttttgtacagctttgagccgagtgttatgctcaaatagttaatgtgataactgattatataattatgatattaaacacagtttaagtatccttagatgatagaatctttaccatttagaatgaacaagggaaaatgttcgccggtggaataatttaaaacggcataattgaaaggttcacctacacatctcaccttaataacagcaggtgttggcaaatcaatatgttccatgccatcccccatgtatgaacacatcaaacaaaaagctgcacggtcataaaatgtatcctttcgagtaaccaaaaacgatgttgttagaaaatcttgggtagatgcaaccaaaatctctccatttttcggggtacatagattgttctgcacctgtgaggacaatagaatattagagtcaagaggcatgtgacatgagaaattatacaagaaagaaagaaaatttggcaatacaatcatgaaaaaggtgccacgtttgcaatattgtaattaatagtgtacagataaaagaacatgtactttagcataaaatttggcaatacaatcatgaaaaggtgccacgtttgcaatattgtaattaatagtgtacacataaaagaacaagtactttagcatataatatgtgaaaatattagataactcggccataaaatataacagcatgatataaacacaaaataacgaaactgcaagcaaagaaaaaattacccccatcaacaaaattgcctctgttcgagcttcctctgtttgtgggacatgcatattcatttcatcaccatcaaaatcagcattgtatggattgcaaacagactcattaaacctcaatgttctccaaggcataatccttgcctgcatgcacaaatgagctcacttattctagtgtttgcaaatcggcactcagattgatagatataaataaatgcagttctgtttcttaagagctaatctcacagcatcatattcaggttgtaagtggcccttaaattaaaaaaaaaaaaacctagcccccatattctaatcaatctgttgcttaagctcacacatgtgtaaagagtataagcatcgaccgatcaattttcagccatggtacagtacttaacattgttagtatataatgatagagtggattgatgcctcttacctttttcgaaaatcaatatcttcaaatggcaggaaatcctgattgtctaagtggttagtgtgtgaagcttatgtttgaagataaattttccaagggttatattcagctcagttcactgtgttcaaccatcaatatagtttttcagaaaaaaaaatatatataagtaataattttttttcatcctgattaaaactatggactataagtttaaattgacttgatataaaaactatgccacaagaaatcaattcaaatgtgtcaataccctatgactcatgatagacattcgatgcaaactaggttgtctgttgaacagaacaatgtccccatcctctaagtgacgctcaactatatcaccatacttcaactcatctgccaaacgctttctggaaaccttgatagacctacagtacaaacaataaatcaaacgaaaaataaataaataattaatttatgtgtgctagcacatgctgtaagtaactatatatgagcccttgccatgtagaaccatcagcacgcctgagcatccttgcaccaggatatttatcagggccattactgacacattgcctcaacttctctatattatgatgggaaacacgttcagggtaagtcaaaatccgagccattcgtataggaatcgcaacctgaatatgtgcaatttagaacaagaaaatcaatagcagatgcaaaaagcagcacaaaattaagtttgtgtacaacttcaacttcctaacctcggtaatttttagattaggatcgggagatataacagttcgaccagtatattcaacacgttttccagataaattcccacgaaaacgtccctgcttccccttgagacgctgaatcaaaccagctagagtcttttgaggttgatacatggcagcaggaccagcacgaacatcactatttatatactgtgcaacttcaacttgaagaaggtcccaattttcctaaaccaacaatctttgcataagtaagatgcactccagaacaattgcaataactattatacatctaaatttgtcaaagcccacggtgatagcaaagacattagagtgatagtacactgttaataataaaaattattacaggtgttgaacagcatgtattgaatcataattcgttggaactttttatgaatgtcaactaagtatcgtatgtaaattggtcccagttaaagcaatactaaacaacaataaaaaattggatcatacagatactacaaataattaaacaaagtttgaataaatgagcaaaatagttgacaatcataattattagtagctcatacctggtgggcacagaaaaagaaaataacaagaaaaatgttgttcgaaatcataagaaaaactgaaatatatttcttttaataaaaattaaaaaaatttacatctaaaatgtagcacatataaatgagagcataaatgaatcacaccatgcttgagataaatattcaccattccatatatgttcagacaaatggtaaaactggcattttttataataggatttcagaccaaatatagataattgcagctgctaaaaatgaaaaccctatgaccccaaaatagttgatataatcaaaaacatttatacatcttcatactaaatcttacaggagaaatttaaagttttgtactgctatcacacaccagatatctagctgcggtacttggttctgatgtttcctttcgaatactagcactgacttgaataatttgtttcaacctctcagttaggtcattttcattgctgaaacaaaggaattatataaacatatatctatcaacaactgcatcaccatagaccataagacaaaacaaaataaaacccccataaagatgaaagcaatagcttgataattcggcaaatgaaagcaaagataacctctgcgatccatccataataacagatggtcgaatagctataggtggcacagcgatgtttgtcaagataagattctcgggtctaccagaaagataaagcaactcacagtcctgaaatattttaaaagagattgcatgtaagttctactgttagtaaaagttaagcaaggaaatgcatgacacacactttcttttttgcctttatttgaataaatcaaaggcaactttaaaataactaaagaagcaattcacagtcttgcaacaattgaagtaaacatttcccccaaattgctatgtattctcatacaagaaatctccatagtttgggcaacttcacacttcaaaacatttatcaccttcatctatgtagacctaagagtatacctcatcaagcatccttttaaaaaggtgtagaactgtggctggattaagaatatgactttggatattaatggatcccttggactcttttgtgtgtgcaattgcagatctgcactcttctaaaccgtcatttagttttgaacgatcatgaagaaggcccagtgtagacacaactttcttcacagatcctgcaatagatggcaaatttcagaagccactaccatacaattttctattcaaaaaaataaaataaaacaaaatacttacaggtatggaaaacaaaataaaaatctttaacatcgtctgaatatatgtatattgaacatctcaaaagctaaaatgaaagtaaagagcctcagtagtaagaaacacaaaagggagcaggtcattaagtctttttttttcttcgaaagtttagtataagtttcttcaacataaaaggacaaatattgtatgcctttgattgcattagaagttgaaaactcaatgagaggccagaaattctcactcttgcccaaacggaaaccatgtcaggtgacctctccttttaaaacctgttattcatttctgctcacgcaactcaagaagtgttatgatgttccttccaaaggaatgggtttctatctaaaaggttaacctattaagtggactaacctaattccttgcaaaacaattcttattattatgtattgccaatttgggacttttctaacaaactgttctttctttctattttttctgaatttatgattgtcattctttctagctatctcaaccttcggtctttcaattttcaatttccatactcaaaatttgagtttcaaacagatcaacaaatgcaatactaaacacctttttaagagtacataaggtctacttcaccagcagactgccacctgctagagctaaaatttccatgaaagaacaaagagaagcccttctttaacagtcaaataaggaatgaaaaccaaaaggctataaagttttaaattaaatattaaaaacttatggtttgattatttacatctaaattctggaatgaggtggacaaatggctcaaggtctgcacagaaatccatacaattttaaggtactttatagaatttttttaaggagaaattcaatctttgacgtttgacataaaacaaataaataaagggatcacccaagtcagcatatagcaggaatcaagtgtgtttattaaagtactaactaaggaacatcgagagagaaagaaagaatccaaaccattaagacttccacatttggggcactttgctgctctactgttacacttcttcactatctttttcatcaattcagtcttcttcaatggctctatcttagtacttctcatcttcttcaaaaagtctaagcgtaatttatcatccagaagaatacgagaacaagtctgtgaaagattcaaagcattagcgataacgagtcaaaaattaagcttagaccattttcaaaattttaaatatatatttacattttaatggggctctagtaaaaatcagtaaagtgaaacaaagcataacctcatcgtgactagttcactatgacaaaaatgagtaaactttcactcaagcaattataagttttagtagtgtgtgtaacatttatataaaattaaaaaaacatacaggctagtatttatttaaaacaaaaacattgtacaagatgaaataaaatatttgggataagggatatgagaaatgttacaggagatggatttgcaagtatgcctcacgatatctatgtattcaaaagacaatgtccaagttattggacttggacaactgatagacatcaagcaatacagagaaaaacagagggaccaagagggagctagctttcggtaccttacatatgcacttcaaaatgtccaatatggtgctcaaatatccaacattgtatacaggtagaggaagcttgaagtatccatagtggccaggacaatccgaaaagcgcccatggcatgttgcacattcagaaaacttatttgcagcgccctaaaagaaatattccaacaaacagagcatttagttacaataattaacacttttcaccataaaatataaatgaaaggagaataaagggtagattttgagagcgagaaataatcaatctatataagatatgtacttgaaataaaagagtgcaaaaaaagaactggtgacgaaataagaaacaaaaaaaaaacaaagcagagattccatccccaagatcaacatgctgaaaaagtcagctgtattaaagtagactatcttgtcaaagattcaattgcctcacagcatttaaattatcacgaatcaaacacaagaaggagatctctgcactgaaattcatcattgaaaaaaaaacaatctatttaaagaaatttgttaaaaactagaacgataacaatttcatatgcctcaattgatttgtctccaagtcttcaaaatagttctctcttcaaacaaataaaaacgatgatgatgaaaaggtatacaattctatccaaagcactaatcgaaatgtattctctgctacaaaaaaattcaagtctacgcaaagttcagtaaaccatggacactaaatcatcgacaatgacaaaaaaaaactgcaagatcatacaacaaccagctataaataaaaatgatgatgatgatgataatgaaaggtacacaattttatcaaaagcactaattgaaatgcatattcattctgcaataaaatcaattcaagtctaagcaaaattcagtaaaccatggacactaaaatcattaacaaaga

SEQ ID NO: 218900 - DNA, 2857 bp, Cannabis indica
accggtaattacaagggaatttttcactgcggttctacggtttgtcgtacggaaggtgtccctgctctgtggaagggtttaacccctttcgctactcatttgactctcaagtatgcgcttcgtatgggttctaatgctatgcttcaatccgcgtttaaggattctgagactgggaagattagtaatcatggtcggcttctctctgggttcggagctggggttcttgaggcacttgttattgtgacaccatttgaggttagtgggttttgttccttttgttgatatattatggcctttgcatgtgtgttttgggttgtgcattttggggttcttgaggtttaaagttaatgtataatgaaaaagaatgaagtcaatttggtcgtttaatcgaatcttttagttttcaatagccaaaaggagtttgaagaagtgaataatagattaaagaatgaaaagggtatgggagaatttgacttggctcaggtttattaattaattcttagaccaaatagaaaagattaaagcactcactttctcaccaatcaaacacggactcacccctttttcgttataggaagtacagaacattagtaaatacgttggaggttgactttggcactcagttgttggtttaagacaattaaggctttttttggagtagttaagaagttggttagagctagtttgttgaaaacagagagcaaaagagagttattgtatggagagttgcagcaagtgcttgtattgtacctgtgattgtgattgaggacttatttaatttggttaattgcttactctttggtgtaactatagttcattgtgttagaaccatgtaaatttactgcttaagtcttgtttgtttgttctgataatgattatagactttgagctgctctgcctctgttttggttcttataatgactatagacttttgggagttattcaatttggttaattgcttgctctttgatgtagatcattgtgaatggaatcatgtattttctgataatgattttagactttaagttgctctgtgttggttcttgaatatgatttagttaactagaaaagaaaatatcattgactcaatcactcttttgttaagttggacatgtatcgttggtagtatctttaagatggaaacggaatcataacattaggtgaaagtcattaggttgttctttgtaacttaaaatttctggctttacagtgtaggatgtttgtatgaaaggtgtatatatgaatagaacaaccactgtaataaattataggtgaattttgctaagcaccccttatggatgttcatctctgaactgaactaccggtacccgtttttgtttaatgactatgcagttgcttccttttcattttggtgtctgtctttccctatttctctctttattttcttgcttttggtgagctatgaagattcttttctttcaaagtagaaccgtaatctatttttctcccgacaaaagtacatttaattggtaaagtttatacttggataatatggcatttagtcacccactaggatcaagttgctgaactcgtgcccagctaaactcgtgttgcccactcgaatgattgaagttagagtaattgggaagaaaagtagttttccttttaggctataaatagttcacattctctttcggttcctaatcaggaacacaaaaataaaaataccatgaagactctccttgccattcttttctattataattaagtgatacagttttctctgttttccttttcttctattgtgagatcttaatattatcttcaatatactttttattggagttgataacaatgtaggttgtgcaaaattatttatgcaggtggtgaaaatcagattgcagcaacaaaaagggctgagtactgatctactaaagtacaagggtcccatacactgtgctcgtacaattattcgagaagagggtcttcgtggactctggtcaggtgcagccccaactgttatgcgcaatgggactaaccaggctgccatgtttacagcaaagaatgcttttgatgtcgtcttgtggaagaaacacgaaggagatggcaaagtcctactaccatggcagtctatgatatcaggatttctggcaggtacagcaggtcctgtctgcactgggccgttcgatgttgtaaaaacaagattaatggcacaaagccgagaaggagggaatttgaagtacacaggtatgatccatgctatcaaaacaatttacgcagaggaagggcttcgtgccttatggaaaggactactccctcggctgatgaggatcccacctggtcaggccattatgtggactgtggctgatcaattaaccggtttgtatgaaaggagatatatggtcaatgcagccttgtagctgaggtaaacatagatttcattatcattctattgaatcatttttgaaggtcttatggatcaataatcaagttttgatttgattaacgtagtagaacaataacaagacttagaagagaagagcaagagtaatatatgcctcttactatgtgatatatgattgcagaaagactttggtggataccaatttttgtaactgtatcgatgaaattgcctaatacattagtttggtttcttattgtatcctattagttttgaagtccaactttgattgtattgtaattgcatgccatgaagactttgcatttgcaccaacatttcaattacatatttttaatattttctttttctatataaatacatatattattataattatggatataaaaattagaaaatctttttttttttctttcttaaatttgtagatttttttttattgtagatacattagacttttttatttgtagatttttt

SEQ ID NO: 218901 - DNA, 5587 bp, Cannabis indica
cggttttttcggtcagtttattattttaaaaaaaacgaccgttcaatgacggttttaactgttagcgattttttcgatttttggtttcgtcggtttttcagttccaacggtgttcggtaagtcagtttgaacagttttttcaattttttaaattttatgatcactcctactttaaacttcaggtacaaaaaagaaaatatattgttacaaatttatagattttgttaattttgtttgcagaaaaataaaatccataattgcaattatatcattaatcattttgaaccctagattaaaaagatttaagtacttctataattttacttgttatagtgctataactactaataaaccataataattgacactagtcttacgagtgtactcacaattagatgtactgccagtctgccatgccaccatttattattaataccaccaatttgggctgtcactttctcaatgagcaaaatgtgggcattatagcaaccccccaagaactcagtattgcacatgtatgcacactcgaaagctcaataactcatcatcatcatctctctctctcaaagaaaaagatgttccaactcttctttctgtcttcagcttaggtccttggcatgattaattttggaatgaaaataatatcattatttggtaccagctttcacattcttcacaaagcttttttcttaaaaacaaaatcttctacgtacaccgatttgtgacccactacccattaatgagtattgagctttgagcgaacctatgccaccaaattgcctataatgcttctttcttttttctttttaccacatatacacagagtgccgtactcatattgaagcgatgaaaataaaataaaaaaatatatatattttaattagttacaacgtatatttataataaaatatgatatttatagatataatattaagtttgatgtaatgattaaattagattgcatttatgttagaagtccaatgttcaaatctcaccaacaataattttgtttttctttttaagtttacttttgtcctctactttaaaaaaatttacgcctcttcaccaataattttgtatacccattttctgtgtttgagcagaactccattggccaaggacacttcgagccgatctcagcacttccatagcagaacaagtttattcttccacaacaactcgttttttacagcccaaatcttccaactaaccattgctgcctccaaaataacagcagcaggttaattttcaattaacctgaagaaccacctgctaaaatcattgaccactaacccagccatactaataacagataaattctagtaagaacgagcaaaatcacattcaacaagaacattaaatatagtctcataagcagtattacagaaagggcacatgagatcaacatgaacatgcttactagtcaattgtaccttagtaggaaggcaacccgaaatagcgcgccacaaaaaatgatgaacttttggtggaactgcaagctgccataaagtcctccatcctccccattcttcttcaatagatccaacattattactcaattacggaagcttatacacacttttaactgtgtaaaaactggttgactctttattctaatactactcatccatctcagttgtatcacttagctagatagataaaattaattccctctgttgtcccaaagaggtcattcaacacctccaaatctcatgtctttgttcccacagacagcaagttgaataccgtttgtccctctaaaccaggatgaaatgaagagacatatggattatccaaatcaagcaaccaaggatcaagaagaatactaaccaatttaccacagccaattgatcttctaacccctgcccaaaccaactcctgagcttcaaaaaggctacaccaaaactcagattttgtcctaaggtagctgttaaataactacctgaaggataatatctagctttataaattttactcactaaaaagtcttccttagtcaataatctccaactttattttcctaggaaagcaagattgtaatcacgaagatcacgaaatccaataccgccaatatatttgtgatgacaaagacgcttccatctcacccaactaacacctttactagttgaactagattgagacttccaccaaaactttgacatcattccttcaagacttgaacaaatttccctagttagcaaaaatatgctcatagcatagcttggcaaaccctgagcaacagacttcaataagacttccttacctgcttttgacaagaactgactctcccaactgaatatgcttgttttcattttatccttaagaaagccaagaattgtatttttattctttcccatgatacaatgcaaacctaaattaaagctattatctgaggcttccaacattcccaacatctcacacatatgagaacgaacatccacaatagtattcttactgaaaaaaaaataatgactttgcatagttcacctgctgtcccgatgccatttcatatacataaagaagttgtaagatatttgaagcttcttcctcatgtgccttacaatatacacatagctatcattagcgaatagcacgtgtgaaactcttgggactcccctagccactttacatcgttgatttcgctcacaatatttcaacaaagatgatgaacactctgcacaaaccaaaaaaaagataaggagatgacggatctccttgccttatccctttgcctggaagtatagggcccataacatgacccccataagtcacattatacctgaatgtagtaacacagtgtataaaatgaaagaaactagataccggctaaaccccatacgagtcatcatagcttcaagaaatgcccaaccaaccctatcatatgctttaatcatattgagtttaagcaccataaagccttccttcccaattctcttcctcttcaagtaatgcattttctcaaatgataccataatattatctgatatcaagcgtccaggtaaaaaagtactttgtgtattcaaaattacatcaggcaaaacaactttcaatctattggcaagaactttagaaatgattttatacagaacattgcaaaaagaaataggacaaagatcactcatatactcaggaaattttttcttaggaatgagaattatattagtttcattcaatgaggaaaggaaggaaccagccgtaaaaaaaatgcatcgctagtgatacaatatcctcgccaacaacattccaaaatttttgataaaataccgatgtcataccatcaggtcttggtaacttattgggatgcatttgaaacaacacatttctaacctcatctatggagataggctcaagtaagcttgcgttttgatcaactaagataagaattggaatgctctccaccactgttctgtagtcaacaacttcagaagcatatagttgttacaagtagtccacaacaatagaaggaagacaatctttcatccaacccaattccctatgaattttttaacttttgaatggaattgttccttcttcttgatgtggccatcacatgaaaatacttcaagttttgatctccttcttgaagccaaagctacttacttcgctgcttccaaaatatctcacactgaagcaagaaatcatttaactttaatttggcctttttatagtttgtcactgacacgggatcacgacctctcttccaatgataattttcaaatttacagtctttaattctttgtttaaaattactcgagtagtcttttccccattcaaataacacctctccacagtgttcaattttttcctttattgtgaaatccgaaagcaaactccaagtatcctccacaaccttaaagcacataggttcttttagctaggagttctcaaacataaaaatttgattttgagcaaccgtaatagaattcactggaactaaatgaaggggaaatgatcagacgtagacaccttcaaattaaaaagtttaacagaaggaaacttatcaagccaatgttgagtgacaatagctctatcaatttgaaccaccacccactcgtccgtacctctgctgcattcccatgtgaatgggtacccattcaattccaaatcatatagtccacactgatccaaagtatcacaaaatcctttaatcaaccaatttggataaggattacctccacgcttatcatcttgggaagtaacattattaagataacctattatgcaccatgaaaattcaaaattttctttcagagaaaattcttttcctcaagcttctattaggttcaccataaagactagtaagcctccacttcccataaccctaccctcaatcgaaacatcaatataatttgaaccataccctaacaactgaacctcttcaccaacttgccataataaagtaacaccccgactctttccttgaacattaacagaaatcgcacccttaaacccaacagacaaataaagcttttccacaacatcacttctcgacaatgtctcacacagaaagacaaaattaggtttcttttggaccaccaggtccttaatgaattgaaaagcccatgggttccaagcccatggaaattccaagatataagactcataatgactggtgggcctggaaccaagacccaccttgaacctattttttgatctagttcctacaatatttgcttgatccatttcctcatctaccatctcatcatccatgttactatcaaccaactcagtacgccgccttttacttttagtaataagagtcaactctttaccctgtggattgattgtactctgtaggcaatatctccaccattattttcatcacttatctttcctaaaatattgggatcacaattactttcaaaaattttggtatcagttttcataattctaatagtattaactgtcctttcacctgcaccagaccgacgagaatgcccactgcctatcaccatctcggactcttcattccctgtacgaagtcattgtgcaccaataaggtagtttttcttcttcttctacactctcatcccaatcccataaggtttaacaatttgatccacattttggtcaaagcgtttggaacattacctttctgaatgtccaatgataccacaaatgaaacagaaggttgggagatgctcatacttgaaagtagcccagatccactcgccattctccttacatagtttcatacgacacttcaatggcttctctgtatccactgtagcacgtacccgaagataaactcttcaaataccattgaaattttttagatcagatttgaaaaaagactcaatataagctcatgcactacatactaccttgtccatcatgaaccatgttcctaaatcatgaattcgcacccacatatccagtttatgcagacgaattgatcttggatttttaccactttttaaccaatggaacaacgggaacttattgaacatccatgggcacaaattaaccaatggaacacccacttaggatatccaattcatggtagaattggaataagcacaaattagtatccaattctttgatatacattaaaatgtatgtcatcatatggctcattgcatcaaaa

SEQ ID NO: 218902 - DNA, 3776 bp, Cannabis indica
atcatatctgtgaactgggttattaacatcaatgccaatgtcactgctgaaactgatgttactaacaacatactttcgcttcagatcttttctccaccgcgaaagtatgtactgcgctggaatctcctccatgccattttggctgaggactgaaagggcgtgcctgcacaaataccctcttaagttaaacatgccacagacgcatatgacctccatctccgggggattgaatagaacctcgtaatctctagcctccctcacatttccatttacttcagtttgctcttttactatatatgtcatgattggcccatcagagtttgactgtttcgagcaaaaacatgaatacattccttccacttccctttcgaaccttcgcagtatgttgttcgtgtacaatcttgagagctgcaactcgaaataacatcttgtttttgagtttggattctttgaatccaaatctgccaatgattcaagctgatagtgtttctgcagagctagatcatacttatctaagaactcttttattggagtatttctgttcagatattcttcgaaaaatgataagacaacctcatttggttgtagtggaaacatacctgccaaaaatacatctttcaaaaatacaggaacccagcgtttcctgtcttcatataatgattgaagccatttctgatctctaattccatgacgctgtaccatgtcctcccacgctgcctcgaattcttcaggcttctgagagtagtatactgctttattcaatgctgcattaatcgcattgtactcaaacaagcttcccaatttttctggtaccatttgcattattctcgataggcaaaggcattgagtggctcttgggaaaacatcagcaacaacagtttgcaatgtgtcattttgatcggaaattatgacttgtggagggcgtccagacatacatgtaagccacgccctgaacaaccatgtgtatgattcaattgtttcacctgcaagtaaaccacaacctaacaaaacagattgtccatggtgatttactccaataaacgaaaccagaggtacttcatatttgtctgtcaaacatgtagtgtcaatacacactacatctccaaaataattgtaagtgaccctagtccttgcattagcccaaaacaagttcctcaagcatcctttctcattgagatccacaacataaaagaaatgtggatctaccaactgtgaacgagaaaagaaattttgaactgcttgggaatctcctgcctcaagtttcaactgattggagtaatcaatactcctaccagattcttcttcctcgacttctgtgttcccattcacctcagcatcaactatcacagttctgaatagcttgactttctgagtttcatcggggccatctaattgcaacgctcttttggttccaacgcctatgttcttgtgggatttgtagaatttcccactagcagggctaatcaggtggttgtgctctagttccacttcaataattctccatcttttagtgtccattagtctgaattttatcattgctgggcaaccagttcttgtttctggtcttgggcggttagcgtcacttttctttttgaaacctgcactgctgcagctaagttttcctctgtatctttctttactctttctataccatgtattacttactctaacaccaaatcctcgatctttggcataacaattataaaagtaatatacatcatcataagaatcgaactccattccaaccgaaggaggcaagggatttcccccttggagtatgccaccttgactgacatattcagtcattgcacaatctgcctcggtctccaactcatcgccgtcatcatcgccaactggctcagtgttgagagaaacttcttccatctataaacagagaaactgaaaaactaataagccaacaacaacaaaaagtgaaaaactaagtaacaatccattaagatttccaacacaggacataacattgcacctacttaatctcatttctatggtattcactaatcataaataagcatatctcaattaccacctacatcccaattcaaagacaaaaattctatgtttgcaattgaagatgcattcatagttatgatactaataagcttttatcattttcaccagtttcccaacttttccagcattaattatatacatattcaatgcaatcaaaaaatttgacaatacctcaacatatataagatattcatcattttctaattccttaatccttatttcctaaaatgatggggaaaagcaataacttgaaaactacccatgtactaatgttagatgatctacttttccttgagcttaattgataaataaggaagtgagcaaaagagagcaaaagccagaaaaaggttattgttcttcaaattttctagcaagtaaaagaaattcataaccggaaattggtgtcagcatttttgatgggtctgtgcaattacctcagaagagaccgtgccggagaagcgtgaagcgcacgcgccgtgtgagcagagaaacgagggctttattagattactccctaatatatcctcatcaaatgatcactttgaaagcataaataaaatcttaaacttggactgttgggttgggatagtaatgtaataaaatttgaagtacagatttctcataccaaaaagttttgattttctatccaaaaaaaaagttctgattttctattaaaaaaaaaaagttttgattttgatgtgtttcaaaatttaagagtcaacagattttacattatagactcacaaaagagaagcttaggtaatggactcacagtcacatatcatattcacccttacgacgccgtttctcttgaaacttttttcttttcctcttttataaagaaaagaaactgtctatgttcttttgatttcccaaatctaatttggttttatatgttttttcatctatttattttatattattttaaaaattacaaatgtaataagtttaaagttattagttttgaccataattataagaaatcatgtaatgatattattacttatgtgatagccaaatttattttgacaacaagtagtactagtagtattatttggtggtgaaaaaatttcgattgtaatcaaaatttgttgatagcaaatgttatttttgaataaattttgttttgctgaaaataaaaatagcaataaaaatttaccttttattttcctttttttttcgcaaaaggaaattttctttaattttctttagtcaaataagagtgttgactttgagatcgtagtctatttcttattttattaggtaaataaaaagagaactttttttatatataaaaaagaaactaatcccaaaaacgacatcattttgaaaaaaaaagacatttgagaaacaatattttacaaaacgacaccaattaagaaaacaacatacatttggagaaacgacatcattttgaaaacacgacattttttgtagcaatattttacaaaaacgacaccaatcaagaaaacgacatcattttgaaaaaacgacatttgagaaataatactttacaaaacgacaccaatcaagaaaaggacatacatttggaaaaacgacatcattttgaagaaacgacatttgagaaacaatattttaaaaaacgaaaccaatcaagaaaacgacatacatttggaaaaaaacgacatcattttgaaaaaaagacattttttgtagcaatattttacaaaaacaacactaatcaagaaaacgacatacatttggaaaaacgacatcattttgaa

SEQ ID NO: 218903 - DNA, 6677 bp, Cannabis indica
ggtaaaatatttccaacaggtagaccatggatctagaatatctattaagtcgatagaatcctatcttgctcttattctttcagatagcctgaggcttgactgggtagaagtagagaattttttctggagttgggacctccacgttcttagttttgcacaaaacataccatcctacaagtagtttataacttgggaaattaaatggaaagaagctatctcgactaccacacagaattctgcgaagtagctcctattaggtagatgcacgctatcttgactacccaactctaaattctgaagcctccatctgcgcatttactgggtaactctccccaaatagagagcttgttctagaccaagcctagaacactttgaagaccccggatagtcttgtatttccagaggttatcatagttctagaacttattttggtactaatacatcctctgtccccttttatctttcttttatgtcaggaggttatttctaaaattatccagcgtggtgagcttagaggccttatccatggtattaaaattgccccttcaggtccttcaattttgcatcttatgttcgcagatgatactattttgttcggttgtgctaatgaaggggaagctaaagagttcattaattgtttatccctctatgagagctagtcaggttaggtctctagcaaatcaaagtccagtattcttttctcaaggaatttggataacagtagaaagaaatcaatcttgaaatgacttcagataaggcagtcaaatggtgaagagaaacaccttggcaacacatttgtgtttaagaaaaacaaaagaaaaaggaggacaatcaaaagttgaaagagagtatggcaaagcgcttggagggtttgaaattaaaacttttatcttatgcagggagactaactttgattaaatcagtggtttctgctatgcccatttacgttatgttaacaaataaagttccttttggcgatctgtcaaagtttagatgctatagacgtgagaaagttttggtggtcgagtaatatggaaatgatagatttatgtcctttaaatcttgggatcatctttgtcaacccaaagttcatgggggtttgggttaagaaggtttgaggacatgaacaaagctctcctctcaaagcttgtgtggagtttagctatcaatgattcaaagtcgtagattcaatatcttcgaatgaagtattgtagatatcagatttttgggccgtgaaacacaaagctagtgattctcgtatttggaagggcattcttgactctagagatatcatctttaatggttctatttctctggctactaaaggggattccattgatgtgtggagacaaccttggattccttggttaagcttcattgaattttaagagttaacgaggaatttgagcactttgagtttcactatgaaaatagtgggtggtatcttgattggttgttagtggaataagaaacttgtgtttctgatttttggttcttctctggctagtaagatcatggatattcctagaattccgtcttcctttggtgatcaggttttttgggaaacacacaaaaaatggtatgtttactgtcaaagatgcttatgttgttgatcagagtgtgaggtttggtctgaagcaggctatttgggaatagatttggcacccaacaatccatcctaagattacagtaatgttattgagaattgttagaacagaaagttagttagtggtgtaactgaaatctattattcctgttttcggttgttattgttagttgttagttagttcattccttctctgttttgttgcttagataatttgtatataaactctattggttctgtaataagattgagattctcttttcttctccattactcttttcttactttcttctctttctttctctttcgtttagcttttgttctcatcaatggctaactgatttaacatggtatcagagcagttccctccgctcactgctaacatggctactctaggtaacaataacacaattcctgcagctaacaacacctgaacaaatgcccctagatctcaagccgaaaatagagctcgacagaatcaagaaccggccttcttcaaccacaatctttcagttcgtctcaatgatcataacttccttttgtggaagtagcaggttcttgcagcaatcagaggaaataggttgctgagattcattaaggagccacctccagaagaatttctgaacaatgaagatcatatgcaaaatagagtcaatccaaactatggcgattgggaagttcaagatcagttgctcgtctcctggcttctgtcttcgatgactgaaagcctcttgactcgcatcgttggctgtaacacagctcgacaaatttgggaatctctggagaaaaacttcacattgcaagtttccttataagatcctcgagtttcgtacgaagctgcagaatttgaagaaaggaaatctgagcctcaatgattatctgctgaaagttaaataggccgttgatctgatagcatctgtaggagaagtaataagcgatcgtgatcatgttgcagctatcttcaaaggcctcccaagtgaatatgatacctttgttatctcttcgaacattcgaattgagaactacacggttggtaaaattgaggctttgctgctggcttctgaatcaagaattgagaaatctagaaaagaggtggaagcaagtgccaatcaaaatgcgaaagagcaagatccattattggaagctaatcttgcctttagaagattcagataacaacagatgcttggcagaggcaatactcagttcagtataggtcagtttggctatagaggttcaaatcgaggtaatgaattctctcaaaactttaattcaaattttagaggcaaaggcaactttaataatgctagaggaggcagatctggtatgtatgtaaataatggagtacaattccaactttgcctttgatttggacatactgcattggactgtttctatcgatttgataaggcattcacaggacctgttcaaggtggaagcagtggcactcaaacatctcaacaatctcagcaacctcaggctaatctcaccataacagaaggagtcaatgacagcaattggtatccagattctgaagataccaaccactgtactccacaagctcaaaatttagccacctgctatgattatgctggacaagatcaaatgcatgtttgcaatggttcaggtttgtctataaaacatatttgtcaatcttttatttttccaaagcactcatctcacccacttgtgctaaataatctccttcatgtacctgaaatcacaaaaaaccttattagtgtgtcaaaatttgcaaaagataacaatgtgtattttgaatttcatgttgatatgtgttttgtgaatgaagagatgactcgtactactttgttgatggggatgcataagaatggccaatatacttttgatgtttcacatgtaggacatgtctcaccaagtcttgaagctggccaaagtattaaagataaaaaaaaacctctcccttaaaaccagcaacacaagctgtcatcctgaaataaagagcacatacactgttactttgaaactctacagtcagtgtttcgagttgtatcaagtgcaattctagtgttcaaaatgattttactttgtggcataatagattagggcatccttctgagaaaattgtacaaactgtcctacaatcttgtaacatgcctataagcaataaaatctctcatttttctatatgttcagcttgttgtcttggcaagattcataaatttccttttcctagagcttcagctactgtcaattcagaacccttacagttagttgtgtctgatctttggaatccatctcatgtgaattcattcaatggctataatactacattcactttgttgatgtctactctaggtttacatggatctatctcttaatacaaaaatcagatgcctttagaacatttttgcactttaaatcttaagttgaacttcaacttggaaagtctcttaaaaccttacagacaggttggggtggggaatttagatcttttaccaaatacctaactgaaaatggtgtgcaccacagacacccttgtcctacaactcatcaacaaaatggcctagctgaaaggaagcataggcatattgttgaaaatggcctaacccttcttgctcaagcctctctcccactcaaattttgggatgaagcttttaaaactacagtatatattcataataggctgccaacaccattacttgagcacaagtcaccgctgaaagtattgtttaacacaaaactcaactattcaacctttaaaacctttggttgtaagtgcttccccaatatcagaccctataacaagcataagcttgaatttaagtctgctacttgcacctttttaggttatagtctaaaccacaaagggtataagtgtctagacaccaatgggagactttatatttcaagggatgtaatatttgatgaattctcttttccctacgaacaccaaacaggccattctcaaccctcctctaacctgccttttatctcacatgtctctgctatcataccaacttgttcccactctaaaccaccttacaaaatggttgatcttatccatcctattacatctgatgccactacacatacaccagatttacaagttgaccaacatgttttactaaacagctctaatcctgaccatgatccacatgctgttgctactaatgactggtttcccagccaaccttctgtttatgatgctggtgaataatcacatgttgtagctccacaattgcagatacaccaggtgctcaggtgtctcaaatgacagaaaattctcctactgttgctgcacccactgaactaaatgtgaacactgatcctgatgctgcacctattggtggtactcaagaaccaggcaggggttctgctgttgcttttcttcaccagctgctcttcctttagttgctggttgtctcaatgctcctggaaagaacaacatgcacagaatgcatacaagatctagatcaggtgtttataagcctaattccttcttagtcactagagaaccagcaaatataaaggaagctctctctcaggagcattggaacaatgctatgagtgatgaaatattggctcttgctagaaataggacatggatccttgttaaacttccaccaggtagacaagctattagttgtaagtgggtttacaaggtcaaagaaaatatggatggctctgttaacaagttcaaggcaagattagtggctaaaggtttccatcagcaagctggatttgattttacagaaacctttagcccagttgtcaagcctgttacaattagggtatttctcacactggcactgtctaaaggtcgggaaataaagcaactagatgtgaataatgcttttcaacatgttacaaccacccggctttgaggttcctggacaagaacacttggtgtgtaaacttaacaaagccctttatggactcaagaaggcaccaagagcctggtttgacaaattgagaaactgtctattgtctcttgggtttgtgtcctctaaatccgatcattctctctcacacggccaactcaactacacttgtattagtatatgtggatgacattttagtgacagggagtgattcccaggctgttagcaacctcattgctgccctgcacactcaactttctcttaaagatttaggcactttaagatatttcttgggaattgaggttcgatacacaccagatggcattcatctttgtcaagccaggtatgttaaagacctcctcctcaaagctcaaatgtctggggccaaaccgttttctactcccatgactagtggccttcgattgtctgctcaccaaggggaccctatgccagatgttcaattgtataggtcgactgttggggcactgcagtaccttacaattacaagacctgagttttcttttagtgtcaacaaggtctatcaattcatgcagaaacctttgttgacacattgacaagctgttaaaagaattcttagatacattggtggcactactaactttggtcttcacctaaccaatcctcggtcatttgagttaacagcattctgcgatgccgattgggcatctgatccagatgatagaaagtccacctctggctttgctatctttttttttggctctaatttagttgcctggaaaagcaagaaccagtagactatttctcgttccagcactgaagccgagtacaggagtgttgctaatgtaacaactgagcttacttggatgaattacctattttctgagctgaacattcgaatgccacaaccacctacagtctggtgtgataatctcagtacaatcatgcttacacagaaccctgttctgcatgccagaacaaagcacattgaactcgatttgtattttgtaagagagaaagtcttgaacaaaaccatagagatcaaacatgtttcagcatatgatcaacttgcagattgactaactaaagctatatcaagtcaaaggttcattgatttcagaaccaaactcaaaattgaagaccattcaattatgagtttgaagggggtgttagaacataaagttagtggtgtaactgatttctatttttggttgttattgttagttgttagt

SEQ ID NO: 218904 - DNA, 2158 bp, Cannabis indica
atgagactcaatacttagttgaagtgctaggcaccaatggcaccttctagcatttttctttacaaatacttagtaacttatcataataattattaaattaaaataaattggcttgatttaattccaccaataataatatgtctagaataccaacatgaggtaacactttaagaataattaatagttatttattaagatacgtagaatctaacacttaaatacactaatataataatatggcactttatgctaatggtaacaagcatttctttttgtgagctaaattttgttacgaggatttgttgttttttgttggtttggtgcttgggtcactaggtactgatgattatattacttggcattataatataaatggtgagtattttgtttaaagtgggtatcaagtggcgatcaagaagagagaggtggaggaggatatggatgggatggaacagtggtggagacgggtatagggtttgaaggtcccactgaagatcaaacattttctttggcgtttttgtcatgggtggttgccaacttctaaggtgctacagaaagtggaatgagggaggtggtggggtgttgtaatgtggtttgcggaaggaagatgaagattggtaccatgttatttagggttgtgttcaggtcaaatttttttgaaaagttgcaggttttgggaaggtggttcgaaaatgtggtgatgaagaccttatttttttaagctgcattggaaggctgatgccaaaagataagtttgatttctttattgtcttagcttggaaggttatgtgaaactgtcttacataaattttttgtgttttctgtggatcgggatttggattaggtatctgattatttgcattttttgggatacgaaacactgtggacgtctgaatgaggttaggccgaaatgtaaatggcaacctcctgtggtgggtaatttgatgattaatgtcgatgttgcgattgatgaggttgtcgagtgttgtagtacatgtggggtggttcgatatcatttgggagagattattgcagcacaaatgtataattttttaataggtcatttttcccttattgttgttgaattgttagctataaaatatgggattgagttgagtggtccatctggcgggttcgaaatgacaaggctcacactaataagctagataatgttaaatattacattgattctattcgtatctcttatgtagcgtcatgcttctcttttctctcctcctgctccgaggcctttagagatctagcatccccctccccaggagtggcttaaactgaactgtgatgttaaagtgggtttggaaagcatgtgtactgcagtggtagtaagaaaccatcttggaacggacttgttagaatttttgaatgctctatgtggggaagcggctgcatgcttggcgttggaagtagcttcggatattagatgcaagtttatttttgtagagagcgactcgagagtagccatcaatgcacttaatgggtaggagactcattgggcgcttgaacactatgtctcttttttaatagactatctcctttgtgtgttagttgtattttctctagtattagtaagacctgtaattttatagcccataatgtgacgaaatgggcctttacccaccagcggtttggatgtatcccattttcttccattccgacaaatcttttctgtaatgaccatgagatctattgatatctatatatacacgctttttaattcaaaaaaaaaaaaagagttgggtggtctattatctataaagcgttgtatgatttcttctgattgtagtttggttgtggcaatgttggataagtcgcctaagctccatgggagatgggatctactggttgtggatgtacgactgataatggagaataatattatgagtgcgttttttcagtcacgttttgtaaataaagtggcgtattttataattaagaatattttgtattgtaaaacttttagtttataaaatgaaagtatttttccgatagtaattgcctttgttatgatggatgatttgcctctcttgtgtcataattttttgcaatgtactataagaaaaaaaacatctttttaatttttagtattccttaattaatattttttttgagtgtagcgtaatagtattttacaatcatttaa

SEQ ID NO: 218905 - DNA, 4832 bp, Cannabis indica
atatatatttatatatatttaccaaaaaaaaaattaatctttaaataaattgtataaatcataagacagtggaacaaagacaattatataacaccaatctagaaatcaaacattaaaccagattgttcaaacttttcttgaataagcttcttcccacgctcagccatttgaggtgttaaataattcacccaatctcctatctcacctttcctataaaatgaactatttggaataccaacataatgtctcccacttttatttacctccaaatttttcatattttcaaggctacacaattgttctattttttttggaacgccttgattttcttcctcaaccgaaaatggaaaccccgaaaaatctgcgatctttctaataaaaaacacattgttttttttaagttcttcatatttcaaaaacaatatcttgtgaggcatctttaaacttgctttccagaatcccaaaatatggtcccaaaatggtccatatatgtggattcccttacaaaacacatcaaagcactcttctaaatgacttggttcaatattatccccagaaattttatgaacaaagtgccaatgggaaacaaacaaatccaatggatttctacaaatatatattattttagaattggagtacttgatggagggtggcaaggaagggtaaggagtatgtgtactcataattcttggctttgtttcattaggtaataatgataattcaagttcaccaataagactatgtggactagtactaaccaaagggtgattattataattactagtacgtttgacaatagaaaaaacaagagattttaaccaagtagtacctgattttgggcaagaagctaacaaaatatcatcatcccttgctacaaattgagtttggaatgatattatacctttcaagacgaatttatggacccaaaatccttggtaacaataataaggattttgatcacttattggatcttcagccttttcaagctttgctagaatttcatgaatggtttcttctccctccattaattcttcctctcttttcttgttcttagttacatttgatatttccattattaattataattatgagacacaatatactagctcaattatatagatagtagtggtgagtgactctatataataataacattaataatgaaagattgtattgattttctctctgttttggttttatgtttttggaagggttgaatattattttttcctaatacaacatgtattatatattgttaaaggacatatagttgttgtacagtagctagctaagcttcggtcgccaataataaaataattttcacatttcacatgttaattattttaaattttttaacttattgattgaagttatgaataataattcagtcgaagaagatgaagaagcaagatcccaaaagtggttgtaatttttcggtaaatggtaattaagtatataaattacaaattgttcttgttatgataaatgatatttattaattattgtacttaaatcttttatcaatcatatgtcattatttgaccaacataattagcattatttgtgtcattatttgaacaacatattattagtttgatatgattagtgttgttggaggaatttagacaatatcaaaaactgttagtattaaaactaaatgagaacacccacttatagatttacaagtattcgcctagattggcaaatactcagaataattaatcaaatataaaagcacataaacaaatgaacattaaagaattatagtggtttagtcagagcccgatttgcttaatccactttaaaaggagatttgtaattagtttcattcagatttgatcactcctttatatagaaagaaagtgatccttcagtttacataaccggtcagatagaatgcatgtgactaatgtcggtcacgttttggacattcatgtaccgacaacatataacttgtgggttctaaatgagttctcgtgcacattattcatttggagctgacacttgtaaaggcgcagtctttacattgggcacaggggagaaacattgggttgtagcatataatcgatatatgcgcaactctggcgacttctctctatgttatgcttctattctactatgctaggcatagtgtgcgattggatcttgtcgcggtcgcaccttcttgcaagtttcaatcatgcgaggatagccctgtaggggctgttattaacacatcatccttttctactgtgtccacgagtcagtcgtatacgagactgtacttgtatttctaggtaaaaaattcatcttataacacatgtccttagttttgcgatgatacttgtctgtcacgtgacgaaactatctcgagggatagtcgagtagtcacattgcgggtgacgtctaaattaccttcttgaggtgtatgaatggaggtttgtaatttacctttacgtttccaaggtgccacatcattgaaaccattcggggttcgtgtccattgaatggacgtgcaagcgagtctcggggatagccattcaatgaggcatccttggtttttactcgccacatgtcatgatctcaataggacatctatataaccccaaatacaaaaatgaggcttctatttttcctcttattttcatttgctcaagctttcgtaaaaataacatccagtccgatttgattggatattaaaaaataacatctaatctgatccgatcctaattagatatccaatgtttgacggtcggttgtaattggatcgattggttgttattggattagattaatttatgcacacccatacctaaggaaaaaaaaaaaagtaattataaaatataatattattttaattgaaataatacattttcttaaaggaattgaaatagtatatgaaaatataaaatgaggcaggttgcaagtttccaaactttagttactcctactttttggtggacaaataccagacctaaaataccaaaaacatgactcttaatttaatttaatagatataattatgatggagcaaacacctcaaaaaaaaatgatgaggtattgtaaaatttgccatgtaaaaataccaaaatattactttatgttttattctataggtatcaactgctaattaataattttatattttatctgaatatttgtagaaaaaatacttaaattttaaatttacttaaaataaagctaaattaggacgaaaaataagaaaaataaacagagagaaaaaccgggcaaaatttctggtgtatattgtattaattgtattaaatcctcaatgaatgtacatgaccgttaatggaaaatatatagtacatggaagattatctttttctaacaataaaatattcatttttccaatgattggctgaataaaaggaatcccaagattttaggaaattctagaaatctctaattgacagctcatggtatatcaaatgatgaggtgtccaagctgaggtaaacatctaaatggaaaatatctaatcttttcaacacgctccctcaagcttggcttggttgatcaacaatggcaagcttgtctttcaagtatgagaactgacttattgacagtggcttagtaaaaatgtctgcagtctgttctgaggtgggaatgtgcctaacttcaacaataccttgtttgatgagatctctaacgtaatggacatccacctctatgtgtttggtgcgactgtgaaacatgggatttgaggagagttgatttgcaccagcattatcacaccaaatgacagcatgcaatttatgtttgatctcgagttctgtgtagagtgaatgaagccaagcgatttctgtggcagtttgtgagagggccctgtactctgcctctgttgaggattttgccacaactttttgtttcttagaaccccaggttatgaggtttcccccaatataaacgcagtagccaatagccgactttcgatcatcaatggatccggcccaatctgcatcactaaagcattcgacattccactcatttgacggcttgaagagaatgccttgtccaattgtgccttttaaatatttgaggagacgtttgcaaacattacagtgatgttgggttggactgtggatgaattgacttaacttattcactgtgaaggcaatgtcgggacgacttagagttaaatactgaaggccttccatgacacttcaaaaaaaccttggttgatcgaaagccttgctgtcatttatattgagtttgtcactctgagagataggagtaggacttggcttagagtgtaacatgtgagttttgttgagaaaatttattgtgtacttgctctgtgagagatggagaccataggccccccgagtgatttcgaaaccaagaaagtaatttactgagccaagtgttttgagtgagaagcattgctaaagttttgcaataatactgcgaacagtgagattattattgcctgtgaggaggatgtagtcaacataaacaaggagatataattcaacatcaccttgtttgtaaaagaagagagaaggatcggatacagagctgtaaaagccaatggaggataatacttgctgtagacgatcaaaccaggctcgtggtgcttgtcgaagaccatataaagctttctgcaacttacaaacatgatgaggatgtgaggtgctaacataaccagcaggttgctccatgtaaactgtttcggagagtgtgccatttaggaaagcattatcaatatcaacctactgtatatcccattgattagaggcagcaagatgaagaataactcgaatggtggaactcttgacaaccggactaaaagtctcataaaaatcaactccaggttgttgctgaaaacctt

SEQ ID NO: 218906 - DNA, 5975 bp, Cannabis indica
tggtgtgccttggccatgagtcttgacacgagaagacacaagtagtcatttgtgggctagtttgcatacatgcatgggacagatgcaccatgctagaaagagacagaggtcaaatgtatgctactagtttggtgtcttatcttaagggcttggcaacatgtgtggaggcatggtgccttgaggattggaccatggacgtattggagtccttgggcaatgagggagactgttcggacagtatcgaatggggcttgattagaagcatcgtcatatcagcttagtgttgtcatcttgccatacatgccaccttggtcatgagtgactaggtgagcgtcggtattgagattttccttatcatagtgggaacctatggacagtgcaagtatcttagcttgagagcctcgatgcatggatgcactcatggatacttgcgagcatgactcgacaagagttattcgagggacgaaagtgtgtacgaggcacacagtcgcgtagaaaatgaacccattattactcggatagttggaaggctgaccttggctttgagaagtcaaggtgatgcatgggtgtttcactgcctgaaaaagtgagcttgtgacacttatgagagctcggggtgtaccaaatttagtaaaaatgtgcttatgaagaaaattaagcagagtcttaccatcattggttcttgtagcagcaacttccacccatttggatacataatccacaactaaaaggatatactcatgattatgagatgatggaaaaggacccatgaagtctattccacatacatcgaaaagttccacttcaagaatgccatgcaaaggcatctcatttctccatggaatatctccagttcattaacaattatcataagctttgacaaaatcattaacatctttaaacaatgaaggccaatagaaaccactttgcaataccttagttgttactctaaaagctctaaagtgcctaccacattgttcagtgtgataatgggtaagtattgaattcatttcttcttctggaacacatcaccgaattacctgatcaacacagtgcctatagagaattggttcttcctagttgtaatgttttacctctgaataaaactttttcaactgccgctttgtagtatcaagaggcaaaacttttgctactagaaagtttacaatgtcagcaaaccatggtacttcatttgctgaaaaaagtagttcatcaggaaaagagtcatttatctatactgctttctcattttctatttcttctatttcaagtcttgacaagtgtcctgctactcaattcttagttcctttcttgtcgcgaatctccatatcaaattcttgaagcaaaagaacccatctaatcaggctaggcttaacatatttctttgtcatcaggtacttgatagtagagtgatcaatataaacaatcactttgttaccaattagataaggtctgaacttgtcaaatgcaaagacaatagctagtaactctttttttattgtggcataatatatctgagcaccattaagaaatctactagcataatagatagtcctgaaaaccttatctactctttgccccaagactggacctaccgcataatcactggcatcacacattagtttaaaaggcaaattccaatttggagacactaaaataggagcagaaataagttttccctttaacacattaaaagctttaaggcattcatcattgaattaaaaaacaactccattcattagaaaatttgaaagatggtttgagattttggagaagtctttgatgaaccttctattaaatccagtgtggccaagaaaacttcttactcctgttattgagactggaggtggaggcttctcaatagtagcaatatttgcatgatctacttctatacccctgcttgaaattttatggccaagaacaataccttttgtgaccataaagtgacacttttcccaattcagaacaagattagtgtcttcacaacgctgcaaaattgcttctaaatttttcaggcaagtgtcaaaagaagacccaaatacaaaaaaaaatcacccatgaagatttcgatggttttctctgtcatgtctgaaaaaataaccaccatgcatctctaaaatgtcacaggagaattgcagaacccaaatggcatccttctaaaagcgaaagtaccataaggacaagtgaaagtagtcttctcttgatcctctagagctatggtagtttgatggtacccaaaataactatctaggaagcaatgattattgtggctagcaagcttgcaagcatctgatctaggaatgacaaaggaaaatgatccttccttgttgccttattgagcttgcgtagtcgatacacaccctccatcccgtaacagttcgagttgggatgagttcattattttcattcgtcaccacagccgtaccacccttctttagaacaacctgtactggactcacccatgcactatctaaaattggatagattgcgttgttgtcaagccatttcaaagtttcttttctcaacatttccttcattgttggattcaacctcctttgagcatcaatataaggtttgttatcagtttcaaggaggattttatgcattacaatagaggaactaatccccttaatgtcagctagagtccaaccaatggcaagcttgtgggctcttagtactctcaaaagcttttcaagttctacaccaaaaagatgagtagaaacaataacaagaaaagttttgttttcacccaagtaaccataccttaaatggtctggcagagtcttcagttcgagctcaggtggcatctccacagaaggcaatgatcttctaggcccttgtcccaactcctcatatctttcttatagtaaggaccttgagaatttatccaatttaaatattccattacttcactatcatcaaagtcctcgcgaaattgagttagagccatcatcaaagaattagaaaataattcctttttagaagcaaatcggtcagcaacatttatagcaaagcaactcactctcccttggataattcatagcttataagacattgaaaacaacttcctcaccttgaactcgcagttttaattcacctttctaaacatctataagtgcttgtcctgtggcttagaatggtcttccaagaatgataggcacatcagcatcctcctccatatcaagcacgatgaaatcaataggaaagataaatttatccactttaacaagtagatcttcaataacaccccgtggatgttaactgatctatctgctaagtgaagagtaactgctgttggccttgcttaccccaaactaagtctcttgaatactgataagggtattagattaatatttgcacccaagtcacatagtgcttgcttatattggaacttctcaatggtacagggaattgtaaaactgtctggatcccgaagcttctgtggtaatttctttttcaaaatagcactgcattctttagtttgagctaccatttcataatcctctaacttccttttcttggacaagatctccttcataaatttcacatagctaggcattttgtccaaggcttcatctaaggaatattaatgtgcaacttcttgaatacctctaaaaatttagaaaattgtttatcaagtgtagtatttctaagccttagaggatatggaactcgaactggctactcagctgctactagagggatctttttatgttatgacagtcatcttttacctcttcaatagttgttccagaattctcatcttgattctccttattttgtaccacaggttgctctacttattttcttgaggtctattattgagtagagttgctaactgccccacttgtatctcaaggcttctgataaatgctctggtcttagtcataaactaagtttgtgtgttagtgagggttagcaaagcagcctgtagttcataagatggagcttgttgattacactgttgaggagtagaggattggcttgtttatgggttagcttggtgttactaaggcatattttgctgggcttgattctaattattcttccatgagaaatttggattatttctttacccaggattgtatgtatatgaaaatggattattgaattgcctctaaaagttggcaatagcttgcacttgagtacgtcatcaaaacatctttagtagattcacacttgtcaagagtgtgtggtcctccacagatttcacaacccgtttgtacaactttgacagcttcagttgtcttctacaattacttagtaagagtagctacctgagatgttaaagtagtaatggcatccaattcatgaataccaactttcttcttcacagtcgtagtttcaccataccattggtggttgttcattgccatgtcttcaagtaattcataagctctagttgcactttcacaaaaatgccccccaaaatgcagcatcaatgatggtcctagtagtaggacataaaccaatataaaatttttaaaccaccatccactgctccataccatgatgagggcatattctcaatagatctttaaaccgcttccaagcttcatacaaagattcaccatcattttggcaaaagttattaatttctcccctcaatttagcagctttagaaggagggaagaatttagagaagaacttttgagctagatcttgccaagtgacaattgaatttggttgtagatactttagccatcttttctctctttcctttaaagagaatggaaaaagcctcaattcgaaagcaccatcactcactccattgtatttgaaagtgccacaaagctctagaaaatttgctaagtgagtgtgaggttcttatggaaatccactaaattggagagtggactgcaccgtttgtaggatagctggtctgatctcaaagttgttggcctctactactggtggtctgatactgttttgtactcccgttaaagtagggagtacataatcacacaaactcctttcaacattagggtgagcctgacctccttacaaaactctaggaattatatcttcattgagctccatttctctgctttcttggcctccatcttgttctttctgttttgcttacacgatttctcaatctcaggattcaaaggaacaaggctatatgcacctcttctgttgcacatataaaagattcgcctgagatggaaaaaattggcaactaaataggttagaaataagagaaaataaaatcaaattagaataaaaattaactaaactggtattgataaattttcaatcctcagtaatagcatcaaaaacttgtttgacaaaatttaatatgcaagtatacgcaatcaaaataagtaatataatgataaataaagtattgttccctcgaggattggctatcaattaccaattaattatttccttggttctatttgataaataataattgttggataaaaggtaaataaaatatacaataattaagaaaaataacagtaataaaaacaaggattattatgatccctaactatcatttattttacttcataatgtaatgcccaatttctcttcttcttattcaattaataagttgaattaagaagtttataacctagttaagacttataaacccaatctattcgaaaattttctatatttctatggtaagtttaatcacaaaaataacattaagcataacaactaataaaattatacaaataacttaggtactttcgtcctaaattaatttacatccatatcaatcagagcatattcaagtctcaccttttagaatttgaatttgaattcatagataacaattatagatgactagtaaataattgtaaaatcaaaatagattgtaaggaaattgaataaagagaagaagaagaaattgaataactacattaattcataaaataatttcaagtggtttacataatgatctttaaaagaacttagctactaaaagtaattctgaaataaaagaaatttaactaaag

SEQ ID NO: 218907 - DNA, 2647 bp, Cannabis indica
tgttaataatcgaaaaaggtacacaaattgcagaatcaaacacagggcaacaagaagaaaacaatggcatgttcgatgaaatggtagaacaactcgacaataaaataacaaggaagactcgttagtcatgacaaatcatcgccatcaagaaattgaaaatggataggtatgtaaggctaattaagattttcacctcttgaatttttacataccccaaacttttcagactattaaaaattctcccctaacaatttaagattgttggattcaaaaaccttttatccaattctgttcaattttacaaatgcggcaattatccatatacataatcgtgccccccaaatttcgatatttaccaaattgtgcccctccttgaactttcatacacgtcagacttccgtcaatgaaattggacaatagtttagggagaatttttaactgcttgaaaagttcagggagcatatatatgtcaaagttccaaacaaaaaacctaattagcttaaatttaattacaccaaatgcagcaattacccaattacacgagcaagagattacttcaaatttttaattaattagtaacacaaactatactacaattataaatgtgcagctaagttagataaacttacatttacatctttccataagttatctaatattgcagcaggaacatggcgccaatggtcgattgttatcggcaccattgtcttcgcctgcattcctaaataacattgcagctctctatttggagtcccaatagattttcctttcttgttgaacttcaagtgtctcttaattccattgagtttatcagcaattatttttgccaatttcactacccctttagtcgtcgaactattctcctcctcttcattcgggtcatcagaaatgatatcttcgacctcctcatcctcatcgatctcatcatcaggttggtccgtgatcctgtcaaaataagaaagaataattattattagaaatcaataacagatatttgaaataaagacaaacaaacacatataaattgaataataattatcagacaaaaattttactatccaaaatccaacacaatcttagcctgcatctgctccaattgttgattttattccttcaaaactcattttaatatctctgaatttgttgtcaaaagtttgaacatcaccaaagtaaaataaaatattaactaaacattttcttaatcactaataagtatattataaatagacccaaccaaacacaaaagaatgctcaagttaaagataacaaaaatagataaactcaagatcaggactcgggataggttacccacctccaaatatctggtggagaacttgaatggtctccttctataacatttgaaattgaatgatcaagttgaggaacatccttagttttaccacctacataaacataaactatgttactcgttcaaataacaaaaatcttttgtctttttcacaaagatttcttacctttcggctctttaaaggtggatgaccttgttcctctggtccctgaaaattgtttgttactcattgctcttgtgacagctctatctttctttgcagattctttcaatatcgagtcaccgccagttaggcatgattcacagaccctgtcctgtgaaacaactgaaaacctcaagatagaaaaatcactcataatttactatcaaaggtatttattttcatacattattgccaatataaaacacttatgttaataagtattatgatcatattcaaagcaagagtgatacttaaacaacaaatctatctcacataaagatcgtttcggttatatacaaactcacaaagataaattagaattaaagaaagtcagggctctcttacacatgttcacaagcaaagctttactatattatattgaagcctgtagaaactggtacgtactcatcaagcaaattaagccattaaaaaggaaataaataagagccaaccaaaggaatttctcttgcttctaattaagtccttaagcaaaaccaatatatatctcattctatccaaccagtgttaaatttccaataaaagcaccaactggaaatcacactcagtttcatcctagctataaatttattactagaactattataatattacttataaaagacaaatcaaaaaggaaaaaaaggaatagtatactgaatactgatgaacactaccacaaaaaatgagctccaattgattccaaataacaaatctcttgataatatatgagttcactcttcatggatattatcacgaaatgtaagtatatatactgaaatttgctatttaattaaaaaatatcactcatttttacattgaattggctattatatggttaagttgttgttcaatcacttgagagagataaagaaagttgagatacagttagatatttttgatataaacatatttttcatatagtgttaaaagagagatttttaactaagtagctaaattaatcataaaaactcaaattttccataataaccataggatcaaaatcaaatagtttaatatgatcttatctaaagaccttttctttttttttttaagaagaaaactttgatcaccagactatgcatgcaaatgcaactaaaactttataacccttacaacataaacaaacactttaatac

SEQ ID NO: 218908 - DNA, 4938 bp, Cannabis indica
attatttaacgaggatgtcatgtggggcatacatgtgattagaatatgtaacattttttttttcgagagggatgacctaaagaaaattacaaagatatagggtacggattctgactattccaacaccatgtgttatctaatcctaatgccatttgggctaaattgtgagcacctgtattcccttgtctgcgaacatgaagcagggaaacagtaggaaacgaagataacacctgtagaatagaatcaataagagctccatagcttgagagtatgtgttcgtgtgatagtaagtccgtgactaaatttttacaatcaacctcaacctggtgaatgttaacttggttgtttaaaaaccatcggaggccttctaataacgcccaaccttcagccactttcggtagcatctgccctcacggctagaagctcttgctgctaccacttgtcctatggaatcacgcacaatagcacctattcctgatttacctctgtgactagaaatagcaccatcaacattaagcttgagggagccaatcggcaggggtgaccatgtctccacatgacactcagtagctggctgtgattggttctgatgctgctgttgtgattcctgatgaagtccaaatattctcgggcttcttgttgaattcggctagagtttacatctttattcctgaaaacacagtcattcctgctattccaacacttccataacatgcaaacaaataaattaaaggagtcaagtggggaattttgctgaatgtataaaatgatatctagtatatgtaagttccttaatttcttcagcataggcataaaacacgtacctgaccaaacctttttcatatccttacactcaaaaaaagcatgttgcacagactcataatgaaggtgacaacgaggacaaatgggggaactaagacatttcctagtgtaaagattttcagcagtgggaattgaattatgagataaacgataaatgaagtgtcaaattttgggaggaatttgaagactccagagggagttccaccagcccttcaggatagttgtatttgaaggggatggttgtgttaaatttgtggaagtttttgccacatggtaccctgtcttaacagaataatgacctgaagaagtgtgctgccagaaataagagtctgtttgggtagtgtcaggtggggggagggatagaatatcattgatagtgtcctggggaaagtggctgcgcattagagggatgttccagtctcctgttggaaggagaaaatccgagacatggacaaggtggcttggaagggaagtggggatgaagcagtggtttgggatccaattatcatgtaaaattctagtggtggacccattttcaatcctcttacaaagaccctctttcaggagagatttaccccaatgaagactctgccaaacgtacgatggggaatgacctaaggaggagtttaaaaaggttgtgcgggagaaatattttgccttaaaaaggttggtaagcagaggtgactgattggtttggattcgccaagcttgttttgcaagcatggcttgattgaaaggcttcagagatctaaacccaagaccccctatactcttagcattgcacaaagctttccaacttttccaatgaagtttacgctcaccatctttagcaccccaccaaaaattggccatttccttcttaacaaaactacagaaagagtcaggaagtttgaaaaccgacatgacataagtagggatggcctgaatcgcagccttaagaagaacctccttacctccttttgacaggaatttaccttgccacttagacatgtaacatgatagataattttaccatgcattttttttttttaaaaaaaaaaaaaaaacaatgcacactccctttaattttaggcaattaatttttttaattttttttaagaaaaacaaaaactatatgaaagtatacacattataattgttaagtatatcttctaaatttttcaaaaataataattagagtgcattttgcaccactatttaaatagtttttccatttaaaatgatttttttttttaattttgtaaaattatttttgtttttattttttaaaaatcaaaaatttgaaaacgagagaaatcgctttcaaaaacaattttaacactttgaaaaaaagtattctaaaaatattttttttgaaatatcgtttattcgttttgtctttcttaccctaatctcgaagttggacatcagacattggatctcggttcctagtccatacctcagacttctatccccagtctcaacctgggcacggactctatcgaagccaaacatggtccccgactcggagcttggagcctaacctcgaccctggattgcactcgaaacctaatagctttcgcacccaacccctggaattctctttgaagctttgaagttggttgttcaagcttgtgaattttgggtgattatggtatttgtgttataggcttggattttttgatgttagacttgatgtggagctttgttttaatctttaaaatctctattgtgttggatataaatggtgtgtgatggaatttgtggttatgcatgttttggaacaagttttgtatgagatttaggtaaaattcgagcatgttgagaattggcattttttttggggattccaggacccctagtcgtggccacgactgggctcgccacgatgtgggaacctgattgttgccgctgcagccacaaccttgctcgttgcggcaagaccctgctttccctaggaatttttgggttttattttcgctataacttttgacttgggactttatttgggacgttagaaagcttgtttcgggctctatattcttatctataagttaaaagcaaattatgtgattatgtgaaattgaattttgggattaaccctatttgcaaaatcccaggaatgtgtaactaggattatcggcgcttgctcaggaacactcgggggttttgaatctccacatacttgggataccaggtaagacagtagttactacgtagagttaagtgctgtggcgctcatatttgatattgtgctagcaattgagtgagaaactgatgataggtttattaccctaaagtgagcggttatacgatctagggttattactctagtgtttaaatgattttgaatgcaatactatgttgtatatgttaagataaagaattatgcgggtaaggcataattaggttagactcggtaatcaaaataagataaaccactctaaggccttattgtaaattgacgtgtgaatgtaacacgtaggtctatgttaaatagacaatagatgccggggcatcaatatttatttgaattgacagtatattgcatattgttatttataatgtcttgctgggcttggcttacgggttctctactatgcaagaaagagtaaatcagtttgtgatcagccatgaatttgagggcttggcggtgtattgtgcatgttcaggccatactagaccacgcgggttgggtccaccagttgatgtattttgtattctcggttttttatcgcttaggttggcatgtaaaaatgacttgtaatgttttgtgaaaacaattatgggatcccgaaacatgtgtaatctttttgaatggtttgtaaattaaatagttacaagttatatttttactctataataaatttaaagcttaaatttctactcttattcctagtaatcccagtctagcagaattaggttatgtttaatggttgatcgtagcatgtctttcattagggcgttacagcagaggttgtataggattcctagttacaacaacggatactaatcagcctatttcaactagacataaaaatatgagattggtgcgtgaatttctagatgtatttcctgaggatataccttgattaccaccttctcgagagattgaatttgatatagaattagttttggggcaaaactagtatgaaaagcacattattgaatgtctccatcggaattaagggaattaaagatttaacttcaaaaattatataacatgggatttatcagaccgagtttttctccttggggtgctacagtgttattcgtgaggaagaaagatgtgtatcgattactgggaactaaataagctcactattaagaaaaaaaataccctttacccagaattgatgacctgttcaatcaatttaaaggtaagaccgttttctcaaagattgacctccgatcgagttaccatcagttgagaattcgagaaaaggatatcccaaagattgcattctgtactaggtatggacattacgagtttctggatatgtcttttggactcatcaatgccccagctgcattcatggatctaatgaattgagaattcaaggatattttggataagcatgtaataatttttatcgatgatattctagtatattcaaaattagaagaggaacatgaggtacatctcagattagtacttcaatgaatatgggatcccaagctctatgctaagttgaagaagtgtgagttctggttgtcacgtgtctctttcttagggcacatagtggacaaggatgggatcaaagttgatccggccaaaatcgaagctattcgggattggccaacaccaaaatcagctacggaggttagaagcctttcgggttgagctggttattattgtcggttcattataggtttctcaaagatagcgacaccttgaacgtaattgacccaaaagaatttgaagtttaattggacagatcagtgtgagaaaagtttctaagagttaaagtaacggttaattactgctccagtattaactcttccttctgataaggaaaagtttgtcatttattgtgatgcctcagacaaggtctaggttttgtacttatgcgaactggaaaattagtaattattctttaattaatgaaagagaagccacagcatctctaattaaat

SEQ ID NO: 218909 - DNA, 3140 bp, Cannabis indica
ttttaaaacttaatttttaaaaactagtttttaaaaatttttgcgaaacgactcataatagtttttaaaaattatttttagttttaaaaaacagaaaacagtttttaaactgtaaagccaaacaaccttagtttttagttatttttttgtattttaaaattaatattaaaaattaggtatgtaattggatatctaataaaaaaaccgatcataatggattttgaggttggattaaaaaaaatatatttaattggattgaaaatgtctaattctaattctaaggatgaagaaatttaaacataagtttctttcatatatataaatattgataataaataatactagcaaaattctttcaaataaaattactagcaaaatgtaatttttcctttatataattattattttaatttgtatgatttctttgcttcatttttttttattttcattagaagtatattatttttcaaattaattttatagtaattaataccctttaatttgttgctcaaataaaaaaagtacccgttaattttcttaaaatatatatttcgacacgatataacttgttgttttaaaagttaccctattactaatataaattgctaaaaataaatagaatttgtgaaaataatctcataaaaatgtaaaacaaaaaacaagaacaaaattaaaatttcatgcatgtttgtccaccttattttaatctaatatcctaacaaaagacagaaacctcgatctaataataattggacaggttacaaatacattagatttttgagtaaaaatttagaattttactgttacatataagtttttacaaaaatatgtctttttataaaataaccctcaaacaacaaaacaaaacagaataatcaaaacaataatgaaacaatagtggaatcacagtgaaaaattaacatagaataaaacttacacaatatatttaaaaaatatttcgtctcacaataaataaaaaattttaaaattttaatatgtggtgtaaaaaccccatatatattttctacaaattggtattatcttgtataatattatttttacctttaaatggaattatttccttttcaagaagttgccgataatgtagaaatcccatgaagccgcaggcacttatagtccaatacagagctataggtacaccaaattcctcagcagccttaattgtaaacgacataaaaccatccgaaacgacacaactcaccggcggaacaccgctactagtactgtcgtttagctggaggagaagttctctaaaggggcctatgcagttcttctcggtggacacacatagggacggaatgtcctgcgtagcatcggccttttgctcggtcattgggaggccgtccgggatggattcaaagcgaaaatcggggaagccatcgagggagttagggcctcttgatttgaggagacggatgtggttgaattgggtgttgacaaaggtaatgtggaagccttttaggtgtagaagcttggctagtttcatcattgggtttatgtggccttgtactgggaatgggatgcacactgcatgtggtttagacattattattgattggttttggtcacttgaattataggatggtctttgttatatggaacgagtaaattaaagagtgttgggtatatataacaagagctactagcaatgaacaagtattagaagaaggctcaatatctgtaggtcaaagaatattatattgtataacaatcagtcatcacccatgtgatttaataattaataaataattgaaaaaaaatcatatgaaaatcaatgcttacggttatggtgatatgctatatagcaccacttttagttgtataaatgaggatcttttatgtagcttaaaaaaaattaatatttttctcactatatatcattaaaatattatatatttttttttttagtaatttacgatataaattgttgagattattaaattattatttttatttaaaaattaatttaaatacacaaataaaaatatgacatgtagataataattttacactaaaaagctaggtacctatagaagttaaataaatatatcttaggtattattaccgtaaaaaattaaatttaagaatttatctacaaccgagaattaaacttagataattatgccgcaaattagtctatttttaatataaaatatcatttaaatattatattatttaaaatataaagtgttgggaataaactcacttaatttgtctaagtcactaggtccattttttctctcatcaaacaaatttgaaaatggttgctgttaggtataacaattggctctgtcactgacttaaagtgagtcccaccaccaactataaataggtgtgccaagttcactgtttcaatcatttctacctatagaaaatcaaaacaaaggcttttctagctcaccaaaagatctatgaagcacttgatgttgaagccataaaatttgttaagcaaaaatttaatgtttagagtactaaaaataaatgcaaaacacaatttcacttatgctgaatttatagcataagagtttattaatttaagttcgaaccatcaaagattattaaaataatctcttaattacagacttttcgtttaaagaaaacacattttgattccaattacgatgatattaaaaatttgaattaatttaggggaaatttggggtaagtttggaattgcagctgaactcagtcaatttaattaaccgagctgcctacatagcttctttgtgaaggatcaagccacttgtagttcagaatacagtattacagaaattgaatataaggattccggtagatgaccactttcaggaatcctttgctatttgaaactttggaaaaaattcctaggtgtaccttttatggaattttgagatttatattttataccattttgcagtaacgacgactgcacttagtcttagcaactaagttgcctacgtatcattttataggaataaagtcaaacgtagttccgagcatattttattatgctttgataattaagaggtgaatgacctctttttgggatgccatttaatttgttatgactttgaattttagtgcacttttaaatttttaggtaattaaaattaccatttttgagatttttgtgaggttaa

SEQ ID NO: 218910 - DNA, 3864 bp, Cannabis indica
ttcgtttcctattgaaattcgacgggatttacagttgttttacgttcgatctggtttcattctggttgcgtggccgactgcatcgatggagcttcattcatcctctccgtttgtgacgtgcggctgaaggtaagggcaagtggtatttttgtaatattttcattttgggctgtacaaatgttcattgggccggcccacagtattgttgtaatatttttccatttttagaatattcctgtttttttccctattattttagggttattaaaagaaaatttacttttattgatgctatattgtattatgtttccacaacgagaaaataatgttgcgaaaaaatgtaaataaaaaaactgaaaaaaaaaataacagtccataaaaaatgtaagaacaaatcataataaataaataaataaaaaaagtacaattttaggtgattttatgtgttttgtgtaaagtttcctattttatatgtagaaatggaatgcaaattaagcaaatcgtagtatagtagtatacgtataccatctagtatcatttgatattaataaaaggaccatttttctttattttcttattggaaaactgacaaaatataattaaatcaacttcaaagtacaattaatttagcaagttgtacaaatgatgtgccccataaaatattattaaaagaaatgcaattctgtatatatttttctcaatcaatttgtataatgaatcctgctagtgctactgctatatatatatttaaaataaagaatatttattaacacaataataacaatgggtagtactagcaatttgagcagccaatattactactacttgttcttcctttggttcttgtcttgtcttttccttttagtacattctataaacaaatcatgggttttgttaacacatggattaatggtgagaaatccaaaccatcccttcataatctactcaattatcccattgttaactcattgcttccatgaaaatactccatattaatccctctctatccatttccttaattatttcttctatcttaaactttcatgaattcttcttcagataactgatcaagatcagtattatgtcaaaacagaggttttttttttgttttctcttcttttattataagagctttgcaactgaagaaataaatcattagctttgttggtttgtttgacctattttaagttactttgcctttggatgtaatgtgaatatatgtgcttaattatattttggactttaattttgttttgcttttcgttttgagttaaagggagtttcataatcataatcttagtgcctggttactatgaattgggctcgattatgaaatgaatgaggttaacttattattagaagctgaaagagaaagagtactagccatgtactcattttaatttaagaatttttttattttaacttcaaaataatttttttatatttttatagaaatttacgtagcaatctacataaaaccaactaaaattgtaactaaaatctagataacaaccatgtatagaaactgaaaagccctctttattttaattgtgatgtcaaataattaattgctagttcaaggtaaaaagatacaatgtaattgtgtcagttgttcgaaaattctgttgatttggaaaacaaatagaaacataaataattaaaagggataataaccatatttagttacaaaaaatctgctactcttttggaatttttaaaagggataataaccatatttagttacagaaactaagaaaaaaaaaatcttattttactaaattactagtccaaaaaaaattctagaattatttagttcccatcccttttttttttattttattactgtagatagccttttctatgactgagatattctttactagttcaaattaatagcaaaaattggcattgtcgttatgtacagatatctatagtcctacacaaaaccatcctaaaatgatggtgaattacaaatttaacaaataatggtgattaagtaccatcaccaaagacaaaattcaattatagcataaattggggcaatcctacaatcatcggaagatgatcaagtttcagctcagcaaaggggtttttgcccgagctcctgccctcttaactcctcactgcttcaaattgtagggatattacctcattgtcatcaaggttcggacccttttttctctttcggctcttttggcagtgggagttctcctcagcttctgcaactcctccattactaccttctcaactttgtcgatggagttgagaagtttcttctgtggagtcaagcaatcagaatcatccccagttgtctgattggctattccacgcaaaatctttggaactttgccaacggaactaactgaaggcgggaaaagcttggtgctcctcacagccgtatatggagaagtagctgcatcataacgattctgctccagtggagcagctgaaggagatgcaaaaaccccaaggtcctgtgctgtaggactgcccatctctaggccgcttccagattctctcaatagagcccttctcctttcaatagcctggaaagagttcaaaagattggtcttaattcaaatgtaatcaaacattgatcacttatcatcaaaaaacttattgatcttaatcatgaataattataagaaacaaacacagaaaagcagtacctttagtcaaagaggaaaaatattacaagcaggtttacgaaattgacaaatcacaaggcatcaaagcattatttttctctcaggacagaaaagttatgataactactattttcaatcatgtttcctatgtagaaagtttactaaaatggttaacaaactatgataactacattcccaatataaattcacaaacttttgaaaaaactccatactataaaaaattcaaaggcaatgcggattggacctaatgatacccttattgacctaacataaaagccctatatctatgccatcgaaaatgaagggaaacaacaaataaagaatccaagataaccaaatacagttagatattatctctaaacaaattaagggttaaacatcaaattacattgcaggcaaactaaagcccacgttgattctaccaggaccaaattgtaaaagtaacataatcaagtcaaactcaatgtcaaaccaattattgtaccacaaaacagtagtaaaccacattcaatttaaatcatgataaaaacaacagtcaataatcagtttcacgaaacaaaaatacatactcttgtaattgcagtgacatcacgcagaggggttcttgggtaccaagaaggtaactgtgtggtccggtttcgtccccgtccacgaccccatccccgacgagtggttccagacatgggtgtgctctccctacgccaggtcccagctcttggggacaccaaactctctcttctaaccccgccaccatcgtctcttgcagccccaaaacccaccggagtaccaagaacagccgccgtcgttggtgtcgcggttgtcgtttgtagcatgggcggagatccaatcaaggttcgagccaccacgggctcatcgaccagaacaccaaaactattagatctccgttgagtgaaaattccggccacgtcaacaggccttgacaatctgtctcttgactccggcatagcttgcctttttactgaaattacgaatattaaaatgttaaaaagactgaaatgaagaaaacaacaaaacccaaaacccatttccaaacagactagaactcaaatctttcatttgatcagaaccgagttttgttcgtacagattaatctcaaaaagaaatgaagccactacagtgagaacagaaacaaaaacaaagaactgagatcccatttcttacagaaactgagatt

SEQ ID NO: 218911 - DNA, 2272 bp, Cannabis indica
aaaactttaaaatgaaagagtttataaacatatgttgtagtgtatttttagtacaattcttaaaaatttccaagtttctatattttaaagaaagatggtgtaaatgctctaacaatagctaatgtaaaatagctacaaatgtaaaattatagctaagagtaagaaaaaagaaaaaagtaaaaaaaaaaatttattcaataaataagctaaaatcatttaaaaatttatctctgtttagctaaatgtagttaagaaattgaaaaatagtaagggacattttaaaagtatccactagtatgaagtgagatattattattagtttattttaatatcacgtcgaatttaatttaattgaatgaataatatcagtaactatcacctattacaacaatgtcatatatcattatggttttagttactttaaaatagttaatagtaatatttaataacaatcttctaaaaaaattatttgtcttagtgcttactaatttttttttataaatatattatttaaatgaaataaaaaatataatatatgaagaaagaaattaaggtgtaacgtagatgtgtgtgataaaattgaaaaaaaaatgaagtagatgagctgtttggagtgctttaaatgttgtatgaaggaataaataggacgagtgatgtcatacgcgccagcctcgttgagaatctttttcttttcattttgttccattggctccatacgaaatccggcgactatttgaatttcaaactcggcgtccttaaaactacgcgttgaagtcaacgtctctcacgcaccacgcgtaatactataaatttaacgtcatgcgcctaatattgtttttgttttttttttctctaaacgccttctcaattttactaccgatatttcttgagatggcttcgtcagctaccacaacgacgtcgtatttgtgttataggtgcaaccggttcgtgcggatttgcgtaaacgaatcggtcgcttgcccccactgccaaactggctttttagaagagatcgagtcaacaccttcgccagcgccggagccggttgcggagactactcaccgccatccttttgtagctacttacatgtttggtgaagaatctgctcaaatcccgagttcacgtagggttcgccgtggatcttctcgccgatccgctttgaaccctgtaatcgtcttacgtggcaccgtcgaggaaggaggtggtggtggtttggttgagggcgagaggaatagctttcagttgttctacgacgacggtgccggttcgggtctccggcctcttccgacgagtatgtccgagtttttaatgggttccggtatggataggttgttggaacagcttgctcagattgaagttaccggttttggaagatccgaaaatccaccggcctctaaagctgcgattgagtcgatgccgacgattgagatcgtcgatagtcatgtaggttcagaatcgcactgtgcagtgtgtaaagaagctttcgagctgggtacggaggcccgagaaatgccctgtaagcatatataccactctgactgtatccttccatggctttctctccgaaactcttgcccagtttgccggctcgagcttccgacgaaccaaaccacagctgatccaaagctgtcgccggcggccgtagacgaagagactgttggtttgactatttggaggcttccaggaggtggttttgcggttgggagatttttctccggcggaagaggcggcgagagggaagtgcccgtcgtttatacagaaattgatggtgggctccattcgggtggggctccgagaagggtttcatgggtatcgagaagaaatagaggaggaggagagagtcatggaatcggcagtgtttttcgtaacatgttctcgtttttggggagaataagacccaattctaattcgtcttcttcatcgagtcggactcatactgaatctggttctcttaatcgtagtcgtagttactcaattggttcagtgttcagtaggcatatgcggaggcgtaacagagcttgggttttggatgatcagactggaaatgaacggtggtgattttcttgaaaattctagaccaacgaaaaagaaaaaggtcaaattttgttgattgttatttcccctaaatttggattttttttttcgcaaaagctttttttttttttttggttgaagatgtttaatttgcttaattactgtatatatgtcatttaattcgataaattaccaaacttaaaacctaatcttaaactaaattgtttttttttttttt

SEQ ID NO: 218912 - DNA, 2598 bp, Cannabis indica
aaaaaaaaacataaattaatattaagtaagaaatgaacttcacataacaaataaacaagtatatatgtatatatattgtttttttacatatataaaaattcaacaattgtacgtatacggcctattaataaaataagccctagctagctccacaataataataaaattgaaaataaagaaataacatcaaattttatgaaagaataagtaattaatgaaagaacttattatctttaatccagccctaataatctaattaatctgcataaaaacttcaacttgatgggttctgcagtagatataataagttggccaatacttattaattatgacatcaatctgcaaatatacaaagcaaaaaatattattattattataatatttttatgtgtatgaagtaagtactatgtataatagaggtgtcacttttatgtgtttggaaatttcttaatagcctttttttttttggctaaataaattattttttgaataatttaagatgctgaaaataaaattttagacatgtagttttttttttgatgtccgagtgcaattgaatatttaagcattatttttggcactgtaaattattattattttttttttgaaaataagtagagtatacgtgtgctataactataatttctatatataaaatgcataaaatagagacgttcttaccaataaaaataaaaataatgaattaattagtagagagatacgtactctaaaatatctttccagtaagattcattagtttggtcgttatccatgagtttttcccaagcttcagaaacggtagaattgggagatgacgatgaatggccaccaaatgacgtcgtcttacctgaatagtatttatcactcttattctccacgagatcattgttactagtactattagtactagtactactattatttaataatggtagttctgaaaccagtccaggaagttgatcaaaaatctcatcatcattaggttgatctgatgatgatgagttattcttctcacgatcatgagcctgatcactgcggtcatagccaatgttggtccctacttctgtacattctaaagagttgggatttacaggagtagggagtacatgagtagtagtactgctttcgagatggtaacaatctttcggtgcttgagaatgagtattattgagaatgacattactattgtaattttgaggaatagtagtagaactagggtttataaattgcatgaggttttgcaacaattggactttggccatgtattgatgatctggctgtaagaatttgagggaatttattggattattattattattattattattattgaagatgaggttggtgattaagtttgattgggcaagcatttgatgagaaagattgagaaagtgatttaggtcagttcttggtttatgagtttgtggatcaatacccatttgaagaagcttcttccttagataagtgttccaaaaattcttgatttcattatcagttcttcctggaagatgtgatgcaatccttgaccatctacaccaaaataattttgtttcaataaattattagatgatacttttttttttctaaaaaaaataatgaaaataatacagaaactataccataaaaagtacatatcgaatctttataaaaatgatctatataccatttttttaattttttttttaaatttacgatttgagttgttccgataatttttatgtgagttgctatgtggaatttggttgcaatttaaattgttatgtgtatttccgtcgtaataataataaaaaaaactgcattaaagtgtaaaattgaaaatcccccactataattaaaagattttattttctcttgaattgataattaagagcattatattttcagaaaaaataattaaacatttttttaatacaaataaaaataaaacttgaatgtaatataattttgtgaaatttagatcaattgcaaatatataaagaaaatattttaaaaaaatgtatgtaataacaaatttatggaaaatattttctttcatactatttttatttttgttggtacaatccatgttctaggctaaaaaagaatttaagtgaataatactaataattaattcttatatatatatatatatatataaattaaagaaaagaaatctatatcaatcaaaataatataaaatataaatactatatggtctttctaaagtgcctgtttgtttttacttcatctatctatttaaagttattctcatccatttgattagtccaagaattaagaatgccttatcaagggcttaaggttttttttttttttaatttaagcgtttatatgttacaaccatgcataatttgaaactcgaatctaagaccttcaacacacaccctgttatggctacttaaactagcttcaagtagttaggctaagcttatagtaacactctcattactctcttgatgctactctataggcatgaatgatgtaattgaaaagattagtgataataaacaatgtttaagtggggatataattggaaccatgtttaaccagcttattgtaaaactaggaaatataactggatgttgcgtggttttcataata

SEQ ID NO: 218913 - DNA, 5192 bp, Cannabis indica
ttttttgaataaatttgatatttgggattttgatcagtggaggcttacccgtcggagacgatcagagccgagctttcgaagaaattagcccttactgatcggcaattacagatgtggttttgtcacagaaggttgaaggacaaaaaggaaggaggacccgctaaaaaacagaagaagatggtggtagcagctatgccggaatctcctcctattgatgagttgagagtcggagccgaactgggtagtgattatgggtcgggttcgggctccgggtccagcccatttggtccttctgctgagttaaggaatgtggcctcgaggagcttgggtgatgacatgcctccaataggaaggaggtactatgagccgagacagtctaagatggagcttagagctattgctattgtggaggaacaagtgggtgagccattgagggaagatggcccgattcttgggatagagtttgattcattgccgccggatgcatttggtgcacctataggtattaatactacagattttgttgtatttaattgcttgatgttgtgactgtatataatccttaaatgtgattattagtttattgttaatatctttttgagacttggaagtttaggtggaagtgttaataaattttggacttctttcaagcttaatattacttaatggcaaaagcataggcattttgattgatgtaaatgaaaatgtgataatatccaaaactttctaaatgcgcttagtttgtgcttgttgcttagtttagcattgtttgacacttggtcaatgttgagaaatatcagtttctactttctgtccaatgttaccagctataaaatcagaccaattgcgaaagctgtatgcctgctctattttcatatcatttagttacggatgctgatttgtcctgtaattttgtgcagttgctgagcataagcggtctggtcatagatacgagggaaaatcatatgccaaatcaaataaagtttgttccttttcttctttgtgttttatgttgtcttgattaacatgcacccatatgtatcaaatatgttttcccaggtaactaatttgagggtaatttcaggctactccaagagctgtccacgaatatgcttttcttcctgatccaagcagtggccataatgatgcctatggacaagtttcccaatctcatattcataattcgggaaatgaacagctacccaggtctcaaggtcatggttctcgtgttcgccattcatctggaccagacaaacaaataattcccttcccttcaccatctgttgatgataccagtctgccaaaggattctttcacaaatattagagtgaatcctcatatcagtgataacccaattatttcaccagaaaataattatatgttacctgatggacaaatttgtcctaatgaagctgttttaaggttggagagaaaacgcaaggtatgcaaagtgttgtgggtatgttaatgtatggtatggtgtatctttcctataaggattgatcatattattattgaccttttgcagttggaagaagctagaattacaaaagaagctgaaattcaggagattcggatgagaaaagagcttgagaaacaagaaaatctaaggagaaaggtatacctttgtttttttttgggtgggtgggtgggttgatgtttattatatgcgactagagctttttgtactgatatttgaacattctgtctttagcatgaggaacgattgaggaaagaaatggaaaggcaaaatcgtgaaaggcggaaggaggaagagaggttgatgcgtgagaagcagcgcgaggaggagagatcaaaacgtgaacaaaagcgtgaaatggaacgaagagaaaagtttttgcaaaaagagtgtttgagagtaagtaaggagcctttagtgcttcttattcttatttttgtttgggacaggtgataattttctactctttctttttggtattctttgttttatgaatatatttgaagttggagaagaagaggcagagagaagagcttcgcaaagagaaagaggcagtgagacgcaaagctgcccttgagaaagctactgcacgtagaattgctagagagtcaatggagctgattgaggatgaacaacttgagttgatggagatagcagctgcacaaaaggggttaccctccatagtctctcttgatcatgacactttgcaaagtcttgaatcactcagaggtagacttgctttgctttgtagaattttttgtaaatttaaagctgtttgaatcttcatgactgtcggagcttaatcttgggtagtttattattcatcattatggatcatcattatttggcctccttttccacttttgttatatctactgtcaaaatctattttgtctaacggtaattcttctgcactctgttgcgcttagattttttggttgctttcccacccaagtctgtgcagttgaaaagaccatttgcaattcagccatggaccaattcagagaagaatattggcaaccttctaatggtatgttcttatatgtttctccctccaaactttaggtgatcccatccttcttgcattggaaagtcatcaagtggtattcctaagttttcatttattaattttaatgtttaaatgttgtcgttgtctcttttaggtttggagatttttaattacttttgccgatgttcttgggttatggccttttactattgacgagtttgttcaatcttttcatgactatgtaagtcacttgcatttatggtttggtttatttgtttggcaatttcatctttccttctgccatttttcttttctgatattggactattgtgctatcaggattcaaggttattaggtgagattcatgtttctctcttgaagctgataataaaagatattgaagatgttgctaggacaccttctagtggattaggaatgagccaaaatggagcagctaatcctggtggtggacatccagagattgttgaaggggtaacttctgttctgtgcttatgcattcaactttttactgattattgtaaaaccaatttaatgttcattctctctttcaggcgtacacatggggctttgatatacgtaactggcagcggcacttaaatccgttaacatggcctgagatattccggcaattagcactttctgcaggctttgggccacagttgaagaagaggagtatagcatggtcatacttgcctgataatgatgaggtttgctatctattttgcttttctttctcacagtacgctttttatgagtatcttccaaataaaaaaggtatgcatctttgtgctgctcaacaatgatagaatgtgagccaaatttttaggaacaaactcttaaaaatatatattttcatgtgtacagatgaaaatgagtagaggaggatattttgcatccaaaattataaatgaacgcaatgaagaagaagttaaaccttctgtagagaaaaaaatatgctagttctcgttttctctccgccacttggcctagcattcattgcttttactgatgcatgatatgtgttattgataatgtcagggaaaaagttgtgcagatgtaatttctactattcgtagtggttcagctgctgaaaatgcatttgccctcatgcaagaaaaaggtttattacttccacgaagatctagacatcgattgactcctggaactgtcaagtttgcagcttttcatgttctttcacttgagggaagcaagggtttgacagtgctggagctagcagaaaaaattcaggtaagatcttcattaacattaacagatcatgtttattaaactggctcgcatttagtctaatgcaaggcaattatttgatttcctgttcttttctgttttggatctaagaaatctgggcttagggacctgacaacaagcaaaactccagaggcatcaatttcagttgctttgacaagggatgcgaagctttttgagagaatagcaccttcaacatatcgtgttcgagctgcttacagaaaagaccctgctgatgctgaagctatactttcagctgctcgaaagaaagtacaagtatttgaaaatgggtttttggccgtcgaagatgtagatgaggttgaaagggatgaagactctgaatgtgaagatgttgatgaggatcctgaagttgatgatttagctactccatctagtgtaaacataataactgaagattacaaagaattaaatacttgctccggaagtggaaaagataatttatgcaatgatgttgctctagttccgcaaactgagtttgataaggattctttatctgtacctttgagtggttcccaagatgcaaaatgtctaagtgccacgcctgtgtgttttgttgccagtgaagatgtaagaggcagtgcccccgatgaagaaaatattgaaattgatgaaagcaattcgggtgaatcttggattcatggtctcacggaaggtgaatactctgatctcagtgtggaggagcgtcttgatgctattgttacactaatcggtattgcaaatgaaggaaactcgatccggcttgttctcgaggtattgatttgagaccatcttttgatatatgttcatttgctttactggaatttgacatcccgtttttggcaggatcgcttggaggcagctaatgctctcaaaaagcaaatgtgggcagaagcacatgttgacaaaggtcgcctgaaagaagagaatgtaattaaagtagatttctcatctcaagtgggaggcaaggctgaaatgcaccttgcaaggtctgctgcagatggcagtcaaagtccattacctgatattgataatagaaatactgatatgtccctcagtgttgcagaaaatcaaagatcagtttatgatttgaatagtttacagactgacctcaacactttgcctgctgacaaagcctcagtagctcatgaattttccactggtcctgacaactttctaactcagcagctggcatttgcatctaaaagatcacgctcacaattgaaatcttatattgcccatagagctgaagaaatgtatgtgtacaggtccttgcctcttggtcaagatcgtagacgcaatcggtattggcaatttgttgcgtctgcttccagcaatgatccaggttcaggcagggtctttgttgaattgcatgatggaaattggaggattattgacactgaagaggtatgcatttattgt

SEQ ID NO: 218914 - DNA, 2666 bp, Cannabis indica
aaaaaaaaaaaattagactataaaattaatggtaaaacaagtgaaaaatataccaaaataattattatttttgggtgtaatatagatttaaccaaaaatatatatttatactatattgttttttctatgctaagataaacaataaaaataataataaaaaatgtagtttttggtctagatgatgctacaagtatttgatttctgaagggtgaacacgtatctctgtctctctcactctgttttactctaatcatcgaacaatggcggtgcggtcaatggcgaatatgattcagctttcgattcctaaaccagcggcctcaaccacctttcagggtcaggcagctactctactccatcggcgtggcctagccggtcgtactgctggtaaatactactaattaattatctaatatgtataagcttttcataatctgatcgagtttagtcatgtgtgatatgattgaatgtgttacagaccatcacggaacttccaaggtgaacttttgggaagacccaatgaacccagcaagatggaagagagaacctgtaagctctttttttttttttgtactaataataagaaagcccttctatcactgaccaaacacttatcatacagtgattataggttttctttttatttttttattttttacacacacataaaatcttgtactatcaattttcaattcccaatctacctcatgccaataatagattatattcttaaactggttaaatgtacacttgtcaagattatacatcaaacgaaaaaaaaaggattgaatttgcaaaattggatcaagagctttttcagaatttatatagaaaaaaaacatggtctaaaagataggatatgtcatgataaaaattgaagcttttcatttgcagtttgttataataacattaactgcatgcgggatcctaacatacgaaggatacaagtatttcatgggagacaagaagaacaagaataacaaggtatggtgatagtttgattgatttacttaatttaatttttagaattatgacaagcttttatgtcttgttcttatatggtgaatcaaagcatggtagagtgtggctgcctggctggatggcctatctatcatgttattattattattagctgttgctctcttcctgagagtgtacttgttgatcatattctataatctgaactggatattcagaaaaaacaaatgttttgtttcatatttttaagctagttctcagaatatgatatttttttataactttttcttgcagaaagttggagaaccatcacactagttttgaggctgattcagtacttggcacactcctgttgtaacacagtggattttctatgttcatcaacgtcttaggcttgtataaaaatatatatacctatagttgcctgtatacataattttgttctaataatgataagtttattagtaactcatattttttttctttccataatctaatagttgctttaataggcaattgccaatgagcttagtcttctaaccaatagattctcatttaacaatgtatgtactatacttatgtcatatctttccttacatgagcatcaaaattataaatacaaaagaatagaatattattaaggaagactgcaagtagccatttggtcgacaaaagttatataggttgaattttctttcttatcaaacttggcttctcacttgcaactttgaaaccattttaattcttaaagtctggctcaatgggcttgttcacaaagggtatctccacttcaaatttacatatctgtacaacaaaatcgtcatcttagacataaaatatcgaagagtaaattttgaactagtacacaatgaacttctataatggctaaggaaaataaaaagtggttaatcgctacagttaatgttaaatgggcatttattgtatttacaaatctccaaagcaatttgatgaactgcataaatcaaacgaatccataagcagtttaaggtaagcaaaaaaaatcaccctcaaatccatgcgaccaatataatatgtatacacgtatatatgaaaattttatactagagcatcagtttattaccattacctgtaaaattgtcttcatgggaaaattattatttaatactatttcacatgacgagttatgtttacatatcttatcatttctttgttaactcattccaatacttttttgtatttgttttatcattttggtagaaaaagaaaagtatttctcccatcccattgtacggtgaaatttcttttgttctattttagtactaaattagattctaatctctgttttaatgtaaattagggaaacatgtgaagtaaaagactgtcagtctttggtattctctattcagtaaatactgtctttgggtctaattacaatcataggatgttaaaaacatgtttatgaataacgcatgtaaactttattcgatgaaatttacaacataccacatgattacactacaaagtctcaatctgcatctttaatttcggcttctacatcaactactgccttggacgaatactttttctctgcaatattgtagagattcattaaaagcaattcagacaagtaaaaattgttcagccaagggctcattttcgtgtgtgcgaatatcaatggaggaagatgttctcaataagataaagtgaaa

SEQ ID NO: 218915 - DNA, 9222 bp, Cannabis indica
actctagccgtaccgatgtgttactgtatcagcctatactcagtatgtcaatcatactctgatcatattgatgtgatttcatcaaatagtatggtactatcgaccataatatcagcctatacttggtacgctagtcatactctagccgtaccgatgtgatattgtcggatagtacgaagccaacatacatatctaatgtaatctaacaggcttcctaacatgcacgctaaacatgtaaatacatatgcatactattatactaatcttacctaaattctaaattcaggtgtgccggtcaacctgagtggaacaatctgctcggcgaattacaggctcctaaatcacatcaatcacaacactgataagtgacacgctaaatcacttcccggggacttaaacttgaaactaaaagtttccctaacgatgaatagcattgcaataccctaaataacacaaaaatgggaaaaactagggttcccaaaactgccccaaccagtagaccggttccccaaccggaattctggttctgggaaaaattcctagaagccaaccggaattcctgttcctacaggcctccctgaaccggaattccggttcagtgcaggaatggttccaaatttcatatctcgaccgaaacaaccccaaaccacatgagactctccagacctgttctaaacatcctagaggtcaatatcaacgtaataaaacacagcttcatgcaccattacaaaaatcaccattgatgagtcaagcttgagttcaaaactcaaagcttgctcatcccacaacctagctatcaaaacctgctcaattcaccttatataaccataatataacatcagaaaacaaacccaaacacacacaacaaccacagcagcaaaatcatcatttcaccattaaaacccaaagttttgagtttaaagcatcaaacttggttaaatctaactaactaacaacaaaacctgcttgaatccactcaattaaacatatttaagcttctgaaaacaacaacaactaatcacagcaaccacaaaataaaaaaaaaaattcatgcaaaaatatcatttttcttacaactcaagaaaacaaaaaggaaagttgctaaaaacttataccttggcttggattacactaagagctactggaaacaaggaattgatgaagcaaaatcatgaaccctagctggttctaggatggccgaaagagagaaacagagagttttgagagagaaaatgatttttgtctaactttggaataaaatgaataaatggatgatttttccctaattaaacaccttatttcaccaatatgaagcttaaaaaatagatttaaacataacatcaaatccccactaaaagacaaaactcaaaaggtaaaaagaccaaaatgtccttgcccatactaaagagtcacacaaatcacttagggtattttgggaaaactctaaattcctgacatacctcgacattcccaaagtctaacaataccgtcccgctatactaaaatattaagatgtgattctaccgagccatacgccgcgttccatgttgtcgggcactgaacatgcaaaaatatgaaatttcactatatgacatataaaatgcattctgaattcaaataaatcaacataaataattatttaaatatcaataaataattttcataattaaccctaattatctgctaatttccaaattaaagctaagcggtctttacagttgcactattcacgttgtacgacaaacaaggttggggccaactgtctgctcataatatgaaaaggatctttgacttgaagtcttgcccgaaataaaaatggaaacttctatttctcgaagaatgagtatcattggttgagtgacacaacagataaggatgtcttggagattggggagttcatccaagattactagatcatgagggtcatggatgctgacaatctttcattctagttagctccaagttattgtcgcccccctttttcattaggattgaggtcaagggtgaaggcagtttttcaacttacatcatttgctcaaaacatttctcttctagctactactaaaaacttttcaagtatagaatttatccttctaaagacgaacaagaaacaaactagtagccaaggatcccactcttgagcgggagattccagagaagaaaaagaagaagaagtgaaagaaacaaagtcaaaaccaagtatagcggtctattatgattagaatgacaccaaagaagtagttcaaccggctgccaaagcaacaattggaaaagggaaggtggtagttgaggtgccatattaaggggactcctcagatgaggatgctccatctttgcttgtttcggagggtgcccatttggatgttcaaggtagctactttaatatttttctttattttccttttgcctttcataaatacttattaagttttctcttctatgcagctatgtcaaccaggttgaagaacatgctaaaaaggaaggtcgttgatagttttaagtagaaatctcctgttaaaaagcaaaaagtttgagataaccttcctgttagcatatccccaagctccaaaacatcttgatacgatgttgaagagacttccatgactctgactcctgggatgaaagaagttgctgccataaacatcccagattctcctctttcggccaagaagtcttccaaggctttccccccaaccaccatgcctaaacaccctaaatcttctaagggctcggttggtgtcgatatcaccgatgttgaatggcatcatttgcccaagccaactctactgcagctgccgtgcaacctgaaactaaaatggctaaagagatgatgagtttctaccaagagtgtgcaatgctcgaggtgaacgagcagctggctagtgtcgaggctttatctgtagaacttctgctcaagggcgttttgaaggaaattactagggtatgttttataattgttgtctttgaggcttcttcactaattaacgcttaaattttctaacttgctttattgtttcatttcccaaaacaaactaaagctcacatatccttatttctgagctaagtctatagctctcaaaaccaatattacaactaatgagctgataatggctttggaagaggccaagagtaatgtcgaggagaagggcactaagatttggggaagtgaataaacaactcgttgctgcaaataacactatcaaagagttgaagcaccatctggctgacatgtcatccactacttagttggaagcagacctggagcaagaatcaaagagagtttaggaactcactgatgagaggaaaggactcccaacacttctttagagctaagaaactaaggtcaacgagctgaacaaagctcttaggcaaaaagaataatcctctctgaaggtgaagtctgactttaaggaagtgcttgctgctgagcggaggctcatgccaaagatgtcgagtaccacaaaaccaccatcgcagaggtattctataaattttaggaggtcaatcccaaggccaacctttgttaccttgaggtggacatacacgatcccatgatcagatattgcgagataaggaaggctgaggatgacgcaaaaggatttgagtacaatactgatgaaaagaccaagaataccaatcattcctctaccgcctagaattcagaaactttgttcggtgaatactaagaacctaaagctcccatgggatgatttccaaagtctccttcttttatatcagtttcgcctatggccttttatttaagaccatttagtcaaccaagaagcttttaaacttggtttatttttattattttgtcaaatggctaatcggtcaacctttaagctcgaacttttatctagcttttttttccttattttcacgcatgtacacttcatttttcttttttctttcaagaattttttctcaagtgtttaccatgcttcttaccaatgttgtgcagtgtaggtgcccccaagtgacgaagcagactttagactcttgctcacttacaattgactaaagtattcgtatatgttcgttcggtccttgtacctagatggaccttttttacaagcatgttaggtagttctatgacttaagaataaatcaacaaaagtttgaaagtaataatttataaattgacacaatttgaacgataattaatagctttatttatttattggttgatatgtgttgttacccaagtagcatacatttattgaataataaaaagctattacatgatctgttcggatcttagctaattaaaatagaaaaaatctttgaacaatatattccttaagggaaacgattgtctagataggctatactttggaagtagtcattcggatcttagcatttagtatttttccaaacccttgaatggtaatcgtttagaagccatcacctaagagtgatgtttaagtattatgcaattatgtggtcttcacatctttgcatttattggtagtattttcttagatgttcaccattctaatactgtggtactaaaactagcttcatattttcatcataccgaccctataatgactgcatacttagaatatgaattagtacgacaattaacattaattaagcataattcataattatatgtgattaattattatttgagccctatgttaataaatagacattagggttataatttctaaattttagagattttattaaactccaactgtattatttatgctatatgtgaaaacttatactttcatgatttttgctcaataaggataaaaatgcgatgatttggccattagagtcacatgggtaagatttagaatctttttgtagtgggataaccataagtgatatttggaatgtcaagatttaaggtggttgtgattttggaccattttacctctaagcctttaggttgcttaagggtgaagtaaggacaaaatggtaattttccttaatgttatttttaaacttatagtggaaaccctataagttttctaggtgatttaagcttattattaatatattacaattaatcaattaatgactttacttcatttctaagttaaattaaataccaaagaaataaacttatcccttagtctctctatccttcagctaaaagaaccagcaagcacctataatttcttccttaatttttgtggatttgagcttcaattaaggttatagaagtggtacaaacaagagataaagctttaacacctttctatttgggtattgaaggtttttcttaaagtttaaacgtgcaaagtttgaggagaggatctgtccaaaccttaagggattggggtttgttttttgggttagttttaaattgttttaagcttgtttagttagaatttgggggctggttgagtttttgagcagtggtaaattttgattctatgagttgtggatgttgttattgcttgagttatgtttattattgtttaattaggtgttttggagcttagtgtgaaatttagagtaaaattgagtgagattcgaagctctttggaatttatgcagaaaacaatccaccattgttccagaaacggtgaactattttcccaggcaggatccaaaattggtttaccgttttgggaatctagtttaccagtttgggtagttttgggagccttaaattttatatttcctcgatatttagggaattgcctcactatttattgatagggaaacttatcattttgagtttaattcaccgaaatagttttagcaggttgtttacccattttgtatgattgtgacatagggcctccatttagaaagaaaaatttccattaaggttgatcggctcacttaaattaggaaacaaggtaagattagtataatatgtgtatgtatgttatatacatgtcgtattatcatatttatatactaccaacactagtacggttacagtatagagtgcataagtacagtacatgatgttaaggggtatgatacagcattacaaacactagtacaagacaagtacagagtgcatgtgatacaacactcagttatactcaaggtgtgatccagccctaccaacattactacgagatgagtacttagtgcatgtggtacagaggtcaaacttctgttaaaaaccttcttaatcatctattaagcattgtaaataggtgtatgggcacctagatgcaagtcaataatatgttatatgttttatacttttcttactgggtccatcaactcacaaatatatttacatgtgtaggtaaagaaaaggtgaaggctgagcaccagtgagtccagagcttgaggaggattgtacatatctagatggctaaacttggagtgtttggtctcaggacaacatgggccttcattttgtagttgtggagggagacttttgtaaaatgtattttgaatgatgttgttaacttttaaaatgggatcccaaattttttataatgttatatatttacaaaagtttaaaagttttaaataaaagtttgaattaggcacgattttaaaaatcctttaattagcaaagccatgcagagtaattagaaaatcactatagcgggcctaagctattaggccgttacaatttggtatcaaaaccaccaggttgtttaccgaagaccatcaagataaatcatcatctaagacatgctcgactcatggttcagtaagcctttacttgtttagtaatttatttgattagcaaagcatgatagtaagcatgatagcaatatataggttgagtaatgcattgcctaaaatccatgtatacggtaattggattgtatgtgatcgctgtctgacctgcttgacttttgggtctgaaggctaattcctttgatatggaagcctgacgaaacacaaggagtcagtgcaatatggttgagatcgaagatggtttgggaggccaaaatcctccacatgatccccgtgggtgcaaaaatggtcatgaaaatccaccataggctcctttggattggaagcaaaggtttgcaaaaatgcaaacccaattatccaataagatgaagagatctagaggctaaggcagcaaggtcctcctattatgccttaacagcaagttccaactgctcttgctctggtgctaccagtagaacaatttattgttggtaaccgcatggagaccttgtatgagcagtttcgcaagcaagcacctctagtatttttgggaggccctgatgttatgaaagccaaacaatggctaactatgatctatatagaatctttaattttattggtgtcacaagcaatgataaggtgacgtgtgccactttttaattccatgataatgcacacgcatggtgggaaatggtgtccattactcgagatgttattagaattacttgggaggaattctaagattttttaaagccaagtactacaaccaagcagtttgtagtaccaagagaaaagagctcaccaaactggtttagggagagaacatgtcagtgattgaatatacatctcaatttgactgactcgattagttggctttaggtatagtacccacagacttctgtagaaaggaaaaataatttgctagactgtattccaagattaggcacgatttggcgattactactaatgacactaagatgtatgctgagatggtggaaaaggcactttgagccaaaggtgcggtagacttttcacaagaactccgagggactccaagtgttggtgggatcaccactttttgtacttttggttatggtagggattgtggggattccaacatcgatcagaacgaaaacttttttggcaccaagttgctgggtcatggtaagcagagggggttgtcaaacttatacttatcttgaatgtccttgatgcaagaaatatcatcccggggagtgtaacagaacgacatgatttcaggatggaatggtgggacactttaagaagattttccctcaactgaagaaagaggaattgactcaagagttgaaacccacactagcacgagtattttccattacataagcgaatgttgcagctactccttatatagtaataggttagcttcctatcaaagattcctattatactgtattgtttaactctagaactacacactaatatgtgtcgtcaagagtaattgatgaattgggtaagccttgtgattttagtgagatagggtttggaaccttattacctagcagagaattagttatctccaaaaggtggattaggtttatgacaattagaattgagaatagggagttaagtgatgatctagtggagttggacttaattgagtttgatatcatacttgggatggattttctgtctaagtacacgaccaacattgattgcaaccaaaagatggtgacttttcagccagatgataaggaaccatttgtgtttgtaggatatgctcatggttctctgattctaattatttcaatatgaaaagctagagattttatgcacgatggatgtgttgggtttctagcagttgtgattgactccaacagacccaaaacatttgggcttgaggatgttagaattgtaagaaagttcttggatgtgtttcttgaagagttactgagatttccaccgcagcgggaaattgatgttgtcatttacttggcacctgaagcagagcctgtttctaaggcaccttatctggtggctttggcaaaacataaaagatcttaaactacaactttaggggatgcttgatctaggatttatccgacctagagtgtcgccctggggagctccagtttttattcgtgaaaaataaggatggatcccgttagatttgaatttactatcaggaatcgaataagctggtgatcaagaacaattatccattgcctagaattgatggcttgttcggtcagcttcaagggaaaacagttttctccaagattgacttatgcttaggttgtcatcagttgagaattcgagaggaaggcattccaaagattgcatttcatactagatgttgacttagaaatttggactagacttctaagccacactcgcttgttagattgggaagaatgagaaaagtagttaagtaatttaagagagatagccaatttatagtaattcacctcctatatcgcgatagtaatgggtctacgtctacttgaagtttttatttctcaggagatggtaactatagcaatagactaagtatcagaaatttcaaactctaaagagagaagcactaaccttgtgggtagttttctaaatgtgaaaaataagctaagg

SEQ ID NO: 218916 - DNA, 6574 bp, Cannabis indica
aaatcttttcaaaaatactgtgtttttataaaacaccagtaaaacacaaagcataacaactcaaaacaacagtagaacaccagtaaaacaccagtagaacatcagtgaaaacttaacacagtatactgcagtatgaaacttataaaaaaacacagtaaaaatgtaaaaaaataccgcctagcagtatttttgtaagaaaatagcaaaagttagtataccatgtaaatttccctaaagttaatgcacgacatgacatgacccataactttttatgtcacagtacgagatacgatctatatttttttatgatttgacacgacacaattcatattttttataatacggcacgactcatattattttatggtctggcacggcacgattcgtattttaaaaagtatgaaaaatatgggttaagctagcaagacacgcacatatttatagctatgtcaggaaatacctaccacatgtctattgacttcatactatactacagaagttccagaaatataagttaagtattattatcgtccaaaattaaacttaattatttatccggaaaattaattttcactatgacacaaattactgaattagcttctgtaataaaattattattagaaaaaaaaaaaagtgcttttttagggtgtgaagtgtctccaccacgtctacatctaagaagagaaatttgttgtccttatcccaccacaccacccatattagcacattaaaatcacaataaataacagttctaaaataaatcacaataaataaacctttaaataaataaaaaacaacaacaaccctaagaaaacatattgttggcctcacacaaagacatctatgtgaggtcatgaattacattaacatttcgtatgctttcaaagtagatgtgtcttgatttgtccaatgaagaaatttttatattttttaagaaaagttagaaaggatcaaacacttaacgctactttatattgttttttaataattaaaaaaaaaatacttctatagtggcaattcagtaaataaaaaaaatcatttttatacttcaaaatatatatatttttttttatttttacagaattctacataaaaatctttactacaattaaccggaaaacttaaatctcaacctaaatagaaatcattagaaaaaacactttagaaattcaaaccgtaaatttttaaataaaatattattaatcactctaaaggtaaaatcttatagtaagtattggacacactaatattgaatacatgttgcttaaaaaaccaagtattatatatattttgaaatgcacaaagatttatgaattggacaatttgtatttgttgcaatttgtatttgttatttatgaatgtaaatttgcttatttgttgttgagcttgagaaacctagaaaaacaatataatgaatcatgatgcgtttaatagactaaaaatcatataatcattatttttcattcccaacacatccacattgtacaatcactacatagaaagaaagaagaagaaattggacaagtaaagaaaaggtgaaataatgattaaagaattcccaacgaagccatgattaatttcatttcattttcatttataaataataatatagtttgcagatggaagtggaggtggaattgagttgagttggaaatgaagtttgtattgggttctcttctctctcttctctcacgccttggaactgttgtttctttctttctttctatctccatctcattctgataaatcaatcaattgcaatcgcagtcagaacaaaatcgttgtgggccttcttttttaggcccagtggggcccattatggccctttccaatacccaaaacacaaatacagacaaaaccaaaccactcactgccttctcctgactggccactgtagtgtaccctcgaccaaacctaaaccaaacatataacctaataataatattattaatataaataatattcattattaaattaaccatatcaatgaccccaacgtcgtcgttttaatgcaaagacaaatctaacctatacgcggcccactttgctaactgctacacaaatataaaagcccaccaaagtaaatcaattttgttaatactttttagttgtggtaaaaataacggatcatgaattttccattttaacccagaaaaataaaaaaaaagagaaaaattgtttattgtgttatttgatatttgatagaagaagaaagaaaatcacaaaacttggagaaaattttcttctgttccctcccactgaaatgaagaaagatgtgagaagaaaatttgtattactctgaaaagaccaagtaattggctattatttatgttttcattatgttcttcactgttgatcaccaaaccccaccactttaaatatccatatatggttatgctgagaggagttcttatgtaaaagtagctgctgggaaaacttcaatttcatgctcctaacatgaaaaccttctcttgatgtgtcatttccaccacatttattttgtttgtttaaattaaaagggaaaaaaataaaataaaaaaacttattcactcctttgtttctctctctctctctctttgtctttctctctcttttatcttttctttctttgtgatttgtatatggaatatctccaaaaccacaccaaaaagccccattcaaccaaaactaatttggactctcattgagaatgaggttgtgtggtgtgatgagttggagaaaactttggcaaaatctcatgacttgaatcctacattattagataatgcatcatcaccggatttccttctcttggtaactcgactaatattatcaagactagtgtgtgaagagttttttgcatatgacacaactgtggtcaattcatcacttttgtagctcaagcatgtagcagcatccaaaaccccaactgggctttgaggcactgatgataatgatgatgatgatggaactgaggctgagccacttactactccattagtggtgcatctactgatcagagacaagtctttgatcagttcaagacacttcaaaactctcccctgcaaaacatacaaaccacacacacaaacacaaaaaatgttattgatttcaaatcagtacatcatgtttttaagtgggccaacattttttttttttaccttttgtactagcgtgaaagaggagatggccctatctatgtccactgcttttacttctcctgaaactgaaattgccaccgctgcagcaatttcagaaggtttgaattccaagaagtcaattcctgcattgaattcccaccaagaactgcatcaaactccattaatcctaaagaggaacaagataaacacatacattcatagatggtcaagaaaaagacctctaattgtgcccaatatgagttgtgctgattggcatatggatgacattgatggatgctgatcatcactgatcttgctgagaaaatagtcaacgaatgaacaggaagtagaagtgtgcaatctccatttcagggtgctcaacactaaaagctccattctttgtatagttatagcttcaaacacaaacttgggatctccaacctgccaatcaagtgatcaataatacttccccacatatcagaatctaataacagattaggcaaaatcatattgccaattcaacagtctaaatcgaaatatgtaaagacttctatacctgcaaatccacagactgaggcactttagtctcatccatttttgctgccaatgacaaacaagctacagctaacaattgtacagtccacgctttacctctctaaatcaacaaatgcaagtagaataagaaacatcaatgagaaaagagaacaattaatatgtacaaatgtaatgacataaatgatgtaaattcaggttcatcttctcaacttacaggcaattcataatgtgaaaggaaccggtctaaatagttcatagctagacagatacacatgggtccaaaacagtaatgagcttgagcctgtccattgcaatattgaaaaatcagtcagtgacagaaaaggaaaaataaaatataatcaaatgaactacataattaagattcttcataacccaattaaactatgaacaaactcatgaaatgggaaaaactaaattaatctaccaataatttagtcattgcttagcaagaatttgcgatacaagaattccaatagacctaatacacacaaattgtgagaggagatgagtttgtaagggaaaatagaggaggagtaactgagaaacatataaatcaagttggaaaagcccgaattgcatcatcataaatgcaacataattataaacagttatgagaagaaattaatccatagctaatgaataaagaagcaaaacataagaaacccattagagaaaatttaatcaaagcaaaccttccaaatccaatcaagagcttcccttctaacgctcaagttcaagtctccactgcgcagtctcttgaggtaatcagctcttggcaaatgctcactctcccttaaaaccattgcacggataatctcatcactctgtaatggaaaactcatcaaaggttcggatctatcaaggtcaaaacttggttcttgatcatggattcttttctttggttgttggggcatcaaaggagatgataccccaaactcatccgtggcattattacaaccaagatcatcatcaaagcaagtattggtattctcttcacagagaaggtttgagttaacacagtcaaacctatctgccattgaaagacctcaagaaagatagtctgtaaaacccagaaatatatcatcaaaatgaagccttttgtaatgggctatatcaaagaatcaagctttttccccataagcatctccttttggaacaaaacccagaaagcgataacgatgagaagagaaataaaagagtggagtagagagagagagagagagtgagtgagagaggctttgaggaaaggttatggcaaagggagaagctttaagtagaaaaagaaatgagcatgtgtatttagggtaaaacaagagaaagaaagagagagccgtctctagctatggtggcttccgtagagaaatacagatccaaacattaaaaagaatatacagccagccaaacacaaacattaatccatttttgttttcttatttggaaataagaaagaaaaaaaacttcaccatggctattgggatatgtatctctgataaatactaaaaattctttttttttttaataatggaattccttcatttaaagaaacaatttttcctttttttttttaataataatagtggcattttagtcaaactattttttgattgattttttggctttaaacccatttggctagtgagtccctattcaattttttttattttttctttttgctagtgcttgctttaccccattggtcaatacaaaatttatttatttattttgtatatacataaaaaagaaatgacaatgtaatgagtccaagtattagtagtacatgatcttttaattttttgaggcgaaagttgtaaaagaaattataccatcattaaatccatattgtacataattccatataatatatcaataaatcaataatgatatatgctttttctttaatgaatgtctctactatataatatgagtggttgaaatgactaacatataaatgaaatttatatggggtgctactcttgctaaatgctaatggtaggctttgatcacctccaaccaacaagcactttacatttacataagtaaaaaagttgaggcctaatgactaataagagtaacataaatgtttgcaggtaatatctattctcatacaaaaagaagaaaaaaaatacatctttgtatatgtataaaatctagtttgattcttattagattgaaagaaattgttgtgatttttgcatatgattagagattatataccaattatgatatgattttatgatataagggaaacaattaaatgccaaaaaagaatttgagggtttttttttttttcaatccatgagttttggttttcctttcctataaaaatgccattaacattaagcccttgtggtctttggacatttaattcaaaggaggccaagtggtcaaagtattgtattgatatacctactactcttgtttgtttgctactctctagtgcgtttagttctgtttggttacatcaacaacagagggcctgtttggattgaaattaaggagttgcaattatagtaataaaaataaataatacacgtacgtaccccgtatattactcccaaaaaaattattaaacgtggaaaatttagatagccatgaaaattcgttgtatttacataaattttgttttaagttgaaaaaaaaaataataataagaaaaaggcttggagatcaaatatagaactttaattaaacattagtggagtaaaaagtaaaaatatttcatgagattgcaaatagcttatatgagctggaacttctttagccacatatgagtaagattcatgaatctaaaaactaaatctattatttatttattttcctaaaatttatctaccttatttctacaatttcttacccttattgtcaactcaccaaaaaaa

SEQ ID NO: 218917 - DNA, 5209 bp, Cannabis indica
ttttttttttttttggttttaaccaagcaagaggaagatacaagttaaataggcttcattagaccaaaatattgtcaacttagagctgaagttagactgatgaagtagtcttcactgcaggggattgtgaggccgcctgttggatggtcaaatccgaattcctcctcagctcggtttaacaaattttggaacaaaggatggttcaagtaagatattggaatgacaaacctcttcttttgtgattctccaacataaacagctaaatgaccttttggaacatcattagtaccattggctgaaatagccccatatcttgctgaaagagttctctgaagtttatgcttggcttgagatattcctttcagtccaatgcccatcttgagaaaactgagtccaatttaaggttggtatacagtgatggagaacttgtaggtggtgattgagtcaagactttgaattgagttggcatttatcagtggctacatatgtaattatatatatatatacactgagtgagagactactaaccttaaaaataagtaggactggtaagtgatgagagagatcaacgaaagaatgtttagaaacatatcaagtgaaagccaagctgaagattcacatggtcttgtcctaatgagttccaagacatctttccctaccatcaaacctgaagccaaaaaaaaggagcaacttgaaattaatatatatttatatacattgtttatgtaatgattgcttttagctaataaggactgcccttttaggtgttaggcatgtccttgacacataaagggcagtatcaataaagaagtaattatgattcacttactcattcatcaaagcattgaacttggtcttggactatttagtggctttttaagtttcaagtgaggaccaatcagtaagccttttagctgattggtaggcctagcaattatccaaaccctggtctgttttcactatagtttcctgctctagctatatatcattgtattgggtccctctagaatacctcacatgggcatattttagttaaaccagtatctttcaagagccattttctatgcacaacagcacaagaatatttcattttcttatcatatcatagcattttctctttttctatgttcaggtactgataaaaaggttctttgaccaaataatggtagtttggggtctacttcaagactgaagccagctggaaaaatgtttgatagttggatcaaatctgcatatccaatataaaggaacaatctttgataattttaataatatataaatttaagggaaaaaaggttgaattataaaaaaaatctagatttgtttataacattgctaaaagccatgcctaaaaaccaagtaatcatgtgttgtgggacagattaaactaagatgaatccccaagacactactttgaagatcactatcaaatcagaataggttttagctgaggtttctgtcaagtgtttggaaatattgaatggaaggaagagaatattagaggtcaagctggtcaatccactaaactagcttgttatgtgtgctttgatttcaggcacaaactcattaagtatcaacatctgacttgcttcttgtcagaaaacattgcaagataatggctaattacaagttaatatgataataataaaacataaattctgaataccaatgtgtctgctgaacaagtatcaagaagtctagtagtctcaaattattgtttttagtccaaatggtctgtataatgttgatcaacaaacagtgtaagtgcattggttatagctaactttcaataccgtacactgttttcatacatggtaggcctgagggccatgataattttctcacacaaaaacaaattagcaaactagtctgatatatcaaatattatcataagtggggggtgacaattccatgtgattactctagacatattttctaaagaaaacaccattttctattgtctttataccaaccactccatttgagattaattctctaaatggctctttattgattcctatagctgccacagatttaggattgggataacacttttagctgaaacatttctcaaccgtgcgcagtatgcagaaagtctatctagtcattcattcattcatttattaatttatttttattctattaataccttaatatgtctcaatcatgtcttatctttaatccatttttctctaacccaaaatcttttatctaatgcaaagtggaggtctgtgttggctctatttaccccacaaaataatatgtttctgtctaagttctatcactacaatgatgaataagaagacaattccatgtgattcctcactagctcatgtgtcaaataggcccacctcacttttacatgttgataaaaaaactttcttcctatcatgccacattgccatatttatacatacaaaagcaaaaacagtaacagagtcttgattacctaccctactttctcatgtttttgtttaccttctaacagaggtacacaagtgaaaaaattggtgtttgtctgcttggtgttagccaagttaagaaatttcctaaggacttctttgaccactgtaaatatccctaagggaggctatggtctaggtaccatttaagtgcacttctaagtttctaactgtctacaacaaataatttatcttacagaaaactaagacgaggcttttgaatttgtatacaaccagccaatagatggccggtctaatacattcatcaatcatatttgcataaatgaatgaaaagaaacattaaaagcagtattatttattctatttgttacaaagaattgttaaaaataagtcttctaatcaagaaagatcaattcacggctaccaaaggctggcattgaattggagcttgcttagaacagaagtttaaaatggtgaggaataaaaagataaagaactagacagtggatatagatttgatgaacagttgtttactagtagtagcatatatatacatataaacatatatatatatgttcattcatgctataaaagcttgctttttttttgttatacttcaaacaaggtccctcgtacacaaattttacatcttaatgtctttcctctataacagttatctttgagttcatatcttatgattctgaattgccccaacaaggatcttcaatgaataagagaaataataggcaaaatgatagatagaattggcaataacaataactaggcacaattgggatttgatatcgaatgaacaaagtgtaacaatgacatattggagagaactcaactctcccaagagccaaggctcaattacaataggattctcatgatccccacacacacatatatatactatattttcaatccatctataccctatcaatataattaccaataaacccctctcctacatattttctatcaatgctctctttatgcttctcattggtgtgtcaatttctaccttgaattagcaaattttaaaatttgggcactcttagtactataaaagtgggtcccaaaaaaacattctgttcattaaacagtacggcctttgccaagcaaaggtgtccatcatttctctcctggatgcacttatgcatcttgcacaaagataggaaacacccttcacaagagcttgtctagctaagtggaaatatgtaaagttaggtacaatgaacaaacaataactatgaataattgctagtattaaacaatttcaacataacagctttattcattaacattaaatagattagtttgcacaatatacaatgcttaagaataacattccacaacaatatatacttcttaactgaatgaaaaatactttaataaaaaacagaaagggtgctaccattatttaattgatccaatgcttacattcttgaatcagaaatgagatttattgtacctgctagaattattcccaatagctataacataaacataatgatcaccagcattcaattgcacattattttttccatttctgtttcggtctggcataaaatagatccattaaataaatttaggcttctctttgaatgaaattgttaccacaggaccagtgcatgaagcttgagaacataagcaaagatgtcaactctgctggattccactaggccatgtttggtttttcactggtttaaaaatagcctcaagttctgataaagtttcctcatccttcccattatttgcaagttctattgcagcagcaacattctcttcaacctattaacaaaaatttcattcatgtttaactaaagtgaatgagaaaatactctgtgttcaaatgaatttaagggcagttcaaaactagaacaattgcgctaaaagccaggataaagatctggcatgtgttttgaatgagcatacaacaaacttcaaaacaaaagctagtgacaaacaggacctgcttgacagagttcatcccaaccagcaccgatgaaatatctttgtttgacaagctgtattgcatggctaactttgaaatattcttccccttcttttgacaaaaggcagcagcagcttggctcgcagactgcggatataaaaagtattaaaagacaacagttaagttgttacttatataatcaacaatcaaacaatatcccacttctaaatagattaacccatcttcgaacctagttatacatcacaagaatagctgttgataaaattaaaaagacaaaaatgattctcttcctagataactactctggtctgaaaagacagatcaagtaggcatatttattttccaacttttaaaattgaaatttatgcagattagtagtgttttttttcattggtacattagaggaagagggattcgacttgaacatctcgctattctatttctatgaccaggaatttatgaagattaatcaccaatgcactagctaaagcaatgaaacaagagaaatgtaccttgagctcagatgaagctgggtgccattctggaggaccagcctcagtaagaagtcccattgcaagcggagaagcactgattacgccgacacctttgctcttcaagtatggtattaaatcatccaaggttgaatcattaacactatagtggcagtatgaaagaatcacatcaactgttcctggtggtacccgatcaagaacatatgtaaaaacttctaatggtaagcccagtaatgccaatgaagcggattttcccagcttccttcagcttttgaagggcaggaattgtctcattg

SEQ ID NO: 218918 - DNA, 6821 bp, Cannabis indica
gggtagtttcgtaattttctgctttctttcttttttgttttggtaaagagggaaataattaatattacctttggtgaaaatgaaaaataaataaacagaggggtttcagaggtatgggctaataatactattgccaaaagtggaataattgtttcatgatattttgtgcttggaaaacttttcttttgacttctcttcaaatgtacagacattatggaattgattgcatcccacttgctacggtggcgcgtgaatgacataaacacgcgccgcacactgttttcttttttatcctccaaattcatttctttattttcttttttatttcagtgcgatagatagagctgttaattggcgaaaaattaaaaattgttcttcctacgagacaagaaaaatttgtttttttttttgaaagtttttgcatgaactcaactgaagatgaaagaggcagctgcgaaagcgattgtgcttatgcatgccagatcagccaccattagggtggcagtaataagttactgtgtattattgtacgcgcctattgtataggtacacgtggactgatgagattttgttcatgttggttgttggtttaggtgacgaagcgcgtggacacaaacgagggtgactggactgggtggaactggaggacagaaggggacatgatggtaaatggagcgttcttcgtgccatcagggggagggcttagcacacagtacgccaaggcctctagtgttgagcccaaatcagccgccctcatcgaccagctcacttccaccgctggcgtcttcggtgaccccaggtaacatcttatttaattacctttttaccctttccgacttttttgtctttgcctacaataaagtcagtttcaagcttacctgtcacattaactgtcatcgccttttcttttcttttttgttaaagtttagtgatactctttactttttaatttattctctggttttggttaattcacacacacagaaaaaaaaaattctccttattcagggaacgacaatttaataaatagtgggaatatgtaaattatgtaatagtgggatttgtattcatgggtgcacgtgatcttgcgatgaaatggaatctggctcgctcgagccaagcaagtagctttacagttttcagttgtctgtctttcatttttttattggcaaccctttttgccctttggcaaaattgcatctttttatgaccttgggattgggtaaagagtatatacgttatatacatcatagcagtatacatacactcttttcttctcttttatgctcgttggatacccattagtaatttgtggggtccagttgtcagacatttatttgaccatatcagtactgaaagctttactctactaaatttgtcccatggtatttaaaacccctctctacccgtttcagtttattacattgacattttgattaatttctctctaaacaagtcattataatagttaatagaggtattgaagaaaaaggttgatgataatcttgttatgtataatagtcattctattaattgttttgattattcgttgctgagaaaaggttgttttcaaatgaggaagtaaatacatgtacgtgtattagggggaaaagtgagaaaaaaagggtgcaagtgggactctatttaataattttttgggagaaattggggaattttgatattgactaaccatggtttgtttgtatggggaatgtggctgggtttttattctctctacttgctttccagcaatgaagagtggacccctttgttattttatctgaaattttggaccccacttctgatatgatatgaactggacctatactactagccacaaccacagggcacagtacagcataagaaccggtgcttcaccaagtcccatctcaacttactttcctttgctcttctgtgtagtctttagtctttactgccttttttctattctaagttttgtcctttcactactctttcttgtaaatctttgttctctcttactataatcgagtgtaagagtgagctttttaaagggggtccctaattggtctgaacatggaaaagagctgtcggtttttttttcagtcaagatgaattgtccatcagtggccaaaaacggaagcttttggcaagacaaacgttaaatgcactctattttaacacttgtttttactgctacctattttgatgtgttgggttaagtttggtggaagtagtgactatggttaagggctgtggatgttcctaatcttattaatatgatttcttcataggatattttattatatttttaatggtggcctaaggccccccatttctctttcttggaacttgagtttttttatcaacaactagagcttactatttcttggcccccacaataccaaatgtttatgccataatcagtttagttttattatagtttcggttgaggaagcctttagtgtattgatgtcacactcttgtactacatcaaatctagttcttaaaaaaaataaagtttattttggatttgaatattgttacatgacttttttctttcggtattattaaaatgtataatgttaacgttatggtagggacaagagcgtatcactacctggattcagcggcggtgggagcataagtggggccacaagcaacaccgggcatgggacctcctccacctccaatggcgacgacgactacttcggaatgatatttgggagtggttcgtcatcagcagccggccccatgaccccgaccccttccccttctttctctatctttttgtctcttttaattattttagtcatctctttcaccaccaactgtggtgctcaattatcattaccattattattattatcatcatcactgttatagaaggctgaaaaaaccaagaaacaatattgtgtgaaatttcataattagatgaagatgagtaaagaaatcaaaaaaatgaaaaaaagaaagaaaatttcgcaaatggattggattcgtttgggtcccacctttgtttatatttggccattattgtagtttgaaaggcatcaagaacatggagttacatatagccaaaatggacccctcctttgtagaatctttaaagatttattattattattattaactattataatatttttgtaagtttttgggtcttttcaaattaggattcataaaactaattttgagggctctttttgacttaggagagtgtttggtgagtttatgggatacaaattaaaaccacatgcttacacaagcagaaaagtgccgagtggagttaatatgagtggctgagttggcatggtctctcttttcaaagagctaataattcactattatagtatctatgctattaaggtgcttataagtggtatctcatattgaattataccagtagatctcatttaccatttctctctaaataataacaattttcacacaaaaccttctaagataaaaatgaattatcatcatattgcaaaggaaaagaaaaattgataaggtagttaacatggcatgtctgagtgaatcagctaaaacagccaagctgtctaacattacgaaaagtcttctaatagcatatagaccaacgaatgtgagctcctataggagtgttaagtagatcgaaagaagacaaaataagaaagtatgagtatgagtttgtttagtagggccgtattgtattttatataatatttttttatgtataaattatatgtaattttgacttttatagttatatatttttttttttttgaaaataagagtcattttattaaattgaaaatctctgttaccaaattagacaacaactcaactggaacagtgtccaaattgaacaggcatcagggtgagatagagatacttaaatatataatataatattttattttaaaaatattatatatataatattttaatataaattaaaatttatcatataatattttaatataaattaaaatttatcataaatactatataaaaatataatgtataacctaatttaataatttaaattgtattttttgcccaattattagtatcattattattctcaaaaatttattttggttcctaaacttttatttatctaatagtttgtttggtaaatgaagaaaaggtatcgttagaattagaataaagtaggaaaccataacaacacatgtgattattttgttagcacataataaataactatgcctaagatataccaacatgcatgatcaaatataagagggaacaagacatggatctataagaaacacaaaatttcctttttaaaaaataataaatataaggcacactacaataattacacaccgtgtgactagtgactggttttaagatattgcatggcgcaaaaattacactggagaaataataaaactaggctaataaatgtaacaatttttaatagttgttggctgtaatttggtcattcagaaatttctttgtattattaaatttgtaaattcactaataaaatagcatggagatcaggctgaattgacgacttaaaaaacaataagcatcacaagctaaataattaatcgtcttgtttgctgatcgtttaacaaagataatagaaacattgtttaaagaaaaaaataaatgtttacaatcagaaataatcaagccaaatagaaatgacatttaaagagtatgacgaattgcgtgaacaacaacttgataatcaatttcaacaacaatttgagaaaaaatttaatgtttgatcaagctaagaatctctttgactcccataacttttgtcataatcggttgtacacaagcaagtaacaactttgaattaacttaagtgacatttctttcatggttacgcgttacccaaccaatctcaaagctattattcacacgaacaatagaagcatccacattatcatgttctcaataggaaaaattcaatgctttgccagttgccactaccaacataggaggaagtagactcccttaccagaacatcatttcagtgatagggctgagcataaaatctaaaaaataaaaaaaccgtttaaactggcctaccgaacaccgttggaatcgaaattgacggaaccgaaaataaaaaaatcgctaacggttaaaactgccattgaatggtcagttttttggtaataaaccgactgttatacgtatatatattaatttattaagtttttcttcttttatgtattgtagttactaataatatattattattttattaatattaaaattaaaagaataagataattagtttttgaacaagtaatttatatgtttgtagttataaaatgtaaaataatgtgtttatagaataaattggatcatattttcaagaaaaaaaaaagatgttcagtttgggcagtttgaaccgaccaaaccgaggttcaaaacggtcagttttaagatagaatctggattggtctgtcggtttttggattgcaccaattcagaccgaaaacaaaaatttgaatttttatatagaaaaaaaaaactgaccaaactgaccgatactcaactcctaattaagataagcaatagacaatgaaacaactccattagcaacaaaaaaaaatttcttgccaaactaactcattacaagcatgcgaaaagcccaataaatcattaccacctgcctagctttgaccttcgagaaaacagtcataacattaaaaaaaaaattaggatagagtgtccctagaaccaaagaatcaaaccgctgccatcaaagtgagacaaatggacatttaaccataatatgaataataaactcagctcttccacgacacacttgacacatcaacggaacattcacacatttcccccaaagttgcgtgaatgtgagcaaaatacctaagcgagctctccataacacatgatgcacctttggtgggattttcaaagtccaaagattcctctaaagatcagaattatttagctcacccaaccttcaatttaaaatttgaagatacttataggcactcttaacgctatatatacatgaagcctctctattccaatgtcattgatcctcctctaacccatcattaagaacaatactttgaataagcaacttgtccctctcattaaaaagaacaaacatacaagtaaacatctcaaacctgagaacctggaatcataaactgagctaccttaatattctccaaattaggatgagtcgaagcaataaaaagattctcctcacttggtaaccaatgttgatttaaaacatcaaccgaagcaccattgacaatactccaatgatattattcctttaacaagtttcgagattccataatagaatgccaaacaaaacttagattatgacccactatagccgagaggaaagtttcacaagtagggatgtacattttttttatggagatgggtcccgcggggattccccgctaaatggggaacgggatgggaatagggattatttttgtcctcgaatattaaacgggacgggaatgacactccccgccccaagaagaccgatttagtattttattttatattgttaataatattttataatttacaagtgaaatggggtacactgggttgggtactgttgaattggagccacaccattaagaagttttgtatagataatttaagaaatttcaccttattgtgagctttgtactttataattcttatttataaacaaaatgatcattcttaaaaaatatgttttatctatgagcatgggagaccttgaaatccattacaagactttttatgtgtagagaaagcaagtacaaaatggtatccatgaaaaaaaaaaaatacatcaatacaaacatttcttttggcataaacat

SEQ ID NO: 218919 - DNA, 2844 bp, Cannabis indica
tacttctaactagtctggtttagtcgtacaacaacgaaaccttacctcctttacgtactcacgagagagtagtaaagtagaccgaccgttaacctaccttctacgaactagtccgacgtcgtcgcctccgacactactcagacgccaccaacgactgtgtctaaatacattgtcgaacctacgatactgtatgcatctctctctctctctctctctctctctctctctctctctctctctcatattatatctaaatatatatctgtattcaatttggtatgtgctttttgttgtgaccatgagctgttcgatgaaatgagcatgcttcgttttaagtttgtctgcaagtttcatttcaatattcctttgttctgaactaaagattttagggatgaaaatgaaataaaacataattctaactgattatagacttagagtggaatctcaattaattgtaaacagtctttttggtttcttttagtttggcaaatttcacttttccttgtgaggcagaacactagagtagaacatattgatagaatgctctcagatgcattattttggagcatagttatttatatcgccagctaaactgtacaatacaatcatattttctaatttttctcaacactgtaatccaaaccagagaaatcagctccaaacaccaaagcattccacatggctgtctagcaatgagggcgctaggctcggttctttacagaggccaaggtttggttatttacttaaaggtcgaagtcgaaccaacagagtcatgtgcagtggtaccattagtagtagtcccattgttcttagtttcccttctcctgctaagtcagtcgacccaacaacattccttcagatcaggtcaatttgcctacctccaaaacagtactccttttcttttctgtttttggttttggttgctactttaacacttagttggtttttgacactctgatctttgtttttcacttttgggttcccgtgaaacagtgttttattgctgtctttatattggttgtcgaacttcattgtcccagaactcatctccagatatttccaattcgataaggtggaggaagataagaagcaaagtgttgatgttgatgaagacgtttaagtgtgaaacgacaggaccaagattaatgaagctaccaaaccagacaaacagagcaatgagaatgagaacaatgactaagttactttttattttcttttcacattcaaaggaagaattgaaatatcgaactaagaatccaattttatgaaaaccacattggaatatatttttagtgcgtttaataagtcttgctgtaatgaaaataaaacttacaattgattgccaacaaaaccaatcatgatataactaattaagaccctcccaaaaaaataaatttataaatacactctaaattggtattcatagactgctagtgtggtactacatttctgctcacaaaacgtctcaagtttgattccccaaactctaaatgattgtccaagcattttcatgtaaagtagtaggtttttctgcatggggcatgcttccaggcttaggaggtcttttcgaaaacaacaatgatcttccatcaaataaacttgaaaatgcttgacctcttgccttgttatcgttggagttcttatgctcttttgaagctggtttcttcaggttcctttctatgccaccaaagttaagatttagcctcttaaacagtctttttggttcaccttcaggactaggagtatcttctgctaccctcaatgtgtttagcacttcctcaggattgtgtaacattctctccactgtttcgtatacctatacaattaaataaaacaaatgtaatttcacatatttaagaaccaattcttcacatcaaaatcagttttaaactttcgagattttacctgacaaagatcatcgattttctcactcaaagtgctggattggcaaacagtaattgcatagtctttgcattcataaaacagctttgacaaaccactatttatagatagagaaggctccgcaataacaaagcctaaacccagctgaatgttataacaacacgttgttagtgacagcctattgtagacaaaattcaaaacctcaaccacgctaataaaaagaaaatgaggaataatcaaacaaaaatactaatgaaagatgaaaatatatagtgaggatttgtcattgaacttgcaattcacagtatctctgcaaagaaagttatctttttagaacttttaaagccctcacttcactactgtctaaaataatgacactaaccagtagttgtcaacttgtcatgtcaaatgctcaaaaactattgcttaattatttctcagataaacagttggtcaagaatttaagccataaattgtcaaatgacattggtttaatacagatttttcagcaaagtagaattggacaatattcttcacaaggaaaaagaatgaaagagaaaaggaattagcagtttatgcaaattcactaactaatttactatattcaatacttatcaaaatgacagcgtcaagagataatcaacttactaaagatacaaacaattgctcaaaaagctcacaaggtggaatttcctccaaagtgtccagaataccttccctacgggagaaccaatagcttagattataatatgataaatgaaaactaataataaacaaaagtggaagcattaataattgcaactcacactgccaaatcctcatcaaacaatggtgtttgtttgactgctggcactggctttgatgtttcccacagctcatgccataaatttcctattgagtaagcacaaacattgttcaaccaaacttcatacaacattcaca

SEQ ID NO: 218920 - DNA, 2990 bp, Cannabis indica
agttgatagaaaaaggaatgcttactattgattctttgatgaaaactgaattacttaaagatgatattaatctgacctcagcacatttttttgctgtcaatcatattaggtgcatggttgctctagacaatttggaatgtagtagaaatttgttggataaatatcttggactatttccatcatgcttggaacttgttttaatacaagcacatgaaaaggatttcggggatcttagtttctcgggctttgaggaaatccttggtagctggccaaaagaagtcccaggaattcagtgtatttggaatcagtatgcacaatgtgctgtccaaagtaaaggatatgaatgtgggaaggtactcatggaccggtggtttcattcggtttggaaagttcatgatctgcagaatggtatgaatagtgagaatatagaattagcttcggattcaatcttggaatctcttcctaatctaagtccaattgatgtgatgtttggatttcttaatctctctctttataagctaatgcaaaatgatcgtcttggagctagcatagctgttgaaaaggcattaaaagcttctattcctaaatatttcaagtactgcattggagaacatgccatgtttttgctcactggtgaatcgctattgaaagagaatgcttctgtcagtggtgtgctgaacattttggagcggtacataggtaattcattacctttctctgtccctgagcctttgcctagaaaatttatcaaaaacatcaagaaacctagagtgcgacagcttatgagcaacatattcagtccagtttcgtctgatttctctcttgtaaacttggttcttgaactctggtatgggccaacttttctacttgaattattgtgtaagccaaagcttttggtggattttgttgaaggcattctggacatatctccatccaactatgaattagctatgtctgtttgtagacatttgagcagtcccaacagctctactgatcttactccgaccagtatattgttctgggcaagctcaaacttagttagtgcaattttgcatgctgtcccgattcctccagagcatgtatgggttgaagctgctcgcatcttgggtaatgtaatgggtgtcaacaccatatctcagagattttacggaagagcattggtggtatatccattttctgtaaagttgtggaagtcctaccagaccctttacacggatatagagatgaaaaagagtattgcagaagaagccaaagcaaagggtttagacctttgctaactttgtttatgacttcaattggattagaaaattgggtaatgagtattgcatttgcatttgcttcaattggatgtttcattgataaacatccctggaaagcacaccctcggcaagggatgttttgttttggttactatttttgctgacacaggttagtggaccttccttggacctttttatgttttgaatttaggaactacgtacaaagctgcttgtacaggatagaaacacaatcaaaaataggttgtagcttttaccagcttggcattagccattcccttaatttttaccacttttgatttttgttttttgtcaccattcatattagacacttatttttgtttatcaatatatgtagagtaattgtaattacatagactattgtacttgttggctcttatacatgaaatgaatttggaatagttccttccttcctgttatttgtgatatatgtatacatcttccttttgaccattttatttttgctctcttttctttgttgctggattagtttatgtattaccttgttgattgctattgacctgtatcaacactttgttagctttgttaaattttgcaactcattccacaatggaattatgggagacttggcaaacacttttctttttctttttaatgaaatatcggatttgtttttcttaatatccatggaaattcatacctatcatagatatttgttaaaactataatatctcttttacaatcttaaaaatatgcaaaatattcaatagtactcttcatagtgagataaatttcgaatatagatatgctatttcttgttatctgtcacacgggcatactattgaattatatggttttattcaaactctgttgtcaaattagaaacaaacaaatttattttcaacttcaaatagattatgtacatcatttgtgggttcaaataagtgcatgattgtatgttaatgatctttatttagagattgatgcatgatgttagccgtttaactatcatttctctctaattctcactaaattattcataaaatagttgtgaaaggttatttgtcaatttattattctatataggaaaatttgatcacaaaggtagttttgaaattattctaggtttttgttatgctctagttttactttataaaatattatgttttgttgtatttcattaacttaaatatattttataattttaaaaatcatattaaagggattataagttgaagcaatctaaacatgcaacctgcattggcagatccacttcgatcctagctgcctctaggggtgacttcaacacaataatccaacttgaaaataacacaattttggtggattaagaataataggtcgaatctatttgatagagcaatattaattggttcgtttatgtttttagtagaaaaatatttctttaaaatatatagtataatttattcacacgactattaaggaatgtgttaattgtgttgatattttgtaaaaaattatttaatttgtcaattttatttattttaaactttacatatttttaggaaaatttcactattcattcataataaaatacttcatattaaattttataccatttttaaaattatttaaatttatacaaaataattctacccaaaatacccctcacattcaatttttccccctctctctgttttttcctcttcctcgcctacgattaccccacgacccacattctctctctctctc

SEQ ID NO: 218921 - DNA, 3764 bp, Cannabis indica
tttttttgtgaagccttagttttaatatgatgataccctagaaaatataacattatttaactcttaatcattagaacacacacctcaatcctttgattgtcactctgacagagatcaacttgtagttcattttcatgtggctgcaactataagcatcttccataagttcaacattcttgccataaaccaaataaatggtccagaaataaaaatataaataaaaactttgaagttattgtccttacttttgaggggaaaaacttctgtttacttttctctataccagcattaaactcaggggcaccccccttggactttcctagtttagatgctctggaattagtatcttcaacatcacaaactgcatgattttctttaagttagatctgttaacactatcaccagcttgtatttatcattgcagatgactcttaattttaaaaatttaaaagtaaaacataaaagagtttcaagtcaaattatcacaatcatgttaaagagtacccgtatttcaaagaaggataagagattacagaatggcaaaaattgtcattatccatgataaatatctaaaagctaatctcaaaagataaacttcttacctgtatcagcagtttcttctcgcatcatcaaagacgtagttgccagggttaccagggcatcaaaaggagaaccctcatctgcaaaaagaaagtcaaactgaataaagggaataaaaaggtctacaaaaccattgggaataaaaaaattgattagagaaatttgttttagtaacagtggaagttaataaacattcaaaacctccttcataaaaatatactacgtaaaaatgaggaaggggcatgaaggaaggagtagcttggacccagaattacctccttcataaagagaatttctacttcttttccttgaatccttagtaatggacctaggacttttcacattcacaacctcactttgaattcttcccttagcacttaacttttgtttctctgttccaatataatcttcttctatgtcatccaactgatcacttaccttgtctttatcgtctagcttttttagaaaatagttctttcctttcttttgaccattctctgtaccagcacctttcctacccatcaaatgatttcttggtatctcacaatccttattattagtttctgtgttccctatgctaaacccactagccctgtcatcaactttagcatactgaagctgtccactgctcatttcaggtctagcacactaaataccaaacaaattgtgaataataattaatttttggctaggtttatgataaataaaaatattgtacgtaagttggtacaaaaatattactatacaataaattgaatattaccatcctaccaccatcttgatgtggtgatggtgaaccaccttccaatttcctgttaggcctccaagaagcatggggggaaccacttctttgtgaggcctccgtcagaaccattgctagcttatgaacaccatcattattaacatccctgctatctttatcagcatttgatacatcaatacgaggagtcctttttcgaacagtgtgaggtataatacctgtaaagaaaatttagatgacttttttttaatttgatgaaaaatttagatgacttattacaatcaaaaactcaaaataccaaatttgaaaatgaacaaaaataaaaataaaaagttattttttctaaaaaggaaatcaagaataccttcttctaaacaaggtgaaaaaataaatattaatgaatttactttctggcacacagcaaattaagtgctttccaggtatatttttttatgactttgttgatttaaaaggaagcaccaaaactattgcaataacttgtatattccacgtagcattggaaacatatcattgctaaaacgttaaaaagacattgagatctgcagaaaatcacattaacgcagaagcgattgaaagcaaatcatttttcccacctgtgcgccttttttttaacattggcaggcccccattatgtgatgcagctgagtggaaatgcgaaagatctggcaaagtcctgtctgatcctttatttgtgctattatgagatcttcctcgtgtgcccttttgaggctcttgaaattctcctccagtctcattgctctcttcatcactgtcacttactccctgaccgtcaccataatggttagtcaaactaactgcataagcactgaaattgtttaacaaaaaaagggaatcctaactcactagtacacagtaatgatcagtcatcattgctaccagtccagcaactgaggcagtaccctcaggaagagataagtatgcctggaaatacagccaaaagaaaaggtttaaatcagaacatttcataagtagaggaagtgtcagatgagctggaaaacattacaattttgtaaagagtattccttattaccaaaaaaatgaagaatttagataaatgaagaatgcaatgcttcgtttttttctggctattttgtatccattgggatccatttattaaaatttaaagtccaacaagtagaacaacaagataacaacaacaaaaaagttcaaaaaaaaaaaagaagagatttcttagattatgatattcacaccaagatgataataagaaaataaaaggagcaaagtaaactcggtcaatagcttttatataagcaaaaataatagaatctaaatttaactagtaaagttaaaagaggctagcacaaggaaggtaggagttaactacacataccctattcatagaatagagggcctcaaccatctcagatgaacggttacgaatcgcagaagccacctagcaaaaatatttgttaaaagaatatgcaatggttaagagtaactataacactgttataatgacagaagaatagaaccattaaatgaccgtgtggttatcctaaaactctcttttaaccaaatgttaactgctagctccatgatcatttatcgtataaagtttaaaattacaaacaaatataaactaaccttcttccaatctttcccatacttacgatacgcttcatagaaacgctcaagttctcgcttactccactgaggccctaacatgtcagacaacttccgcttctgcatattttagaattgagacaaacaccaaagatcaaactacaaacttaccgcataggtaacactctgtaagtgtatggtaagactaataaagaatatttactttaggtaaagagtgtgtgtgtgtgacgtaaggaagaaacatgctcaatatggaccatagacaaaatacagcaaaactgccagctttctattcctataatggtaatatgtagacatttgttacatacaaaagaatcaattaagaaaacaaaatcagagttcattggatgcaatacaccaataagtctgagcatcctttatcaagctaaaaggataaacaaaaatgaaagttaaaagagtaactttatcagctagaaatgatcacgagcaccctgcacaatgtatcagaggaatcaaaatgttggaagatcaacagtatgtcctacttttcaggaaattattacttaaaacaaattatcagaggcaacatgtaaaatactttagcaagttttggtaccaaattttacagaccatccaagtaactttctcctaaaacatttggtgaaaaaggaaatgtttacatgtttgtggtaaaactataatctagctaaaattgagtatccaaaagttcctagttgttatttctcacaattacagcttacgaaaagaaaacaag

SEQ ID NO: 218922 - DNA, 7539 bp, Cannabis indica
gttacatatgttgtatatgtatatatatttatatacatgggaaatattaaaaggcacatatagtgcctagtacccttgtgaagtataatatgattattagtgcaactcaatattatgtcctacttgttttattttaataaatattaataaaaatggttaattaattatatagtgatattttatcgtgatactattactaagcacaatgttctatattcatatctcatcaatgatgtaaactcaagagctagccttaggtcaaggctagtttattaggcttgcgcttaaggtccactcctagttaagggtaccaaaataaaaaaaaaacttttaataaatatatatttttcaataatgtttaaaaatactatttattttcataaaaaaaattaaaaaaatatttttttttgaggaccagattaatgataaaatttatatatatgtaccaattctagtactcatcataaaagtagtttagattttattttattttattaatttctttcttattaatatgaacatggttgtcaatcaactactttcattgattgaattattatttctcttttttgggaaagcttaatttgtttttttgttgaaaagaaattatattaatattggtaaaggaatcaattgtgatgagtacagacatttttgaagctgttatttggccaaaagtggtttttaaattaagggtgttccttccttgtcttcaaatcgattaaaagtctttcatgtaacatgtttatgatattagatcctatgataataatatacaatatacatgtatctatatatctaacatatattaagaaaaataaaattaaattacttgacaaaaatgacagctcaatgctcattttttgtcactttcaacttttagatttttttcattctttttttctttttgagttttgttgaataataatatatcttatattacatgtgattcaatagttttgttgattttataatttttattattgtttatttttctcttaatcaattaattattattttttaaaaagttttaaagatttaaatttaatttaaaattatcaataaaattaagtaattattttttatataaatcttaatttaaatttaaatcaaacattaatttaattaattaattaatcatactttataacaaatctattagttactttatttaaaatatctaaataaattatattaaattttatatattgaaaaaaatataattaaattgtattaaatttaattattattattattatttaaattaatatataattaaataatagcaactctaatataactctaataaagtataaaattatgtatatgtaggataacaggtgctatgggattgttttattatgggctgagaaatacaacagctacttatgcaacaaatttcctcaatttagttcctattgtcacatttgttttatcaattttactcaagtaagattttgtttttacatatatgttaataattaatcacataatactatatgaattactaataataaattaattaagaatctgattttgtttagtgtagattagagaggttgaatctacatacaaaagaaggtaaagtgaaatgtattggggcattaatgtgtgtaagtggagctcttataactagtctttacaaaggaaaatcatactacattataagtcatcaccatactacaaatcactctcataccattcctcacacaactcataccaattggccacttggcactctcatgttggttggcagctgtttctcttgctctgcatggttccttatacaagtatgcaccttcactatttatagatatatttatgcttttacacctcactattaagattgaagcattcctaattgtttatgttaattacttgattctagttatacatatattttggagaatgttagtaaaattgtaatttttattaagtttcatcagtatggacttaattagtgtcttaaacagaacatatttgtagaattagttattcttaatcttcttttaaaaattaaaaaatttagtttggttacaaatataggacattaacgaaatttgtatttaaaattacaattttaatgtcgttaaaaaaattattaaatttatatatataagttacatataaaaattttaagtacttatgctgcaaatatactttggatatataagatgttatgtatttaactatatataatggtaaatattattttagactttgtattttgtaaaagttactgatttgactatttattttgttaaataacaaaatgaatcttgtattttctaaattggcacagatgtgattctgagctcaatttttaacaatattttagcatgagcgtacatatatagaaaatgtaactaattttatcataacacataatctaaatcagtttattttgataaatcagctcatgattctatttgtactattttaaaaaatacaaaatttatttatcatttagcaaaaaaaaaatctaattaatttgtaatttttgaaagacagaaactaaaataatatttatcctatacataatgttgccttaataatattctcaatcattgaaataagatctgagatttataaattctttaatttttattatatacatatgttcatttggtacatacataatttcaacttaacaattgttttgtcattgtatacctattattcccatttgatccattattttgcacatatgcacatgcacttgtacatcttacagtcaagattgaacattttcctaacatttttgcctttttcttctgaagtctgaataagatatttacttactaattgactttatgtatgtttttatgtgttacaaagtacaggttaagttgaagagaatatttccatatagatattgggcaattcttttgacatgccttataggagctgtgcaatcagctataattggtttatgtatagatacaagtgtaggttcatggacattaggctggaatctacaactcattactataatttactcagtaagtttatttagatgaaaattgtagtacaactttaaaagagtgtttcaatagattttttataaatattttgatatttagaagagttgtttttttatatcatcctatatattagttatttgagattatttgtaaatttttagaaaattctaaatagtttataatgacgaaaataaagtttaaagtgtttattttcaaaatttttttaaaaaatctacatgtgttcttaaataagtacgacatgcatgattataaaaaaaatagattaacaattattcttaaatactaaaacagattagtaattcaccgaaacattcatttaggagatatatactattttctttttgaatttgattatcttttggtgtgaaatttggtatagggatcacttgcaacagctgctacgttctgcttagtgacatgggcaatttcacttaaaggggccacttatccgtccatgttcaacccactcactctaattttcgtatctttatctgaagctatcatacttggtgtatccataacaactggaacgtaagtattataaatatataatatattttttcaattcatatagatatcatgatcactacctattttaaaatatagtggacaatagaaaaaaaaatatttttgggttcttatttaggaaaaaaatagtatctttcaaaatcagtaaactgtaaatttaaaagaagagttttcttttcgggcccctggactatgtgggccctaggcacaggcctagtccgcttgtgcctggggtcgggcctgatcatgatactagttgtgtttggttggaggtaatgaaatatgaaaatgaattaattttcattcctttatttggttgcattttaaaatatatgtcattccaatggaatgaatttttctaccattttagtgcaatgattattttattttcaaataaaaagaaaaactattctaatacaaagtgagaacaaatttataattttttttatcaattttttttttatatatttacagggttacactattttatcaaaatagcactatttgcaaaaaatcaatttttcttcttcattttttatccataaatatatatatatatataccaaattaaacactaagtgtatatatgcatgtatatttttgcagtttgattgggatgatgttgatcatatttggattgtattcctttttgttgggaaataaaaaggagaacaaaagcttagttcatgatgagaacaacttagaaggagaaggagcaacaaagatgttaataaagaaaataataataataataatgttactattaatcatcacatcattccaactgggttggagctcactaccattaatgttgtgccaactacttcaccaaaacaaataatacaacaaaaataatattgaaaaaacaaattatgttagataaaatgtgatcttaatcacttactagctatagctaattggagttttaaattttgctttttggctacttcatatatctagaaaaatgtaatttaattatcgagtttttcagtaacataaaaaagtactaaacattactcgtacattattacttatatagtgttggatattttaaaatgtatctataataacaatacttattcattgatgagaaaatgtttcaaatcaagaaaagcattaatgataatagtatgaatatcaggtgagttgagagcaatataacaataaatcaactcctccaaatcattccaatcaaattcactaccaaattcttcatttttcttcatcatcatcatcattttttcaagtattgattctcttatatctaaagatgtatttgtacttaatttgaccacacatgtactctctgaaaaaacaccgctcacatcatcaggcaatcttgctgagaaactttctttcttattattctgtgtcctccttttcgtcattgatctcgttcgcagtgtcattgacatttcccgtgccttctcatcatcttcttcttcttcttcttctttttcttgggttgcatccatatgatcatgaattgctgtagccaagatggaatgaattttacttattatatatagctagttttattgttcaagcttttaatgttttagctgagaattcttgtgaagggttgttaataagaggagccttatattttgagtcatttattacacaaaatttgaatgagtcacatattcaaaattgttacaatctatctcatgtattttttattttggagtagaaaaataatgtttatatttttttttttaatttcctttaattggtttgaatattgtactattatttcttcatttttaaacacacttgttgaattaatttattaatggtataaaacttaaattattcttattatcttatgaataatgatggagacatttttcaccttacacttaattttttttttattttcaataaataagatattaatgtgtggtaagtatttttcagtgtgcgaacgaacatgataacactatgaggatccagtaatagccaatcactgtctaaatgattgagtgtgtccactggtttgcaaattgcatgcatgcattaacaataatacaaagatttttcaatgtgaataaattaattaggaattaaatcattcaattcaaaaagatttgaatatatatgtatatatacatatatttgatttgaattttaaatcaagaagatattgtaaagaaaagagataaggtgaaagaaaggttgtctcttattaattaactcataaatattttttttctcctaaatatttattgatagatataatattagtataatttttattaatttctttccctattttatatttaatccagctagcatgaaaattaatatcaatgaattggaaaatagattaaatatatatatatatttgaaatttaaatgtccaaaaagaggaatatttatttaattactacgtacctaacattattacaattgactaggaaactatatctaatttttgttgaataaacaaacattccatagccatactttccaccaagattactaattttttttaagtaaaaatatataaatgcacttttattttattatttataaattgcaatctatatatagtaaagtactagaattaggttataaatacgttatattggaataatattagaaaattttagaatcatcatcaagtcttattagaaagatcatcatcaagtcttattagaaagatcatcatcatcatcatcaagtgtgtatggaaatagggtttattagaaaatggttcaaatggtcacaagtagttttggcaatgttgatggtgcaaatagtctacacaggaatgcaattgttgtctagaatcattcttgtcaagggtacttttgtctttgctctcattacttatcgaaatgtcgtcgctgctatttgtgtcgctcctcttgcctattacttcgaaataaggtttttctttctttctttcgatcttttttgttttctttgaaataatattgttttgcaaaatttttctttttctttatgatttaatgaatgagtgagtttatgtctttgatttctattgtatatttatttgattttttaaaaattcaaatctcatatgcttgtagatcttctaatacagaagttcataaattaactaagtttattcttaccatggaggcataatatatttctattgaaatatgactatattgctttaataaaattgcctctatcttttttttttattattattattattaaaaaaaattcttgttgtttaaagggttgttgccctctttcatcaataaagttttcattttattataaataataataataatcacctaaatttgattttgatccaaaaaaaaaataataaattaatgaagacaaatatataactgccggattattatattttttaattcattttttttatagcaatgaatatatgttctatttaattcattctaaactttttctttcaatgtttttttttttcataatttttacattaatttcagtaagatattttacaatgtttttataattatcttattttcatgactattttaaaaaagaatgaattttcaattaaaaaaaatctaacaagtttattcatatatttttatttaatggtttttattaatatttaaaaaatatattttttttgaatatgaaaaaaagagaaaactatacatatataaaaatttaatgggttctttataaaaatttaggagtatatattaaaaatggtcgaaaaaaatattaattactatcatttgtaaatgtgatttgtgaaattgacatatttttgtttgtgttaatttggcagaggtcatgtaatgaagtttagttggcaagtttggttttggctctttgtcaatgccttgaatgtgtaagattaatataatatttcttttctaatatatcttcattaattctaattattattatatttataaaggaaatataatcatttattaccttgtttcctctaatgatatatttgatatcttttatttttgataatatttatttagtattttatattttaaaattgtacatattt

SEQ ID NO: 218923 - DNA, 3591 bp, Cannabis indica
aatcacattcttcttcatgaaattttttgaatgatagcattgtttctttctagaacactttgaatgttcatagtaggcggtagaccactttgaatgctcgcacatgtatgtaggatttcaccttaacagtccacgaataattgccttattttctggggcaatttccaactggaaaaggccttaataatattagaagtcacactaacttactaacaatgcacgagtgagaacactcgttttaaattgcatgcacgatacactaagaatatcttctatcttgagcgatctctcagacagccaggagtatcaatctcatgggggtgccttcgacgacaaacccctgaacaatgataactttctctcaaaatcactctttgacaaccatgtcgattaaggtcaagcctcgatgtccatggatgatatatctcgcatggttagggagttgcgagaacccatggtggttgaaatatgagagagcaagtcgactgtctctgtccgatgtaactttatcaatgcgatgaccttatctgacgatgtggttgaagaagttgagtcggacatcgaattacctgctataggagaagatgttgcaaatgagaatgaagaattaggggtttccgattatgaagacgcacctttggatgagtcgttctcctgcaaggaccttatttttaggacaaggcaatcaggcttagtttctttggagaagttaaaacttattttaatcagttatacgagaccaatatcaaggcaacgacctcatcttccttttactaaccctgagatcatcaagacggatgttgtggttacctcgattcccatcctttgcaccggagtcaaaattctttttcacccgtttgtcaaatccatcctaaatttttacgacgtcgtaacgttccaaataactccaaatagttatagaatcatcctatgattctttgctatgtataaagaatatggatacgctgatcctacagtagaggatttcgtttcttctacgacatcaagaatgttggtaatgacaacgggttttactgctttagcaagtgggctaatgcgaagataaatggtgttgaaggtgcaatttccaatatgagcgattagaaatcaaaatggttttatgttgccagcttgccggggattagaatagaatttaactatcgtcctagtaggtcacttattcttatacttctatttatttgttaataatttttctaacctcttttatactcacagggagagacccatacacaaaaaataactggagaacagttgaaggtcgcaaaaacactaagtttgctgtcttagaaagcttgcaactgtagaattctgtgtacgtctgccaagttgcaagaacacagtttgatccctattaacgccatactccagcgagagccaatctacaaggaaccttttgagaagcagaaagagaagatagcgaagagacttttaaaacaaaaatgactatcaggtaaataatgccccttgtatctttgttgttgattaacattgttgtgagttctaatacatttttgcaaatatgactttcttgaagagtgcacctcttgtccacaatccaaaaacaactcctaataaggaaatcgcgactccatcgagcgcaaacccttaagtagaaaagcaaaaaagtgacacccgtgggccatttgtgatcgacctctttaagaaggctcttaaggtcacaaaagaaaaaaggaagaacctatagtggacccagccaccaagacacatgattttggggttcttcaggacttatttctcaatgacctcgagatttccccaatcgagagtcatggaatcgatgctcgatgcacatgatcaaatgagtgactgagtatgctcgctctttcatggtcgcatagcaaatgctaagggacaacgatttgcttcagaagaaaaatgatgccttgtagaagaagatgaagaaaatgaagatgtcactgatcgagaaagagaaaggatcatcagatgcgactagggccctagaaaccgagaaagagaatgcaactaaagccagtaaggttgtcaaggatttgacaaagaaaaaggaagctctcgaggtctagatagaggaggagaagaataaatcatatgaccaagtggttagtgactacatctacatgactctatctaaagttccttcctttgacttctctctccttggccaggaatttgcagatattatcgatgcttttcgcgctatgtccccaactgagactcaaggagtggtgggaactcctttcaatgatgcgataaatcctaacgtggtgaagttcaaaggagagaacattggtgagaacatcgagaatgaaaaatgtaatgactgcataattaggaatggaaacactactacaaaattgtgctttagaggtagtttttaaggtcttttagcatcagttttggtaaaattcgttaccgacgttgttccaggcgacattgtagggattaaaaacaaaagatgacatagagggaccctatggtgtcggttattatacaataaccgactataataaccgacgccataggaccttatggagttggttactaagaaaaaattgacgccctatggtatgtgattttcatacaaaatcaatttgtttttttagttttaaaacctaatataatttcacaaatttaatttatttaaattaaatattaattaatttaaattaaatattatataaattaatttcatataactaaaaaataaatagaaaatttgattttttatgcttacatttggttaaaaaatttctcctaaacacataataactaatatttgtaggatatgacaacttttatgatatccttaaaataccctccatttacatcacccccatttacacaatcagaccccctcatcggaccccatatcagacaccacatcagacacaatcggacccatcagacccccatcggaccctatattggacccattggacccccccccccatcggacctacgtctcctacctcacaaactcacagtttcattcaaccctatcggaccttgcccaaaatcacaaatctgagattctaaaacctaaatttatccctaaatctaacaaaatctatctttaacactaaaatcacaaaaaaaaaaatcaataaaaaaataccatatactatagacgtagcacatcttgatggcggttgagcaagtagaccctatacaaaataccatatactatatcaaaatttgcagatataatttgtaatgatgattactaggaaagaaattttacctcaggtgttacaattaagtatttaggtttaggaaagaacatgttcactacttccctaatatatttgcacccctcaattgatactgagatttcagcatcttcttgcaacatttttgaaattagaatgcgagcatgtgaatcatcatatggcacggtgtgaactgtgattggacccttatattcgtataaataagctgcgaccactctattgttgatattgtctgagcagagaaatattgtctgatcagatgccctctgttcagggattttgtacatgacaggtggctcatatatgttgcgaaaattattaattactacgcaagtgcacg

SEQ ID NO: 218924 - DNA, 6530 bp, Cannabis indica
ttacagtgggcttccacttcgtgcaacaacgacaaagatggactccgggattgaaggagcagcaactgtctggtggagttgggctgctgatcgatgcccaagaagaggagcatgagcttagagagagaggctttaagtgcaataggcattgagtaaattaaggtttaagggcagtggggataatatataggtaggatttttttaaaatgggtcgaagcagtattttgtcttactaatcctatgtctaagtatgatggtcattacaattacccctcgttaaaaggattttatccctgaaatataacctagataaatctgaatattgagtcctcatgccagaatctaactcccaacttgcttcttccaccagagtatcttgaccaatactatggttttgttctgaagaactttatccttcctatcgaggatttgaacggaatattcctcataggataagtgtggtgataactagggctatgcataaatttttgtaaactgcccaactcgaacaacccgccaaaaccaaattgggataacccaacgaaaaatacaaactgaaaaacctgacaaaaatataacctgcccaatcttgatattgggtgggttgaaaataatatcaacccacccaatcaacccgaactaacccgactaacccgattaagagagtttttgtatatagatatgtatgtttttattatatatatcatataatttatatgactatttaaaaaatataaagttcaaactatttttttatggtagttgatttgaactttaaattcaatctctatatatttatctcattattacaattagcacacaccccaaaccttgtctagatgcatcacagtagaccacaaagctttgtttatttgacgataaggctaacaccggtgctgtgattaatcacttcttcaggtcctggaaactggcttcatacttatcagcccacacaatttgttgggtttttcagtcaattgtgttaatggcatggagattttagaaaatctctctacaaaacgatggtaatatccagctaaacaataaagcatctaacctcaaaaactatcttcaatctcgaataatctctaattgtttcaatctttcccagaccaaccacaatatcattttcaccaataatatgacctagaaaggacactagggataactaaaactcacacttcttaaacttagcatcaacttattttctctaagtcattgtaagaccattcaaagatgttgctcatgttcttcttctaactgagagtatactaggatatcatcgatagacactatgatgcaattattgaggaaatccttgaatactctattcataaggtccataaaggctactgaagcattagtcaatccaaacaacatctctagaaacctataatgtctgtacctcatacaaaatacagacttctgaatgtcttcctcgtggattctcaattgatgatagcgtgagcaaagatcaatcttagaaaatgttgtcttcccttgaagctaatcaaacaagtcatcaattcctggtaaaccaatatctaacatcccttgaagttgaactttcaactccttaagttctattggagccattctatatggtgctttagaaacatgctttactcccgatatcaggtcaatagcaaaatttatttcccgctggggtggtaaactaggtaattcctcaagaaacacatctagaaactcttttaccactttcacatatgcaggcccaactgttttaagtgtattggaatttatcaccattgctaaataacctatacacccatattgtaataagctctagctctcaatatagatataattagaattcgagagccctagacttctcccacaaatacaaatggctcctcagccactagctgaaaggtcaccatctttctcatgattttaatactagctgcatacttagatataaaatccatccctaaaatgatatcaaagtctggtatggataactcaataaggccagtatttaactccctatcatccactataattggtacaaccctaatccacctcttggagataactaactccccactaggcaaaaaggttctaaatcctaattcataactataacagggcctacccaatttatcaattactcttgatgccacatatgagtgtacagctctagagtcaaataatatagtataataagagttattaatataaagttggcctatgaaaactgatggactagccatggcatctgcctgtgtgatggaaaacacctgagcataagtggatatgaactccttctttggttcttgttagattctcctaggtgatatttcttacaacgagggcattttgggtacgtaaattcaccctgaggaccaccaatccgacctaggttcctacaaaacctcttattttgtctagaacttctcagtgtgaaaggagtcttatttttcaaaaaaaaaaaaaacttagaatcaccactactcctacacaaactagaaggaggagtagtgactccactagaaccttgaatccctcggggctcatgcaaaatctatactgcaccttcggctcgaagagccttctttacaatcagtgcatatgtggctacatcatcagtcataattttctgatcatgacagatcttagcattaagcccaccagggtacttttccttcttagtttaatctataggtactatacctgaggctaatttttccagccgttcaaacctagtcatatactctgtcactaacattgattcttcttgaaccatttgtgtaaactctttgtggtttgcactacggacatcctcattattatatttagagttaaatagatcttggaattcatcataggtcataccatcaacatcttgtgtgagcgatattaactcccaccataccagagcatcttcctagaaatgaaatgtggcataagccactctgtcgctgccagtgactcccataaaatttagtatctgcctcatagtggttatccattgctcgacattcataacatcagtgtctcccaaaaagatcgaaggtcatgtctttggaaacgcttttatagtggtaccaacctcttactataggatatttcattggcaacactattagtggagcaataccaatctgaggaaaaggagcaacctaagggccttgctacctcagcctaacaatctcctcatggtgttgttgtaatttggcctacaactcagcaagcctttgctccaactcttgtggagcttgtggtatattaatattacccacaccacgagcccgtccatagcctctacctcgaccttggggataagggggaacctaatggccttgaccgccaccaatttcgaccatattaccctgacttcgtacattatgttgggtatccatatgatactagcatgcaaactcataagttagtttaattaggcagtggttaccataataaacttaggactgcatacatgggatcttagacacgcacataatcaatcaatatatcattaacatatttctatcatgcttttctaatcataataatctagtaaaatatgtaaggtttactgaaccgtgagtcgagcttatctcagatgatgattgtacatatcttgacggtcttcggtagacaacctagcaactatgataccaaaatcataacaccctactagaccactgctcataaccctacccaatacataagcctaataaggacgctaatatagctcacaatcacttggccaaacatctcattttttgtcaacaaactaagccaatacctccaagctccatgagttccacatctcacagaagctaacagcatcctccaatacttgaaaggaactccaatttaagggctaattttctatgcaaaaactcccgaaccacttcacctccaagcctttgctgacgcagattggggagcttgcttggacacaagatgttcaatctcaagctattgcatttatcttagacaatctctaatctcttggaagttccaaaaatagcaaagagtatctcgatcttcagcagaagcagagtatcgagcaatggccaataccacatgtcaactcacttggcttcactccatgcttcgtgacttcaacttcaacattagacttccctcaaccctattttgtgacaatagtattacaatctacatattagaaatctagtgtaccacgaatacaaagtatgttaaaatcgattattaccactttcgagagaaaatcaacaatggctccatcaaacaaattatattccctacaaatccaacatagttgatattctcacaaaatccttttttcctactcactttcacgaacttgtctccaagatgagtgtaaatttttttacaatactctatcttgagggagcctattaaaagttattatgttagctatgtcacttatattaagttagagtgagttagttagtcaattacatactttactcactccatttcctctatataaggtctggttcctcgccattctacaattcaattaattcataagaataaaattacgttttctctgttcaatacaactaatattaatacacactttttaattacattgttgcagttaactatcttttaaaaatttaatttatggatgattatttaatgctattttactttttgttttaatttgcgtcttaaaatgttgctaaaaaagaatctttcgtgtataatcttgcataattttaaatgttatcagtttcaatacgtagatcaaataatacaatacaagcaaaagtttccagattcataaagatatagaacaccatataaattatcatacctgcatattcactatttttacattggagcatagtaataaatgttgtaacaaatatagcattagctcatgttttactaaatttgataaacaccatgcattaagtaaacgattttagtgaatcattcaaatcttgtattttttttaattcttgtattttagtgtcaatttattggattagtttttgtggacaaaaatcttttataaatatagattgttcgaacatcacataatcttgcggtgcttaatgaaaagtataactatttcttacataaaaaatggtatacttcaatattaggggtcttttgtacaaaaataaattgtatttttacgtattggaccttcctaggcccaatgcaaaatatagtttttgtttcatggaaaattataggaataacttcataaaacataaatttttgtaaaaatcttacatttttacattcaattatttttatttttacggtattctatataaaaaaaataagattacaaaaagaaaaccacataaaaataataagaaaacaacatcaaaataatataaaaaatatacaaataataaaaaatcaataactaccgcataaaaatacagcaaaagaacgtatattatgtaaataaaatcttaaaaatcataaaaatgttaaacttcacacatagcgtatttttataatttttttttattatttttgtgtttttttttaattatcccacaaattatatgaaaatggtacttttaaaaaattggttttctttgtgtacaaaaagatagtattggcccggtctctaaatttttagggcttaatgcaaaatataacttctctttttaataaaaagttatataaaaaatggtatctttcaatattaggggtctttttgtacaaaaataaattgtattttaacgaaattcgatcgtgctgggacaatgcaatatattgtatttttatgaaaaaaatatataaaatggtaattttcaaaattagattcttttttgtgtacaaaaataaataggagctctaggcacaaaaaccttcctatcctatggcaggactgctattgatgtacacatttgagctcgtttggaacgtcgtatttagtcgtattatattgtattgtattatattgaattagattatatcatatttttatatttgactatgttaaattttaatttatagtaaaatattatatatttaggtgtctataaagttaataccacgtatagttttacataaaatacaatttaatataatatattatacaatataataaggtataatacgacgtaccaaatgaacttaaaggtagtagaaaaggaaatcaaattaattaaggatcacattcaagaaaaaaagtataaatatgatggattatttgagcagaaaagtatatgcataatttgaacatttttgtgcaaggccaagggtttttttatttttttttattttaatttatttattttaatagaagcaagaacaataggatcttaacagccacagaatgttcaactgtagtgaaaagacaattgaaggtcaacaataaagacagcccatgtgatcaaaattgcaaaaatgatagcagttcagcaatggccacctacattaatttcataacttgatctcatgcatggagaggtaactaatgatgtgtcatgcatatttttagtgttttcttgtggctttattagtaggagtattggacaattttcataaaaatattgaattatattgaattatattatata

SEQ ID NO: 218925 - DNA, 7688 bp, Cannabis indica
cttaggtccttgagccaaagctcaaatctcttagtccaatcttgtgcttcttctgtttgaaaaacgcttttgaaagcctataattaatcaaaaggaaagctcaggaaatctaatcattctaagacgtaaaagactctaagaagaaaattaaccatacagaggttataaaatagcatatttaagtgagaatgagaaagtcacaaaaccatactacacaaaagaaaaatgagagtgacctcgataatcaagctgccaagtttgcccaatggttttgatatagtgaagaagatccctcgtaaaagcttggactgcaggtaatctagcttttcaacaataagaaggcccttctgtctctcagttgcatatccccgtctatgagatgaaaattacaagtgtaaagtaaaggagaggtcagtagctgtagcctataatgtgtacacttgtagagacttcatcttaaaccttaaactaccagcaacagagctgagatatgaagtgttaagtaagttatatcacctgaatattattgcgttggattcagcagcttttttccaatcaacatatataggtaaagtaaggagataatctgagttcagggcagaagtcagcatcaaatctctagctgataattcttcaaactgagcgtcattaagaagttgcatgaaagcacgctgaaaacgagtggcaacagcaactctacccaataaaaaatacaagtaagatttcacagaaaaaaaaacaagtacaatttagtaaaacaagattgtattttgtaacgttcattttacaacataaaacttcctaagtttcatcctttaataatttttattctattcttttgtttggttacctattaaagtatttaaatgtcattctaataaaataattattccattttaaaatagaatcattccaattcaaagataaaaaattaatttatcttgccattccgattcctattcttatacattttaaattttaaatttaatttcattcctattcttattctcattctcattcttatatttcattcatctcaaccaagcttaatgttatttttaagttaaactcgatcaaacacaaacacacaaaccttttgacatttttaggtgaaggagaaggcaggaacttccttaaatccaaaacgtaattgaacgaaattgggttttcgaattcgatttcttcagcgccatatcgatcgtcttctatacttcttccattcccattatcaaaaacttgtccatctgaagcagccgagccttcttcttcattccccgtttgctgaaaataatcagagcgcatttcttccaaaacactcttgtgttcagcatgaatgatggaatccaaacacctttaatttccacaacactctctcccaaaattaattaaaccatggaaagaaaataaaataataaaaaaaaaccaagcaaaagccataattgaattcaaggacttacgacgagagaagaagaaaatcttccaattgatcatcgacatcgccagtagcatggaacatgttcgacacaatgccgcttagaagctcagtcttggaagtaggtatgtacttctgtctgggtacttgtatcttagaaatccatttttcttcctcctcttcgctttcatggagtccctgtcgtttaatattcttcttctcaatgttgtcgtcgtttatgtctatatttgggagctgaacggtgtcgtttatggaggtctgaggttgcgtcgacatctctcggaagtctgtgagagagcagtgacatcggcatgacgtagcagccggtgacaagggcgagcgccggcggcgagaggctacggcggcggaggtgaaaatttggagagaagcagaagaagaaatagctgctaacatatcagtttgtatatgtaacttaaatcacttcaccatagaacacaagacagaacagttatgatcaaattagaaaagcttaaacttggataaggatacggttgtattttgtgtgtatgtaaataaatatgtgatctggttttttgctgccaaagaaatgttttattattgtttaatgttttcattttttgaaaaaaaatagattaaatttttatactaattttttttgaaagaacgtcttgttcattaattaagaaagtaagatgtgaatcacagaagaataccctccccttgatacaaaatagttagttcactagcaattctagcgtttttagctacaccatgggccaaagtattaagacttcggttgataaaaaagaacttacacacatgaaactttttagtaacattaactattgaaaaaaacacactagacatcttccaatcaggggttcctcatcttgttgttaaagcttgtacaacgatcttcgaatccgagaaaatgtgaacctcacgccaacctaacttgacagcccaggacagagcaaggagaatagcctgaattcagcttccaaggcaaattgcgaacgaattttctgagatttaacaaaccaccttccagtcgaagtatcaactcttattgttgcaatgccagcttcccctaggacccacgaagcatctgtgaagaaaacatgtctcaccttctcttcgcgcggacgcaagggaataacaggggcttccaaacagtcaatgacaggatcattctcaatggctcctcctctgttgcggatgggcaaattctggagttccagattagctttttcaactctagccatggcaaaggacggattgacaggaacattatcaatgcaatgtgcattcctctgttgccaaatttcagaaaagaggcatccaatgaatgcaagaagctcattcttattaactccgagcgaattcgagataagattctccataaaaaggatcatgttgtctcctggaatgtcttcaatcctcatcggaaatcttcctccaaaccaaagggcttttgaaaagctgcaattgcgaaacaaatgaattgcactttcctctttaaatccacacaagcagcattctttgtcagaaataaaatgcagtctattcttagtagggatagcctcattcaaaattctccatagcaagactgaaatacttggatggatccccacatcccaaattcacttccaaatgtcttttgctggagcaaacctccaagattgttccacaccgtaagctgctttaactaaaaactaccccttttgattgttcttctagtacacctgatctgagaatggagaaggaattcttggaatgttgagaatgcggttccccaactcagagccaaaaatttgcaatatcagttcctcgttccattcattgcctgttgaaacatccgccagagattgtattgtgaatcttctgtttctgatactattgattaattccacaaactcttaatactccatccatggcatccaaggctgcctctagaaattaatggactctcccgatgcggcaacagatatcgaacctttgaggatagttaaattaaaatttctatactcgcatcaaaataagtcatttttacttttaacacaacaaaccctaatattataattattagttagcttaatattcttttctcgggccaattatagattctcaacgtgttacttaccaagaaaaattagggttactcgtccctaaatttatagctatcgtagattgcattttttctccagccttccctaggctttaggcacagcttggtcggggttgtgttttgcaactatgattagtcttgtctctgtgacatacttttatgtgttttagtcttgtctatgtgatatgattttcagtgttttagtcttgtctgtgtaacatgattttgaatattttagtcttatttatgtgacatgattttgttttatttcgttgttggttcttctttattcttcaatcgctcgtcattaaattgctgttagtagttgaaataacaagttttttttttgccactgaaggattgttagtagttcagttatgtaccttacacaatacactacaagaaacaagacttttgtgcgcttgcaaaggttgggtattgcgctggtaaaacagaatttatttttgccagcgtatttttgtgctggcaaaaagagttggtaaatttgcattgctatgggaacttttgtcagcgcaaaataaaaaacgtcggtaaaaatgacttttcctagcgcgtaaatgtgctggaaaaagtcttacttttaccagcgtattagcacgttggtaaaagtctaaattttgccagcgcatatatgcactggaaaaagtcttacatttaccagcgcattaacgcactgataaaagcttaactttttccaacacaaatatgcgttgggaaaagtcttacttttaccagtgcattaacacgctggcaaaagttaagcttttaccagtgtgtagatgctttgagaaagtcacttttgatagatggatatttggctttttccagtacaataatgcgctgataaaactttgtaatttattttttatttaatattatttaatttaaattttttatcaataatttttaaattaaaataaataaaaaataaaaaataaaacaagaaagcttaattataaataattacacaataaaatataatttaaattgttctaattatacatgcataatatagttataattgtctagaagttagtaaataaacatatgtttaaaataccaacataactataattttctcaacataagtatacggtccaaatcctttcacataacgtgaacgtagtggaacaagaactctgtgtcaaatctttagttgctttgtcccccaaggaacctccaagcatgttcttctcatatgaaaattgttacctgaaataagggttgcgagagagaataagatggtgaagatggtaggtgaggtgagattacaatccaagccacgaagttcggcgctgctatgatcgttgtcgaagtgttgcgaaagcagaatcatcattttcatatgtggtcggtacgagcgattggtcttgggatattggctttccatgttcttcagaataaactcaagaaatgcaccattttggtccaccacattgctttaataatcaattgtatagtatttaccgagatttttagaaaccgattaattagagcttaaggaaaatataaaacaataaatattagaaaaatggtttgtacgcagttcaggcgttaataatcccttgtccacaagtcctttgtattagccttgccgacaagtatttgattattataagtgtttacaatgataactttgtattccttttatttctcataaagaagaagaaagcttctctaggaattttgacagaggttttgtaagtaagaaataggttcaccctctctacatgataaatagggatattcataggcacatgcgtgggtgagggcatacctttcacccacctagggtttcgtactcaacatgtttctttagctagtgattacaacttaacaatctgaccgttggtggctagggaacctcataatcgtgtggtgcacaactgtgacatcctaatttgtaggacttactacccgtgtcgcccaaaggtttcaccttgcaaagttggtgtataaacaagttgttgggtaaaaaggagctacagagcatgtacgcacactaccaaggtctgacgcgggagataagatctgatttggtgtcagaagatatgcaaccgttgggtttaaattcggattagatatcatggagttccaggaaggtctagctaaggccttcttggatcaactgattcgctaccatcctagagcgtgtgcaacttttacgtacttccgatagcaagagcattcgatgagaatcttggagtcttttccgcatttgctcgcaaggagagcctctgggtattacaaaatcttctgtaaccctggtaaggggaaaacataaaataacaatatgcaatccgatgtggcacccttatgtgattgccacgtacaagtcatccgaggacagggataacattaaccccctaagctcccgagataacaatatgcaattcaacctctttttgatgctcctcccgctcagtatccaaagtctcctctaaggcagttttctccttcagtgaagcctcctctttttgttgaataacctcagtcaattccttgaccttgctcttctggttctgaaggagtgtgcggaggccttccctttcatcagttagatcttgcaccctctttgattcatgctcgagatctactatgagcttggttgtggaagacatgtcttctatttgctgctttaagtcatcaatagacttcggttagatcccacaccctcttgaatttcagctcaagatctactttgagcttggtagtggacgacatgtcttttctttgctactttaagtcatcaattgactttttcgcaacaattagttgcttgtttagctcaactagttgttggactttcaactcaacatcttttttggcctcctccaacgccttttgtaagtaattggtggtcttacaagtctttagagttgtagacttggctcgggaataagtataggccagctttaatttagcctagaaagagaaacaaacaagttaaattacctgggcaaaaaagcccgtacaaagaactctgaaaaaagagtgtaccctgataatctcctttagaactccgccgaccagaagttcgacgggcatatcttacgccccagtaacttgctcgttgcctcgaccattaagcgatcttggtagaaaccaagcatctctttagccttctttgtctctagttggatggtgggcagagtgttatttggctttggtaggctgggccattcagtactagcccctttagagcttttggtcagagtggatggaggttaattctttaaattcttcttggccggaggaagggactcagaaatgtccataatgaaaaccctcaagctcctctcaacttctacttgagtttttttggagctcgagacaatgcttgtgggaataggagcatacacctttggtcgtttggcatgtgatttttggccagatgcatcatcttcctcttcttgagtgcgcattttatcttctctgacatggctacataaaagaaaacacttgttaaaaatatgagaaattaagaataaacaagataagtaaagcaataactattctagacttcagggggagcaccctcccgacaagaaaagacaaagcatcctcgtcagaaaaatccccatcatcttccactactatgaccttccctttccctattacaggggaggtaggactaatggctacctcggggtcattcctgatcctgatagaccagtcagttaacacctaatgccgttgggggttttcttcttttctagagcctcttgctcattggtaattttctcaactaccttttcggattcttgaatctccttagatgggtaaagaccgtacttgaggaaattgcccataatttccaggagagaaatgttctgagctaactccaacagttgaagaattgcttgagctcttgaccttagacccaaggtgaaaggaggacggcagtaagagggaatctgttggaaaaaaggtggtcggcatccatttctttgaccaagtagtaattttcaaggaaaccaccgatcttagacacctccttgttcgtagtaccgctcaaccattggtgctcattttgggagaaataaaagtatcctgatgataactctatgaaaatagagttatttatatctttttgggcattaa

SEQ ID NO: 218926 - DNA, 4598 bp, Cannabis indica
tataatttacagctctgaaggagatgccaatagcgatcaagactgatgagcctaaagcccagcattatgagttacccacttccttcttcaacctcgttctagggcaaaattttaagtacaggtacgtacactacagagagagtactctatttttctttttcttttttttttctttttttttttggtaaaaaattgaatttgagtttgtttattaattactattattattgctaactgggtttcaaagattatttttggaaaatttaatttgagtaaaagtgaagtacattggaggaagctgagaagacaatgatactttgatttattattattattggaaaattaaatttgagtttttgattgttctttctttctgggttttgagaatcattgtgtatagtttgttgttactttgagggaaaaaatggagtactttggaggaaagctgagaaatgctttgatttatcatcattgaaaaattaaatttgaggttttgattgtttatctatttttctgggtcttaagaattatttattgtgtatagctgttgttactttgagacaaaatataagagtgcattggaggaagcttagaagataatgatactttgatttgttattatattacttattggagaattaaatttgaacttttggttatcttttcctttttggggttttgggtattactgtgtgtagctgttgttactttgagaaaagttcaagtacattagaggaagcagagaaggcaatgttggaaatgtactgtgaaaagtcaaagcttgaagatggtcaaactgttcttgatgttgggtgtggatggggatcactttctttgtacattgctcaaaagtataagaattgtaaggtcactgggatttgtaactcttctactcagaaagatcacattgaccagcgttgtaggtaagaatataatttatgagtttgttttgaagtcttaggattttcatttggttgattgattttgaagagcttaggggtttattttgtgactttttgtagagagcttgaggttgagaatgtggaaatcattgtggctgatataagcacatttgaaatggaaagatcttttgatagaatatattccattgaaatgtttgaggtatgtacatgaataactttgaccaaactaactgtaactgtattcgaattgagagtttataatcgaatagaggtatttggtataatatttcattcctaaacttaaaaacatcaactttaacacaataacgataaaaactagatccgtaaatattatcctaaaaaatattttggtacctacaattttttttttgggataaagttgtttgatacattgagttattctatggaattgttatacacatctttatgtgtaattaatctcacacatgagacatgacaatacatataattttcctaatttagaggtgaattctatttataactagccaagttgaaactaaaaaataaaataatagaagtattttttatatagagtattcatatttagaggttttattatactatgctttgcgctatatatgatagtattggatttgtttgaagtattgggtttaatgtgataattacagcatatgaagaattataaggagcttttaaagaaaatatcagggtggatgaaggaggatgctcttctatttgttcatcatttctgtcataaaacatttgcttatcattttgaggtataaattagtattttttttctttttataattatagttttggtttgtgctagttttgttaatttgatttaagttaaagtactgttttatggcataacttaggatgtaaatgaagatgattggattacaaggtacttcttcactggaggtactatgccttcagcaaatctactattgtatttccaggtaaattttgctatcaaatctctcttttcttaattcactttgagatggttttcgctatatatatttctaatgcagctatattataacttaccaaatttgagctattatgatcatatatgtatatatatacacacacatagtactttcgtaatctcaaaatttcatttcttactacattgagatgctaatgccacacaccctaccgaatttgtgctaaaatcagattagttcggggttgtaaatagccatttcatataattattttgcataataatctcatttttataattctttgagaaatagattttcaaaaatattcgataccctatttcaaacatcgtttttgcaaggcagcatcggaaaaaatgaaaaatttctctagtgactaatgaagtttgtaatctataatttcaaacttccattacttattgcatgcgaatattgttaagatgggttcattcaatatcaaatattactaattaatgttacaccctttcaagtttttgatagcattttcttgcaggatgatgtttctgttattgatcattggcttgtgaatgggaagcattacgcacagacaaggtaagaataatgcataacaatgatttgtgtatgtggagtcgagccatactaggacgagtcacggccgaaaaaaactatttaaaatgagtaatgttaaacacacataaattacactttttatacacaatgtttaactttaaccaaatatcattttagaggtaattaggatttttttttccctccgaactttgacatgtactaaattatgcccctgaatttttttggctgttaaaaattcctctaaactattgagattgttaaatataagacttttgtctaatttagtacaaaaattctaatatgaatgaaagttcacagggcatgatttagtacatatcaaagtttaaggggcatgatttggtagatatcaaaatctgaggagcatggtttagtacataatcaatcactgaagcagtaaaattgaatgaaattagataaaagttcttaaatttaacaatctcaatagttcaggtggaatttttaatgacaaaaaaagttcaggaggaatgatttagtacatttcaaagtttgaggggaaaaaattctaattagccatttttagaatagaccatttcactgcccaacactgttatattgctattggtaaaattagtatcggtttctacatattttaatttaataactaatataatagcaaggtctcatagtatatcgtaagtaacatgagacattattaattggtgcagtgaagagtggctgaaaagaatggataagaatgtaaggttgataaagccaataatggaatcaacttatggaaaggagaatgctgttaagtggactgtttattggagaacatttttcattgcagttgctgaactatttggatataacaatggtgaagagtggatggttgctctttttctcttcaaaaagaagtaaaaaaaaaatcaattcaacttctgaattcctcctatgccattttaagtttgagcttctcatttcattgagtttaaggacactacttgtaaatttcgtctctgagaaataaaatgggtgtttggaaaatagatagtgtcataacacactcgatatcttgtcaaaaatttggtatttctctctaaccatataaatattttactttgaaaattcttgaacaaccccatcaaaatggtaagatgtatagggttgtaattttatgatgcatagaaaatgttcttactaaatgaatacaaatatgtatcaaaatcattaaaataaaaaaaaaaaaattcatcaatcggtcatgatcgaagagaaaacagaacaaaacaacagagaaaaaaaaaatatatacacatacatctgatgtcaattgttagatattatatgaaaataataaaatatttaaaaaaagaaaagagaatgagttagtgtcggtatttagactttcaagcttttgttctttatacataatgaatgaggagttcgaggaccggtccaatatttataggtgagatactttatcactatatgtacaacattaattgtcagaatatttaacaattaattcgagaaatcaaataaaaaaaattggtgaatcgaaattgaccatatctaaaatatttatgtttatcaaataattgatttggaatcaattataatgaatatttcatatttgtacatgtaaaatcaatttataattttatatataaaaatattctaatattctctcacttggtcatcatttaattttagcacgtaaactcaatgttcttcattatataataaacacatgaatcatagcaatagatcctcattgtatgccaagtattaccttctatgtattttgatatattcattatttaacaatgtactttatgagacaatatacttaagcgaataaaccttaagccttatgtttattctgctcctctaaaattttttataatataaaattaagatacgcataaatatgagaaaatataaaactaagagtttcattaataattttagttgtacaaccaaaaattgcataaggggtaatcggatcccatatttgttttacgatccttaaatttgtgttgcgacatgcctatagtcaatgatatatatgcgatctcccaataaagtattgcatgcttaatgaccacttatcatgtctctttatgactaaatatttaatgtc

SEQ ID NO: 218927 - DNA, 4572 bp, Cannabis indica
tatatatattaattattattttttttttgtcatgtattatagttactaataatatattatttttttattaatattaaagttaaaagaataagataattagtttttgaacaattaatttgtatgtttgtagttgtaaaatgtagaataatgtatttattgaataaattggatcattttttttaaagtttagtttgtgcggtttaaactgaccaaactgaggttcaaaacggtcgatttttcagattgcaccaatccagactgaaaactgaattttggatttttatatagaaaaaaacagacaaaaccgaccgatgctcagccctaagcatagggtttgggctcattgttgcataactctatgttgagagcatagtgtatgatgtcaacaaaaccaaacctctcaggggccttggtttgccttttctatctatctccggtcagtttatacccctaagtatctgcacgactggtttctactacttcttgttgttcatcttcactctcatcttctaaaatactttcatgtatcactagtgctttatgcatagtttggttttcttcgtgaacctttccaacaggttccacctcaaactccaaatcatcttcagtctcatctctggtaagaattagtttgtgtagccatgacatccttgtatacccttgtcttcttcaaagacaacatctctgctaattatgcatctgtcttgattcccagtttctatacactatagcttgtaccctttcacaccctcaagatatcccaaaaagatgcatttctttgccctgggatcaagtttcccttgcctgacatgagcataggctatgcaaccaaaagttttaagattgccataatttgcatggtgtcctgatcacatttccattggtgttttgaattggattgtagctgaggagacacatgttgattaagtagcagccacaacaaccttagtccaaaatttttttggcacaccagagtaaattaacatacatcttactctctccaaaatagtcatgtttaatctctgctaaggtttttcaatcgagtttgtgtcaggttgaaatgaactaggtctagtcgtctagattgttctgatggattaaggtgtaaccaaacgacagtgagtttggtagagtcaattgtcgtttgactcaagattcaaagggcagtcaactattgtttgactcgggataaaaggtctaaattgaccttggttaaaacttaattaatttctgttatgtatagattaaattggtaaaattccaacaagaatcatgaatttgatacttcattcatactaatcaataagctttatacagtgtaattatacaagggttagttacataattagttgtacaattagtaacaactaacaactctagaagtaactaactctgtaacagtaagctaacttactctatcatcctccctcaaactttgtgtagaataatcttttgtactaagtttgtttcttaagagaaagaatctaaaacaacctaaacccttagttaagatgtctgcaacttgcaacttggccaaaggaaatcatttattgaacaaccaattgcttgttcagaaccttttctcttacaaaatataagtcaatcccaacatgagtgatttccctcggtttatggctctattcatctgtgtgtgtgtgttttgtgtatgtatatctaagacagttcccttaaaaagttccatatttagtcttagtagggaaataaaggaagcctgattaaagggcattcttttaatggccttcaccctcttgtgttcttggtacagacagcagtaaacaacatcagtattcagatcatattctcattggcatccttgaattccagctccaagtttcttaatacagtatatatctcttctgatcttggatgagaccgatcagccacccggaactcatgtacttttccattaatctctagccagctacagcctggagtctttttcaatcctttatccctaagaacacttctcattttagcaacaccgtcccattttcccgctgcagcgtatatgttggagagtaatatgtagtttccagcattctttggctccatacttataagcttttcagcagcaaattctgcaagatcagtctcggaatgcttcatcttgcaggcactcaacaaaggtccccaaacccgagcatctggttcgaagggcattgatttcacaagctctttggcttcattcacatgcccagttcgtcctaatagatccaccatacaagcataatgttcctggttcggttggcaaccgaacaattccatcatttctttgaaaatccctttaccttctttaacaagacctgaatttacacatgctgttaataatcctagaaaggtaacctgatcaggtttcatattagattgcttcatttttcggttcaactcaaagcattgttgccagtctccatgcttagcataagcactgatcatagagttccatgtgataacatccttattattgattttctcttcatcaaaaaccttctgagccatctctatgcagccacattttgcatagctgacgagaagagcggtattaagagaagaaagcgagctcaggccggatttgatcgagtacccatgaaagtactttacattctctaatgctccaatgttcacacaagctggcaagatgttaataattgtaatgaaatcaggtttgaagccatttgatttcatgttggagaaaagagaaagagcatcaacagattgatcatgagttacacaacctttaatcattgtactccatgaaaccaatgtcttgttttccaataactcaaaaatctttcttgctgaatttaacttgtcacattcacaatacatgtcaataagagaattatgaactgatacttggtagtctataccatttctgatcacataggcatgcatttgtttgccccaatcaatagatttcaatcttgtaattgaagaaattacaggtagtgcagtaaacaaatcagctctgattccagatcttcccatgcctcttagcaatttaatagcttcatttggacaaccatttctagaatttgctgatatcataatattccaaactacacaatctttctcaggcattttatcgaacagtagtttggcatatttcaaagcacccaactttgcatacatagacaataatgcagtgttaacagacaaatctattcccaaattactcactaaaaccaaacaatgaacacactttcccactcttactgacttcaaatgaacacttgatctcaacaagttaatcaaagtaactgaatcgggttctatcaattccattctcattctcttaaaaagatgaaaactttcctctccattaccactttgagaagaagcctcagagatatgaaaattccaaaaatccaatcttgaaacagggttttctcccaaactaaatgaatcaaaacccaatttcacaacatgcccatgaatcattttccgattcaagccatctcctaagccattacaagacctcaaaacaaaagggtaagtttcttcatcagggaacatagattccctaaccatatattggtaaaacaaaatggttttatcaaaatcaccaaacttggccaaatttctcaacatggcattgtaaagacctgaacttggctcggtaatggaatcaaagactcgttgtgagagactaagaaagcccagttcggcgtaagagtcaatgagtttggaagacaacgttgagttctgttgcaggccatggagaatgaatcgggcgtggatttgtttgagctgttggggtttggtgcagaggttgaagagggaagaaaatgtggtaaagagtcttgtttggttacagggaaaatgtgggattttgagaatgaaaatgtcggaaaagagagatcttgaccgttgcgagctcagcataattgtccgaagcaaaataactcaacgaacatttttgggctgcttttggtttcagtgtctaaagttttggttttcagtttcagtgtctaaagttttggttttggcatgtatgtatctgaggacttatatgtaattttacatcaccaaagccaatgtactaaatcatatttcccctaaagtttttaggcatttaaagaatttttttttgaagtaatagatttaaaaatttatatttaatttcgttcaattttactaagatgatgattatttatatattaaatcgtgcgcctaaactttgatatttactaaattgtatctctaaattttgatatgtatcaaattatattctttggactttcatttatgttaagcttccgttagtaaaattagacaaaaattcttgatctaataatcttaatagttcgagagaatttttatattttagtagcttgaaaagttcactagttctggtacatattaaagtttaagggcaaaaatcctaattagctaaaaataaaggctaaaaattaggggtgttcatcaaaccgttcaaaccgtctgcatcgtaccgcatcgcaaaaaaatacagtttgaaattctttgcgatgcagtcgcggtttgaatttttcctaaaccgcgtggtgcggtgcgatttgtgattttgaattg

SEQ ID NO: 218928 - DNA, 3548 bp, Cannabis indica
caatacgacctaatacggcgttccaaacgtcctaacattactattacattacattacatcaaaagtaaacatatcttataattacgcggataagttgcctagttataaaataaaatagaagtgattaattcatttgttggcctaaccattagtatctaataatcaaagtagactaaagccattttgtttgttaatagaaaaaacttgtaagaatgaaaatgctgtatctttcgatatgaggcttttgacaaaatatataacatatatgtatttatagcaggacatgttgcattcagaatacattctcaaagtcacacaactgagagagagagagagagagagagagagagagagagagagagagagatcatcataggttagatcattcaaccaatgacagaagagaaaaagagagcaaattactacaaattgggaaattccacaaaaagtgaaatatatgatcttaagctagcttgctagcttgattgctttagctaaagtcctaattaataataaggtcgcaaaaagtccaaagtccaacccccccaagtcataagtctggtcatgccatttgaaatcttttttctctcaagcttctgcctcttctgtaatcaatttctgcatctgagcttgacattcccattggatatctcctcatttttgatgatgagaatatgtcttcctcttcttcttcatctgatatcatcatggcctctcctccacttgctgctttattactatcaccaccaccaccttgtacccttttgtgatctgagtgagaaaagcacaacaaacaaaactaagtccatttcccaattcttatctattatcaatataatatagagcataaacatttcaatcaaaattcaaaacaaagatttgagtggctttacctggcctcacttccactgggggtttcatggtaaaggagtcttccatgacatcagaaatctcaacatactgaggggttgtgatgatctcatccgcactaaatccaaacgatgctctataagcttcaatctcctcggcatcttgcttcgggcttttcatctgcctactgttctgattctgatttccattcacagcagcggacgaggaggagttgtgaacatctgaatcttttgaaacactcaacctcccaccagaattcgggaagggcgggttatccagatagaactgagcaaacgtagcagggcagaaaaagtttgaatcctgagtggatgccaccgctgaggctgcacccgcacccgcacctgcattctcatggtccagttcacatttaccattttgtggtgatatgagactactaggagttggaggacttccagggtaaagcgaataagtagcttggagatcgtttgccccaatgtagctagtcttgttgccgctaccagtagaggagaggaaatgggcaaaagggacatcaggggaagatggagtggtgaggtgagcaagctcaggtgggggtgtgagaggagcagtggatggctcagtagtgaaggttgagaaaacaggaggggagactagttgagtctcatgggcataaggaccggtggcgtacatgctggaagaagggccaccaggagagttagcagagagcgacaagaacccattggttggggattgagcggtagaaggaagagcagagttggtgaaagaggctggggaagaaggtggagctaagagtgcagtgggttgggaaggtaggccattgggttggggaccatgtgggtgaccatgaccatgaccatgaccatgaccatgagggtgaccattgggttgggttgctgacccattaccctccggaattcgagaagccggtacaattcgttttccacctttttgggttccaaaacaagataaggcactcaaacatcctccccatctctttcgctgtcaaataataaaatctcaattcaattttctttttcttccccttttctcttttctctcttctattatatgaaaaagaaaattcaacaagaaaatacagaaataaccagatctagactaataaaacctcagatctgagaagaatcccagatccaagccattttactttccgacagagataatatataataaacatatatatatatatatataaaaaaatgcttacccgttcagcttcttggtgctgaggaaatctattttgctcggagcccattaacagcaaagaaaagcagcgatggatttgggtgtcgaaactcaaaatacagtcactcactcactcactcacgccaaagctcgagctcttctttttcatttcattgtattctccacacacacagagaccccaagctcaagctcagctcacaccatttgggttttgtgcttttcgctttctcaaattctcgcctactcaactcactctcgcttcttcttctcttctttttcttttactaatgaatctaaataaatatgtattaacgataatatatatataagattatttccttattagtaatatatttaagtaggtataatttatttattacataatagtaaagagtaatattagtagtagttgtcacacaaagaaaaaagaaaatacaaactaaaaaattataaaaaaggaagtgtaatagtaatagtagtagtagtagcactttttctttaatccatctttatataaagagtaaagagaaaaagaggcaagactaaagagtaaagagtaaagaaatccttttttatatatataaagaaaaaaaatgaaatgggaattgagaaaatagtgagagggaatgaatagcacatcaacaaacaaattgcaagaaaaggatatatattagatgagacaagacaaaagacaaaagtgaaataaaactttcatttctatttttctttttcaattcagtcattgctttcctttgttctctctctcatttaatacaaattattaattagttttatgcttttattaactcatttaatatgctccattattcacatcaaatcacatttcctattgtatttttacttaaaatgttcattgatgatatcatgtatgagttcataaataatcgaatttttataatttaatccaattcaatgtggatttgattagattgaaaaatctaaaatttatatttgtgcgaatgttaatttaatgtaaaaataatcgatttaattcaatacacatatttatactaatttaaagataatagatcaaatgtataatttattgttatttataaaaatatatatataatctaaaacaaagtttaaatatttttttatatacactaatttttttttcatattttaaatatgttatttttgttttatttattttaatttatttttattggcataaaacaataataatttattttattttgttgttagttatgtgaagaaatatatttttttttaataaatactaaatatttcaatattaaaaagtaattaattctatccgtacttttacgaattgaatttaagttactatgcagaagcccagccctgggctaaggtgggctaggcttgtgcctaaggcctactcaaacttagggttgttcatctgattcaatccgcacttttttggt

SEQ ID NO: 218929 - DNA, 4242 bp, Cannabis indica
tttttttttttgaaaaagtaagccatatatttgtgaaaataaatgtttacagtaacaattataaataagaaaaagttataagttacaactctttatattagtagctgaaattgttgaaaattttgtttttctaaatgtatacactactcataggcgtgcgaaagaaaatgaattcttaaggcgagacaaaattatagggtccttaataactttatataaaattttgtagctattttattgtaatagaaaaattaaaacaaaaaaatatttaagtgagattctaactcaagggaatgaaacagtttacactagttgaatattttgttttgtattattgttgattaacttttatcatgtataaacgaattaacttatttttttgggatcccgataagaagtggccctaaaatgatttgacaaaaaaataaccatctttgttagagttattcccaaaattaagtaattgataataaaacactattacaatttagatttttagtaacactatttagtgatccgcaaattttatagaaagattttataacaatacaaaccactttagagtaggaaaaaatttatggaaacaaagagcaaattttgtgtgggattttaaaagttttttttctttattattattttttagggatttctaaatctttaaattttaagatataagattgcttcatgtaattgtataattaattttgctaattcatatgataataattaactattaaggaatattttagtaccttgttgtttgtcctagttaaggatgtacacccgcctttaattgggcgcgccgattctcaattaaattcctcataacgatgtttcgtttaatttttatttatttattggtattatgcatatttctttatgtatatttatttatttttttttaagaatttttagttttataaggacaatattttgtactttaaattattaacatagtgtatgatattttatttttatgtaattgatgtcatgcttgctttcaatactttgaaaaaataaatattaaactatttttatagatacaatttgcggatacgaatgatttaatatttaacctcaatttgatgtcataaactaatgtgaaatcaattttaaaagaaagattaagcctactttatttcgttctttaattttataaaagtcaaataaaattaggcttattttgcttagcctaatgcatctatatatgtacacttgtagaaatttaatttttagtgtattttttctcttatgattagctaaatatatctaaatgaggttcacacacaacaagaaaataaaagaagatttacatcataaccaatcaactatagctcacaaatcaaaattttcaatcataagaaaatgaatgaacattatcatggatataagagaaatgataaaagagtattagtagtgcttaatattacttaaaatatattatatcattgttagtattattaattatgagatccgatacaatttaacttaatgattattataaaaatatttttaaccatatttaatagtaatgctcatcataaaagtaatatcttcatatctcatcaacaaataatgtagaagtatataagcctccttttcgtgacaattagaaatgtgaaagttgcacgaaaatgtacataattatgtggtcaggaaaaatagactaatttatatatatattttttaaatatgatcatttattttctttctaaattgaatgattttttcttggttaatatggaatattgatgatgtaaatgcttctttaattttatgtgagattgagattgagatttcaacataaaattaattggggctaagtagagtaatctctatattaagttaaaatatttttatatatattctcaatgtgggacactttaccatcatcacgtttggacttagaaatataagtataatgaaggaccttaagagaccacgttggtccgaacaagacattttaaaagaatctcacaagaccaaattacaaaacttgtggatttagaaacaggtcaatgatcccaacactagaaacgaacacacattgactgaaatatcctaaatagaggtcaaaagcagagacaacgaaaacttttaattgctctaataccttgttgcaaattgaaagagaatgccttttggtaatggattgaggtcttttgttagggtgagttagactcaataatttttctaatatggtatcagagcatatccaattttgtaatgttaggtatcccaatatcaatttgttcacaattatgtggcatgatccacgctgtgcgtgaggagcacgttagagtcccgcattagcttgagatacatactcaattcacttaataaagtaataacaatccttccttatcaagctgactttgtgttaagttgaattagacggctcaataactttttttaataatgcgtataaatattctaaatcaattaataataatttagaaaagaacagaacatgcatataattaattattttgttactaaaaatgtacatatattatagtacagaaggacttaattgcctaattttatttgacttttataaccaactaaatttatcatttatcaaagcaaaagtttttttaaaaaattattggttaatatatgtttttttttttttttttttttttttttttttttgttacaaattattaattcttcacttaaaacgactactcttcataaagtcactatagattttcttttttgaaatggaagtcactataaattaatgaactcataattcatgttcttcatttatgaatggaaacgttatatatagccactattttatctctatctttttttagtatcttttctagatcaattaattgacagatgtacatatatatattagatattttttaattttggcacctaaaaaaagtatattattacggttataataaatgtcgatcttactaatttttaaatttttttaaataatttacaatattaaaaataaaatattttaaagaatcaattgtacagtgtttatatatttatggaatactttttttgggtattactaattgatagttactaaataaatttaattataaatattaatttaaaaatactaaacttaaaagaaaaatttgaatttctatgcttaattcagctacttaattgaaaaaaatgtaaaaaatatatctctttttacaatatatcaaaagtatatttatatgaaaaatatttaagtaaaactcaatatttttatttttttttgtcgaaaagcttctttttttaatttatttttggccgataaaacaaccataacccatataatgtaaaagtgagagatttttctatttagaatgaaaaattaagtataaaaacttaaattttcctaaaacaacttattcatgggtaatacccattaaaaatagtataaccatagatatattttaaaaaaataaataggaatcattaactatttaaattatatttttatagtgtaaattattttagatttcgagttagatactaactataattataatatacgctgacatattatcatataaaataatcgagtaattttttcatacatgaaaataaaaataatccaattaacgtaaaagtgatgaccaaaatttttatttaattatttattattattattattattgtttaaaaaatattgttagacattttcttttgtaagggtgactttgggacaaaatcattagagagaaaaaaaaaaactaaagtggaagtagcccacaaaaagagacatacatgctaccttaatcacaacctaactattattggtataataatatattatacaaactattttcagattgtcttttttaggcaattattaattagttaatatggcttgagattattatataaaacattaaagaaaaaaaatagtgacagaatcaattttgcctttattgtataatcacatgttttaataaattataaacaaatttttttatctaatataatgcatattatatataattaaattaaacattttgtctatttttaaataacttagagtactaaacgtaagacttaaacattcagttatatacgtgcaatattattttgaatttaaattttgacctataaaatattaggaatttcctgaagtgggtagaataaatattacctataactataatatacaatgtcataaaaaaatttagatgtatttattattagaatatttctaattaaggaaataaaataatattattgattctgataaat

SEQ ID NO: 218930 - DNA, 2238 bp, Cannabis indica
ttaatgaaggtttttattttgtttccatcctaaaatttaatttatctgtattatcccatttgcaaagattttttctttttaaattttttataaatggtgaatatcttaaaggattgcttctgttgtgagtgcgattaggcagagagacgagaaccttactttaaacctcagttttatacttgtattttcagaccaatgagacatttgactgaaactattttgatttgtttatgtcacatactgaagaatatgcatttaaattttccaggcccctcttttaattggctgtgacataagaaacatgactgtagagacttttgagattgtgagtaataaggaggtgattgatatcaatcaaggtaaatgtactctttgttttccatgtgtctttatatgtgttgatatcttgacttgttgcacatataacatctaaaggcctgagagttaatatgtttttgcagatcaacttggggttcagggaagaaaaattcaagtttcaggaccagatggttgccgtcaggttctgccgccctctttaacctcgtgtagcatattaactaacaatacagctaaagcacttgaaaatcaattgaattttagagataaaatgagcattttacaacttcttgcctaacagaggactaagaactcccaccagtccaggccctcttacctgggattttttttcccaggtccctaaaaaaaatcatgttttcacatgtctagcaacttgattattaatatgttgctaatctattttcctttttcagatctgggcaggccccttatctggacaccgtttggctgttgctctttggaatcgctgcgcaaaggcatcaactatcacagctcattgggaaacacttgggcttcaatcgagcactagtgtagcaataagagatttgtggcaggtttgaaattatagcatttcgggcacatgtatcatcttataagaattggcctcaaacctttctccttgcacttttataatggttactcctactggttgcagcacaaagatgtagccgaagatgcagtgtcgtcctttggagctcgagttgatagccatgactgtaatctgtacatatttagtccccgaacggaagctctgtcgaaaatctagagcaggctgctgcatttagcaggcttcaaaggagctaggacctttgattatgttatgtccattgcagtagttgtgtatgatttgtacattgtctgccaaaataagactcaaagttgtcctactgagtgccacactgtgaggactgtcttggctattatgatgctgaaacatcagtctccttggccttgtcatggacctaccaaattgaacatatgatcattggttgctttacttattacttatagggatatttgcggtacaaatatttttcagttttatacacttatataaatattatatgtaaatgtatttaacttataaaaattattcaaattatagaaaaatataataagaaccgcttaaattaattcaaaaattaaagaaatattgcactttataaaaatattatttttgattaaaagaaattaaaagaaaaataaataaatgaaaactattcaaagttatggattggattttataaataattaaaagaaatgttaatactattttaaactatttgttttgtaaaagttatagattgaattttatgttttgttaaatgaccaattaggtcttgtatttttgaaaataatataaaatagtaccgtgagtttaattttcaacaatttttttaatagaatcaacttgaaataatttctagcacgaactaatgcacaatatataacaagttttgtcataactgttgatttttttattcaaataaagtgagtgcaacaaaagcataatgagagggagaatgtcacaaaaaaatttatataaacaatttatatatatttttaatgaattcaacttcgttctagcatccataactagaacaagatcttgttcatgataacggatctaacagaattataaataaattgatatttacctttagtagcgcaaaacttcatattcaatccttgtatgccatgaatgagatcaccaagcctcatttgtgtgtgattggcttctataaccatttatctttgagactatatcttgcacaaatgaaagagggtgtgttgtctcctttttcaatggtaaaatcttgaaatgcactttttgatctcacgacatgagagtgtaagtctttgagtgaaattgaagaacac

SEQ ID NO: 218931 - DNA, 2091 bp, Cannabis indica
aatgaatatgaaggatacattgaagtcacctccagcagaaaaccagaccatgaagaaggctacgatgatttcggtcttcttgacgaccttgttctatctatgttgtggttgctttggatatgcagcgtttggaaatgacacgccggggaacctcttatcaggattcgagttttttgagccttattggctcataggtttcgctaatgcttgcattgttcttcacttagtgggaggatatcaggtaacaaaattcttcttttgtatctaattgacaaaaggattgatcttcacccttccataaggtgtgaggtttgagtccaaaagggtacctacatggcaattgtgagttgaaatattataaggttaaaggtagagcttggtttaaaagaaataatacaagtagtcttatatagtaatgttgtagttttctggtcccgaaatattgtatgttgtttacctatttcttattcactgacaagaattataaagttttatttcaaaatcgattggtatgagtgaagcaactcatgtttttatatatgactcaatacttttacatagtaattactgtagttacctttctgagtaaaggttcataacagaattacctacccaactgcaaaaacagattctttttcaattgtaacttttgggatttggattataatccctcttaggtacttacatggtaattattatagtttctgatcttaaatatagtttggcaaacattcctattctctaaagtaattcgggtgttatttttttcgctttcagatgttcagtcaaccaatatttgcagttagcgaaaaatggctcagcaagaactactcgaacaatgaatttgtgaagaatttctacactttgaaactgccattactaccgctcgttcaattaaatccaatgagactatgtttccgaacagcttatgtagtgtcgaccacaggaatcgcaatgttgtttccttatttcaaccaagttttgggagtgttaggtgccatgggattttggccaatgattatacatttcccagttgaaatgtacttcgtaaaaaacaaaattgaagcttggacaagacaatggattgttcttaggataattagctttgtttgctttcttgtgactgttgttggggtcatgggttctcttcaaggacttgtaagtgccaaacttggttaacttaaaactaatatagagatagagacatcaaatattcttatactatatctaatatagaaatattacacattacagtctaagtaatgatataggcacacaaaatacaaactcacaatatttttcagccaatcacatctctgactaagaagagataatctattacaagtaggggtgtacatttaataatctgatccaaaaaatactatgtttaaaatattagataaatcgaaattaatctaatagatatacatgaaatacatctaatagaatgaattgaatcgattagatgactgaaatgaattagataaatggtcaaatctaatattcaatatataataagatcaaatctgaataagcctaaaaacattgaatgtagttcagtaaacacccccataaatatggctaataataaagctaattatttcaactcccacatgtacatcctaacaacacccaaaaaatgcctaatatcaaattttatacaaagctatattttattgctaaaccaatctatgtctaattgcttcatttctttaggcaaaataattgaaatcttatatttcatatcttgtttaatcctatacaccaaggagttcatcatcgaaacctaaagacttcattccgaattttccattaatagattggattggattaaaatttgcacttagtgcggatcggatgcactatgagtaaaatagtatggattaaattagatgaacacccctaaccaccactgccattgatgttgcaaggacttgccgttgaaacttggaaactttttgggggtcgaccctaggcataggcgggtcaggcccgtgcctagggctcaaataaaaataaaagacctcattaggctttatttaagtaaattaagtgtattgtgaacaataaatattcataacttagttggtt

SEQ ID NO: 218932 - DNA, 7322 bp, Cannabis indica
aaaaataaaaaccttatttttagcaacataaacccgataattattttttaacggcataagtacttactgtttgtaaaattataattttccactctattttgaatttacgaaaagaatagttagaagtaatctcaaccttatatatttcttgtcttagacaataaagaatttgtattagtaaaattagaaaaaaattacaattttacatatattaaatatttatacagtttaaaattataattttattaatacagcttacaaactcaaaactttaaatctttatgtcgcgctattttaaatgattaaattaaaatttgaatacattttattaatcagccaaagtcaactgtacattcacattgtataaaatataggaatcaatttccttaaaatgaacacaccaccatatttcatccttctcaacaagacgtactactgttctcgtcagcctgagcaattgaactgatacagaaaacttccaaatcttcttacatttttgtatgaataacttcatttagccaagaaatttcaccattgtagaaaacaaactcataaaatttgatcaaaaaatgcattattgtttagaaacaaaataaaataaaacactactttagcatattattgttgatgtagtactagacactagtgcataccgcataatattgtgtccccttgatcaaggtaaaaaatggcaaggggaccaaaacagggaaactagtttatcagaaaaagaaaaaaaaaggtcaaatactacaatgtattggatctcacttcttagtagttgcatttaaaatataggataagcactttttttacaacttaagctttcataggaagcgctttttggacgtggttgatccctttatgaccagatgccaccttcccattccctctcattaccctgcatttcataacaaacaccacaatcattactacttgtttaaaaccaatcgaagcatatggtcctaaaatcatgtcattgcatagaactgtcataccattgtgttgttagcaatccttctactccaacaggatctcgaatgtgaatcccattcgaatttatttcaacctgttaagtgatataatggaagctgtaatgaaaagaagagtgaaaattaccattcaagtgcaactaggattagtaaggctccataccttagcatcaatttcagagcttcctccattacaggacactgtgcttccattatggcataccccagggctgtggatttatataaatgacaaatatcaagaacttgaaacactcaatttatcaagaaaattactactcgagatcttagttgaggaacatcattgtaaaggtatgagaaaagaactgccatatcaataataaatacctatcaaataccatagtattggagaatcagtagttttgaaatgtcaaacaacaattgatgatcaggttatttttcagaagtttcaacactataactggcactaaggcaaaccaaactctaaaagtgattaggtactgaaatttgatgattggtatgtggttcatgagaaaagttctgttattcacatgcattctgtgtcattgcactacattttcttatcccaattaaaatgtaagtagttattgacttattgtgtagcacaaacaatgctggtcattgagttgaagttgtaaagtgaaacattgaagtatataaatggtagtctctggcattcatctaaaatgtttgcttgaactgttagccatctacaagcaagaaagctaaggtacctgtttactttattgaggaaaagttcagcagcttcttcgtcttctgcgacaatagaatcagaatgagagctgcaagagggccagtaaacaatgttagtaacttcccaatattcaacaggctaagtggaaagtggtcaatggcatgtataggaaatgtaacttacctcccattttgacgaatatggtcaatggcagcataaatatcctcaacaatttcgactgtgcaagccaccttatcgtactcaagatggaaagggctagcctcagcaatactaaacaaggtgcttgctttaggaccaccatacattgaaacgcctgcacccatgacttaaatatgctcagcaattttgtatggtgtttaattaagagcaataagacctataatcatgggctagtgaacgaactttcaaagaaaccattgtttgaagaattaaacataacggatacctttaacttggagttctgcaacgagttcacttaattttccactacttgacacatccttgtgtacaagaagctttttctaaggaaaaacatggtataaatagaaaaagctaggtgaggagttcatagtggaaatataagagaaatcttattaaagcttttatacaagccaaagaaactaaaaaccgaaaactataaaatcaaaagggcattaatttctactaaccactatattagatgtatcagcatatttgatctttgcatcaagaacaatgctcctcgccatatccaaattagccgacttatcaatataaacatggcaaactccacctgcaataatagcataatcaacttcagtagtagctctactttgttagttacagttatcttcgatctggcagtttttcttaccagtatgaccaagaacagggatatttgttgattccttgatttgagaaacaaggtttttattgcccctagggatcactagatctatcacatcttcgagctgtggcagaataaatcatcaaaagtacatccctaaaaccataacaaaacattttcaactgattatgcataccttgagaagatcaggaatttcctctcttgaggtcacaagtccaataaggtcgtcaccaactgtacttgggattgctgaagtgattacctataaaataaaaattggaagacactcaataagcttctttcccaatgagatatgaaataagaaacaaaaaaagaacttcctcgaaggaatcaaaccttgtgaaagattgcattcgatctcttggcgtctgtttcacctttaagcagtaaaccattgccagtgcgaattgctaatgaagcaatctgtttattcaaagcgaaatggtaaatgataacaaaacttcttcatgttatttcatttgaaaatccatcattctttactaatttccatgcagccataagtttctcagtttgacaactctcagaaaaaaaaaaaaaaaaaaaaagaaacaagagtttctcgttgacaacaagaacaatcaaactccacatgtggctcccagaatgatcatgtatgagaaagaaaaaataaataaagaataaccaaccacaagacacactaacataaaatagaagagaataagtaaattatttcagtatcataaaccaacgaccagatattacactggtaaaatgtataatgaatattagttgatagttataactttcacctgaactaaggcatcaggtcgagactcataaacaaccaatagaacacccaaaggacaggagactttctctaagataactccatctgccagctgtgtgcataagcagtcatcagaagagtacaaaataagtaatgatagaataaaaatactaactgcatcagaatttcagacctctgatctctccgcaacttgaccaataggctcttccatgtcagcgagtttacgcacagatcttgcaagactagatatctgtgaaaaggagtagcctaaatcaacatgaatttcataataaagagaacattgaaacaagcgcaaaggagaatgaatggcatatgatttagtggaagtgcaataagtaaaacataaacggtagaagtagcaatatcagcttggctttataaacagcttgcctttccggccttcaaggccaaacgagaaagtacggtcttgtcctttccagcctcaattgcagcagcaatatcagcttgattctcagctttaatcaaattttcttttgcttccagtgaatcagctatgtcaagcaaaatcttcctcctctcttgagatcccaaggcctgcaacataaaacattcaaattacaaaactgaacattgaacaaaacctccagaaagaagagttctatatgtgttaacagaagcatgacatggcttcacatgttcaaacaaaaacatagtgttgcttacttgaagccgcgttgaacattcccttgctgcaactgccatttctcgtgcacaaacttctttaacaacaggccataaatgtgcatcttgatgaaatacagtaccaatacgctttccttggagaactttgatgatattgtctgcggcaaagccactgcaatgaagatggaaccagtttgaggtaaccaataaacaatgtacagttatgctaaacaactctgtaacaatgacactaatctatgaggattgttcatatatacgatcatacctagtaataacaacaggtatgccagcatcagctgcactaacagcagcattgactttagcggtcataccacctctgcccaaccttgacttgtctccaaatgttatttcgtcttgatgtttctctttgacataagtatgaattaacttcgacttggggtcatttggaggaccattgtacagtccctcaacatcacttaacagcacaagaaggtcagcatttagttcctgagctaacaggccagccaagctgtcattatcccaaaatataccagaagaatcctgcaaacattttcaataagataatgcttgttaacagaaaaattttagacagtgaaaaaataaacagacaagcaactaaaacaattcaaatgaaaaataacgtgtgctaaacataagatttccataccattaagggttctcttctagtgctgacagcatcattttcattgaaaataggtataaccctcagagataccaaggaattcaccgtatcagtaagttgcttcttgaaggctcgatctctgaaaacaccatctgtgacaagaagttgagacgaggtgacatcaagctgcatgacaaataactttatattagaaattaaaaataaataaataagtgtacacataatgattttataattttggcccaacctggctgaacatggtatcatacagagccatgagactaccctgcccaacagctgcacaagcttttccatcatcaaactcgccttgtaaatattggagatcagcaaaactgaaaaaacaagcatggttaaatgaaacatttaatctctcatctatatcaaataatgctaagctataaccactactgaaaataaaagaattattaaggattgtgaatttatcataaaccatgttttgtttattagataatacttaaaggacttgtactcgacctcttaaccacctaaccccttgagttagtgtcaggaggctataaaccatcactattaagtgctatttgtactgaggctactccttttactgttgttatgcttggcatatttgaacaatgctttttttaaccaaaagcatgaaacattgcttgtacctagaaccaagagcaacccatgtgcactcagagaagctatatgtatttatatatatatttaatataattataataatataacttttgtaataaacaaaagataatattttacctggtattggccaatctcctgtatttaagcctttggcgtccaagaccaacagctcctgaagtcactaaaataacgtcgtagtcttgagaattcaactctttaagctacagtaatttcatcgaagcataggacatggtcagttataagcaaattttcatgattaaaaatgaaataaaacaaaatccagttgctatagaaagaatcaaatgagagccacagatttacaatcttttattattattacagatatgtctctcattggaagaaagagaaaaacaaaaaaaaacagagtacctgctcacacagagccccaagtcttcccaatgctaatcttccatctcctcgagtaaccacagctgttcccacctgaaacaaaaagcaatcatcaacacatttgatccacaccatacgtttccttttcaaaataaattaaaaaatatataaacaattaaaagaatgaaaacctttaattaaagattatattaaatgaaagaaaaaggttccgaattccaagtattaacctggattaactacttcgtatgtttaaagcctaaaaagactgcagttttctcaaaagaagtataaatatatacgataaatacgagtattttttttcttttcatattgatcttcaaatgtttcaaaccgagcttcaatatttatgatatttcccaaaatattaaaataaagataagcaccatattgatctataacaagattactgtttgtacaaagctagtttcgatcaaatcggagataaaaaaacaatacattttaaatttaaaaacgtaaagattagaaaagagcgcattgcacacacaaatattatgtcacttttgagtaccttaacaaccagacgcttaacattcttgacaaaagctctagtaggatccatggaatccattaatggcgaactgagcaacgtcacagaaatcgtatcagagagaggagagagagaaagagaaagagagagtgagagtcactgccgctaattagaaaagatggtacagaaatgaaatgacatatatagtcagaggaaatgaacatggattaaggaagcaacggttgagattaatcatacgtccaaaaaccgaggacataatgacacgttgcacttgaagtgacgtggggactcggttaacaaatttttatgactcaaattatatgaactaacgaaaaatttcaacagttaaagaagtgatcctattgggccacttgtttcataggttctgagctcacagtattatcagtgggacccgctccactggattatgtgacaagactgaaagtaacgtgcaacgtggcaattctcatacgatattttatctgttttcaacgattttattattcccgtgataatgataattcttttccttttaaaaaaatttatattaaaaaaaatactaagactatgtctggtaaatgagagggagagtacgatgggagtaggagtaggagtaggagggatggtgaattttttgatattaggagtaaagttaaaacttaaaatgatgaagagtatatgagttgttaaaattttagtatatatattgtttagtttttaaaggttaatttaatatttttttttccaacaatgaacttaaataaaatataattagagtttaatacattagagcataagagaaaaattatctatctaaactagtttttcattcactttaggtgcacgaattgctaatttttttaattttagtattggataaatattattttagaccatgtattttgtaaaagttatc

SEQ ID NO: 218933 - DNA, 4957 bp, Cannabis indica
tgggaatattacatcgtatgtgtggtaataaacgaaataagaagttggaatgtttcgttttcccctaatgataataataataatattcattgtttctcatttattcaacactcggctctctatagtctctagtctgtcccagtcccaggccaggggtttaccgatcactcaaaaagcaacacaataatgaaagtgagggaaaaaggtttttggttctcttttcactctttcctttcccaacacttcactcttacctaatcaaatctcgatgtgatcctatcaatctgaagatacaaactccaaatcacacttacccaattcgggttttccatggatttcgttgaattggaggcgatcgagggtctccgatgggcctggaactcatggcccgcgtccaaacctgattcgaccgccttgattatccctctcagtattatgtgcacgccattgatgcaacagccggagcttcccattctttcttacgaacctgtcgtttgctctcaatgtgctgccgttttgaacccttatgccagggttcaatacgcttcccgcatttggttctgccccttttgtcagcacaagaactcgttcccctcctcttatgccggaatcggagagactaatcttccggctgagcttttcccgacttacagcgtcgttgagtacgcgcccggtaggaaaatcaccagcggtggccccccgagtacgggctctggtttgaacctcagtttcaagagcaggccaaatgggttgtcttcatcttcgttgtcgttatcgtctatggcttcggcttcgtcgttggcgggtttggactcgcgctcgatcggtcctgcttttgtgtttgttgtggatgcttgttcggctgtggatgagtttcgggcactcaagaacgagctgatgcgtgttatagagcagttgcctgagaatgctcttgttagtctagttacgtttgattcaatggttcatgttcatgatcttggattttctgagtgttcgaaggtcgtgatgtttcatggtgaacgggagctatcatctgatcaggtataatatttagcttcaaattttggttttgctatttcatgattatatgctgtgttctgaagttgggatttttactgtagattttagtacttgacagtgtttaaagctaatcatgattctagtacattccgtttaagcttttctagaactttggtatgaatcagaattcttttgtgtggataatacaatctagttaacaacattatgccaaagtttatgttttttggtatctgaaattagaagcaaaaccatatagtgatctttagtgctgaagatagagtgcttggcaaagtatgtttttttttctttctctgcatagtggtctttttatatatatatttccttgcaaagtatcattcccagtatagtaatcaccttgaggaattcctgttaaatttgcaaatgattatcaaatgaatattaatttacaaatttacaaattaagtcaagtatcactgtcattggctatctgaactcctggtctccatatttgctataaaacttggaaccttcgaaactagatattaagaaactaactgacatcacttcaattcaataaagtacaggagatgtgaatggagtttcttggtttcttggtcatttatttcttcatcccttcttaacagtttttttttttttctctctcatttcaaaatcctcagacacaacaatttctggggtttaaacacacaaagccaaagccccttggaacgacatcaattttacaaaaccaaggctttctgataccagtttctgaatgtgaatttaatattacaactgcaattgaagagattcattgttcacatgaagttaaacgaggccatcgtcctcaaagatgtacaggggcagctatatcagttgcgattggacttctagaaggatgcttaggaaacactggctcacgaatcatggtatttacatcaggacctgcaactctaggtcctggaattgttgtagactcagatcttagtaattccatcagaactcacagggatctcatcaatggttgcgcaccctattatagaaaatcttgcagcttctacaagcgattgtcacagaggttatctgatgcatctattgttcttgatttgtttgcttgctctcttgatcaagttggatcagcagagctgaaggatgctgttgagaaatctgggggtttcatgatgttagcagagtcatttgagtcgagtcaattcagaagctgcctgaggcaaatttttacccgtgatgaagaggggcatttgaatatgtattttgatgcaactattgaggtagtgacgacaaaagatttaaaaatatgtggtgccttaggcccttgtgtttctcttcagagaaagaacaacttagtgagtagtgatgaaattggggagggtggcacgtttatttggaagttaggtacactcaccaacaaaacatgctttgcattctttttccaagtgagtgatgagcaggagattcaacccggatctgcatttttcattcaattcataacaagatacagaaatgggagtatgggaatccggaaaagagtgacaactgctgctagaagatgggtcgggaaacgagcacctgaaattgatgcagggtttgatcaagaggcagcagcatctgtgatggccagactcgccattgatcgagcagaggggcattttgctcgagatgtcataagatggctggatgatgcattgatccgttttgcctcaaagtttggagattacgtgccagaagatccatcttcatttcgcttgtcatccaacttctctctttatccccagttcatgtactacttaaggaggtctcagtttattgatgtttttaacagtaccccagacgagactgctttctttcgcctaatgctgaatcgtgaaggggtagtcagctcacttatcatgatccagcctacactttttgagtactcctttgatggtccaccagttccagtcctcctagacgttcgctctatcttaccagatgtaatcttgctcttcgattcatacttctacgtagttatccattatggatcgaaaatcgctcaatggaggaagcttggttatgacaaggatccaaaccatgagaacttaagaaagctgttggaagccccagagctcgacgcagagcaattggtggttgaacgagttccagctcctaagctaataaggtgtgaccaacatagtagccaggcaagatttcttctggccaagctgaatccttctgttactcaaaattcaacctacacaaacgggtcagatattattttcacagatgatttgagtttgcaagtctttttagatcacttgcaggtcctggcagtgcaggattgataaggtggagctctgtatataaccatatatatgtttctccacaatacaatttttatataaagagaatttttgtgtatagcttttgagggaaatagatgccttattttctataccgactataggtttcatacgttgctttgattgagtgggaatatattttttttttcaatttctttaattatcttatgttttactgtgagtgtgaccagactataattgtttgctccacttccttgaaattgcactcaactcaattggggatttcaaacaaatgtttgataaatatgccataattttgtttgtacatttttttggcatttttatttcttatctttatttttttttattatttttttttttttaacaaaagaagattttgttcaaaggaaccaacaaggatacaaacaccaaacagcagctacaaaactggccgaatccagcaacactaccagctagctataactttacataaatggacatcaaacttgcttttgctagtacctataaaactcatacatctgtatttgacaaccttcttaatatccatgctaatacaagagacagttttgtaactaagatcaaaaatacaattatttctatgcacccaaatgttatagacaatagccaagcaaacaacatcgagcaatttttcctacaagtttttgagaggtttagaaagccaatcataccaatctttgaagctcttcggccagtctaatctccctaaccaattgctaacttcagacacaaccttcaaagtatacgggcaatccatgaagatgtgagcatgagtctctttgtcaactatacaaattggacaaagatcatctggaatcgacatgatcctgttgatgtgttctcttgtcaagagttgattattgatcgcttgccaaccaatgaatctatgtttcgggatacacatcttatgccagattcggttagcataatcaactttttgcatgggattaactaaaatgtgtaacatatttactttgaacttaccattcttactagcattaacaatatctatcctgttagtagagtttctcaaccgtaataattttttgaaatatcagctcgcatcaagtttaaactcaatttaccaaaattcctttccctttaagtagatggcatttatccacctaacccacaagttatcttgtttgctcgagatgacccaaacaaattttgctatcaaggttgtgttccattttctaccctcacgaaagccaacgcctccatacttcttcggaaggcaaaatttttcccaaacggacaagtgcatcttgctacggttaccttttgacccctagagaaagtccctacaacacttgtcaatagctgcagtgatattctggggaagaataaacaagctcatctagaagctcctaattcccaacggaactgagtgaatcacttgcgccctttaaacaaaggaaaagtttctactagcctagttgtgcaacttcttgtggatcttatcaataataattccgcaatcagtggcacgccacttagtcggcctaagttggactcccaaatagttaagggggaagttgtcctcttctatttgcatcatcctcaagattctttct

SEQ ID NO: 218934 - DNA, 1454 bp, Cannabis indica
agtaatttttgcaaaacatacgatataaaatgatatttacacttaattgttcataattttttgaccatggtgtggaggtgtgttaggttgattaattagttgttatattataattattattatcacttatttttctttaagtaagttattacatgatagaagttattatatccaatccaatactaaatcaatattattgggtgaaattctaccatgattaatatctcatattttgtatgtatatatgaatttaccttgagaatattaggtgtaattgaacttggccctcttgaagagaagaatgcaactttgggtgctaatgacttgccaataattgttttagttgctactatttccaacctaggaagcctgcatatgtatgcaaatttataaagtaaactatacatatcacaaaaaaaaaccaaataaggtccaacaccatccaagagtattatattatttttttttttgtgtaatttactatcctcttcattatatttttaatttaataattattataaaaaattactaattatttataataagatgtcactttatagtattttataaattttagtacctcatagcaatgtgttcgttattaatgagaatttctaaagaaatatcaatagcgtccaagactatttgagatgtcatactgctaatagtacaaattaatttggagtcccatatatttaattttaaaaaacaacaaattattatgaaaatcattaactatttgtaaggtactacatgatagtattggacacctctaataaataattgatgtgaaatgctaaagaataccaaaggttttctcgtcaccatttcaagttgttttactgccattaatagagtaattaattactgtgtcgaaacttaataattattataaaaatctccgactatttgtaaagtgtcaccttatgatggttgggccttagaaaaaaataattattcagcttttgttcttagtatatatgtggtatttttgaaaattaccaattttttaggtatttttcaaaggacgatggggcttagataaaagcttgacctacttaaacccaaggtctaccctaacactactaatatccaattacaagataatttttattaggggtttattgaaaaatacatgttttatttatcaattaactaaatttacctctaattttatatttaactgaaatatacctcttttttatatgtattgtactcaaaataccctaacataagggagtcacatggagagtatattaaggtgataggggtaaaatcggtaaagtatttaaaaaaaggtaaaaataataaactttaaaaaagaagacaatataaaaaaggtatagagtctaattttctctttttattatacgtatagtattaaaaattcccccttaccttttattatttcccacattctattcaaccaaacaatgaattgtttctctcgttcc

SEQ ID NO: 218935 - DNA, 3810 bp, Cannabis indica
ttgcaaaatagttaagaaaataatactttttaatagttaatatttaaaataaaaaataattttaataatacactcaattctcataaagacatgagaattagagagagtgattaaaactcctcaattacatccaattacgatattaaagtgtaatcacatagttaaacaaatatacaaattgtgtaattacctctaattacacttaaattcaattacaccataactttccaaaagccccccctaatagtttttctcttcactcataatgaaagttcgagccaacatatagcataaatgctaattaatctaagagaagcaagacctaaaattgcaattcaatattttataaaccacaagaagaaaaaaaatatcaataaactctcaagaacttgctaaatggcaatgcgaaaattggctaacaaatatattttctttctccccccttttgaaggaatccatgagtcaatcaagatttgtctaaataactcttctttataatctaacaaaactattgtttccttcctcttcctttcttgggtggctgagcatccatgtgttcttttccggtaacttctgatgtatccgctgttacaataagacgcgaaaggaatgtgtatcatcaaaatagacttctagtctaaacactttcgacagtcaaagttctaaacattccatttgaaaccattttgtaaaggaacaaaaaaattatcacaagaatattattttacaaagtgacaataaataacattagcatataaaatccaagagaccatgctgttttatatcctaatgttggtcacggtgaaaaacaaaatctagagattccaaagtagataagtaatgttaagaagaactaaaatcaaaacaaaatatgcttattattataccttcgggacctcgagccatcaaagtgaaaaacaaattgttgagcttttccattttcttagcgtcctgtgcttggtctgtcttaaacttcagacactgaaaaacagaaggatgatcgcacaagtgaagataaatttatattccgtatgccaacaaactatccaattatgtacatttaatcatctcttttttcagataaggtctaataaaaatattataaacaatgtttatacacaacacaacacaaggataaatgccttgataaattaaactccgagttcacttatgcactaaggttagggaatgttccactctatcaagtgcatgtaacagagcagtatagaaaaatgtttgatggtctaaactccatcatttgccacaatttaatttgatccatgataaagaaagaaagaataaaggacaataaaagacccattaaatgttagtgagaaacatagctgtggatacacataaaagagagacagaaagtgaaaccatatacagaaatgcagaagatatcagactaatatttgtacagacctttgtctaaggggtatgcataacttgatgagcttcaaagagaaacttaggttaatagaatactacacgtttcattcaaaattgataaaaggaaaataaagatatcaaagttaggacatctgaaaatacagcatattggagataaaacaataactaactaaatggaaagtggtgttcaagcttagaaatacgtctctaataccagataaagaatgcataaagttgaattaacatttgcgatatgctacaaaattaatgcccatactaaaatttaataagctattttcaaaaattccaaatgaattgcacttaatcctttgagacatatgctattcatcagtttccattagatattcaccagaattaaatgatgataaaattcccaataagacttgacttaagcattcccttccctatcccttcagcaagtacataatacatatattgttcaatcactcactaagcatcttaacagtgaagccaaacattttatggatatcaagaaaattttccaaaacaagagaaaaagaaatgtggggttaaaaatttctcagcaagtaaaaataaatagcaggatgatacccaagcaatcaagcaaaaaattcacaaacaacaaaaagtacaatagaaacagtacaaagtttttaaatcaacaaaatttattctctcaaatttgagaaaatacttaacttcactaattccaaaacaaacaataacgatcaatgaattaatccaatattccaaaactaaaaccgaaaaagaaagataatgcagtacctctcgatcatcagtgaccttgagaaccaattttccatcacaatgtctgtatttcataacataccgtgtctacacaatcaattaagaaaaacaaaaattaatcaaacgttaacatgaatcggacaatcacattctcacagaaaacaaactcacagattcaggatcggcacggaacaattgtagagttcggtcagcgaactcgtcccaggaagttatataaaccattttactatacgaaacaacaattcaacaatctggagacacagttcagagaacaagaagaagaattgagagtgagaatttggatttgggattttggatttggggttttagggattgctttgatttggtatcgtaaataaagtaaaataaatttcttgattttgaaggttagaaatgttaaaatataatttcacttttgccctaaagttttatctttctctcattttaatcccttcttagaaaaataaatttgatacctaattctagaattgaaatataagtcattgatcttgcaaaataattagaataaatagtatttgtccttttgaattataatttttgtagaattttgttgcgtttttattttgcaaattttttctgagctataaaattattactaatagtctctgtattctactcattgttttaaacaatttgttgatgtaagactaatatgatattaataaaattcaatttaagagtttagacaaaaaaaaaaatacataattagtagttaaagatgaaataaaaatatgtatacgtatttttataggtaatatttgaatatttaatgtcaataaattaaattttaagtagcttaaaactattaaataaattcgagaaaagagagttaggagggttgaaagcttaattttcaccattatttttaggtatttagccagttggccttgtgaaagtgtttttagtatgacaatgatggcaaaaactttcttcaactcatgacagcaccataatatttattggattttttaaaaattgattttttttttcaaaaaggagtagaagctaaagagataaaacaataaatttttatgtagttaaagggttaaactttaatctaccagttgataatattaaacttgtagcaatggagttatttaaagcatttatctcaagaacacttttgtaaaatcttcaactcttttcatggtggtggtagatcctatttataagtagtttgatctaattggcccaattgaggtttttagatataaaatattctattgatgagataaatacaagataaattcatgagtggttctaattactatgtcaaaaaaatctctaaaagaagtaagttattattgtttattgtactattaatgttgacgtcctatgtgcatgagtcatcgcttggagcatgaggaaagattgtgttagagttatggtgtgacaatcctatggaggattgcacatttttccgtgagcctttttgtgagttggtaaaagagacaagtcccaaatttatggcatggtgtcaaagatgtgacacgacttcatctggaatagtagacaatcctagatgacctttcatattcctttcctgaatattcccaatggtgatattcgtttagaccaaggctc

SEQ ID NO: 218936 - DNA, 11208 bp, Cannabis indica
taaaataatttccaacattgcctccaaaacacctctctttgagtgaaaacttcgaaaagtttcttcttagcttccttaaactttgacagcgaggcctcatccctctcctttttcaaacgattaatctcagccttatactcttttattctatctttgaaattacttgtataatccttttcccaaacttgaagaatttcgctgtaattaataattttctgttgaatatccaactcattgcaagactcccaactgtccttgataattttcatacacataggcacccttagccaagtgttttcaaaccgaaatttccttacaaaggggacaaaagacttatgcaaaggttccataagtatagggtaatggtcagaagaagaaagtttaagattaaaaagtttagcatcattaaataaatccatcaaactttgagtagtgagagctctgtctaaccttacttcaatccaatttgcggtgcccttgcctctttcccatgtgtattgataaccagataaatcaaaattgataaggttgcaatctgaaatagccttgtgaaaaccttgcagcagccactcaggataaggattttcaccaagcttgtcttcatgcgagagcgtattgttcaggtctcccattacacaccagggtagggtgaaatcattagctaatcgacgaagtaagtcctaagtgttttgtcaaagactcctgttcagttcaccataaactcccgtcaatcgccaacttggactattatcaacttaaatttggacatcaatatgatcagttgagtatcctaacaagatggcttcttcttcatacctccataacatcgctatacccccgcttctaccatgaacatcgactgaaaaaccccctcaaaacccaaagccaatcgcaccctctccaccgtatcacgacgacataaagtctcacgcaaaaataaaaaattgggcttattttagataacaatatccttcaagaattgtaaagtccacggcagttccagcttaaaatactcataatgagcggtgggcccggaaaccagtacccaccaaaagcccattttttgagcctgattgtgccattgaatcattatcatcttgaacaagcccactagcattatcctcatgggccacgtgactcctctcatccacacacatatcattaggcctttttcttttaggattagcaccaattaaatgctcatgagtatttttaaattcttcaatattaatagttgactttccatttgaaaaagaagtaaattgagaatttccttccatattaagctcaactgattgtccattaccctgtacaccacgattacctccatcatctcccaccaattccgtaagtggagtagttaccatatttggaaccaaaattcttccagcatcaggaccaccgagaaactgatgatcagctccatccgcctctatgcacaaccatttagaaccgaccatgttatttcttctacgcggctgagcatacatccactctccataaggcttctcaatctcctccaatggtgtcgtaaacaacttggaacaaaatcgttcagaatgtccaatgataccacataggaagcaaaaggttagagtacatgttcatatttaaacatggcctaaaaccaattgctgcctgtctgaagaattttcattcttcttctcaacggtacagtgatatccactttgactctgactcttagataatccctccatagcccttggaaattcttagggtcagtctcaacaaaggttccaataaacttagcaatatccttcaagaccaacatcgatttgaatcctgttttgagaccaaaaacttgaacccagagatccaatcgatgcaagacaatcgagcgtggatccacccatggtgtgattccctcaaatataaaatgaatccgattaaacgtccacgaactaccagttatcactctttgtatatcaagttcatgataaaattggaatagataaagattaggatccaattctttaacaaacacaccctttctcggttgccaaagagatgccatcatatgcctagtatcaaaatcaattgatctttcagtgagaaatcgcccaacaagacaccagcgttcatcaagaacctactcctctgtttccacaacatcataggacaaaacattatcctcctccccatcaatcgccacccctgcatgctgctcttctagagcctttatggacgctatcctaacggaacaaaaacagaccaaccaatatcaagacaaaacagagagaaaccttaaaccatgtcaaaggacaagaccaaaaccagttaaataataacttttaatatataaatatattgagaaaaaaatccatatatattatttttggtgagatgcatattatttttggtgtgatatgttttatgtgtaagaaatgagaatggattataaatttatgaactttatatattataaactttatcctccagaaagctgtatttattgtaaacttgtaaatttataagtaatcaatactaatactctctattaattggaaacatgagtatacatgtggtctttgaaatggaacgaattcccgtggtacttattttgttctttcctaaaatattttgagcgttttatgtctgcatgcacataattaataaacattactactttcccacataattaataaacattttaatttggaacgttaaaagtcgatgtgtaatatagtagacttgattttaatttcattttcacccaaaattatatttgttgctcatctgtaaataaatatatcattaatcatacaccacatgatatacatgtggtcgtcttaaatgtattgcaatgggaagagaagagattcctataccaattactcttttctttttctctcctttaatatttaacgtatatactttttttgaacagcatattttgagcgttatatatttatgtatatatattcatatttacagataaattgactagcccatgatactcttaactctcttactctcatggcgaaattcaccttgtcactcgtttctttcgcacttattctccttgtcttacaatcatatcatcttctactcaatccaaagctcactttctcattccaacccaaattatgttgcttcaaatccatggtaagtaggtttagttatagctctgtatacctccatactcgacctgaaaccactcaaaagtctataaaccatttgacccggaaaccaaaacacccacttgacccgcttacattacaagaggttgagagggttcgaaccattctctcttcttacccacctttcgtctctgccttcccgccaatccagtccatggtactagacgaacccgacaagaatcgggtgtccagctggaaaacgggtgaccagtttctacctagaaaggctactgtggttgcacttgttagtggtacgtctcacgtcgtaactgttgatttggacttgggtcgggttacaacccattttataagcacaacttctgggtacccggcagtgaccgtagatgatttgtccaaggccttggaagtggcactttcgtatccaaatttgaagaaatctgcagtggagagaggtattgaggtctctgacttggcttgcataactctttcggtgggctggtttgggccccatgaagaaggaaaaaggcttacaaagatcgtttgttactctagtcaaaacacatccaattactacatgaggcccattgaaggcttggtcatgacaatagatcttgacaaaggagaagttgttcaatttgttgataagggtcaaagcataccaattgcaagcgagaccaacactgattatcgatacaataaagatggccaaacgaagaagaattatcccaaaatgaagccattaaactccatatcaatggaacagcccgatgggcccagttttagcattgaaggtgggcacatggtgagatgggccaactggcagtttcacctgaagccagacccaagagctgggatggtgatttctagggctatggttcaggattgtgagagtggtgagtttagaaatgttatgtacaaagggtttgcttcagagttgtttgtgccttatatggatacagatgaggcttggtactttaggggttatatggacgctggtgaatttggacttggggccacggctaagtcacttgtggcactaaatgattgcccaaaatattcttactatatggatggagtgtttgtgggctcagatggcatgccctatattgagcccaatattatttgtatctttgaacgttatgctggggatattagctggcgtcacaccgattttcttgtgcctggttccgaggtatgcttttaatataatcttacttcctttatatcccatatttttatttttttaaggatgttcatttataaactcggtgaaactgatgattttatatttgttatttgatatgtaatagatcaaagaatctagaaggaaagtgacacttgtagctcgaatgactgcttcggtaggaaactatgattatatattcgactgggaatttcagacagatggtttgattagagtcaaggttagtatacattaatttaagagttataatggcatgaaaaaatatcaagtgtatgtaaaagagtaataagttttatgtaataattttttctttaaaatgtaaatatacaggtagagacatctggaatgttgatggtaaaagggactccatatgacaacgtaaaaaaaatcccaaacgaagaagaaatgagtggtcctttagtgtctgaaaacctaattggagttgttcatgatcattttgttactttccaccttgacatggatgtggatggaccaaacaactcatttgctaaggttagtttggtcaaacaagagactgacccctacgactcatcaccaagaaagagttacttaaaagtcaagagacacatagccaagactgaaaatgaggccaaaattaacctcaagctcaccgagccttcagaacttcatgttgtgaatccatctaagctgtctaggctgggaaatccaactggttataaacttgtccctgggagaactgctgctagtttgcttgataaatacgatcctccacaattaaggggtgctttcacaaataatcaggttatttatttattattttaatattgataattggcagtgttacattttgggtttaataaatattatcgagcattgttgttttgtgtcttaataggtatgggtgacaccttataacaagagcgagcaatgggccggtggatttttggcataccaaagcaaaggtgatgacacattagctgtgtggtcagataggtgcgtatacaaataattgaatgaataaaaaccaaaaataatttcattacaaatattaatgttaatttattgaacgtgatatatattatatatgtttgataatatttaataggaaccgtgaaatagagaagaaggacattgtgttatggtacacattgggattccatcatataccatgtcaagaagattttcctattatgccaacggtgtcagcaagctttgatctcaaaccagtgaattttttcgaactcaatccaattttacgtgttccaccaacttttgaagatgatttacctaattgtaaacaatcagtctcgaaacatttgtggtgtgtttaatttaattacttataatgcaaataaaaaggttgagaattgatttataaaggtaatgaaaatccttaaaatatataaattaattatatatgtattgattttaaaaaatatatattagtttaaaataagactttactttttgaggaaaagaaactgttattattgttattattaatgaatacaaaccattataataatagtttaaattggaagtagaacaacctccgatacatacaaatcttatccaaccaagagcaaattttgaaaaaactcacttttaggaaaaaggattaaagatcataaacatcaataataaaatcttgaaaacaagataattgagatgtgtgtacccattaatgattaaagaaactagtaacgaacattatttcaacatgttaaatttgcaaactatgttggagagcccactgcaacaaagacttttgttatgcggccatgaactcttgatttctatatagaccagatactacacatggtgcaaatgaaaagttaaaactttgtctttgacaagtgatggagaaaattcccaccaaactagcagcaagaacacataattctacaagaaatagagagaatttccaaacttttttaattgccttgccaagtagcaaaacattaccaattaattcccaagcattgtaccataaacaacaagtgacagcagtcaaaatcttcttgtgatacaaaaagataatcacaaggataggagatcgaaaatcattccaccatttggctaacaaagaatctgtttttatttattgatttgaagaatgtaaatcatacaagcattgtgtagatagaaaatgaggcaaagttttcattgttgcaaactaaaagcaacttatatatgttgtaaacaaagaaactcgaactttaccaattgcaagaaaaatgatgggaggaggaaggaaaaggatgaagggcaagggtgattagaaatgatccagaaaatccatggttgagaaggtggttattgtaaaaacaagagaagaaactaataaaaaccagtacaaaactaaaactgccatagagcactttagaaggcagacactccaaataggaatttaataccaaatatagtaagaccctagcatgcactaatacaaaattgaactttacacttctataaatttggactttagaggaggtttttaaggcctttcagcatcagttttggaaaaattcgctaccgacactgatctaagtgatgttgtaggattagaaataaatgacgctaaatgttaccctatgatgtcagttactatcaaataactgatgccatatgtacactatgacgtcagttatatacaaataaccgacgctatatgtacatataaccgacgttatagggttaaagataattttccctggcgcaacaacctctagcaaccaatgcgcactagaaaattatgttaggatgtatgtaacatagtataaaaataatttcaagttataatatagaaataaacaattagcactaaaaaattaaatagtatttacccgatattctagggaataaagaacatttggtggttgttattcatcgatgatagccaaacaaccaatcgattggacgcatacttaaaagacgcattcttctcttcatcgttgataccattcattgggagaagctatgggtcgtaaaactgaaaaattcttctcaaatcatttatgctctcccagatgtgcaagcattaaattgttaaaaattagtgtttataataattttactagaatttgattgataaggttaactagatcaaagaagagtatacatcattccaagcaatatttccttgtcgatgaagttacacaacatcacctgttgctaatcctctctagataacgtaatttgggtatgaggtgccatgaatcctcggggtacccgaattgtgattatatcacgtttatctttgactcttacaaattcatcaatcatccattttagtgacttagggatcaaagctacgatctctggtgttatttatttatcttcttgatgagcaccgccttttcgagaaagcatgggacctttccccttcaacacaccacgtcttgatggtggttgagctagtggaccctataagaaaatatcatataatatatcaattttgatcctaattctactgaaacaaaacagataaaatagttatttattcatccatccgactgcagcacatgtattcgcagaacctatttcactatgattgaatatttaagatattcaaactccactaatcattgataattaatttataacaaaagttacctcaggtgttacaattaggtatttaagccaaggaaggaacatgtttgctacttccttaacatatttgcacctgtcaattgagattggaatttcaacatcctcttgcagcatttctaaaatcagaacccgagcatgtgaatcatcgtagtctttacagtgaacttttattggaccctcatgttcgtattgataagctcgggccactatgttgtcgaaattttttgagcaaagatatactagctgattaagggccctttgtttagtgaaattgtacatgagaagtggctcatttaggaaataaactcctcaacataattttgtagtcgaccctcatcctcatgagcatattgttgtggaacatatgcttgatgaaccacctctcctccttcctcatcttattctacttttgttcagtaatatttttcttctatttaagggatttaatttcggattttaatttctcaatctccctctgtttctgagccacaacatcagaaacgtctcttttctttgcgccaaacagtttagatgccttggcaaagaacctgcaaatgaataaataaaataagctataatttattttgtataattaaggaaacaatatttttcaagtactagcatacctagcggccctaaaacgcctaggatgccctggtgtttcgagcgcctgcgtcagaatgtcattttggccatggacttgaacttgtctctgagtaacttgctcctctagttgagcctagtgcacatattcaagcaattagtatatgatttttatatatatatattaactcattattagtacttaatcaacgattaatatatacttactatcttttcgacaattttcttgtcataatcagtgacaagtttcgttctcttggtccgagattggatccaaacatggtggcatgggggatcttgaacctcgaggttctttttctgtattgttttataaaaattaaatgagtacagttacattttgaagcacattgttagaaattgatctttcaaatcatacctgattttctgtcatatgttcaaaccccatttcattgcactttcaaatgttttaggtccgataatgcacctaaattgatctttaaggacctctttgccaaatttggaataatgcatgatttcacatgtgttgaaacccttgaacaaaatactattgtagaaaggaaacaccaacatctcttgaatgttgcaagagcactttttttttttcaggccaaactccctatcaaattctggagtgactgtgtaatgactgcagcataccttatcaaccgcacccccacacctaatcttgaaattaaatgtccctatgaattgatgttcaatgaactacctaaatatgaacacttaagaaattttggttgtcttgttgttgcttgtactctcactgctcacaggaataagttcaccccaagggctcgaacttgtgttttcatggggtacccacaaggtataaaagggtataaactttatgatattaacaaaaaaagagtttttcatttctagaaatgtgatcttccatgaaaacatatatccctttcatcgacttaacacaactaaagaatttgttaaccctttttccaacatggtttttccttctaaacatgtttctgaaactgttgtaagtgatttttctactgttattcctaatactacttgcactaatacttctcctcaagacaatcactcaacccaggatacaactgtgcaatctgatcttcctatccgagaaaatattgctgaggacaacaatgccacagatttacaagaagaaccaaaacgtgccctcagacgcaccaacaggataactagacaacctgcatacttacgtgactatgaatgtcactctgtgttgcaagaaaaaaattctactccacctggtcttcacaaatttttatcatactatacgaaccagctacttacagtcaggcttctcaatacaagatctggaaccaagctatgcacttgtttgccttactcaaaaataaaacttggacctatgtcaaattaccacctaacaagaaagccattggatgttgatgggtgtacaaaatcaagctcaacagtgatggttctatagaaagacataaagccaggctcgttgcacaaggttacactcaacaagaaggcttagacttcttcggctcgttttcccctattgcgaaaatggtaactttcaagctactgctggctatttctaccatcaagaaatggcacactttgcaactcgatgttaacaatgcatttctgaatggagacatccatgatgaggtatatatgcaactccccaaaggattgactttgcccctgaattggacactgattcaaacagtgtgattaaataagtcaatttatggactcaaacaatcatcacgaaagtggtatagaaaactttctgatgcattgattgaataaggttttactcaatctcaggctgattatacattgttcaccaaaggttctcaagacaccttcattgctctcctagtctatgtggatgatataatcatcactggacccaacttgtctttattaaaccagttgcaatccactctcaacaacaaattttccctcaaggctcttggcacccttaaatacttcctcgactttgagattactcgtgctctagaaggatcctatctcaaagaaagtatacactacaactcctagaagacaatggatacataggtagcaagcccacgaaaacacccatggacccaagaatcaagcttgatgataaccagggagaacctcttgaagacccttctccatatcgacaacttgtgggcaaattacttaacctgaccttgtctaggcctgatataacctttcttgtcaatattctcagtcaattcatgtcttcaccacgcacaccacacatgcaagctgcacatcacttgctcagttacttaaaaggaagccctggcaaaggtcttctctactctgcttcttcatctctgtaactttgaggtttttctgattcagattgggcctcttgccccattaccagacgatctaacactggcttctgcatttttcttggagattatttaatctcttggagaacaaagaaacaacctacaatatcccgaagctctggtgaagctaaatatcgggctcttgcgccaattggcagtgaaatcacatggctccaatacctacttcacgacttccatatacctcaagacaacctgcttttatataatgcgacaatcaatctgctatacacatagcaaataatcccacattccacgaaagaaccaaaca

SEQ ID NO: 218937 - DNA, 2308 bp, Cannabis indica
acaataaactaaatatctctacaagatctccactaaagtgagttccttcaattttaatccatttttcacgaggcaacatgtgaatggactaaaattattgaagatgtgactaaaattttaaaattatttcgtatacatagcctataattaagttataaaaacaatgtgtattttcataaatattcttgccacttcttgttggataattagttcaataacactgcatgtctatatgagatgatatcaattttgaaacagataaatcatttcaggagaataaacagataaatataaatttgaacaaaaatatagagattcatgttaattagaaagaaattaattacccaatatccaaggtctgcatggactgtggtagaacgatattggaagatgattccacttcatgattgatctgctgttgttctaacagcgcctgttgggctttctctttctctttttcttttatctggtatttggtaattaatgcataaacaacaaattttgacttaaatttaaaatttatgtgtatattatatatatttgtattgctcgtatcattttactgatcaggatcagagaaaaatttgaccttctttgtcagaatgttattttgctcctgcaatgccttatcctattatgacacacaagcataaaaaaattattaaaacttattccacaattgttaatctacccaatattacacttcttccaaactaataaactggtggcatctattttttatagttaactgccaatatagacggcttatgtttacatttttatagacgtaacacgtttatattggtacacctaatattattatttaaaaattataaaaaatattttaaaatttataatatttttatttttataatttatttaatttttaaaataaatgttgaaatgataatattaagtgtaccaatataattgtatcacatacaagagtgtatgcataagcagtttatggtaacaattaaccagatagcacattaaatttgctaatagtttattagtttagaagcttttactgcgatttgaacttggagaattaagtacaagtgaaacgataattaaaaagatttagctgccaaaaactaaatattatatcggagattacctttttttggaggtctgaaatagattcatacatgagttggttctgaaaaccaaggaaagatcagttcataccaagaaagtaatgaatgcttaagtattaatatttagttaggagttcattgttacctttctcgaccttacgtgtttgagtgcagaatcaagttgttgttccagattctgaagctccttcatacttagggagtctagttcttctcccatgaaatgcctgaaaacgatcatacaacaaagatgatacatttggcacacatatatgaacacacacatgtatataaatatatatataatatgagaacagtgattgattcttatatattttacttctggtttctttgcaagacttccatcctagccttgagctttgcatgttccagagtccagcttccctaaacgatttcatatatatgttgtaagtattaactagtatatttctctagccctaatcaataaatttaggcacatagagacaaatttgattcattgttgtgtatatatatttatatactcctacataatgttactaatagacagatcgaaacaaattgaggaagcaaagtttagtttgttgagagaatggttgcttacagtttgttcaggatcatttgacataagctgcctttctgcatatgaatatctttcataccgttccaggatcctttccatgctgtcaataatcaatgatacacttatatcaacatcgaatatactcacatttcctaaaccataacttattcagcacacaaagagtttgaaattcacagataggttctcttatttttctatacgactgatcagccagagcaatactaaatattttctaggacatttcttattaactaatatattaattactataacattactttctgctacgatactatatgttagactgctaatccatactaaaatgttacatagacaaaataatatttatatgcaaatagataaacaagtaaatttaatatctaatgagattaaggtggcgtttggttgcaggtaatgaaatggaatggaatagaatggaaaggaaacaatttttattccattcctttgtttggttgcattttaaagtattgaaataacattccaatggaatgctctttccatcatttggtggaatggctattctattttaaaaataaaggcatgaccattcaaatataacaaaaaa

SEQ ID NO: 218938 - DNA, 9301 bp, Cannabis indica
tctaataatttgttatttttttttgtaaaaaaaaaagtcacccaataatttctcataaaccaagaattctgttatatagtcacattttatatagaatagatacttacggttgactaggtgttccaattcttgtccaccaaagccaagagttgaagatgagaacatccatttcattccataaatttcccattttcatggaatttagtttcaaaacagttccattctttccttcttcaatgtctactaagtaatgagaatttaatctcaatactgaaacttcataatcctgcatttataataataaaataaattaatagtaataatttcattaatattagtattatatataacatgataaatatatcgttatttagaatttttgtcccctaaactatgactttacttatcttagtgtgtctcttgaactttttatttcgttacatatagtctctgaattattcagtattgtaaactagtcattttgttaagttttgtcatgtgtggcaaataaaatgatgatatgactgcttagtcagttgctatatcagtatcatgtgtataattttaaataaaaataaaattatgcattttttacaaatcattaaattaaaaatcaataaatcaataaataattaagaaaattatataaaactaaattattaaaaaaaaaaattattttttaaaattaattacatgtagtggcgttaacatgacattgacgaacaactagctaagttgtcatgtcatcatttgtctgtctcatatgaaaaaatttaacaaaataaccaatttacaaaactgtaaatagtttaagaattattttgagaggaatttgttgcgaaacccttttatattttagtttttatacacttaacccccttagttttttctttgtagcaaaactcctttaagtttcattttctttacatatttaaggtgtcaagtaaatattattattaaataccaactagattactaacgtatcgacttcgaggttttactgttacatatatataagtgtatacagtggtcatccaattgatatttaacggtaatatttatctgacttgtcaaatttacaaagaaaaataaacttaagaaggttttgtcacaaaaaataaaataaaagggttaagtgtattaaaaactaaagtataaagaagtttttgccgcaaattgctcttttaacgggctaaaaagttcaaaatcacaataatacataaattataattccaagaacaaaaatccaaaatagtctaaatatagtatttatatacttaccttaaataaaataccattagaaaatgttgcattatttattggagttattgtagtagattttggggcatgagcatgaagcaagcacataaaggattcccaatggttgagagttattgagtctccaatgaataagatcttctttcctcttaataactctaagaaatccaatccactaaccctgttaacacgaaaaaaatttcatttttacactttgaattcttttattaaaaataataaactgtttttttaattgtattatagttgttataagattgttttttttattatttttggataaataatgtagtaatttttaattgagtaaaatgtatttttgtaattttaaaattttacaagcgtaatttcataattaaaaattttagactataaaattataaataaaatataaaaaatggcatttataaaaattcacttaataattaattataaatatatatggagattttaggtagaattatcactcttgtcctatatttttggtgttgggaaaaattatgatttaacttttttatgtgacgatatatattgtaattatcacaaagttttttaaaattttaaataatttatggtgttaagatatagttcaaataataaatgatgtgcctgttttgaattatgtttttgactcagtaaattatttaaaaaaaatatataatatacaccgtcaaataaaaaaaattgaattataattttttaaaataccaaaaataaaaacgctcctcgacaaaatgatacataaaaatcttacacttaaaaatttctctatatataaattcaataattatatatttatcatgtcccacatcaaattattatgataatgtataggagtccattacattatatatgcacatggacaaaggtaatagcatttgcatggatgaaaagaatataaatataattatgagttatacaaaattagtgtgaaaaaatgtattttgtgtagagataatatcactattaaaacataaggcttaatttgtataatcattcaaagatataataatggtataattgtagtttgtgcaaataaaagaaatggagaaaaaaaattctttaattctttttatagttgtgtatgctttaattatttaagacattctgcaaaattttgaaaaattttaaaaaattaaaatgtaaaaatatggttcaaacaggttgttacacgcgtgagtcttttattttatacacgaatataaaatagattgtttgaaaagtattttctacattataaattattctaaatttcttaaaattttacaagatgttttaaataactatataacgtcacaaccatgaaaataattagactaaatttttctcctaaataccgaaacaaataaaaagtgcattggacatacctctttttgagaagcgcataacagaaacaccctatatatatatatgtataaatatatatataatttatatattaccttgggaaatcacaatgggtaggcttccatctgtacttgagatattgattatcaggtcttccatttttttggcattgaaatcttttgaaaatgtatggacatttcaatgaatcataaagaggataagtctcatccaaaacccaattcccttcatacaaattacataaattatcaattttgatctcatgattattcattcctaaacaatctacatcaaataataatgatgaaaaccctaataataaaaccaccaaacaataaccactaattctcatcatcatcatcatcaacatatatgaattttgagagaagagaaagaaaagggtaattgacttttgatgatatatataatgaatcacaatctatatatataatgatatatatatcttgatgtataagatatatattattctgattcttttctctaaataatgattattattaacccaggtttcttgctaagtcatatattaatttggtcatgagagagaagaacttttcgtgtcatctagggtttgtcatgcatgcatgcatacgtgtcttattatatatatacatatatattatatatagatatatatataggtgaaaaatgaatatatgatcacgtaggagagaatttttgggatataacatgatctaaatatataattttatagttatattttatgctaaatttagtgaatgattaatgtaacgtggtttatggttgtaaatattttattttaattctatatttatttatttaattatatgagctgtgatgagtgagccttaattattcaagctattttttgttgtagtataatttgctttgaatgggagcaaattattaattgatttgagacctgacaaaattaagaatattattataatataatttacataattcaagtttagaaactaattattaactaataataactttaacaaatattgacctttaattaggactaatttgagatcattgattatagtagaggacatgagtttcttaatcattgggaattttccaataatttgtgggagagattcttaaacattcttatgctgaaaatgcattattttgaagtatattatatatgagtatgaaacacaacatattattctaaagtttattttcgatactataaattatttttttaaaaaaaataaaaaattagtaaaaatatctatttaactacaatttagtaaaataaatttgattataatttttcacatactaaaaacaaaggcatgcctatactcaggtttgagcttttcttttatgaggggtcaattttagggtggcgattcatatttgtaggtcgtgtttgtgtcgtgttaagttttaagtattacaagtaaatattaaactcaaacaacccatttattaatcgtgtcaataactaaaaccaaaattgtttataaatatattaacccaactcaatctatttataaataatcatgcttaattttgattaacttatcaactcagatttataacaagtttataatatatttacaatatcattataatatatgtatgagcaatttaattaacatgtttatttcctattaattaaaaaaatacattcatgtaataatataataaatttaagaatatatatactcttactgatataggtcattttcagcttcagtgtatcaatccaaacttgacactagccgtgtcaactcaaaaataaccccaaacccaaacccatttctttcgtgttgatttcgagttgtattgtcatatctaacctaaattgccaccttaatcaaattttttgtttttcacttaaaaaaaagaatatacactaataaaacttcaaaaataaaaattagtaatatgcgcgcataaaaacacataaaagtgggaattaagggaatattatgttttgtttattttgtgattttataaagtgggacaagtgattacaatataaaatctattaaataatttttaagaattgattccagatcattttgacaagtactaaaattcaagcatatatatcaattgcttatatattcaatcatattatataacaagctttctttttattattattatttattcatttagtacaaatgggttgaatgaattacaacattatacataacacaaagtgttgaagtaattgatgattatacttgtcatacaatccatactattattctctatattttcaattcatttattatattctcttttgtacagcaatgaacaaaaccagaaaaatgggtgaaacaagtaaaaatatatatggtaagagtttgactcaatgaaccaactacatcatcatcttcaacatctttaattgggtagttagattttttttcaacaaaggcttcaaagtaattttggtaacctgtgttcttcatataaggtgagcttgttgtaaacttcatcatttccatggcctacaatgcattgaatcgaatggattaaatcaacaaaaccaaaattggaccccaactttgacattttaatacaaaatcgtgctctctgaactttagtatcagttagtgaaattagacgaaagttcttaaactcaacaatctaaaccgtttgagggaaatttttaacggcctaaaaagtttagaaaacacgatttggtacatgttaaagctcgggaggcgaaaaatcttaattagcctaacaataatagtagaattttacatattattacctggaaactgaaagtgaattcccttgctttcttgcttactcgagcggttgggtgcgattgaagcttttcgtacattactcgagcttcatttcgcctgtcaatcaaggaagacaatgcagcacgaagttactttctccttgaaattgaacaaatagggttagttagttaagttagttttatgcaacatcataagttgatcaaaatgaatactttgaagtttgaacttgtgctaggctacataagattgggattacaacatccccaatttgcttgatttatggtcttgacaaagaggatgtgaatcatcttttcttctcttgcctttatagccatgcttgtataaaccaaaattaagacttgttaggatgaaaggctaatgaagctttttgggaatgtaaagtcatgcaaattaattgtatagtgaatcaaagggtctccaaacacaattgtgaattgtatagataatgtttggttaattattcacaactcttcatgtataggttttagttgtctgattttagtttccccttttgagaagattggtgttcattggtggttctaaaattttattgggtgaaataaatttcttctatttaccaaaaaaaatgaatacttagcaaaaaaagaaatgtagaaaaagactagtttaatccatacaagtgtctcttatcccataagaagacaaaaatttaaggtttcttagttgtcctaattatgagaaaggcctcattttgcaatttcatatactaataaatctcataccttcctagtgaatcttcacaaatagaccattgcagagctgctaatccatagagttcgctctacaaaaacagtaactaattgtaacaaaacacaaaaacatgaatcttcatgtattacccaactttgaattaaccatgttaccttgaatggcaacttctccataatcttttcataataaggtaatgcttccttaagctctccaatattcatcaatgactcaccatcattcaaagcctgaacatgaaactctgcaatcttaattacaacatcaaactaaacacatcaagtaattcaaatgcaagagaagaaaaatgtaatgaacacatagatcgaaaaatagaacttaagagacaaaacaagaaatttatattggtttagttcaagattgatttgatctattttcttaatccagtttgaaaggactatcgcccttctttactaatcgaaacagagatatcaatctcaaaaactacaagcaaataatctcagtaaatcttctcatggcgtaatactttaacactcataagactcacaatctcggagctaacatgttcaatgaggagtaccaactccttttataggacaaaggaccgaatataccaattgagcaagacagttaagttagtttgaaatactaactaacaggatattagttggagatttagctgtcaattagagtttttacatgtttccaattaacttggcaaatcaatattcaatttgagttgagaaggaacattatatttctcatatgaacaaaccttctcacactcagctttgagtttcggatcaatattcaacccaaactgcctcttataagcagcaatcaattccttcgtacgagcatctttagccgctctctcttcggctgtttcaagcgcttcatcgggattaatcactcgcccaccaccaaactacaaccataaaagataagtttcaccgaattcaacaaacaaacaaataaacaatcgaccatataccgttttcgaaatgttgctcggtctaggaaatactccccaagaagacacctttggcttgtaaacatcagacaaatctccttgagcatcaacatttgatgagtttgcatcatcaatgaacttacttgaatctccaacaataaactccacctcgggaatgtctccttctggaaaaggatctgagattggagctaacccggctggaagccccctaccagtcttcttatcagcaaagtttagtcccacaaaatcaaggcttgaaactgaaagctctcctttcttgccacctttcttctccacagtcccaccacttgaattttcaccattttccttcaatcctaaaaagttaatgggcactaattttaactcaaattatcatcaaaaaatgaaaactttacataaataacaacctcagaactatcaataccatcttcaatgaactctatctcaactaaaatacctgaaattttgtaaaccactaattttaactcaaattatcataaaaaaataactttcactaataacaacatccaaaaccagcttcaatgaactctattataactaaaaaatcctgaaattttgttcttggaaaccactaatattaactcaaattatcatcaaaatacgaaaacttttcacaaataacaacctcagaaaccatcttcaatgaattctatcatagctaaaatacccgaaatttgttcttggaaaccactaattttaactcaaatatcttcaaactatgaaaacatttcccaaataataaactcagaaggtccttcaaaaacagcttcaatgaactcttatcattaactaaaatacttgaaatttagctctaggaaatcactaattttaactcaaaattatcatcaaaatataaaagcttttctcaaataataacctcagaaccatcaaaaccagcttaaatgaactctttcacaactaaaatacctgaacttttgttcttggaaacaacaagttttaactcaaatatcatgaaaaaatttcacaaataacaacctgaaatactcaaattatcgtcaaaagaagtaaacttttcacaaataacaacctcaaaaccatcaaaaccagcttaaatgaactctatcataactaaaaaacctcaaattttgttcttagaaaccactaatattaactcaaattatcattaaaaaatgaaaactttcacaaataacaacctcagaactatcaacaccagcttcaagaaactcttatcataactaaagtacctgaaatttcgtttctggaaaccatatctgactcaggcattttctcggtcacatcaccagcaccattatcaattttcaaatcaggggtcgactgagtcgagttcttgtacttcatagctttagcaaaagcaagcttaactgggtcaacaggagccgttgactcaggctcagattttgtgtcaggtgaaatgggttttggagattgagattcatttaaagaaaaggtgagtttgaatggcttaaaggtgtgaactttaatggtggaaattgtagtgttgaatgaagaaagatatgaagcttgaagggtagccatggatatggcatatggaagttgtttaggagttaatttgtgtggtggagatgaagcttagaagaagaagaagaagccattggaattttatcagagttcagaaatgtctggtatttcagttacatttgggtgtcgtttttaaagacaaagtgtcgtttgtacaaatggtttgtgtttagtaaattataaatggggtaaatattactctcaatgcacccctaaaagggatttcaccgatgcacccctatcagttatggcatcttagagaattttttagttcaatttttttattattgtttacgttgtagttatatttaacacattttagggtggcaaaatgtatcatcgtgttatgttcgtgtcataatttatgtgaccggcttttatatttcgtgtcaagcgcgttgacctattttttttgactcgtgtctaattttctcaatcttaactcaatccgtaaaaaatcgtgttgtgttagtgttgttccattttaacctgttttgttattattgaagtttatagttttggttgcttctacaatacaccccttaaaaatgatgcgatacaccttctatttgtttcggca

SEQ ID NO: 218939 - DNA, 2714 bp, Cannabis indica
tatgccgcaatttaccctaaattcatttatatagaattaataatttattctaaattgtaatagatatttatatttaataaatataattttattatgatataatatgaatgattgtttattgttaatgttgttacatttagcactttttggtttttttagtgtacctctatttagttataacttctcaattagaatattgttgacgttaaaaagtggcaaatttcatatcgtctaataagcaatagcgacaaacagaaaacaatgaaaaataaaaagaacaccactgaattatagtagttcacttctcatattacgatgacagtggagttacatctacttcgatcatttattatcacaaaagcaaatgtccttacaagagaactatagaaaaaaaataactaattctaactacacctcataatttcttgagaagtgagagcagagaatctctggccttgtagagagaataaaaattgtgaataatgagctagatgagctctcattttatagggaaggaggtccaattaaattataataaaataacaaaaaattcttacaaaactcgtcagaaaattcctatgattcatagcccagctcacgaacccattttgaggcctaaaatgtcaaaatcgtgagaaagatattaaaacagcttagatccgtcttgcaaaaagcgttctaatgctacttgaaccacatcatttagataaaaattaagtgagttatgactaaaataatgagtgatgtaatgttggaaaatcgacaaaactaatttgccaacgactaggtggctgcaaatgttaacctgggcacccacaacttgtgctttatggattttccacatgttgatcgagattttcggcaacaattagttcaggttatgttgagtatttaatgtgaatttaagaagagttttttacgtggttggggcattaaagagccttagtccatgagtcattctcggggtatttataggctcataatggtggttaaaaggccacctttgtcttgtatgttcaattctacttcacacatttccccatgtatggccttagggaatgatttcctatcctatagggatggcttgagcccaacataggtgtttggtgagacaagacttttctctcctactgatgaattgacagttcgtaagataattgtgaagtgatacttgagatgtcgtgtagttagagaattaggggtttaaatgcttcaacacactttccctagcagagagtaggttgacgttccccatgctgcattatttatatacagttccccattcttaggcaatgtttcgaggccataccatagggttgtactgttttaggggtacttcttccctcgaagaagaaaagttcaacatactcctagtcgcggagggtcctctcgaagatgactaaaactccaggagtctttatccttcttcttccttttgtgtcttggagacacctgttatttttgtcgtgtcctattgataaaggctcaaatttataaattttaagcttttatttgtgcacatatattaatatatattaaaaattccttatttttaatgataaatttattctacttggaaacattcaatttattttaatttttgtgttattttttaaatttaggcaaagtggtgaaaagaaaagaaaaaaaaaaggctcaatttgtaaaagcccaaataaaaataaaaatgttttttctttttctttttctttttctttttttctttttctctctctttcttttgtttcttccaagcgagcccacatcagctgacgcgtgttagctttgtctcctagacgccatgccattctcaagccagccgctagctgcgagaccagctgccatttctcggtccacatgcatgcgaactcccatgcgcacgaactcccaatgctaaccccttccttctcacatcgtgtcccctattctcatcagccattcacactaattcacacgaaattctgtgtgtgtcttccaatcaatcacatcagcttaattctctcaaatttcaatgcaaaaagtggcccataatggccattttctctcaaatttttgtgccactttccccacttattaaagcaagaaaattatcattttggagagcactttggtattgtaaaaaggaccatttaggaaagcaaaacatcagactttagctaggaacaaaaattccacggtttgtccctagactgtcccacggtggttctaccaccttggttaaccgagtcgctggggtgattcctttgccttttatgtgtgggtgccattgcaccttgtcctcatggcgcgactttgcctttagggtcagaagggcatccgggctcaaaagcatcggtggccttctgtgcccttgagggctgaccggggcgattgtatcctttcgaggaggcctaggtgaagttggcacgttcctcggccactagttccactgagggttcaccatcagattcttccagatcgccaaacttactctgtagattctccatcatcttcttcattttcgtggtgagccttttctgttcatccaactatatttgagtttcctctaagtcttttgtcactcgcagtaggttcgggtcatgatcataatgatatccatccttgcaatacccctctctaacgtagtcatcatcttcaccttcttcatctcctcctttgaggttttggccatcatcaatgtaacaccctaactagcataggcgtattacgtgatt

SEQ ID NO: 218940 - DNA, 3398 bp, Cannabis indica
aaaaaaaaagagtcgggtcggatctgatccgatccgagtatctaatctagcgaggcgaggcgggacagatccttacatgatctggatcaggtcagatcatagttggatcagagccgacccaactcatttacactcctactcatggaagatccttttctagaagaggaggtcgatttccatctccacccttaagtgctcaatgccaactttgtcattacatggacacactataatagactgcttctatcaatttgataagagctttataggttttggccaaggatcctcactacaagcacaaccgtaggccaacttgattcaaggttctacgagtcaggacacaagctagtaccctaattctgaagctacaaaccattgcaccccaaatgttcaaaacctggtgactcgagtaaaaaacaatgtctaggacaatttttatgttggaggtggtacaagtttgtccattaaacacattggtcaatcttgtattttatccaattctactcaacttctcatcttaaataacctccttcatttgcctaagattactaaaaaatttctatgtatctctaaattagccgaagacaaagatgtcttctttgaatttcatatgctgactttttccatgttaaaaagtaaatgatacacaatatactcttgactggtgttgacaaaaatggcatgtattcttttgaacattatcagatttagctttagcccacttctgtctctccaagtgtcagtcttgcctttgttattgcaaacttggcttccacacggtccaaccgtatttttcaaaattgtacaaataggattctgaactgattttttgtcaaaataaaacttaataatatataatttgatctaaagatgttatgacaaaattggttacactttttgtatctgttcgtgttagattttgtcttaaagttagttatattaaaaaataaaattgttcaaaaatgactcggggcttatttttactattttggaaaatatagggtcaattttatcatttaacaaaacaaggagtctaattgataactttttcaaaacacatgatccaaaatgatatttaaccataactttttcctaacacaaaatccaaaattattgtgctgtaaaaatttaaatctttagaagatggtttcacaatgtgttattaaatatcttagaatcacataatttcaagatatgttaacatctcaataattaatccattttatatatagagaaatgataatataataataaaaaaaggagcatcaacttgttgtaaatggcaagttgagcaaaatattttaattataaaactgtgtcttatattttgttcttcatgtcttctttattcaatatattttgtcatgaagtaaaccatcgtgatcacttgattaattttagtctaattaattcattatacttttccttccctatttataaatgccattaatctcttgcatgtaacaattcatttccaaaatggctatgcatagtactcatagagttacaataataagtgttgttttgtttgttttattgggtttggttattggtacttatgcctctagagctctctttgatagtattggtagtgattgttcggaccgcaacagaagtgtaacaaaaaatattgatggatgcaaaattatagtcgaacaaggtggtggtgctattcgagatgagaatggtggtggtactattaatggagatgattttggaggagaaaatcgtggcggggatggtgataatggaggaaataataatggtggtggcagagatgaaagtagagaagaaaatggtgatggtaacgaaaatgatagcggacaaaataatagtaatggcgcaaattatggtggaggagaaaacggtgatggtggtgatggtgacggagatgatgatgaacaaaatagttttaatggcggagatgctggaggagaaaacggtgatggtgatgaagatgatcatggacaaaatggtggcggtgatggagaagaaaatggtgatggtggcggcggcggcggcggcggcgagagtagctatgctgctaaagatgaacttgaaagtggatatagaggtggtgctgggcagtagcttattcgtgaaataagaatctattatattaaattgggttatatgtcatatttttatataatactatgttaaattttaatttatactaaatattatatatttaagtgctcataaaaattaataccacatatagttttacataaaagtttataaaatataatttaatatactatataatatataatacgatgtaatacgacataccaaacgaaccctaatatatttatatataagtatcatgaatgtcgattgtatggtaaaaaaaaattttgtggtatatatgtcaattgtgattaattctactttctagcaacattgtaagtttaagtatgtgatcctaccataatagtactaaaaaagtattgtcattaagtattttaagatgttcaacactatattgatgtggtgtgttgtgaatggttaattggtacttatataatttataaaattaaaatgtgtgaaagttgataatatcttacaccattagtagtatgatactacctgtagtgcttagaactttaaggtgtttcttaatatttttggaaaaaaaaatgtatcatatacacctttactattagagagattgttgactacacattcttaaaatattttataatttaaaatttttggttaaagatacttgaaatgaaaataaattaaaaggaccttgaaatacgaagcattaatatccaaaaattgctctaatgaaaacaatgtgacatgtggtaaatatgaaagaggttgagcaatgagggacctttgatgagactctccaaaaaacgttagtcagctgtatagaccaaatggaattgttgagcatcagacatatgctggacagggtatgtcgaccagaagtctgagcaaccaaagatccatctcatcgaaagcatccgaccagcgagttcataggagaaaatgtctagattcatttcaacaattttttttcttgcaaataggtcaatcaatactcctataattgaagcatttcgagaatcaggggatatgagaggatttcatgggattgactcattcaaatattaaatgctgccaaattatttgtaatattcagagatagtaagaaactcacttaaccaggttcatgtgatccttttattttgggtgtggggaagccaacgatggtattggtttaccgttcaacaattaaaggggtcaaactggtttaggcagctccgcacatggaggaagaagggagaagaggaagatagttctccaacgactgcaagagagagagagagagagagagagagagagagagagagagagtagagtagagagagagagagaga

SEQ ID NO: 218941 - DNA, 3540 bp, Cannabis indica
gatgatgacatgtcctataactcaaaaaacgatttacaggtgggccttggtgttcaggcccaccaatcattatgagtgttttgtcttggaattgccatgggcttgggaacccatgggctattcaattcattaaggatttaattatccaaaagaaacccaattatgttttcctttgtgagactttatcaaagaaggagggcatagaaaagcttcggttagcaataaactttgatggtgctttttctgtggatgctcaggggaaaagtggtggagtggcactgctttggagggttgaagatgatgttagtttattgggttatggtcagaattacattgatgtttcaatagcaggaggagaaaggggaagctggcggcttactggtctttatggtgaacccaacagaagtttgagaagaaacacttggaacttgatgagaactttgaaggatcggtctaatttaccttggtgcattattggtgactttaataatgttacttctcagagtgataaaaaaggaggtaatccttatcccaattggttaatcaatggtttttgtgatactttggaggattgtggcttgattgatttggaactgggtggttatccatatacgtgggagaagggtcgaggaactgatgcgtggattgaagttcgtattgacagagccgtggtaactcaaaattggttagatgttttttcgattgctaagctgtcaaatttggaggtatcaacatccgatcattgtcccttgtacctcgtccttgaaactgaagtgagaacaggaggtataagaccatttaaattcgaaaattcttggctccgtgagcctttgtgctttcaaatagtgaaggatacctggaactgttatgctggtcattcgattatgcagaaaattaagcaatgtggggaaagtcttaaggtctggggtaatgaatatactgggaactttaaagatcgtatcaaagcttgcaaagctgagttgaagcgttggaagaaaggtagggactcggctgcagttcagaattataaggaagctgaagttaaactgcaggaggtgttgttgcagcgtgaaatattttggcgccaaaggtcaaaacaattatggttaagggagggagatcaaaactcaaaatattttcatgccacagcgagttcgaggagaagaaacaatgccattcagaagcttcggaaagaggatggaacctgggccgattgggaatctgatttgccttgtgttataactaattattttcagaacttgtttgctgcctctgtggtcgattgtagtgaagtggttagttctattcctaatgttgtctcggatgagcagaatgatgcattacttaggcctatcactgaagatgaagtgcgtaaggctctatttcagatgcaccctgataagtctcctggtccagatggtatgacaccaggattttttcagaaattctggcatgtggtgggcaatgatgtgatcagacaagtacaagatttctttgatacaggttttttctgtcctgagcttaatgagaccaatattgtgcttattccttagaagaaattacctgaaactatgagtgatctgagaccgatctcgttatgtaatgttttatataagatcatctcaaaagttttggcgaataggattaaagaagtgctacctattgtgatatctgatagtcaaagtgctttcttgtcgggacgtctaatttcagataatatcatgatatcctttgagattatgcattatcttaaaaggaagagaatgggtaaggatgggtatatggctcttaagcttgatctcagtaaagcctatgatagagtggagtgggttttcctggaacaaatgatgttgcatatgggctttcatagcaagcttgtttccttgattgttcaatgtgtttctacggtcaaatataacataaaccatggcagccatgtaatgggtccaattttaccaagtagaggcattaggcaaggagatccattatctccttatttgtttctcatttgtgctgaggggttctctgctttggtcaaaagatatgtgtataatcgatggctctcggggtgtcgggtggcaagaggtgcacctgtgatatcacatatgttgtttgcagatgacaactatgtgtattgcaaagcaactgatgatgaagctacgaatgtactgaatatgttagcaagctatgaaagggcatctggacagaaggttaacttgaacaaatcttctgtgttcttcagcactaataccacagagaataatcgtgttcatatctgtaaccgattgggaatggtagcagcgtctgaacaaagcacttatctcggtttgccttgtacaatgggtcgtagtaagaatgcaattctgggatttctcaaagaaaaaatgaggaagaagattatgagttgggagactagatttctgtctaaggcaggaaaagaagtgatgttgaaatctgtaggccaagctttaccgagttttgcaatgagtgttttccttttaaccaaggaaatatgttctcagctagaaggtttgatggctaagttttggtggaaatcccaatttaattccaattctaaaggagttagttggatgagttgggaaaaaatgtgtcgtcacaaagatgtaggggggctcggatttcgaaatttgagggattataacatggcgtttctggggaaacaaggatggagattagtcaccaatgaacactctctagtggctaagatttatcgggctagttactatccgaaagggaattttttcaatgctgaattgggtcctaacccaagctttatttggagaagtatttgggaagctaaaggtttggttaatttgggggctaggagagctattggagatggaaaatcaactatggttcttgatgtaccatggctgcctggggctgggaacaattttattactacagttcatcctagtttgataggaagaactgtggactgcttgttcaaaaccgatggcagaggctgggatgttgagctggtgcaggacatgtttaatgagcaagaaataggcaagatattatctatacagttgggggataatcaatgtgatgatacctggtactggtctgaggagtctagtggattgtactctgttaagagtgcatacaaactattgcagcaaaagaaaggggcttggccgattactggtgcagtaaaatattggcagaatttgtggcaaatgcaagtgccagccaaggttcaacatatggtgtggcgtgcaatgtctggtactcttccaactaaagttcaattatctaccaaacatgtttatgtcgatcttacatgcccgttatgtaatatggaggttgaaactatttcacatgtgttggttcattgccgttttgctaagtcttgctggaatatctatgcggttgactgtgcacgagatgaatctgtgagctttggctcctggtttggtgatattctgtcaaaaaaccagcaggaagttatggttgaagctgccatgattgtttggcgtctttggatggcccaaaatgatgttctctggaataata

SEQ ID NO: 218942 - DNA, 4637 bp, Cannabis indica
aaacagatagagatgtatcggtgtatcccttttaaggaatacattatataatttctcataattatattataaataagttattttgaattgttgatataaattatataaaataaaatatgtctatttatttagtgagatatttaatgttaatataagtaaaaaattatacgccgaccaaattagtgtaaattctgcaccagattagtatagctatttgagaggtctcgagatacagtttgagttgatcatagaagagcaaaaatacgaggtacggatcaagccaaatatcagttttgggtgactttattaactgtattaaaggtttcatgatcaatttttcccttagttaatttgtatagaattgctattcatatgaacatatccaatggcattgtctcatcatttccaggattaaatgctttgccacttgatcaaaatttcaaatgattactaggactaaatcagtgcactaccacaaagttagtcatttttttacacgcgaaatggaaactttttacactcacaatggaaagaattcattagttggtggaggcagtacttgagattgtgaatcctgttcttatggcatgctggaatggctcccaatctcatgaagtcatctgactatcatcaccatttacaacctcatacaagactcagaaattgttaacagtggccagctttttcctgcaaactgaacatgaaatattctcttgttaatctgtggaaagggaattacggttatgtcattggtctttcctctttcttttcggggctgatgatgagttctcgggggtggaatccatatccaaacccagacacttgagaaatgcacttcgtgcgagcctaaaatagtggcatggatgtaaatatatattgattcctgtagaaggctcttctccgtctcggttgtcttcccctctcaatactcttccgctagttccaggtgttatctccccttttatactgtgtctttccctaacctgatgaaaataatccaatttgttatacatataaatacatgttatagaacatcattgactcattttacaagatattctaccttcaaaacatgattggattaggtgactgcttatcacataatcaaattactgtgcaaatcttaaacaagtaaccttttaaaacatgttctagtagtactttttttcacatcctaatatcttcagacagattgaagtagattgtaatttcattgattttcacagacaaagcaaagactgagcaaaattcatagcatttcaaccaaggtgaccatattaaaataaataaacatagaaagcagaattttttaaagttgaatcttgaaacaaattagatcataataagaaacatagtggcaaagagaattttcaaattttatatcttgtaggagaatcatctgaccattaattttataagaataataaaataattaatacagacaaatgcagccaatgtttccaaaacattatccaaagccatgaatcttgccatctttcatctatttgtttgcttatcattttttattatatggttaactcaactgaagctcaaaaataggggtcaggcagtatgtgagccaaataaaagggaagttggtaaccgttgagaaaagccccaaatacgagaataataataataataataataataataaataataaataataataataataataataaagtaaaaatgtagataaacataagaaacggttataatatatgttgcagacaaagaatagaataaacaggtagctaaattgtaatatatgaattattttaggtcattgtgaagtggcatggcaacaaggaaatgatagagtttcgttttacaatggaatttcttatgcaactattgagatatccaattggccatgattggtttcttatgcacaaaattaaaagatgtgattcaattatttaggattaagacccacagaaaggccaatattttattgatataaaatcaaacgttatcgcctggcctgatgtatatgttttaattcttaaatactcacaaaaatatagattgagctgtgctcatgtttgtgaatatctcaatcaagacaactgtaaagatctagatttcactttattcaactcaaacagaagaaatatttatattcataattctaacttttatgtatataataaaatttggtaaaggtcaaaagtattgattttgctttaaataggctttaaccgaattctctattataagggtaagacctggcccctgctccaccaatgttttgaacagtggtgtaagaaccttggctttaccaaactaagaaataattttgaacagagactacttactaattactcaatctagttggaaattgaagctaaaagtgaaataactatgatcttattaaaagaagataaagaaaagaatgggtgagccatttaatcaagcattcatgaattaccaaatgatcttcataaaaagtacacgactttataacacttgttccattttaagatacagttatttcttgctttaacacttgtgattcaatgccaaaatttccttaaataagacaattttctagaatggaatttatttgtttatttttttagaagttgatttttctttttaactaaaagtcaaaccttacagtttgaatcatcttgttcacaatatttctgcaaacgttacaagagtaatacaagactaacttattataatagatagcaatatctctaaaatggtgtaaaatccttttcaaaacgattgcgtagcgtggagttcaagactaccataaactacaactctacacataatttaaacaatgaagagaaaggtaaactaatctgacccatcatatctatgcaatagctttcgaaatgaaaagaacctccgtgactgaactgggaagagagataatcttaattccgatcctattataatgctttcaataacaccaatcaaaactgaaaactaaaaattgcaactaacagtcgataaaatagctaattaatatctttgttcccccaacattttctcacctgggtattctgcaaacgatttgaaataacagtggtaactgtatgatgcttcggaaagggcttattcatctgggtatcatcggaaactaactgagaagaagacgaagaagcagatatggcggcgatattgtcggtggaatctaaagcgaaaaagcagtagattagaaggagaaggagtaacatcaccaagagctggacccatatcagccatgggattctgtaactttgtattgtcaaatcgtccccaaaatcaaacatgtcttctttcttttatagattttctttaagtttttcttggaaaatataatagtttcccagggaaagaaaaaaaaaagaattaatagagaaagagaagaaagggtaaatgagaaatttatgttagaaagagagtgagagggagagagaaggcaaaggccaaatctcaatgggcaaacggtcaatggaagcaattaaggagcgttcggaaaaagttaagaaacaaggaaacgacaatttgttttatgggctctactcactctcatagggatcgaatggggcgagtcggcccgacccgttaccgagctggcctagccaattttcatttcgacctgcccctctccaacccattaggctttttgaatcggggcgggttagtaccagcccgcttaagccgagtcaggtctgagtcagtgcaggtcaactccaactcgccaaaactgagttgggtctaacccaccctgaattttttttaagttaacatttttattaaaaaatataattatatatatgggctaattacataaggtatatttttttaaaaaaaaaaatacattttcacagttttcatagaaacaatatgaaaaaaaaacaagaaagttacataaaagtaacatgaaaatacatttaaataacaacaaaaaataacatgcagataacaaaaaattaacaacaaattaacaagagtacaacataaaaataccgtattttctataaataaaataaaaaaatcgtaaaaatttttaaaattccgtgaaaccgtatttttgtaatttttttgttatttttgtgtacttgtgaaattatctctatatattacatattataattatattagaattaaatgtaatttcttaacaaaatcattaatattttatgcctaacatatgttagatgaagaaattgagcaaatgaagaagaagatagatctattttttaatttaatatttgaattacggttggtacacactgacctaaaaaaattgagtcaagggcgggtcggacccaacctgaaagaaaaagtagtgggctgggccagactggggcaaagacctggataacgactccaatgttttggttcgcgaccgccccccgatcggcaaaaacgacccatttttccatacctagatagaacctttcactctactcttgaattcttacataaaatgctaactcatggctttcaaactaataatgtccttattggtaaaagagacactgatcaaattggaaagagttgtagaaatgatatgatagagatatgcagtagtggtagtattgatgacaataagaaagtttaaactattttatgaggttaagataatcgtaagctactacagttatagacttattattgaatattttac

SEQ ID NO: 218943 - DNA, 9023 bp, Cannabis indica
ataaaattgaattttgggatctttttattatcttttataaataaaaagattatttggctaatattttaattatttattccaaaacgtgaagaataataatttatcttttatcaaatactttctcaaatttaatttaaattattcaattaaaattaaagatagtatctacgatatttattttataattcaattcctatttaaaattgaattatataactcgaaagaagtgtattatatatacccatttaacttttgcactgtacgcacaacatatatatatatgttatttaaatatttttaagtggaaagcaagttttaatttactttggacccaaaggcccttttagtatattcctcaatttttaatttttgtctcactccgtcaatacactccgtcaatacaatacaggtatgttatatatatgtatatatatttatattcagcattctatatatatatacatatgaactttggtgagcctatatcttgatacgttacatatatgtaatatttatattcagtattttatatatatatatgaattttggtgagtctatatctcggtataattaatgcatatttatacgtataccaatttcacgtcattttttttatttaaatgatcaatgaaaaggaaatacaaacaaaatacatatatgtcatctttgttcatgtactgttaatatcgtacatttgagctttacccaagtaagtgattcatatatatgtgtttacatatatatgtataaataaattatatagttctataactagttaaaatgattcaaagatgtaaaacaaagaaaaagctaaaaaaacatgacttgatataactagttaacaatggtaagtagaatgaatatatataaatgatttatatagttctatataatattaccttgattttgtcaatgtagagctcacgagcaatagtcctcttttggtgagccaaaatttggttactagagtatacaatccctggtcaaacagagccatgattcttggagagataaggtggtcttccaagactcaaagaagtgcatagacaaacttctttcaccatctctatatctattatgcataagaattgaatatttcctactgcataagtaaaaaatggacgtgcatattttcattcaagtgatacacaaattacttatatatattcttatattaattttattgacttgtaaacaatgtacaccttgccaccgtattaaacagggaaagatagtcgaagagcaatcattactaatgacaaatgttgataatgaaataaacgataacagagtttaaaaaatgagaagctgagcatatttagtcataaaagtagtaatacactactgttatacgaatgtgagcagtgagtactagggcaattcaaagagtacaagagatcaaattggaccacacatcacgtatcaagcaagcataagattacatgtagggcaaaaatagcaaattcgggcatttaaataataaaatcagtaatattggcataactagatagcgaatatagtttctacgacatcaaaacacattacaaatgaaatgtcacaaagatttcaacaaagtttatagcttagatgattctaattatcttgcctctctttcattttcttttattgctaaactatcttgcccctctgtcaatatatcaaaacactatcgattatccaaaattaactacacaaaatctgcataccctcctccactttcaaaacaatcaatcaaaagcatgaacacaataaaaaataagctaaagtgcacattaacaattgtcaattttcaaactcttcttctaaccctaactttaagtaaacatacatacctcaactgcagatgaggttgaaggggatcacgcagggtagcatagtaaagaactgagtgtgcaacttcaacccagacataaatcaatactccatttgatcatttggttgggagatgaatctgactacaaacctgtaaaggaaaaagataccctaatggattttgggagtgagaaaaacaagaaaccaattttaatataaaacttaaacatatattatttatactcatacctgaaagcacattttcaaaatgagatgaatggacttgaggaggaaatagagggactgggaagctaatttcagaaaagatatagaggattttttttgtttgggggtgagacagtaatttttcgggtttcatgcgaggcataagtttcaaatttgagtaaatttatttttcgtttacatttattaaaaacggccattcactgttaccatacactaatatgtaagaacgagactgagatgaaaaaatccacaggagcttcattggaggaactagaagatgagtgaaagagattgagaaagacactgcagaaacaatttgcacaaaaaaaaaagaaacttaagtgaggagtcaaaataattgatttaataaattattatttaattccaaaatattattaaaatatatatttacaaataatctaacacactctaaatattaactattgctatgtactcatattaatagatcaccatttaacttattattgttgtaaaaaatttcctaccataagaacaaaaccaatgtactcaccatagacatgtcctatatatataaataactatgaacaaaaccaatgtacccaccatagacatgtcctatatatataaataactatggaaaccaattattctcatgagacattgaataatgatatgaatagtataaaaaaagattatttgtaaagaaaccagtacagtaaatagcattgaagaaaactgatcaaaaggaggaaaaaaagaaattacaataactatacaaaatgacacatagaaaactggttattaaaaaaaatgtcaacaacaggtctaattatttgttttaaatatattgcagatatggaatccatcatgtgcgtgattcggtatgaagatgaatggaatgatacaaagaaaagaatcaaatctagagagtcaaaaatggtaatgaaatgctcaagatgtggcaaattcggacaattgcagaatatgcaataattgacaaaattacaagccaccaaagcaaaagaaataggaggcaaagaacaaaaaataacaaaataatctcacttaaaaaaatgattacataaattacgattagaattcacggaaactggttactttgctattacaacattcaacaaaattccgtttcatattttttctaattaaatactttgtaataatgtcatttgatatattctcatacttaaattcaattgcttggtagtgttatataattacatatcataaattttgtttcataatctgtctaatattaattagcaaagaaatatcaagaacctacttattataaaatgagaaatatagttgcgagctacatataaacacacaatgctttttccaaacaatatacctacacccacaaaaacactttgaaaccaattaaaaacattgtaaaatttataatataaataaataaactaacacaatgtaaaaacttgagaaaagtgtttaacaagaactgtatttacaatttagaaaattaaaaataaaaacactattagtgaacaaactatttaattttgttatcagatttctaattaaataaaaagaagaaaaaaaaaactgcttagataataattaccaacaagaccaaagttattcaaatggtttatacctcaaagtcagttcagagagatgtctgtagctccatgagtatttcaatgaagtgtagtactcaaatttaattaggaagttgtgcaaaagttcctacatttggatcgcagccaacaaccatcattttcttgtaaactgcataagcatgctctagattccctgacgtgctataggcttgaatgagagcgttgtaggtggaaacatcaggtttaagacccttaagctgtagatcttcatacatactcactgcttgcttcaccatgcctgccctcccaagatcgagtattagattgttgtatgtatagagatcaggaaatattcctctgctctgcatttcagtgtagagagatagagcttcttctaccctttgtgatcttccaagggcattgatcaaaaagttataacaaagtgaatcaggactgaagccactctgcttcaattcctcaaaataatacagagcatcatcaatttctcctagaaggcagagagaattcacaagaattgcataagtcctcaagtctggtcttattccttctttaaccattctttgaaacaactgacaagcagtttccacgtctccagttttcccaaacccatttataagaatattgaaaatcgcacaatcaggttcgcatccatattccaccatctcctcgaagaaaagcatagcttcttcatgtcttcccatcttaaggagtccttcaatgagtggacagtatgtacgagatgagggagagaaatcacaacctacatgatcatagtaaaaatcgatagcctcgtccacactattaagttccactaaactggaaatgagtatattatatgtgattgtgttaggcttgcattccctactacacatctcttcatataatttgaagacttcaacgattttcccagacttcccatgtgcaccaagtaacaagttgtatgttatagctttaggggtatagccaacacttttcatttcattgaaaagatcccaagccttatcaatcatatgaactctaagaaatcctccaatcaaacaggtgtatgattccaaagttggcttcaatccctgagtcctagaaaattttgcaaagaaatattctgcgtgaagaacttccttaaatttacacttacatttacacaacacttttatcagaggtagaaatactaagtgatccaagcaaatcttatcagatactaatttttcagcaaacaacatgactgtatcaaattcagcttgaacgagagtccttacaatcaaatcttcccaaaaggacccatctacgtaaaccccaacctgatacacgaaactcttgacaatcccgagtgcatcctcaatttgaccatcctttattacacctggaatgatggtgagcatagttacatgattaggataaagagattttttcatctgatggaaaaaccaaaatgcatcattaactctgtttttcttacttaatccagaaatgatagtattataagtgaagatgtcaggatgacagttcatcattgacattttagaaagcatttccgaaactaatggcacctcatcattcttaaagaggtaatccagtatagagttaaaagttattgtgtttggaggacaaccaaggacttccatatcactcaaaagttttagagcctcatccaatctattttcccttaatagtcccccaatcaaggtgttgtaggtgtacaaatttggtgagatccccttcttcttcatcacacccaaagtatcaaatgctttgtcaatattgcctgctttgcataaagcattaataagaatggtgaacataactacatcaggtacataaccatcagtttccatttcatcccaaatttcttttacagtttccaatcctccacgatcaccaaacttgtccaacaaactaatgtaagttacacggtcgggtttgtgactgctagctttcatctttacaaacaatgccttcgctttatcaagtttaccagagttacaaagcgcatcaatgagcccattataagtaataacatctggctcgcatccctcttcatccattctcttcaatagaccataagcctcatcaatctttccagccattccaagaactctaatgcatatggtaaacgtatatatattaggcatcaatcccaaatgtttcaactcttctaacaaaaccattacagtttgagcgtcctttcgctttccaaatgccaccataagtgctgaataagtcttcaagtctggcttcatcccttctatgaccattctcttgtaaacctccaaagcctccctacaaaatcctgactgaagaagcaaatagatcaacccattatatgaatacgcattcaaaataaacccagcctttttcatcttctcaagtgcaatgggtgcttgacgaattccaccccttatttgaagacttctaaaaatagcaagataagtgttcagatttctgtacacaattttcttttgcatgaaatcaaaaacaacagccatatcctccaccctcttgtgagtcatcaagacttcaagcatgtaattgcacgtttcagcagtgtgaacaacattcggtaacccagcaacaaccatgaaatatgaaaaagcagaatttgggtccttaatagacttaagaacccttataacctcttctgaaggtttcacagctttcttcttcactttggcaagctccatcccttccttggggactttcataacaaaccaacataagcccattcgttttctctgcactttccatacttttcccaagtgcccatatgtgcaaaactttaaatttccaaagcttcttcctttaaatgacccactatgactcggagtagctattagggtttctataaaatcaaaattacaacggaaactactacagtacgtactcgaagagcaaagtgtcaacagacccatcgaaataactagctttgatcacaataaagtcggcaaaagatggcaattttcacacactgaagaaatgtctacatgcgtcgttaaagtttgtcaaattgcgtctgagataaaaaaaaaaagagggaaattcataagttcataaggtgaaaaaaaaaatgaaagcgaaacactaatgattttatgtacacaggctttcttttcactttaaaattactaatgaatgtaccactaaagtagtaaggtttcatttgacataagggattcgaaagtcgaaagaatagcaaaaattgtagggttttttcagcaatcccaattgaaacacagaagaagaaagcaataccataaaaaagagtaggagcgaagcgccgtcattgagtgggtggcttaacagggtggctccaccatgatcaccaccgcttaccgcttaccggagcttttatttcaacattttaggctgaccttatcttctttcacgttggccctacatagcaatataaacaattaactactgaaacttgttcgaaagaaggaaaaaagaacaataactactgaaaacttcacggggcgtttggtataggttaaaaatagtctgattatgggaaatattatgaagaagaatatgattgaataataaggggttaaaaataatctgattaagggaaatattattattgtgtttggttatccgtggaaatgtttaattagattataaaatggagataaggttcataacttcattatcttagcatgttactagtatagtagaaggctatgtagcagtatcaataaaagcatttgaaaagtgcgtaaaattttaaaacatatatctaaagctaaattgaattatagcacttaatgatccatgaaaaatacaccttaattacttgaaaaaatagaggcatttgggtatcctattgagcatcctatcaatggttgaattgggaaaagaaaaaatcagccttactactatgtaaagagaacactataattatatatactaaaactaaaggcattaaaactaagaatgtttcttattattactaaaacaaaaaaaaagggaaaaaaaaaaagcaattgtaagaactcaaaagcaattcagtaaatagcacaattttattaagagacattacagagcatataatcattaaaaatataatggctttatatcacacacaatttaaaagcaaaaaaataatggtatatccattatgttctgacatcatatgttttcttagaatcataacagaactcaatgcaaagtttgacttatagatcaaacatacactcccatattctaacaaaaagctttaatatgaaacaagcattcccacaatgaaatgacccatagtctagattctagaactctatatattgccttctaaagaaaaaaaaaatagagcaggaacttaaacaatgccagaattagtaaacttaaaatacggttcaacaaaattagaacataatgagtattttcaccatgacccaagtccaaaattagaacacggcaagcacaaaaaaattgagtacaaagcagaaaccacgaatcaccatgacctaattccaaaatagcaggaataaaatggcaaacagacaataagatatataatacgaaaactcacaaaacccagaaacaaaaatcgaagaaaaaaatcaactcactgagatataacataaataatcaaaatgtatgtaattggcattagtgaatctgattgaaggagttcagagagagcaatttgttgagaagcgaacaaatgaagatttttagcagcggagagaattgaggtgtgaagattttgaggaatggcaaaaatttctgattgaatgaaattgggctttcttgaagatgatgatgatagaggaggagaagctttgagaaatggagagaatttgggggtaatgtgccggagttaggaaggagggtttgttttgaggtttctaccattgacgaagaagatgagtcgttcggaatcggagccatttttgattaactcggtcagttaactcatcaaatctctcactaagatatcacaatgtatatagaaagtagatagggagaaagagataccaagcggctagggcaccaagctacgaagagcgtgtttcaaagttaaggctgagttttgttttagatcataacaacagactcacaacaataataacagagacaaattaataaattatattaaaaattagatgggtcaagaagtgttcatcgtccgtgaaacaaacctcaaacaaagatgcttcattagaggattcacaaagtgggacgacttatgattttgcagagtctttgagtttactggctttcgtaaaaacacccacaaaccttcgatatgtgcgaatataaattcatgcaaaagcgtagaaaaatcaatacaaaatggggaaacaatatgggaaatagggtgtagtacctgcagatgagactgcctagctacagggtggctac

SEQ ID NO: 218944 - DNA, 5918 bp, Cannabis indica
aatcgcaatataaattacaatataatagaaaaatacataaattatcaaatattaaccaataattttatgtgtgaagatttcttaaaaaataattatctaaaatttaaccaataattaattttaaataataaaatgtcttgaattatatggcttaattttaatccaaaacatattagcaagaaaaaaactaaaattaaaaaaaaaaaatgacagcacatccttgatgtgctttgccactaatgtatatgaaaagattcaacttgcaaaacaattaattattgaaagaaatacaaattgtaatattatacaactttggaatatagacttaagcatgtacaaccatacggatgaagacagaaatttctctcttacaatgtttataaattgcttcaaatacgtgtatccatctatttattttattttactttatgttttggacatttaaatcattttaattcgaattcgtttttaaatataatattcaacacttaaattgattgagataattctcaacattgggtcatatatttatataaattaaaaatagaaaggttgcattctctaattattttggttcggataccatactcaaaccaaaccaattcaattaatgttgaaatcatggttaataatttgtaaatgttctaatttttttaactagcttttgtacttgttaaagcttataatacataaataataataaaaataaatatttttaaaacaatattaaattactattaatattatgcctaaaattattgttagatatcaatttttaataaaaaaaaaattgattaagtttatataaaaaaaaataaaaaaattaagccatttaatttggtttgattttatttgaactacgtgctagaattttaaaatcgtgatcgaacagaatattataaatgatctaaattaattaaattattgataccgaattcattaaattataccgaattcatttagtctcatctcaaataatttaattctaatgcaaactttaataccaacaatatttttagttgtcacccaataccaaaacagtaaagtatcaaatatatcatcacactcatacatctcaaaacgaatcaataataacacacacagaggtagttattcatcaagattacactaaccaaccaaaataataaaatggacaataaaatgaacttataattttgttcatataatttaacacaaaacacaaatttaacagtaatttgagcttaattaattacgagtggtagtagtagtgtcgatattaagaacacgagcacaagtgtaaacagaacaaaacgcttgcaaagccatgaacatcaacatcaaaacggcagccaacaaagtaagaaactgccaagaaccaaacacataaagcttcataaattttccaaatttaaccttccatcttccattatgatacttattcacatcttcaataaccttatccaaaaagggcactctcgtcaatctaatagatttactcatcccattccataacttagccacttcttcatcactctttaaacgattcataattatacctctttctctaagtaccttaacatcttcttcagtatcaataatcccattcattaattcagtgtaacgtgtaaaaatcaacggcccagatgcgtttgatgcttcgtaagccactaaatttctcattatggtctctgcattaacgtctaaactaacggcaggaaggtaaagtgtaactgtattgacgtcaaaactaacggttgagatgttaccgtttgttgggatgaaacgaaaaccggatttgaataattcagtcactgatggaatagagatttcttccattaatggtggcttggaaatacttgaagaattctctgcttctggtttggcttcttcttcttctttgtcttcttcattgaaaaacaagtactcaattggagcttttaagagtctgaatccaggaagattggataggattgtccatgggagcttcaaaattactttaactggtcttgaaaaaaatacccttttgagaaaacgtattgaacttctgtttagctttgaaacaatcttccaaaatagaaagattagttttttaacagagtttgaattgccaaaaaagctctgtttttgttggtcttgattctcatcatcatggtcactaatttcaataacttcatcttggttttcaatttgttgtggtgtgattatgtcgtataagaaatccaacaagtgagcacattcggagactttaatgatcgcttcttgttccatcattttgaaaggtgaaacctcttttgaaaatcccaccaacatggctaacaacatttcatcacaagattcgaattgaaactccaaaatctttctcaaaaggaataatgggatttgattttctaacataattatgtctcttagtatagcattgtgcgctgactttctccctgtaaagtcaaccaaatgtgacattctcgatgaagaagagaatcccttattaaatccttctttgatagcataaacttgaagaaactcaagtaaaaaagaggcatcaatggccatcatccaagccagagtttcaccactaaaatccaagtacttgtggtaacaagctctaatcttgtgttcttgattgatcaagtgttgaacaagatcttgaaattttcgaccacattggagatttttttgggctctttttgctgaggaaagtttgtacctttccatttcataaagctctgttctccaataatggtatgggccaatagctacttcttgtggtgtgtaggattctgggtcacttgccattaaaattttggggacattgaaaacagacacagcaatatcagcatcatcttcaagctcttcttggagtgttctactaatttgggttacccatctttgctcatcaaattttgaagatgatgagtttgatttagaagatgtggaatgttggattgaaggcatttttactagtattatatgttaaagaaagtaatttatattgtgtatgttgatcaagttagctgaattttggggcgttttattggcaaaagaacagtaattacatcattaaataatatgaagttttaattggattgttgtgtgttgtgttatggccttatctagctagatatattaaattagaaaattgataaaagatactattggtgtttaatattcttctcggtgtcacagtataattagtataattaagtatcgggtctcataaaaaaataaattttaaaacatattactaactacacttataaaaaaatatacctattacgaatgttcattaaactatggtccatgcctttcttgtggctttaatatttaatttaaggcatcatgctttattttttgtaagacaaggcaaaagttaatttttttaaaaagaaaaaatctttttgtgggatttaaatattaatctctatcatttactaatttagattattcattatacttaaattattatgatatctataaatatcatagttgtagctaaaatgtatgtatatattttttgtttgaccctcgttatcaagtttttaagttccattgttatatctatggacttaaaagtaatacttcgaaaaacggtccttttaacattgtacagcagagatgtccttttacaaaagtaaattaataactaaagtatgtaactagtctgtatttttggagatgactgagtcaatttttttaaaatgttgtgacttatgagaagagaatgcttccacatttaaacaacatcatgctcatcaaattatcaataaacaacaaattaacacatatacttaaaataatagaacatgaaacatttcataattcatcatagaacaatcaataaaccaaccctactacaactaacactaacatacatatatatataataagatattattatttttatctaattactaatataattataattaagtaataattaactctaattaagtagccatgcatccaataccataacgagtatttggaaacacaagaaacaagccactacaaacaatcccaaccatcaaaggaaaactctccataacttcatccatagctttctcatgtccaggaaaaacacagtcagttatccggtgatcggaaaaagcgatcgccgtgaaaaccaaaacagacataagagcatgaacaaaatcagtaacacccaatttatacctctcatctttgggaacttcaacatccaatccaggcttaaacacagccaaacccttagtggtaacaaacccataatacaccttcccgtccggtccccggaaactgtcggtgaaatggaagaagaagcaggagagagaacagagacccaataagacgtgcatcatggtggttgaaacaggggaacactcgccgttaccgtagattgacggaagaaccatctcgaaagtcagaagggttcccgttgggagaaaatttgcgagcattgatgtttttgagagcgtcttttgcacgccctttgcgacggcgcgtcgctttcgaccttgtcccggaactgccgtggatggaggctgatcagggtggtaaggtagtgaggatgattctatgtcgtcttgtggggttgtgtcgtagattttgattccgattccttctggtgtgtccatttttcttgggaattgggtttcaaaaatttgtggaaatgattttgaaagagacagtatatatatttatatatatatatatatagtaggtgtgtgtgtgaaatttgaatttggcggttattgacggttgtggaaatatggaataaccgttttcattaatagttacccaattatatattctaggttggttttttttttttaacaatgaacttttattgaaaatattcaaaagtttatacataaaaaaaaagaaaaaacatctatccaaactagtttatcatccaccctgagtgcacgaattgctaattcatgtgtacaataaacataaatcagagatgcctcaggaaaactgaatagcaaactaacaaaaaaatctaagaaagatcctactttaaaacaaagaaggatttcctagaaaatacagtaattaaaaataatcaactagactcaaaataattaggttgattcttttaaacaaaaataatatgcatttttaaaaaataataaaaattaaaaaccttaccaaaaaaacaagccttttagagaatttatttgaaattaattagctctttttttccatttttttttgtgtgggtctaactgtatttccaatcatattctcttaacacgtcataatgacacttgaaaaaaaatgaatttcatccataaaaaaatatatttctttttaatagtattctaatcaaaaatattattattttgtcattaatttataaagttaatttggatgaacatgattaaagcaacaaaacatcatttactattatagaatgaatatacaatttctcatttttcggtaccagatcaattctcttaatgcgagaaacttttatagtgagaacttaagtttaaataattacagtactctaaaatctgtaacaattttattaactagtaacaggaaactggtaaaagaaaacaaaaatatttatttacacttataatatttctaaattatttaacattagtaaattacaaataattgtatagataaaagtgtcaaaaaaaaattttatttatagtttacatatagatactcacaatatttttttaacaatgtgggatttttcacctaattaataaagagtaatatgactttttgtttaagacaacttaaatcaaccacaaggtaaaattaagaataaactatgggaaaaatttgtggcaaacaacttcaaaatgttgtgctttaattttattggctcaaatttagttgttggtatttttaaaaacaagatttgcctaaatagcatagattattgaagggaaatttacatggtatactaacttttgttatttttttacaaaaat

SEQ ID NO: 218945 - DNA, 6317 bp, Cannabis indica
ttagtttaatttattttttcaattaattttaattttttttttcattttaccttaatggatacccgatgttccccataaccgatgggtattcccctaccccgaatccgttggttattagacggggatggggcggggatgggggtataaataggtagcgaggatgggggcggggattgtattccccgtacattaaccgcccaatttccatctctagttgggtggtgaccttcagcgttgttttcttttcatcactttgttttattttgttatgagattcctgatgtgaacgattatagaccattttaataacgatgtttgtacttacagatggtatggtggaggtctatttgctatccaaacaaaaaatcaattggctaatttcttgacaaaatgttgactcaaaatgtgtgcatctattatttaataataaaagaaaatgtgctcatgtcaacgtaaattaatattggtaatgcccattggataattcttggattttgcctcttaatatatgaactctttcatattcttataataaataataaataatgaagaaaaagtaatattgaattaaaataaaaattgtcaaataaatgcagaaaaccattatcaattggctcaatttagatataacagatttgggtaagaataagattgacttggaagttaggttgaataggtcacccaccccctttactcttttctcaaatgcttaagatttgtatggaaaaacagaaaacgtaaccgagacttttatctttctcaattgtaagaagatgagggcaaccaaaatctactaattcacttaacagttcccacaaaattaagataatagcatctctctctcgctctgataatggttaacactagaccaagttacactctccttcatactaggtctagttagctgcatggtaaaatgtacaaaattcttggctcaccaaaaaggtcaatgcatggcctaaaaaaggggcctcctattttgaatcatgttatgcaaaactgaataaattaatataacaaatgaagacagcttttcaattacttgacctcttcatttccttgatgctttgcttgttccttgtcggcatgcatttcttttgatgaaatggggtctttttctgtaataaatataacaggtttatcaagttgtcttctgcataatctggaaaaaaatgtgaaaacccctaaatatcatcagaatgatcctcattatgttgtcaaggattcaaataagattcccagccaactttttcaagcttttctgtttttaccaagacttcgtttcgcatgtcgtcttggtactgactcattctgcatgcaagtaatttattcacacattaaacataagcaaatccatagatattaaataaagaaatgaaaggtcaagttttatgtgcacgggacaagtggaggtggagaatcataccttgatactaggtcagcatccccaacacccaacattcttactgcaagtaaacctgcatttgtagcattatttattgcaaccgttgcaactgggacacctcttggcatctacaggccagtcatgcaaaagaaacatttaggctactttgcaagaagaatcatactcggacaataaaattaaatatcaggttggaactaaataataaaactcttggctctcaggtctgtctacacataaagaccaaggttgacaagacaaaaattacaggtacctgtacaatagataagagtgaatcaattccatctaatgtagaagcacgcacagggacaccaattactggcaagggagtaagtgaagctaccatacctaaaatttaaagacggaatagaaccaatgttaaaattacaagaaacatatcaccatatgtataaacaaattgtttattttgactagcctggtaaatgagctgcaccaccagcaccagcaatgatgacctgaatgcctcgatctcgagcagcagaagcataagaaaacatattttcaggagtacggtgtgctgaaactattcgcacctgcaatttaatttatatacatgatacaataacttgagtcaagtttatactaaaaaaattataacaagaacatacgaagcctaatgtcaaactgtaattaacaaagaaaataacctcgtaaggcacatcaaacatggctaaaatctttgcagcatccttcataacaggaagatctgaatcagagcccattatgatcccaacatgtggtgtgactacacttagcgaacaagaaaaaaattaaggcaatctacagttagcaaatattataaaaatttattttgcgaatctattattttggggggtttctcagtttttctttcatgaaagatttaagaattagaatgctacaagttttgctaagttacacttctctatagatttgcattgaagatgatgatggaaaattattaaactttccaaccagctacatttctaaagcaactgataaataataaaaacagccaattacaaccaacctgcagactggctatcaaaactttctctattcagtaatgagtctaaacgtttctccacatcagccttggatggaccaacaatggtgatgtgacccatcttcctttgcttccgcatttctagaaaattatgatggtacaaaaagacacattggaaataaataataaaggaatgtatgtggcaagacattggtcaagaaaatttaaggagattcctacctggcttatcgtaccaatgaacagtagcccccgttatacccaaagcccttccaataagttgatgtgctaaagagaaaccacgatccccctcatcttcaccaagtatattatacataattgcagctggcgttttcatcgatggattaccaaggggaagaccaacaacagcccgtaagtgttgttcatactgtgaggtgtagcaagactctattgtgtgatgaccactattatgaggtctaggagccacttcatttagtaggatctgatgaaatagcaatgggcattataagtaaatgaaacatattgcttaactaaaacataagttacattactacctgaccatcctctgtcaagaacaactcaacagcaaacacaccagcaccttctaatgaactaacagctttataggcaacttcagtggccagcttttgaatcttccatgacacattagccggcgacttgacaatatgacaaatattttccctaaaagaagagaaaaaagaaactctcaattatatgtgacttgagtagtgcaagtcagagatcaagtatcatgtaaatgtatttcacaaacatttgaatattaaagtccaaaactcaacagcaagtaccattagtttctgaaagatacgataatttcaaatctacaacttacttgtgaatagtttcaacaacaggataacataagatggagttatctctccctcttgcaacaatgacagccagctcctagtgtaacattgcaacacagtaaaagaagtccattagtaattgttaaattcctttgaaacttttatcttgaatatttttaagagatatctccaaaatagtctaaaatttgcaataggcttatcaaatgattctgaacttataaaaacctaaaatagaaacagctaacacaccaatatcacataataataagtatcccaagcagaaatacactagttgaatgtaacaacaattgacaaagaacatacccaacaaccaataccaatagacaaatttactattagggctcgtttggaacgtcgtattaggtcgtattgtattgtagtgtattatattgaattggattatatatcatatttttatataatactatactaaaatattatatatttaggtgtccataaaaattaataccacatatatctcagaatgtaaaattgtttcaatgaattagatataagtccaccctaccattcatagaactaaacaatcaatttaccactcaagggtaactttgtctactatcttgttccctgacttaagctagaaatttgattttattagtttcaagatcactatttcattataaaatttcacaaggtaagatgcttatctacaacctctgctgggacgtggttgaactaaccttcacaaaaggagcccatttctccacatacaaaccatggccaaagcccccaagagctgggaaacaggggaaaaaaaaggagttaaatgcaaggtataggctctattcatccaaatgaaacaaacaacagatactattatttcctgccaagcataataacaatacactatgaaattcgaaagtaatttttaaatttaattaatactttgggatcagtaagctaaccctagaagataaatcaagaccgttaatcatcatttaataataaataaactatgttaccagcaatagcagcagaaagctcctcctcacttttagcaacagcatttccacgcccatcataggctaaccttttactcttaatcataagaggataaccaaacagttgccctgctttcttggcaccttcaagttcatctatctgcctttgtcatagattattacaaagaaaaatgtcacataattgttacaaaaaggaaatgcatagcagttgtaatccttcacaatcacatgaatgaatcatgagtaaacacctgcataaactctggaagcggaatatcatgctgagaaaaatgaaccttctgaagatatttatcctgccagatgcgtgaaaacaaagttaagtgcagcacctaataacatatcagggaatgctcttctcatatttcatattttgttatctactaaacagagacaagggcttagcatttcatggatggtaggctattataccatattctcaaaagtatttcctaaatgatgatactaacactaaataagatgaaaccaacctggattatgcgaatggtagaggctttgggttggcaatcaactccctgtagctcaagtttctccaaagtggcaacattgacatgttcaatctcaaatgtcaatactccacacctaactaccaagaaagaagattagcaataaaaaaaatcattgtatagtacatttatataaataaccgggatttgtgtgaacctcttagcaaattcttcgactgcagcactatcatcaaaacttccaaccatatgttggtaagagagagcactggcagggcaattctgttgagggtccaaaaccacaactttaatggccatttgagaagctgcttggcatagcattcgacccagttggcctccacctagaacaccaacaatggtctcaaacgaaccatgaacagccgaatcatcttccctatttaaaaaataaaataataacatgaatataatatagttcaaatgccaaactttcttcagttagaactaataaaaaaaatgctaacctgggtgaagtgtcaggtaaggcccggcaagccaagacgggattacgattctgcggaggctgttttaataaggaagaagaagaagaagaagtagtagagagggtttgtttaaatgagttggtagaggagcggtccatgaaaatagtaaaggatgtatgttttgtagaagggaatgatggcctgtagcatcgaaaatccaaagcagtgtgggatgagcgaagcatctctttcttcagactcaaccaccaaaagtgcgagctctgcgttggggtgttactagaccggagtggctgggctgcgagttgtgagttgttaatggaatggaagaagataaacaatgaaaattaggtttttcctcttttctttttaattaattaaccaatatatatacctgcgccacttgatattcattattcactgagcactcttcgcttcaggtataatagctatcataaaataaaataattcacaaaacaaaaaaaaaaaaaaaagaagaagaagttggagaatattataagagcatctccaatggtgagttggagaatactataagagcatcttcaatagttaaaggttgttcattgaatcacattcaatgtttttagatccatccaaattcaatccaacgttttagacccatccaaatccaattcaattatatattgaatgttggatttctccaaccgatccaatccaataaatcattggattggatcgattccatccaatggatgaatccctgtattggagcgtatctatccaatacttttgtatctaatattttttagtactggattggattcatccaatattttaattccaaaattaattagattgattggagtccatccaactccaatcccgagagtaaaacctagatttttctactaaacggactaatatattagtcaatgtttaaaaaggacatttttaaggtcgcacctcacgcctcaagttggcgttt

SEQ ID NO: 218946 - DNA, 2978 bp, Cannabis indica
cttcattgatttgtgattcaagccttgccagagtctttcttttttcctcgatctttgcagcaatatcacttgactgctgctgaatagagatcaactcttccaatttcgtcaacgaacttttctttatatcctcagcaaaagattcaagtgcaggctttactgttgatttgtagtcaattcccatgacctcagcgggtgtagagccatcggcattcaagttgtaatgaaaaccatcaccaatttttaacctagtaccagcaaagtaagaatttcacagccaacacacacatattaagtgattatatcccgtacttcaagtaaatcaaaaaaaaaaaaaaaaaaaaaaagttaataccagaatctgtaattacttgaaaatcaactaggaaaaagtaataactagtctggtttatttaaaaaaaaaaatagaaatttggcctggtttctaaaggtcacatggctaataaaaaccatacaaaatggtttaatccttgtgagtttattttacagcaaatcataggagggaaaaaccacaaattatgtaatagagatagattcttatgtacttttttcctagttcacaattcaaggcataaatatggggaaaaacaactactgcccaaattcagacacaggtaaaagataaaaatttccattatcatgtaattcatcaaagttctatacttttagtcaaagaattattatgtaatatatattaagaacttatgaacaaattcagatggcctgtcgatgtttgaactagtatgccataaagcatttaaattatgctgaatttgtactctaaaacttataatacacataaaatcatttagtatatgcaaagtaactcaagaaattagcacactatgatgacaaacctcctcatgagttgattgcattccattgctagtgtttcgagctccttaaacttgtgtccgagcgtggcatcaagatcccacgacttctcttcccatgagttcctttcaagctcagcctccccgatatccctctcgactgcctgcaattccctcttcattctctccacatccctcggattgaatgtctgttgctgcaccctcttcttcaaatcctcattctcttcacaaatcctgttcttattcacaactttctcctccaattccttctctttcatctccaagtccctctccaattcagcaatcttctccttaaacttgccaatcatctcatgaaacttcaccacatcctcttccagcatccctttctccttctcgagtacctccttctgcgaaggcgcggacttcaacccctccagctttgcttcgagttcagtagcattcgcctccaaagccttggtggcttccacagaattctccctctccctctccaacttctccagccaatcacgatccagcttctccaccgaatcatcatccccggtaatgtaatgcgagtagctatcgagggcgtaagaatgcagcgggttgtgatcggcaaatgaagtcgaatcagaccccagatgatcattaaacatggcgacttggaccagccagtggattatggcaagaaaagtgggccattgatgaggagttccgggagatctcagaatcgatttgttgagtttatgaggataatttatagatctcaagacaaaaggaagatcttcttcgagcttggaggaggtgaaatcgagacaggacatgaggaaagctagggtttgagtgatgtctttggcggagggaaatgggagtttgaggaagagatttgaagagtgagaggaaaggaaagcgttgatggtggaaacggcggaagactggtagcgatggtctttgtattggtcgaaggtgaaattggatgaattgcggccgatgccgacggaggaggggcggctactgacgaagctcgcgtcggagtcgcgctgctgctgacggtggtagggattatggtggtccagcggcgtcggcggcggctgtgggttggcgaaggagtccttgggacgccgatggcctccgccgcctctcattctcaactcacttctggttcggttggtttttttgaattttgatgggaatttcccgctgcttatctcaggctctcttatcaaagttgtaattttgtttaagagttttatttacactccatttgaaaaaatttatcacaaattacttcatatactattctttttaatttttttttcaaatttatggtttgagtttttaaagtggttgtaactctaattgcaataggagtttctatactattttttttttttacaatttagattacagcgctagttgcaataaaaatttctatgtaaaatttcgtaaaaatacaaaaaaaaaaaaaaatagtttaaagtgtaaaaataaaaaagccctaaattttatttgcatcccataaaaataataaatgtaacttactaaatttaaaaaaaaaagaaataagacaacatttaatagtatttttgttttttaattttaaaagtagaaaaataaacgagaatttttatttttaaaaaataaaaatgtgttctttaaactacttttatttttaaattttaaaaacagaaaagaaaagtgttttctacaattacttttaatttacaattttaaaaacaaaaaaaaaaagagaatgttgattttttttttttacttttttaggtggcgtttttatttttaaatgaacgattggaaggtaacacttttgttttttaattttttaatcacaaaaataaaagtaaaatttttctttcaaaaaagaaaaatatattttataaccacttttaacttttaatttaaaaaaaaaataacaaaagtgtgttctgtaaatttcattttcatttattgattttatttaagttaagtttgggttcgaagtcgggatcgggggccaatccgagtttggggtcggggccagagctcatccaggtttcaaggtctaggttggagtcagagttcaaaatattgattaagaaaaaaattgtttaaaaaaatttagaa

SEQ ID NO: 218947 - DNA, 2873 bp, Cannabis indica
atcaactttagtactttacagtgagattaagaaattttaaagggcaaagagaactactaaactgattagagtaacgagcaattacaacgtcaaatcacctcccaattcgttgataactctatccactttgttcagcatatctggcgaacaacagaaaccaaaaaccaatgttcaaacgattattagtgttctcatatgaaaagctctaatcttaatgaaaaatcaaccaactctacttaccattgaaagaagaatcttccagatatttctgcaatgcaataaaaaaaatttagcatttatctttaaaggggtactactatccttttaacaccaaaaaaataaacaaataaataagaagataccatgagtagcgtcttaacttcattttcctcgaatgaagttgaattttctgtagctaaaatcactcaaccaaagggtaacaacttaatcattttgtgagatgttgaaacactttctttaatgtaactttgcaaaaggaagttcgtattaccatatccaatattgggactgtaacttgtcaggaatgaggtgaagctgggaggaaaagctgcaaagttggaaccgaaattgtgagacgtgggcatcctttcttcgatctgcgagtgttgtgcagctttgatctgcgagtgttgttgtgcagcttcgatctgtgagtgttgatgtgagacagcttcgatctgtgagtgttgatgtgaggcttcgatctttgctattgcaggcaattcaagagaataagcttgaacagaagtcatcattttcgtgtcctccgcagctctacaaacataagattttatctttaaagtctcatgaaaattgttctataaagtcttgcaaagagaaggaatatactaaatttgactttgacaatagcagaagatctttttttaccgatgtgaaggtgtgttagaaggcatgaagtgagattgtgatgaaattgctgatccaacttcattattaagaggtacattgtcactagcaccattcaatatatcctggaaaaagattgccaaaacaataaattttctgaattaaaaacattttatgttaaaattctagtgataattggttatgtaatcaccttaatagaaccgaggaatgcttcagtttcacaaattgtagaaaatcgcagagcaaacttctgtacctgaacaagaaatccgaagagtccttttgtgatacaaaattttcatacatgaaatttatatcctaaaagatgatgaaaagagaaaatcaaagcacggatagcatcttacttctccaacggaatctctgtagctaacaatcacgactttggtacccctggctggaaatccagagatgcacgaagcgtgaggccaggcgaagttcaacttcgtaacgtagtgttcctcctgaaaaacaagtatgcatttatttttcaataaatcgccattgatataagaacagattatcccaaacacaagagcaagaatgttaacgatgcttaatcaaatacaagttaacatgaaaaccacacaagatccacagttttactctatcaagaaaaggaaaaacgaaaataaataaagatcagctactgtaatttcgtcgattttcttttggcatttctcgaaaaccaaacagaatccaataaaggtaaaacaagcaaaattatggagaagtcacctgcatttctcctccgagcaagacagtgaggatgacgctggggtgagagggagtatggaggagttggagccaagcaggggacatggaagtgatccaggtgccgaaaggacgacgattacggaggtagggagggaggggaaggagatgaggagaagtagaagagaggagagggtagctgaagaagcgagagaactcgatctcccaaccctctctaatggcggtggctaacttctctacgtgacggtttggtaccaaagccactgattccgccatttccctcctttttagtttcctactctactatttcactatttataacttctctaagggtgaactgtattttaactgtattatattatattaaatattattttatacaatatttttatttatgtgatattaatttttatcgacacttaaatatataatatttagtataaaataaaatttagtattgtattatataaaaatatgatatataatccaatttaatataatataatacaatacaatacgacctaatacgacgttccaaacgagatctaaaaattcaaaaaaatgatttggtacacgttaaaattcaataataaaaatcataatcaacctatttaaaatatatagtaaaattttgaaaaatttgaaacaaatttaatacactaaaaataaatttaaacaatctgctacaagcttaactttcattttataggtatttctttctttatgattatatagattgtagttatttaaaattacatatatattttttataatttactaaattttagagttagccctccttaaaaacttgcaaattcttccttctcttaaagcatttgcatatgtttatacatacataaatatattactaaaatatttttaattattattaattcaactctttactttttttgaagaattttaactattttacttatccaatactattctatttttttaatttattttattatttgttatagaataaataacgatataaatatttaaagttttaagcttgtaaacggcataaattcattttttatttttagtggtattttgtaaaactcttatttttctccaattttattaatacagattttattttaaatttatcaaaaaatatttaaaaataattgatactagggaaaaaaaacaggaatattctaaaaagagaaaaatattacaacaatactgtgggccggcccaat

SEQ ID NO: 218948 - DNA, 2686 bp, Cannabis indica
aaaaaattcctgcaaagaatcatatcatatcattatcgacatctcaatcttagtcgtacgtcgtcaaatcatataagattgcattgcatatagaggagtatatgtcaaacgaataatggaatatttgcttatttatacttaattacccaaatttcactcctacttttcaaccaatactaaagatatatttcaattaaattgtgcacaaaattatatacgatatatattaattaaaattggaaaacatgaagataagtaaaatggagtaagggatttcatttaatcaaaattatatactatttgtattaatgaaaagtaatgaagagatgtgcatgggtagtgaaatgataaatcaacttttagaagtggcattggcatatgtttactttaagatacagaaatcatggcatcgatttcactttcattattaacattattgtgtgtgtgtgtgacaacaacaacaataaaatagacagaatcgagtttttacactaaaacacttgaattattatttataaaagaggatcagattggccaaattttcactttaaaaaaaaaaaatactttataagcaaaagaatcgatttgagaattggtgtagtgtagtacacgaaaaggattacgcatgctaaatcagtagtaggcaattatcgaacaaagtttcacttaaaagaagatccaaaagtaaaagatcatcagagaaaacgacaagaaaagtatcaaaaaattattattgttattgttgttgttaatggcaaaagggatatgaaacttcattttggtctggcgtgaactcccacttggctcttgcaccttttcatcattttatgatcaaaaatttgcaatttgcattaattcatggaaatgaattaaaatggcaaattgtttgtatttagtgatttggacaagacgtattgtgctgctgcttctgctttcggcttccttaccttctaaataaatgtcaatttttgcggctctttttaatgattacattatttactaaatatattaccaggaagggattgtctcctactctctcttctgccatgtgttctccacccattatgaaaattatataatttcacatacttattagacttctacaacacaagagttaaaatataattcttcaccataatatggagaagaagaaagaaaactaaaagagtagagctattttatttcttttttaatctttgcttaatagagctatttcatctttaagaggctccacatttgaaaaatatttgtgtttgttgacactgaaaagtgatcaactacatactaactgataagcggtagcggccaataaatatatgaacaaaaactaaaaaaaaaatacaataattatagtagctcactccctttattccgaaggtaatgaagctacatttactcagaaattttattatatatcacaaaaagctaattgccgtacaagagaactcaaaaaaaaaaaaaaataaataaataactacgtatatagcttaacttcccaatttttagagagagaaaatatgaaaagagagaatctttcactttccaatttttaaagagagaaagtatgaaaagagagaatctcggaccttgtagagaggaaggaaagtgtgtacaatgagctagggagcttttcttttacatgaaaggaggtccaattaaactacaataaaataatagaaaaaatcgcacaaactactacaacaatgggctttagagactcttatttttgaggaaattacattgtatacctgtagagggtaaaatctataatgatcaaaatggaaggatcgcgggcactgacaacctgtagaacaaaggaaaaaggaccgttgagaccttgggataccaggatggtgccagccgaagggactccgccaatcaagtctgtaaataattcaaataaagaatatctgaatgtaaataaagaagatagaaaacgtatatttccaccgtagagtgatggagaaggactggtaataataatggtaatgtattgcgtgaatgcttgggtgagtgttcagtgagtgaagatgagatgagtgatggttaaattcacccattctaaagaatgaacgtgggaagtggtcttcccctttccaggaggaaggatcgattcttatggttcagttatatcatttgccttagattggtcttgtaactactgagtcgtttgggccttgtattttagctaaagcccaatgtatattgggctatatttacttacttagttttgaaggattgtaattctgagttgggtcgtaatgggcatttgggcctaatgcaatctttggccaatacagtttgtcccttattctttgagtcaagtgaagttggcttgaagagtagttgtatagatatggaaaaaaatcgaataaatgtatcaatgataattttaattttttgttgcattgattcacttgaagaatatataaatattgagtttgcattagtagtaatttaaatgagtagtatacatgtgaaataaataatatgtggttaaaaataataatagttaatatgatattcttaataataacaataacaataataataataataatatgtaatgtttgctaatggaactttatgcattaatgacgtcacaattcacaaatgtataagtgtgatgttttcaatccaatatttgttttgacaaagtaatgggccttgaatttttttttttttt

SEQ ID NO: 218949 - DNA, 2553 bp, Cannabis indica
tgtgacacaattgcaatagacacaacttgtttggcaaacaagtatgagatacctttaatatcatttgttggagtaaaccaccatggacagtccatattgctgggttgtggctttattggacaagagtcagtagattacttcttatggatgctcagggcatggctgaaatgcatgttagataagcctccacgagttgtcatcaccgaccattgtaaacccttgcaaacagcaatttctgaagttataccgaaggctcgtcattgttattgtttgtggtatattatgcatagagttccagagaagttgggaggattgaagggatacgaaacaattaaaagacagttgaataaatcagtttataattccttgaaaattgccgaatttgaaacttcttgggccgacatgatcaaacggtatggcctggaaaataataaatggcttcagttgctgtatgaagaacgacagctttgggttccagtttatttaaaggacatatttcttgctggaatgattcctattcaagaaaacgagggtttgattgctttttttgatggttatgtacataaacacacatcatttaaggaatttgtcgataaatacgatctagctctacataggaggcacatgaaagaagtcacagcagatctggagtcaagaaatacaacccctgaattgaaaacaagatgtaatttcgagactcagctatcgaaaatatacacaagagaaatcttcaagaggttccaatctgaagttgaggggatgtattcctgtttcaacacaaggcaagtcaatttcaatgggccaattatcacatacattgtcaaagaaagggttgaagttgaggggagtgagaaggaagtcaagtaccatgaggttttgtttgagacaacacaagtggacgtcagatgcatttgcagtttgtttaattacaaaggctatctatgtaggcacgccttgaatgttcttaactacaatggcatcgaggaaattccatctcgttacattctgcctcggtggagtaaagatttcaagtgcaggtatcttcttgaccatgactctagtgattcttcagttgacatgtataataacccattgtactggtataataatctaattaagctctcccttccggttgtggaagaaggggcacaatcgcaagaacgttataagacggccttgcaagaattagaggcattgttaaacaagtttaatcttgtagaggataacatagtgtaacataaataaaatattaacttggcaatctgctacgaacaggaacagtaatatctttccacgaatgactgattcaagtcataggaatatatatttgaaattctggtgtcatgattgactgtaatggcatcctattgtgtatgaagccaaatgtcaaatgttttccaagtataaattaaatattaataacaataaaaatggaatttcacgaattaataacataatggtacagtgaatgagcttcaagacaacctttttctcttcaataaaggagaaaatacagatttcatcttcttgttttgattaattttgagctttataaatcaaaataggagtcaaatgcttcttctcttctttttcttggcgcagctggactattctggacttgaactagagatctcgccggtgaagtaaatcatcgcacttatggtccaaccaattgggagagaatcaatagattccttttctggattcaatatgaaccagaacatgtaatcttaaaaaatacacaatatcacccaaacaaaacagttaagactcaaataaaccgatcagtttgccacatgttgggttgaagaataaataagattgagattgaagtacagaataactccagatttagctttatccccatgaatgcatgataaagaatttagttagtagccatcaaattaaattttattaataaatgatcaaatactcatggattaaaatcacttgactacagttaaaattagaggtgttcacggattggtttggttcgaattttcattatttttgaaccaaaccagtataacggtgcaatactcataataagagatatatttaaatataaatttaattagtttatataaaaaagtattcttcaacttctcctaaacaaaaccctaattaaggctacaggtggaaaaactggcagctcaaaggtattgggtcgaaaacgggcccaaattttttaattctttacaaaaaaaaaaaagaaaaaagaaaagtaaaaacaatacctgcatatcaatgacaagcagagctgtgcgcttccatttctcagactcagtcattattgtctctttcaaagtcaaactatcgttttcgccttttgaaaagtaaagaaagtactagtcgtaataattgtcgtacatatctctatctctatatataataagaatgaaaagtgctttccactccttcttttcacctgcttagaagaaaaaaataatattttatgataacaactacttagtattccatgctaattcatataattacaagaggcatcaacttgtgatttgttagtactttgttttcttagtattttgaatg

SEQ ID NO: 218950 - DNA, 4028 bp, Cannabis indica
tgaatgaaaggcgaacgtgaacggcactcattgaaagaaggtgtaatgaacggctgagatgagatgatgagatcaccgacgacagtaatgataacggtcgtcgagttccaccaactaggccccacaccccacgttaattgatttcctccatcttcctctctttaaacccccccaaaacaacaaaattaaattaacaaatcaactgtgaggactgaggtgggggaggattcaattcaatcgcaaaataatgtcttggcaatcttacgtcgatgaccatctcatgtgtgatatcgatggtcaacatctcaccgccgccgccattattggccacgacggtagtgtctgggctcagagctccaccttccctcaggttctttctccattttcctctgcacctttttttttttttatttctaatcagttcttgttggatgtgatgtgagtagtttcgaatttcgattaccagtaatatgattgattggtttggtgaagtatggagtgtattcaaaatcgcctctaatatttacttgaaaatcataaatcaaatggattgtgtcattttgtaaatttatacaattttttttatttctttcagtggatcattgttcaatatgattttgaaaattgaaatcgttatgttttttttgaaatcgttatgttaagtagataatttttttaaaacatgtatacacttatatgtgtgttgtcagttcggagcataatttattgaatttaatggtttttgcacctttcattagtagtaacgatgggtgttttgggtgaatatttattggattgtgaaattatctgatcgtggacatgagagttgaaaaactcaattttacaaccaagttgtgataactttattaattcaactctgattgatacagtcagtgacgaaatttatttcctttatgcagtttaagcctgaagaaattgctgcaatcatgaaagattttgatgaacctgggtctcttgccccaactgggttgcacctaggtggcatcaagtacatggttattatgggtgaacaaggagctgtcattcgtggaaagaaggtttgtcctattcgttggtgttcaccctacaatcgttttctttcattatgtgatatataactaattttcatattacattacatctgttttcttatgcctggttgaataggtatgctttaaagcagtcattcggtcattgtttaaaaaatttagctatttatataataaattgctgctttacgagtgacgagtgtgtgtgcacgtagattacagatcacttgctgctaaaactacaaacctatgccctcaaaggaatataacagatcttaatgagtcccacttgtggaccacttcatacaagcggctgacctttttttattccgtctctttaggagactacttaaaattaagcacttctacaaaacacaaacagatagatgccagttgaataaagttttattagctaactctatttgacatctgtagtgaattattaggtccattataacttatattcacactagcacaccccacctgggcggtggggggaagagaacagattataataagaaggcccatttttgccttgacatttgatgctgagcgtgaacaagtatgcaatgtgaagtcttactaatgttgttttatgattcagggtgctggtggcatcactgtgaaaaaaaccggtgcagctatgatttttggcatttatgatgaaccaatgactccaggacaatgtaacataatcgttgagaggttgggagattaccttattgatcagaacctctaaattatctcaggctcggcagctttccatgtatagatctttctttgtcatgtttgtgcttgcattgttttcctgctatggccttgaattggtactgaagttgttcttgaaataatcattccaaagcaatgatatattcgtcgtcttaggatcgttcgtcaatttcttcaaattttcttattctttgatttgtgtatctgttattgctatacagtttgctcctgttgagtatttgattagtttgctttttttgttttataatttttgtaagtctttgaacactcatggcacttggtatagtaagataaactattttcttgggatgattaaatgaatttatattgcataattttgtacttttatagttgaggatttgataatattggtgtcattgcgatctctctttagagttaataagcctgagggcctctgaaattaattgggcaagagaccaatcatggggttgcaagccattgtggggtaaatccaccaatggtttgcatcatctttccttagcttgctcacaagcttggatgacagcaatggtttctccttccagggtaaggagcttcatacaaaatagtgatccctccatggttctgattgcaattagtgcatgtttttaatttttccttttcaaaaaagtgcaagatgttatgtatattgtttatttaatggcccaaatcggaataactaatacaagtatattcataatttaaaaaattaattaaatttttcattcgaccagggaaaatggaggattcatactctaattttttaaacataatttaagattataaacattagatcattttttgaaattttaattgaagaaagtaaaatgtgacaactatgttttgcttagagttgttcatccaattcaatcaactattttgttcatagtgcatctgatttttattaagtgcagattttatactttagatctcatcaaatccgcacaatagctcaaattcaatctaatcaaatttgcaaaagtgtgaattgaatcagttattttaaatttgttacttttaatattaagttatttaatagaggtgttcattaaacaattaactcaatccaatctggatctaatctaattcaatccacaaaatacagatatccatacttatgaaaattggattggattagaatgtctaaactttgtacttgtgcagattaaatgtaaattcacatgtaatagtaatcgacctaatccatacagattgatatatattaaaaaattatatataattaacatttcaatgtaaataatagtaattttaaaatctaataatttatctaattttgttgttagctatgctgaaaaaatattttaaaaaaaaattattaaataatttcatataaaaaaaataactaattcaatctgcacttttatagattggattggatttgagttactataccgattggattagatccaaaatattaaattcatacttagtgcggatcaaatacattatgagtaaaataatatggattggattagatgaacacccttatatttaatatttattaaaaaaaaattcacataactaacaacaaaacaaaacaaattattgttcttttatgtctccaccaataaattaaaataaataaaataattaattcaaagaaaaaagatgttgtgttgaaagaaatgattaattttgttataaactatatttttcatatatataataatagaatacaaatttaatctattaagttttaaaatatatttatattatatgtagtagattcataaattattatatttttgtattaaaatattaattgtatatataaattttttaaacatgcataaatatgtgtggattaaatcatttacttttacatatcaatcaatattcaattcacactagattttaaattttctaattaaactaaatttgtacacatttaataaattgtattggattgaattgaatcaggtatttgatgaacaccctacgaatttagtgacccaaaaagttcataatattagttttggctttctacaccacacactgaaatttcttatttttttacttttttttactgtgggacagaattttttttaaaaatactgtgtaagttttgtactatgtattttattaagttttcacggttattctactattattttttagttgttccactattattttaattattctgttttgttgttttaccgttattttatatataaaaaaagtatttttgtgaaaaattccgtgtga

SEQ ID NO: 218951 - DNA, 4973 bp, Cannabis indica
tttaagatttactaaaaaaaatttaattattctcatttctattttaagggggtacgatttaatagttgtcaaattttaagggacaaagttgctaattttttaaagacacgtcaacatttaaacgaaataatggaagggaaactataagaaggactaaatttttataaatgtaagagttcagggggaattcttaacaagccgtatattttaggaggcataatcagtattgtcaaaagttcaaggggaaaattgctaattattctattgtaaagcatgatttattacctaatttcacgaggtctaaaaaaaaatataaatgtaacatgttaaaatattaaagtccccacactaacaagaatgttttctcttcgtcactctcttttgttaatgaaagtagtcagccgtcgtcgacctttgttcgttttgccagtggttttctatgggtactccatgtagggtggtgcttcatgaagctttggctttggaggatgaggatgacattcctcaattggttttaagtgcgtctaaccaatgggagggggctgttcgggtagccaaaatcttggttagtaagatttgtacatcaaaaacggtggtcagggaacatgttattcctttggttggtatgttgtggaaacctaaaggcaccttcgaggtggagtcgatcaaggataatcacattctgtttaggtttgggttagaatcggaatttcatcgtgtttttattgatggcccgtggattcttgatgataatttgattgtgttagaaaccccgactgaagtaggagagtattctaatcaaaatttcaatctggtctcttttttgatttaattacatgatcagcctatctattgtttatcaaaatgaatgggttagaaacttggtgggatgattgggagcatggaggaggttgatgtgaatgctttactggattgtcttgggaactttattagagtttgttttttcccagatatctctaaacctcttcctcgtgtgatcaaggctactcttctggatggggaggtggcttcaattattgcggtctgttttgaatgttttccagagttatgtttcaattgtgggttctggggcatctattgttaattctattttttcatatttagattgacaatttttttttttataatttgtttataagatttcagctaaggtgcattgtttattctcatttatttatttaattaaaggtgaattaagtgtcaaatttttttaaattgggaaaggttgacacaattagtaagttttaatgaagaatcaattctttatcttgcagatgtgtttattagtgtattatgatcttatattaattttctaaatgatttgatcaaatcttgtgtgaaaaaaatcaaaataagagtttccttttctataaaaagagagtcccacttactgctacaattttgtaggtacataagtaaaaattcctaagttgattgaagatcttttatagggaagtttttttgtgagatgtggtcttgtctaggctgtatatgagttgtctaaaatgtgtatatttattataaatacatattttagtagttaggttttgtatctcttttattgactttgaatattattcatattattagaaaaaaatgtctttgttttgtataggagagtgagttcgactctacctctgtgttatgtcttttgtattgtcttgagtctgtaatcaagtctacaaaaaagaagaatgacaatgcctacctttgggagaatgttcttcaagctttcgggagatagctttttaagtcttgcctcaggaggaagcaagcacttttcaagcagatcgaatggagtcaagcatttgaagttttacaagattaatttgagaaggtaaaatacatcaagcttgcaacatataataaaagagaatttatttatgcataagtcaattactttgtatttttgagatctatctaatgaatccatctctcggcgttgccccttagactagtaacaatctgcaaggattgttgataccacatatgaaaatcttgtatatttttatcttttttgtactgtttgttttctgttctattttatagttacataattgtatgcagtagctacaaaataatttttttagtaccactattattattctacaattaattaattaattggtaattataaaacataaaatttcatctattatgttagtgcccagtatgtgtgatcatgaagaatggtgagccacgttaccggtatggtgattagattgaagctcatgtgtcgataaagttctttgctgcctctaaaaggtctcctctaggcgttactaacagatcaagtagaggtaaaggtggaggtggtggtgagaataatggctttgtttgtggctggtacgaatgtggcagttgaccctatttttcaaatgtttggacaaattttcggtgatgatcttttaagaaattctagtaaggaaaagtctataatcacggatgccatttttgaaggaagatgtgatcgtgtctcctactattatgaaaatttgtgattctctgatattacatgagccttgtatggagtaagagacagtaaaatgtcaattttgggtggaacccatttcacctatcactcttgtgattaggcatggggactttaccattcatttggtaccaaaatcaggaatttttttagagcataataatattttggatgaggcttataatggaaaatttcaacagttactcaatgaattgactgtgaattttagtaggcttaataagtataggcctaaaagtgatgtgaattgggctactaatttctctttgactaataaaattctacctagtatttctcacgtggagcgcatggagccatgcacaaaagactctcatggacatgttcttcctttctcaatcgttaaacattcttgtgttggaccttaaaatagatcttatatttttgtctgaaaccattagtttacgacatcaattggaatggttgagggtaaaagttatttttgttggaaaagttattatcgagagagaaggtagaagtaatgggttatgtcttttctagatgtcaaatgttatcgtgaatcttattaactattcttggcatcatattgatgtgtttgtgtctttggcatatgggccaaagtggagatttacttgcttatatggggagcaaaattctagtcaacgaggcatgttttggaatcttttaactcacactgggctggaagttacgggtccttggtcgtgtggaggagacctcaatgaaactctagaaaataaagagaacaagttggtgtttcttgtggtagggctcttatgatagttttcatgaggcatttttttcatatggccttttccattttggttttgaggggcctcctttcacgtggtgcaatgcccacggttcctccattttataggagagacttgatagaatgttatataacttggattacacttctaatttcccacacacggttgttcatcatatgagctattatattttggaccataggcctttattgactaaaatcattaccacactgtcgataggaggtgatagcaatctggttagaaaacctcatttccattttaaagccacctaggcttttgaggtagattgtggggatcttgtgaaggatcattgaattaataatggagagtctttagtttctactgtggtgaataattttaagagtgatgtgtctgctttgtctagttggaataagatctgttttagatgacattgtcgtaatattcaagctaagaaaaggagcttgcccatcttgatttttcttttttcgaagaaacttggctcatgtataagaaggtggagtctcaagttgataccctctattagaaagagcattttcgggcgccaagataaaaaacaaatggctcgaggttggtgaccataattcagcttactttcataagtgtgcttcatctcgtaaaaagaaaaatcacattacggggattgaagatgattatggtgtgatgatatcttctatagatgcggtgagttttatgcttcataattatttttcttctttgttcaatttggattgtccatgatgatttttgaaaagttctaaattatgttcaaacaaggatgacaccttttatgaatgactctcttattcgaccttttgtggttgaggatattagaagagtcctctttcagatgcatcccaataaaatcctgatgcctgatgggatgacgagtgaattttaccaaaaatactgagatgttgttagtgatgatgtggtggtagcttgtctttatgtggttaatgggaatgagtatttgaaggaggttaattaaaattttattttcttgattcctaaagtggataattccacaaggcctaatgagtttagacctattagtctttgtaatatcttctacaaaattattacaaaagccttgactaatcgctggaaaaaagacattacaaaagtgtgtttcttcctggtcgtctcatcatagacattgctcatattgattttgaatgtatgaattctcttaaacactggcctagaagaagtgttaggagtcttgtcattaaacttgatggctaaggcctatgataaagtagagtggtctttcttgtgcgatatgatgagaaagctgggtttcatgagagatagattcaagttattttcaaatgtaacttttcttgcacttattcttcaattgtgaatggagatgcgtgtggaaatgtgactagggctaaaaatttagactaggtttggcctcaacacgaccgtacgactgactattaaaaaaactcgatcattacaggtaggtcgggttggtcctgttatacatacgggtgggttcacattaggggtgagcaatggtcggtttggtcggttttttacacacaaaaaatccgaattcggttttcgattttaatagttataatctgaaaaccggccgaccattatataaatgtaaaaaaaccgaccgttttaatccacgg

SEQ ID NO: 218952 - DNA, 7060 bp, Cannabis indica
tcacattggattgctttaatgtttttcagtatctaaaaatttatgactgtccggtgtgaagtaatttacatgatgcaatatattttctatagtaatgatgtatattgggtttaataattgtctgatatgcttcctcatgattgttttgtctccctaaatgatgtcacctttactttactttgcattgttttgtttgttttgacaaccagtatagaagcattttaattgttgattcttttacaatatggtcccacaattggagctttcaagctatatttcgttcaacctatcaaattatagtttcctagagaccttgattttttggcttcttgtgctcgtcatttatccttgtttatggagcactttttttcttatcagttggtgattgcagattctactcttttttcttttttgaggggatcttacatcatctgtgcaactgtaaccataggctatggctattcctcatatatttccattctctttttttttaaataaaaattgaaaccttggcattttttttcttgcatgccactgttaaaaaaaagagctcgatctgatgatcttttaattatttaataactgttgcttggttttacttctagtaatataacattcaagtgtcttgtaaaatgttttatgttagatgactcgactatttggtgttgacgatgaatttggagaagatgctattttgggaaagcttgaaggcatgaaagatgtgattgaacaagtaaacagacaatttaaagacccggtaagactggctacatgaagtgatctgaattcgtttttgtgaacttgttagtttaaaacattatatactttatatgaaagaacttgattgaagcacctagtgttagttatttgctctctggtttcattttgcctttatgtttatctcttccatttgctctttggtctactacatttcgtctcaatgttctatccatccacacttttacatagtctatcattttatttctctgtacctacttatggttatttcatatttgttggtgaccgcttaacaaatttatcttctcaaaaaataagataataataacaataagcttcattagtgctatgttgaatttcatgcagatgcagttcaatgttgaaccttcatataggggaattaattcatatttcactgtttgcaggacatgacaacctttgtctgtgtttgcattccagagtttctctcactctatgaaactgagagactggtgcaggaacttacgaaatttgaaatagatacacacaacattattattaaccaagtactttacgatgaagaaggtgcaacttcacttcattttgcccatttagttctcttttttgaattgctttgacagaagctaagctaatacataaatcccttctgttgttatagatgttgagtctaaattgctcaaagcaagaatgcggatgcagcagaagtatcttgaccagttctacatgttgtatgatgattttcacattaccaagttgccattactgccacaagaggtaaactacactgccttaatttatatcttctataagctcacctacaggatgcaatgtagtggtttttgagaactaacaataattgaaaactggcataactgttttgcgggataactaaacagttgtctttatcaataatctttacaaatgggtatatttcaattttttgactagctggttattatggatttttgtaggttactggagtagaggcactgaaatcattttcgcagaaatttttgacaccgtatcaaccttgcatcagtcacaccacagtggaagatttagagcgaaaagtgtccacacttagacaacagttagaaggtgctgaaacagagcttgaaagactaagaaaaggaaagcaaaaggcctgagtctgagtatgccattccacattgatgggctagctccttaataactcacaccatctgtcactgcctttattgttgtctaggtagtttgatttggttctctcactatattctattctttttctttcttattgtacttaataattataagtcgaataattaaattgtgaaggattcactccttgctgataaatgtgttgttacaagtataattcaatttttttttgaatatgagacaatatgagacaaaaacccagcgaagagcaattaaaacaagactttaatttagctaaactatgggtcaaaaagcatattgatgcttctacaagagaggggaagaaaagttatttatgatcacccttaaaatagagaattgctaaaagacaattttggtacttagctcttttctcggtatcatattattactggtaccatatcacatatagaaagtgctaattactattggtataaatgagttgtttcatatggtgtaatattttcataaaaatagtaaattgttttctattaatactgtagacaattttaaatcatttcaaaggggaaacctgtaatcatttcttgcaatcaatttaatattatgtaattcatttaaagaagaaaaaagtgtaaaggcattattaaatgagtttagccaataggatatcaaataaaatcagttagccttctatagcaaatgtttagacaatcctagctaaagaacatggaacttggctgattattcatacaatataatatcattaagggtacaaaacaacatgccccaaaaccaaccaaccaatcaagatgtcattaggcaaaatcactcttaaaagaataggcgtactcctataaaacatagtattatctcttcttttttctgaacaaaaagcatagcattatctttattccaaaacgatgtggcaatagcttaagatactaccccccgtgtagggtcgaaataaagacaacaacatccttctcttccagtgtggtgttgagttggccactcaactcccagtcacagtcattcacaaggactagaacaccaggtctcctgcccaaaaaacatatgaaaatctgagtaatctactaataaagaaactaataccttacactgttcgtaatggtgttaacaacagaatgttaaatggtaaaaataagttgttcttagaaacacatcaaatgttctcaagtgttaggccccatggttcgtttctcttatactattactaggagtggaaataaaattcatacagaggagtaagttttgtagttttggtgagctggctgtttgagtgagtagaagggtgtttttgtaattccattgtgtaaggtgagttgcccatttagagcgtgtctaaccactggcagtgtgtgatttatgcaacaagttggtaattcttagcatctcatggagagcaatggctctcaatctctgtgagactaaagtctccttttgcatcttttatcaactatagctcaccaattcagttcccttcttctactgttttcactactctcattaactctgtggttggttttattagttattttggtttgctttgttgtattggaatcccagggaggctctcatcaggtatgcatatttcctagtaatttaagagatatagtatatattttgttgatatcctatgaacttcaacgctcatttagccagctctttgccaactctgagacttgaacctcaagactaagtgaaattaaacacatggatggacctcaaactcaagtagccctccagatttaaacaagggtctctaatcctcagagcattttcatttccaactttcatggccagccataaaattcaatttataaaaagtttaaacacactactccaaattaagccgagaacaacttacactgtgtctcctttcataaacatctcaggtctttccttgatcaaattgatacgcacccaagcaagcaaatctttcatagtcaactgagaagtgaaataagattttatcatacaactaaccacaatactcaacctaaaaataaacttaatagccatttcagtctatcaacagaagttaaattgtactttaccttctctactccattttgagtttcaacatcaactttatgaatctttttagattcacaaaggagttctaatcccccactgcattcaacaagtaaacagtaatgaggttccgacgaaacaagattaaaatagagaaaaagatgccaatgtcaaatacgccagatcacacatgatttacatatacacataaaacccatggaacgtaactttacagaaaaatagatcacctaccaccaatggccaacggtacaagccaattaaaagtataggtcgcacataaaaagccgtttcattataatttttgtgtgtagagaaccaaatcatcaatgacaatttatcaaaactattcatgcacaaattattaggtacaattcaagaggttcaatcaaagatttcactcctcaaataaaacaaaggcagaaataattctgaatatcgtttctcttactgtgccacccttttgcataaaattcaacttggtatcaccaaaaatcaattttccaataaatatttataatgttctttgattgtacactcaaaattcttgatacgtataataatttattcatacatgccgtgtcttgattattcaaacatatacagttttaaatcaactacaaaagttgatgatactgctaagttacaaagcatataaaacaaagttagttacccgaattccagagtcaattgcatgttccctgcagcgttttaaattcctaagaaaataagaaaaagaaatagtgttgtcagcatattgaggtcctcggagacccatcagaaattagtagaacacttagaacaacacacagaaatttgaaggaatgtttaaaaaccaaagatttctttacgggctctctcagaaacaaattcccaaacagttggtgtgcacaaagaaagatttaagcaaaacacaggtaaatagaaaagaatacaattagtcattagacaaacacaatgttcaacaaccaaaagcttctttacggactctcttatagaactttcttcaaacatttaacctgcacaaagcaagactaagaaaaacacaaaagcaatcaaaagcaagacaaaaactaattcttcaaacaacttcgcgtgcacaaattcatccttaacaataacatcctactgttgaaaataaaaaaactaccattggtgtaagaaatcaaaatacttactgtatcaatatttcgtgaacaaccgtgaagattgatgagacaaattttccaaaagtggattgacaagtatgattcttcaaagagataaacgctgctttttcttttgattattccggcatctttgctttctttttattatatttgggggcaaaaacttaataattgtgtaaaatgttacgcatgtgaaccaaatccaatatttatttactaagttgataaataaaagacaaaaatattaactaaatccgaagtaaaaatacatataattccgttactaaattcggtaacaaatcagtggaacagactctaaattaaaacgccgatcaagatataaaatagaagccctagcaaaattatgaccaaccctatttattgatcgtttaacaaaataaactgaaacattagacaactgaactcacacaataaatttttacaatcttgaataatactattgaacaaaaacagcataacaatagaacttcgtaaagcttgtgccaccgtgaggcaatcggtctccacatgcactcccgaccaacatttttctttgatccaactaagcgcctccttgacccctaaagactcagcaataacagggtcaatgacaccatggttgaacaaagaacacccctctaagaacagacctttgtcatctctagccaccaaatcgatcacatggctatgacctccttcaaagattgttgcgtccacattgaccttgattctattaactggtggaactgtccaacgcttagctctgtcacctgcctgaaaaccagaccccgacgactctaaactagagttttgagcatttctccattgatcaagatgacctttagcgtaagcaacaacattgtcagccgaaaaacacttaccatttcaaacaagattgtttcgagccccccaaacaacccaacaaatagtgacaaacaagaacttctgctcgagatccaagatcttaaaacaattcatacatcaattaagaaaatatgtaccaattgtacccacagttccaatccccgccctattccataccaactatacggtctgacacgtaacaaggttgtgcaaaatagtctattcagcacagtagaaaagaggacaaagggaagaaacatcaacatgtttagtacagtgtcaatgttggaagacaagccatacaagcccgccaaagtaaattcttaatttttggaggaacttttaaactccaaagtttcttccaaaacaaagagctttctaaatcatcccacccaccacgctgttgttgaagaagattgtaggcacttttagcactgtaaataccatatacttctcatgaccaagttagatgatcacttgcttgagttaaattaatcgggatgctgagaatcaatttacagtcacgctcgataaataatcctcaagaatttcctcatcccagctaccaccatataccctcatcaagttacagacctttgccgttgaaaggaccgagtgtgtggattgcatgcaaggatgcacagggtcgagtagccacaattgagataaaacattgataagacttttgttacctacacaccatcgaacccccgccttgaccaattgtttagattctaagatacttctccagataaagctaggggttgttatcaagggaggcatctaagatagagccatgagaataataccttgcttgaaaaatgtggccagcaagagagttacatcgagtcaagagcctccagccttatttttccaagagtgttaagttaaagtccctcaaatttcgaaatcacatgcctccgctccacttagatcagctcaatctattttgcacaatttattacctaaatacctctacacgcttatgtctacatttttacttacaaagttggttttattactcaaatctaacttagtcatcattccatccatcatcaatcaaatcctactctctt

SEQ ID NO: 218953 - DNA, 2224 bp, Cannabis indica
ttatcaatagtccaaggaccaccaccaaagactctctgcctatcctcacgacagccaaagaaaaatcaaaaaatattcttagaactcaactcttcaacctggaatctatggttaattttccaaacccctttcattgctctcacaattccttctttattagcaggtctagggccaataactttcccaatcaaacacaaatcaagcctctttttaccttcttcaaccccagccttattgagaggaagaaccggcccatccccttcatcaagaatcaaaacttcagctagccgattcactaattccaaatccataatcctatcactgagaatcagaacacacaccagaaaaacgacgcaagaaatcgcaaaattaacccttcccatgaagggactgttcttcccaggttgtttcagaggaccgaaacaaacgggagactctaattccaatgctttagttgatattttagttgatatttgatattacttatttttagtatgggataagtatctcttttttgacatacaaagagaaaaaatattataattaattccaataagctttcccaacaaaatctaccaaccaaataaaaattgtaagtaaatatgtgcatcacgtgccgacttagcccatattttaaaaagtttatgaaaatacgagtagtattgtatcgtgcctataaatttataaggtaggctggtattttagaactgtgttttactcttgatgcaaactaatttatttttttatatgaatttgaattcgttttttatatttttattataattaatgaactaattactaaattatatgtattttttataatttttcaataataattacacacaacaaaaactataattataaaaatttaaatatttactgtcatcttatttgatttgataattgataaataaatatttcttcttcttcccaacattattattattattattattattattattattcttttttttattatcttttagatttgtgaccttaataaatagtatcaataaaaagaaaaggttagtacttagttggggagtttgatttgttaactatattcacggatttagctacacaacaccaccggctaacatattatcacccaccaaaaccaataaatgtatttatttcattaagacaaataaaactaaagccggccatatatatttaagacacacgattttgtctcgtaatgtatttttacagaatgtatttcgtgtatattaaatgggtcttagggtacattagatgggtcttagggtacattaaatgggtcttagggtacaatagatggttctcggggtagtctcaggatacgttactattttataaccctaattacccctagatcaactccagctctcatattaaataactatctcatctaacagttgtcgcacatcacggaatacattccgtgaaagtacatcacgggacaaaaccgtacccatatatatatttaataaaactttaccttatttcaatcaaaaataaataaataaaaatctttaccttattttgaatattgttatataaacgtgaaaatttagatttgacgtcattattattaaaagaatgggatttaatttttttaagtgtgaaatattaaattccagagttatatattaaacatcatactcattttttaaaaattctgtgttgaaaatataattcaaaaaatattagacgagtgcaagtttttctttttatacatgatcaacatattattttgaaactaagtcataatccaattatagatttttcataattaaataaatattacattagtgtgatgatgaaatctattaaaaaaaaggtattattttgaaagttatcaaaatatgttattgggtgattctacaatgcacccccttaaaagagatgtactgatgcacccttaacttgttttgtcatctagaagaattttttagtctaactttttttcacattcatgtacgttataggtatttaagatatcctacaaaattttgaaaaattcggaataatttaccatatagaaaataatgttcaaacagcctattttacacgcgtataaaataaaatagtcacgcgtgcaatacactgtttgaacatagttttcgacgtgttaaacttttccaaatttcttaaaattttgcgggatgtcttaaataactataacatacatgaccatgagaaaaaatttgactaaaaaattatttcggatgctaaaaca

SEQ ID NO: 218954 - DNA, 2349 bp, Cannabis indica
atctcaatagttcaggaaaaatttttaacgtctagaaaaattcatggaacataatttagtatatattaaaatttaagagtaaaaatccttattaaccttaaattttattgcactccatcgtattattcttattgtaatttttatttccattcatcccaatataaaaaatgtagtcttaaagttgttcccttaagctcctaaaatacacaaaccaaaaaaagaaaaatgtgacaataatgaataaatgcatgtagatgtggcttacatcacaagcataaataataaattcataatatgtattaatcaagaatgaaattttgtttcatatagtattattaaataaagggcattactattagtagccaatagcaacaagttttgaggctactcattgtttgtcttaagaaactacaaactgtctcaataatgaaaattacttgtattgtattatgtgcaacaaagtttcatatgatgaaatcaatgcattcattttgttaactattacttctatattagattataaaaacaattcaagtctttgatttagtaggtgggttttttaatttttatcttattattagtatttttttaaataaaaataaataatataattgattgctgcaaaacaggcacttctcaagtgcacttcatttcatgtgtttgggttcagagattttaatatataaatatattttctcacaacagcaacctaattttagggtgtggaccaacacaacataacaagttagtacaatttattaaatggtttttgttgacactttttttttttttaaaaaaaaagttttaattataatttaaggattattttaaaaaaataaaaataaaagaatatggttatacaaaattttaaatatatttacaatttttaagattttatttacataaaatacaatcttttaacgtatttttatattgtatatttattatttttaattatttgtacattattttttttatgttgttttgatttcattttttttttttgttattttcatgtctttttttattatttttatgaataacataaaattacaaaaaaaaaattagtaaaatctttagagttgctcaagcaacaaatctctctctatctacaaatatcgaaagagagagatgtgaaagtaataacttatggctgctctcgacatacggcttttacgctactattactatgagcggtttaaattagtttgatttttcccaattatctcaaaagtagtaatttatgtaaaattcgtctataatttattcattgaagaaactcaaactgcacaaatgtacaatattctattttctacagaatacatataatggggtttttagtttgataacttgcaagaaaaaaaaaagagagtgattaaggtcggagatttgatcttttttagtaccttttggctaatttatttttcttctttacaagttacttaatttcccaataaatagttagaggaattatttacaaaaatacccttgtttgatgtaagaattttaggttcatttgggaatttgtaattaaaataagtatgtgagacctgcaatttttttttttttttgtagtgtgggataaattatcacacatttttttgtttgaaataaataattctacacaaaatactagctgtgatagtattatttggagggcttaaattatttatatagtcctaagtacccaacataaaaaatgacaaataatatattgattgatctaaaaccccattcccatgccccaaacagaccaaacaagattataaattgaatccaaattggcctctttaatttattttacttggtgaaaaaataaatttctatttttcaaatgacaaaaatacccctcactcaaacaaaattaactttaaaatgaagataaatgtttctataacaattgttttctttagagcttatttttatttggttacaagttcgaaacaggaataatattgttcataagtcaattttgtcttagccaagtaaaatttgtactactaattcactaattcaaaagggaccctatgctattattatctgtaataattgagatttagcaattcacctaaggccaattaaaatatatatttttttttcttgtaattattccttggaatattagtagaataatgtaagggattgattttattttatttttcaattttccttacatcaacatcatcaatttctttacaaagagcagagtacacaccttgtattccctactctgcaaccatttttttttctttgtttctttgattgacaggtacatattgttacaatcaatctcctactctgcaaccatattgttacatattgttcaaaaacacatgtcgaatattttta

SEQ ID NO: 218955 - DNA, 3916 bp, Cannabis indica
cacccaaatctcccaaaaaggcctaaatggaaaaattagggtttggttatgtaattaggtcttgacatttccccttttggttctttgttggtgaaatatgtaatggaaatttactctattaatattactattataatattttcttttctatttgattgctctttaaaatgcttgaaatatatttcctttggttatattattactaacatgaacaaaaatagtgaagatatttatattgaattttcatatgacagtctcacaatggtcaatttatattttgctttaaaaaaatataaaattaaggacacataacaattattgtttgtatatggaattcttgggaatgagcttagtttggttaataaataactttgatttgattggttgtttcaattggactcaattaattttttaatcttaggtgaaagtggtatcttggttttagtacatacaccattttgatcaaatctctcttgtatagaaggtgaatgactggagtgaatcagccaacaatgaaatactgtttggtttggacaatgaaaatgagttgtaaaggattgctaaaaacagacactatttcgataatgtgattgtcaatatgagttttggtttggtttttgaaatttgaggcggatgcaaatttgtagaataatgtgttttctttagttgaataaactccttttctctcaaaaaaaaataaataaataaataaatgaggcacaggtaaatggagaaagtatgttttttaatgtattcactcttgaaatgtgtttatttttattgtgttttttttttttttgattaaggatttttattgtgttttgagtgttcattaaagcctcttctcactttgatcaccacttaactaatgcctattattaaatgaaacatgcaatgcaacaactagaggaaccaactatcaaaaatggccttacaattaactgatactaaatccatttctaacttttgagctcaactaataaggatgatcgaaagccttaaccatccaatcatgaaaaagtttcaatcttgcaagctctgaatgcaaaaggcatttgtctaagcttagtgaagcgatgtctcaatcaatttttaagagtgattttgatagaagatcattgttctgattaataattaaagagaagttctgtttactcaaaaataaaatgttagaggtgatgagttttacatacttcatgtccatacatatatagtaaatattatgtgcctactttggaaattcaatggtgaaattaggaaaaaaatatttgtcaatttacacatatttccaattacaaaagcccacctaacatattctctgttcacacaatctcatatatatttatacaaaaaaataaaaattgctaaaaaacactagtaattagcatatttttttggtgttatactgttattgatgtaattaaatatcatgtcttatataatttaagaaaataacttttaagtaatatcgctaaccaatcgtaacgcgacacatataaaaagtgctgactggtagtaatgttcaaaaataaaatagcattatatatggtgatgatgaaagtgtcttgtgttcaaatgaaacgttattgactatttgttatagtctttcgtacgtttaaatttcaaaatgtatctatatatattccattgattaaaaaataagatgtgagaacacattcaaaacctcaacctctctctcatcatgacaactcctattgcaacaatactctttatcaccatcaatataatacttttgtctcatgaaaaataccttaattcatttggtatgatctcttcagacatatagaatagatggctcaaaaccttgtccagcacccaacataattcctttcattgcacaagccaaacgctcaagagaagcttgggacatagttgcacttctgcaaagccttcttgtgttcgtgttaatcaagttacaaaccatcttcacattctaagatattctgaatatgacagaccaaatgagaatgctcaccaaaacataagcttcctagataacttccatataataagcaatgatagcccagttggaggagatgtattcttccatggttgccgaattcctgagcttcgtgtttagaaatagtttcattggtgtcactagaatgaataggacactcccacaaattgaaaaatctttcggtagccagccaaccgaagtctaagggatccttaaatactttcaaatgactacaaccgcgactaagaaaaaaccaagctttctctgtggtaagactagtgatacaattgaggaactggcttgatgaattctcaaaatctgaaaattgagtttgaccgtgcaacagattggtttctctctttctgagttggctggtgcgaatttggatgactttctctctcaacgagcactttgggcgtttacattttgtgaaagaagagaggtttgatgcaggcaaacacttactccagattgagcttctagcaaaatctaacaaggattcccctgcaccagcccaaaaatttgcagcagaagcgattagagaaggttcaagttgaaacagatagtttgttgcgccagcaagcagtaaggaatatgctgcactggtcctgctcatatcaaaagcttcacacagatgtttgttggtttcaggtaacgaagcaaataattcttttgagcggcttttgtatgctgaagccagcgttgtgtaagcatttaaagaaagatggtgaagaggatgcatccagtaagttggctgaggtgcttttcctttacattccaaatactcatcgaagagaccttgagttaaaacacgctcaagcttctcacaacaagattggggatcaccaactgataaataatctgctattgcatcatctatatattgattcaacatttcagttgccttgtctttatcaaagtcactactggtacatgaagaacgagcattaacagcagaaatttcctggaaaaggcaattgcactagtgttaatacttgttcaggtaacactccctttcagagaaaataatcgttaactaaatgagaaatttgaataggtgctttgcgagtgagctagtgtatgatatgatttctgtctgtccactgaaaaatattgtatgatatgaaccaatcctcttgagtacagatttcagcaagcaaacaacaaacaaaaggaaaccaatagaacagtaactgtgaaataggtcagtagagcagtaggaaaaactaagccatttcagccatggcttttctttatatttcttgaaaagaaaagcaattacagagtggtcctttcggacctatgatgcagagaacaatctcaattcttgcataatctctccccctataatcaactatatatactatcctattctcacttaaaactatttactctcttctaccatactccactactcttggggtctaacagtgtaaaaccacaattcaaaagagtcgagcaaaatattatgctgacaggtaaaatggaatcattgcagcccggtaaaatccaaatcctatcatcaatcacacgtttgtagatgccattaacaaaagaacatgttttcaagatatcttacctccaatgcatgatccacaaaagttgaaggaaatgcattacatcgcctacaacagcagatgaaacggtacctggaccacaactctgactgcctcatagcctagtatgcaacaataaagtgatgtagaagttaaaaatcagaatcaaagaacaattttaaatgcttaaacataagcttacaatatcagctcaaaattgacatttgaataactatttcttggtttttcccactaaatgataaaaaattattatatgattcatacattttcaaaagggtgggcagatattgtatagaaattatatacaattcatttcatagttcataaatcaaaaaccaaacaccaacatatatacctt

SEQ ID NO: 218956 - DNA, 3553 bp, Cannabis indica
cagctcatccaactaatatgtcttatagttgatgaaccagttttccaccagtacatagccataaggctctcaagctccttacaggtttccaagggaagcaggaaaacactcattgtatagcttggaatagcttgagcaacagtcttcagtaacacctcatttcttgctcgagagagtaaacaaccttcccacccttgaatacacttctgtaattatctttgagaaaactcaagatagttgttttcttacgacccatgatattagggagcccaaggtaagtggtattgttgtcagcttcatagatgcccatatgaccacatatcatgtctcttgtagtaggttcagtattggaactaaagaaaatagaaaaattaactctctgacctggagctctctcaaactggtgaagcatgtccataacataatcaacttcctagttagtagcacggcaaaggatgtagctatcatccgcaaatagcatatgtgagaaaacctggaacccctctagcaactttacaactgtggatcttactatccagttcatactttttcaataaagtagaaaagccctcagcacaaaggataaaaagagtaaggggatataggatcaccttggcaaattccgcgaggagtgatgggactcattgctcttccagcatggaaaaatataggtaacagtctcaacacaatgcataattaaattaactcagcgcccatcaaagcccatacaaagtaacgacccctctgagatagtcccactccattctatcatacgccttactcatatctaagttttaaagccatatcgccccattccgaccctgagttttcctcttcaaggggtgcattattttgaaagaaatcataatgctattagaaataagtctaccttgaagaaaagtactctgcgtgtcaaagattatagacggaagaacaaccttgagtctatttgccaagactttagtgataattttcaggattacattaaaactagatattgattattatatttgttataaaataaattagaaatattattattgataagtgataacataattaatcacttttacactctaatccataagcaataagaatgaagaattcatattatgtgatcatcaacttttcgtagtgacacccataattatatgatatattattataatatattttaatattatctaatgtataactcattattaagttacatcactaacttgtccctaatcttctaaacattaatatatatatatatatttattatgtatagtcatgattacgtgagatagaagaaatttgatggttgagaaactcgatctccatttccaaatccaagctcttcttcttctccatttccagttcacatctcaacttctcaatggtctgtgccaagtactcctctctgctcattgccatagtattataatgatgatcgccactatcataattctcaacaaatcccaacaccttcaaaacctccattaatacacgcctctcttcctccacactccttttgattagttgaatactttccaacattttttccctatcaacaccaccaactgtagaactaatctcactaggccttgactcgctcactaactcaccaacactgcaactcaataaactactcattggtgatgatgactcgcccattaactcactaacacaaccactatcttgtgactcactaaactcgtcaacaaataatctatcaacattgtttatgatattgatattcttttctttgttagtactattactatcggctttattcataacggtttcaccaccaaaactaacatgttttgcaacagaattgtcttctactacttcttcattaaccggctgagttgggaataccgggtcaagtttgaacccatcttcattaaagttccacccactaatccttctttgtttctctcttataatgcaagatccaccgccatcatcatcataatcatcatcatcatcgtggcgatgttgaagagtagtagtagtagtagtagtagtaatattggtggtgttcaacttgttgaacctatcttcaacactagataagccatgcaaaatgtttttgacaagaaaatcaggacctttggtacaattcttaaagaaaggatgcttgagaagcttctcagcagtaggcctcttggtggggtcttggtccaaacacaagccaaccatgtccttgaaactcttggagaatctctgcttgtttttgttgtttttggtgttttcgtagtcagagaatcgaaaccgcttcgttatcttcatgaggagagacttggatagagggaggtgagataatggaggacaaccgtgagctaattccaaagctgaatcccaaaagaccaaatgtcagctttgaatccatagccgttgtgtgagtgaatcacttctggtgccatccagtacggagttccagtcacgtctgttaaggatgacaatgacgttgacaatccacggtttgagtttgactcatatatagatgccgacacaccgaaatctgctagcttaacacatccatttgcatccatcagaatattacctgatcattggaacatccacaatagttaattgtaaatctattgtgtgtttgaaaagaaaaaaaattattattaagacaacaaaattgttacaagccttgtgcctttttcatattatttattaagtcaaatatatgaaatctatattaaaatacgccaattatgaattcatattatttattaagtcaaatatatgaaatctatattaaaatacgccaattatgaagtgtcacccattttgtatacttggtacccttaccattttcctatttttttattaagagcatgtcccatacaatacaatgatataaagataatgtatatgtattttttaatcattttcacaaaattaaactccaataataataataatagataataaatgattatggtataattttatatcataatatatattatttttttatttactcttttaccattcattgatgcttttaataacttttaacattttatttagggttattagcagcaaaattcgcttatgttaattagttcataaaattaaacttcaataatgaagtataacgaaagattatggtgtatttttaataaatactacttttttatttattcttttgtcattcattatacctttaataacttttaatattttatttaggattattagcaataaaattttattatgttttgattttatacacttaacagtccttttttttagcaaaatccacttatgtttatttttctttgcaaatttgaaacgtcagttagacatcatcattatatactaactggattaccactatattggtttcgaggttttaccttcacatatatataggtgtatacagtgatcattaaatattagtttttaacagtaatatttatctggcacttaaaatttgtaaagaaaaataagcttattggagtttcgccaaaaaaaattaaagaaattaagtatagaaaaattaaaacataaaggagttttgttgctaattgactatttatttatgtat

SEQ ID NO: 218957 - DNA, 6701 bp, Cannabis indica
gggctgtattaatgattcaaagtgctattcgaggtttgagatgccgtaaggaattttatggccacagagaagcttttaggcgtaggcatattgttacaattcaggtaattatgctttgctagtgtaactgtggagctcttattgacttcactcttgaatgttgttagcccaactttttgtgtgcatgtattcactgtataaagttattagatgtaatatgttatgtctcagtactttgcttaaatattttcagagacactgtcgaggttggttggtaaggagaaacttcttgtctcaaagaaaagctgttttgatgattcaaagtgttattcgaggtttgaaatacaggaaggtattttattgccatagagaagcttacagacttaggcatctcactgttacaattcaggtaactatgtttatatgcttatgtaacattggagctcttattgacttttatcttgaatgttgttagcctaaccctttctgtgcaataattgtaacgtgtaatgtctctactttgctaaaataatttcagagacattgtcgaggatggttggtaagaagagatttcttgtcccaaagaagggctgtaataacgattcaaagtgctattcgatgtctgaaatgccggaagatattttactgtcaaagtcaggctatctctaaaattcaacattttgtcaggggccacataactcggaagaagctcataggtgacttgtctcaaattttcttttctctttcatttatttgtgttggtttccctatttgaaattgaatattatcgatttttggttgttgtaggtgtttcttccaaatatgcagtcctccctagtgctcatccgagttgtaaagtaaacttagctcttcgttctgttttaaaattacaaagatggtggaggggtgttttgtcacataaacataaaacgaagtctgcaataataattcagtcacatgttcgtggttggattgttaggaagaatgctactagagagaggcaacatatcattctgatacaagtaagatgttcatttttatcttcctttcttacgatgcttgctctactacactcgagtcatttgctttgcataataatgacttcagttctgaacggatattctggtttctttgtttagataggttgtgcaaattcaagttcatgaaggcatatttgcatgtcttgtttaagtaggctgatgggtttgattatgttcttttgttaaataacagtcctactggaagggttaccttgcacgaaaagattcgagagaacaactactagacttgcgcttaaggatgcaaaatacagccgcaaatgtggatgatggcatgcgcatcataaaacagacttatagcagcactctcggaattgttgagcaagaaaagcattagtggcattcttcatacttgtgcaactttaggtgagaagagaaaagagatagaaacatctttttgtttcatttatctctaacttgtcatatgaggttcttaaatcgtgtgtctgtgtgcagatatggctacacagtactctcaaaaatgctgtgagaagcttgtggaagcaggagccattaacactttgctgaagcttattcaatctgtcagtcgaagcatacccgatcaggaggttttaaagcatgcactctctactcttagaaaccttgcccgctatccccatctggttgaagtgatagttgactgtcatggatttatagaaactattctgttggagatgctaaggtgaatatgtcatttccttgataattgagaactgtaggcttctttcatttatgaaaaagaaaaaaggtactaacatctctattactttttcaggaacaaagaggaaggatattttattgcttctgaactattgaggaaagtatgctcaactagtaagggtattgaagtcattcgtaagaaacccgccttcttgaaaaggctacacaatcttgttgaggaacttaccaggaacaggaaggcaattaaggagaagaggtgcctttaatgtttacatttatttgggtccaattactcaattcctgtaggctttcaaataagcatgtcatcataaacttaaatctgattacttctgccttgaaacaggaatgttcgaggaccgaatacgaaagaactaacagatagaagattaaaagaggcacttaatcttctcaaaatggcaactttaaatgaagaatgaatggtggtggtggtggtgttgttgtatattatgttgtgggacacggtctagtaatcgaacatgcacgttcgattgaaaggtagtgtttttacatgttttttagtcagaaactgaatgatgctgcagttagttaagtttagaatgtagtttaagatagattgttattgtaggatttgtttttgatttctttttattggtatgttagttgaaatgataatgtataaattggttagcattgtcctcttgtataatatcatattattttgcaaggagagtaacttaactgagataacatcatcaaaatggccttagcaatttgcagatctttaactgagataattgatcaagttgggtttttcaattatcaatcaatgaattgttttgacttttaactagataacatggtccccaccaagactgctccaataaaacaaacttatcttcttgagtactgaatggagattcagattccatctccaaaaatatctcaggcattcagattaaaatggtcccaccaccaatcaacactattttattataaatatcttgaaatgcaagtataattgttagatagttaatcaaattatgtaaatcatattggtctatttagttacaacactccatcaatggaaacaacagaattagcaaaaatacatatgttacattacctaataaagaacataataagcaatatgtaagtgtaactaagcagcccttgcaagagtttctaggcgttcaggcacatctgctgggtcaatacagaaaccccttctactaaaagatcttggaacagtaactgtcaaaactccatcttcatatccagctgatattccatcaatatctactctaccaggaagcctaaacttcctcatgaaggttcttgcaggttctgttgactcattaatggcctcagttcgaattatgaggtatcttgagtcctcaacttccacttttatctcctcttttcttacacctgcccacaatcaaacacatattagaaaaagcatatatcactcttaaggaaagaagaagaaaaggataattaccagggaggtctgctgaataaatgtgagagtctggagtttctgaccagttaacatggttttctgggacaaagttgtatggaaaaagatactggtttgaagaagttgttgcagagtatatcactggaagctccattgcttgattgagcaatattgatgatgatgattgatttgtggttgaagaggaggcagttggatgggcttttataggcccaacaagttgtcaagttggttgtgggcccttaagttgaggtttatgagtgagattgattaccattattatcatttgaaaaatagaaattagatatctacgcttttgatttgatgtaagttggaaaaaggaaaaaaaaaatcaatattttataataataatacagaaaatgctttacgtctgggaaaagtatgcagattttcttgaggtataggtgcctttcaccatcacaagtgaaactaaattttacttggtcagtataagtttgtatttttactgatgatactaatctttttagaaaaatttcactttcagaaattgggaatgccagatcaggtttattattcaggagatgggagaacataatagaaagggttaattaggatttttgttccctgaactttgacatgtaccaaatcatgtctcctgaacttttaagatcgttgaaaatgccctttgaactatttaaattgttggatttaaggattttttttccaattttaataaaaaagtctaacatggatgaaagtccagggaccataatttagtacatgtcaaaattcgagagtcatgatttggtagatatcaaagtttggggagcatggtttagtatataaacaatcactgaagaagtaaaattgaatgaaattaaacaaaagtccttaaatccaacaatctcaatagttcatggggtatttttaacgaccttaaaagttcagagaggcatgatttggtacatgtcaaagtttaggggtaaaaatcctaattagcctaatagaaatgaactcgttatgaccttgtaatcattattataagcatcattgaacaaaaatgaattaggaaagggtaattccatttcaatgaacagaaaacaaaaaatacacactaaagattactttatgttgaaattcactgagatcaatcaaatttcaccactttaaaattccacaatttaaaggaggtttcctcctaatacacatctcacaagattcaccctcactcactctgttacctatggtggaaaaggtgatgcaagagggattctcttcaacttcaaactcaacccaaaggggccaaaagggcaatttgaatagcaacaacacttcccccccacatgaccttttgattctccatgaaactctttggtcacaagttgcacccttctgcaagctgccactcaagcaattcaacatcatcaacaaaagcatcctccttatgtggttctgcatatttggttggagttgagcttgccgtagagctagtcttgtcttcataagcctgaccgggcgggtaagagatcgtcgttgcaaccaggtcattgccacctttagccatttcttgagaccattgaacatcaactgtctcaataaatggttcaaagttcattagccttgaccactttagtccactatctttatcaacctgaagcaaaggatgaaccaaagtcatgcctttcatgacagcatacacaaacctaagctcctcaagagttaaagtcctaaactgtagagacccagatgttgtgcaacaacagacaacatcaattacaggatatcgattagtccctgattcttctaatgacaatgttttaatcatcttgagatttgaagggaacatcaatgactcaggttcatatcttaccctcaaaatctctacattaggaactctaatagtttctcttctaccagtcactttcctagcatcatttacagatctaaacatgtgaaaaccaacatccccaccatctcctccaatgaattgtagacatggaaaaggttgtttcttcccagaccaatctgaatccttcccaaccatgaccccaaaaagatgtactggacgcaaccttttccatggatcagtcctataaagagctgtggatgctttaaacactgatttaatataattagaagtaatgccttcaactttcatgagacatgtcccaaatccaggaccaagtcctggacctgaaccaaattgatcttgaaatctatcaaacaagttcttcaaataaaaatccatctaatctaagctattttaccagatctgatctaatcaattccttgacaatacccaaaacccagatgaaatatcacactatatacataatctgaactgtaaacagaacaacaaagtcccacaaacgttagagtaaatggatttttctaaagaagaaagattgataaatgtggcataccaggtttggagagcaattttggttgttccattacagacacggagagataaagacgaagattgagagaccagacagagtgacactctaagcaaaggaatgttgttggactatctaagtctatagtacgaccgacaactacagttgactacatgcatctctgatggttttcgacacagcaaaacaatgggctaagctagatctaagttcacagggaaatatgggctcgattacatttataccaaattaagagagttttacagatttatatctatgttttagggaaatttatacaatttacctaaaatcagattttacttttcacattttgacaataataaatatttatttaccaattaaaattatggtaataaataaattacaataagtataattatttgttatagtgtgtaataattataaaaaaagatataaaaataattgaaattgcacatatatttcagtattttagctcatcgagtgtaataaaaatgcaaaaatatagaacacgaattcgagctcgtataaaaaaatagattagtgtatttaagaaaaacaaactaacctgaataaagcacaccatgaatttactaggcagatcgtgtcgagcttatccaataaatgttgtacaacacgatactattcgtattattttatggcacgacacgacacgatctatatttttttatggtctggcacgaatcagtgttcattagatcacatctaatatttttaggtctattcagatctgatccaataaatttcagtcatccactctattcatcaaatgtatttcaaatatacttattggtttaatttatgtttattcaatattttaaacctatatttttcggatcgtggatccatctttattttaagttcaatatgtattaaattggattggattcataattaaaaaaaaaaaaagtaaaaattcaatgttaattttcacacatataaatttatatattacctataacaatataaaatctaattacttatccaaactaaatgaaaaaactaattagttcgattaggtgttagatgtattacattttt

SEQ ID NO: 218958 - DNA, 4498 bp, Cannabis indica
tagtattcatatataaaaaaaaattaaatgcaaaagtttgtgttagactcccaatagcattggaaaatcatattgcaagctaagtgaaaaccatattttcattggattttccttgacagccaaactaaagcccaccactttcacttagccaacattaaaatattaaaaatctaaccaaacacactaaactttcagattcccaatttccacttctcccaataccgcataccaaacaacccttaagagcctacggtttagaaggctacattctaagaataaagctttatcctccacagtttgtcgataaatactataggtggctccattcctggtgcatcatgacaagttaacctgggttatggcatgtagcatcatacgtaccaatggatatattaagttggttattaaactccatttaagaatcgatgtttggtcatgttgttagctaccaaatctctcatgaactctgggccattcctgaccgcctctacactacaagctccaaagctaggattcttcaactatgtttccagctacaatcgctcaaaaaatgaagtttgataaacatgattacattcacaaaataaaaaatatatcaaatggtctctctactagaggacaactcctatcagatgatgagttgattctatatattttggtttgtctaggccatccatatgaagttgttgtaatgaatctaacatgtcgatgtgacacagtcactctgcaggaagtccagtacatgaagcagagccataaaatctaattggaacaactcaacaacacacaattggagactttactcctacaaatcttgctacccagatgcacaagaatttcacatttagtggctcatcttaaacaccaaatcactcctctagccactcatttcctggtcgtggactagtcacttcacatggatttttcctctcaaattgaagtccgatgtcaaacaaaccttcataaattttcaaaaatttgttgaaagaaaatttgatgccaaaatcaaaacacaccactcaaattggggaggtgagtacagaagtgtggtcacttttcttgcatctataggcatccactttttcatccttgtctattacacatgcttaaaatgaaaaattgaaacaaaaacatagggcacgttatccaattgggatcactctacttgtgcaagattgcactcctcttaaatttttgtgggatgcctttagtactaccactttcttaatcaaccatctctccacccctactttagctcataagtctccactttaaatattattcaatcattccaaatctgatattccttaagatattttgttgtgcatgttttcctcatttacgtgcctataataatcacaaacttatatttgttctaccaaatgttttttctattgattatagtcctaaccaaaaaggctatcgttgccttcgcactagtggtcggatttatagtgcccatagtgtattatttaatcaattggaatttccattttcaactggttttggctccaatcagtccaccacatctcattccagtaacatatcctctgacttctattaaaaccattagttaccatttgttacacctaacactcatgatgatagtgtaccaaccactacaactaatgcttctcaaggctcaacaagccgtacaacacctttttcatctttagattcagcatcaactcttgtttagcatagtagtccaagcacagtaagctcctatcccaccattcacctagaagttcatctacaaattttgtcttcatcaccccaaactatccttccaactacccctgcacctagttacccaatgatcactcactctaacgctgtcatatttaaactaaagacttaccttgcttccattctaaaagaaccctaactacctgacctatcccttaccacccctgactctatcactgcttcccttgctcttctcgaatgaaaaaatgccatggacacagatttttatgccttaatctaatacaaaacatggaaccttgttcccttcttgtatcacatgcatgttgtctataatagatggatctttcacctcaaatttgacttagatggtactgtccaaagatgcaaatctcgccttgttgctaaaggctttcaaaaaatgtgcagaatagatttctttgagacatttagtcccattgtcaaaccctccatcatttgagttatcctttccttagttgtctccaatgattggaatgtccaagcgattgacattagcaattcctggtaagttagatgaagaggtgtacatgacccaacttgaaggttacacgcatcctaactttcctcactatgtttgaaagatcgagccatttatggacctaagaaagctcctcaagcatggtttgatactcttctcactttcttccttcatctttgttttcaaaactctttctcggagaattccctcttttattactgtcatggcgatgatcaactttatgtgcttatttatgttgatgatattttactcaccagcaacaacacttctcaagttctgcatattatctctcaactaaacatgcaatttgctctcaattctctttgtttagtcacattttttcttggttttgagacaattagtgagcaagatggattacacttgtatcaaaccaaatattctcttcatcacgttaaaaagactcacatgctaggggtcaagacatatctaactcccatgattcagagtaacaaaatgcacttgaatgacagtgaaccttttgaagatgttaaacaaaacaggagtgttattagggcactacaatacctcacactaagcaggcctaatatagcttattcggttaataagctaagccaatttctttaagctctaacaaagaaacattggctagcttgtaatagaatattgaaatacattatagggacaataggtgaaggaattcaatttgtcaaatccaccactcccaccattgaaagctactgtgactccgattggtcgagttccattgatgacagaaaatccacctccagttattatgttaactttggtggtaatctgatcagttagagtttgaaaaaacaaaaatcagttgctttctcaagcacagaagccgaatacagcattggctcaaacatgtattgaaataacttggttgtagttgttgttcaaagaaatctgtataaacacactaaacatgttgttatatgatgtggtaattttggagccaaacaacttgcatctaatcttgtatttcccttaataataaagcacatagagatagttgctcatttcattagagacaaagttatgaacaagaatatagaagtgagatatgatccactgaagagaaaatagcagacatcttgaccaattcattgccaatcactacctttcattatttgaaaaataagctaactgtctcaccttctccacaacataaattgagggggcatgttgaaatgaaaggtctagaagtatcaaaattgaaggataaagaatattttgcaacatgaggatcaataccaaatattgtagttccaatttcttgtgtaattttgtactatttttggcacctgttagtggtcccaattgtgggaatattattccattacagcctagccaataggattgatttccttaatttttgttttttagtttaaaatgtatcattatacctttgtattctttgagttggaaatataataaatagaggagtaaattttgcatagccactttcctgcctattttagctcagagaaaaataaaagttatgtttgagtaagatatttttgtttgaatatattttacatctagtgtaaatatatatattttttaattaagtaactaagttaaacatagaagctcaattttttttattattggtcatttaatcaaaatttaactgttaaatatatctaatgttacatgtgtttctaaacaagtgacatgtggcataataaggaagagataatctcattaaaactccttaacaaaactcaacactgagaagttttactgatccaagataagttaggaccaagaagcatgtagagatccgccttgccttgtcctaacttcttcgacacagaagcctcattaccattccagtacccaaagtggtcccagttgaaagctacccaagtgatacctagatgggtactcgaacggcctatgacagacgctgactgcccaaaattattgacagttatacttattctgacaaagaatcggatcttgtcccctgtgtctagacatggtagtatgcgtaccttatacacctttttgccagacaattattccaagcttctacttttaaaggttaaaccttttggcgacgcgcgtctacttcgtataatgatcccctattgtccagctattgcaatgcccgagcattattccttccaagggggcccaacatttagctctttttgcatgtaatttaccccattagaaagctttaagaaggaaccctaggtgggccatgggcatgttgttggatatattttacca

SEQ ID NO: 218959 - DNA, 3205 bp, Cannabis indica
agcgtttaaacaattaagtagccttcttcgggaagaagaagccttccccactctcatccaaaggaacggtggcttgcacaccaccttaggatggttcaagaatagggtttttggaggaaactctgctacgtgtagaaagaagctgctcgagaggcttaatctctcttcaataacccgagcccctagtttgtggaagtcttctctgcttctgtagaggtctccatggccccagtgaaacttgtatcagtatgtggaggagttggagtggcagtcgcaagggtggaaatttaagcttttcgtttagaggacctattttccttactcttgcttttgcccttagctgctctagaaagcaacttggctccagcattggccttgatttggcttatattcatgtcaattttccaacgagcactttcaacaaccccatcttaggtgttttcaagttctctgcaaaataaagaaaattgtcaaaaacaagtacaaattaagaattcatatgactcatagttagttggaaacataaacaaggcttaggtgtaaaggaaatcattaattattttataatttgggtttccctgagtaaacaaagctatatcctccttgccgaggaagctaccatgctcttcaaagttagggaagagcattagaaggaaaggatatttcctagtggtctggggtgatggctcaaagtgtttcaggctccttatgatttcgtctatcctattatagtattcatctatcggatacctattgggatctatgctcataagtattcggtcaagcccccttggtctagctgagccattttatccagacgtgggacgtaaactaagcgaaagggtactttacctcttttggaggtactagctcccggagcgccctcatccgatgttataacagcgaatctttctgtcatttccatctccttattgatgtgatgcaaatgatgccttgtccaatcttccatcaagaacatgtcctccttaatggcctcctttatttcccctgccaccatgatggaaatttcctccttaacctctgaaagatcacggtagaggtctcggttgctaatatggtcgatgctttgggacttcttgatcaggccatactgttggagtagttcagtggtgacaaatttctctacttccaatacgtcgtcggtgaccttgttttattgtgcttgtttgataaccaagactttggacctaggggttcaggcaacaggtgctacataatagtggtacttccatcaatcataagcataagacgcacagaagggaaaactaaaaagtaaaaggctgaagtactaacttggcattataaagtcaagaggaagtgtcgggaccctcttcaactggaagtcgatggtgaagaaccaatagtcccgaaagttagggacatgtttggtgacattgaacgaaaaatgtgtctttggatacttttcaagttagtaaaacccaatcttgcttgtattggtctgcatcagtggaggcttcacaatgtaataatacaacaccacaactggtcccaaaacctcaatatcttatatcttacacatcacataccatctcgccaggagcttatatgactgcaggataagttggaaggctcaatcccaattgctgcagaaatattggcaaagtaagtttacaactacaaatgagctccgtaggagatgtgggccccgatccaagcactaaactcatctacactcttggaaggagactcgtccggaagggagagtctattccagcacaaacctggaatgttttaaactccacccttatctgagagtcgctggagcatatcatagccctagaccttattcttaataaggtttatttcccaaatggacgaattgtatacaattagaacgtttttcttttacgcttctgttttggggcctcttcatggattgcatctttctctggatctttggttgggtccatacctcaacttccttgagatccatgacctcgaggtggaacttgtcattaggagtagtcactggaacaaaagaaaagacccaagaagttaaataccctaaaccacaaagacaacaaggctaccggggaaggcctcccctgaaacttcttagagaggtcccctctagacctgttacacagaagtacaaccaatgcagaaccacgctaccgtgtagtagattgggaacttaaagaaaactaggaaaaaatctaaaaagacccatccaaagccctaatgggttcggatgaggagacccagggcccagtccagctcaaaacctacttacacagacagggattctcgagctaacctacctaaaaaaaagagcatgcattcacagtttaacaagcctatagttattagataacccaaacactaccattcaatcctcctagtattcgcagggaaatggtgatcttaaatcaataatcgaatataaatgtacagaattaaaaagttcaaagacttagagaaacttgcttgtaatgtgatgcgggaatagaggaaggtgagggtggttggcctggaaattgaaagcccaacgaagaatctagtcacagcctatttgaacatcgattgttttagacgattaggggtggctcagaacaagattaggggcagtgctcctggaaactccctcactctaattcatagtaggaggtggataagaacgtcaacgagatcgttcattcaccaaaggatgaagcttgggtttttcaggattttttcgggaatcgttctctagtaaaaagcttttgttcaaatttgaaggcaaatgctcaaaattaacacccgaaccacataaaaatctaccatattttttactttaatctttatttaaattcttaaagctctcacttattaagtttctgaaaatcccagtaaatagtactaattattaatgtttttgttgtttctcttttttttttttttaaatctctcacctttttttccattttctttaaaaaattcttctatttttttcactccatttcctctttaaaatatcgttttcttaggtcttttgtgtatttttttacaatttttttctcatgttttttgttttcaattttatttgctaatattttttaagtctttcttaatagtgtataaaattatacgagcatatatatatatgatatatatatatatatattgtgttgttattcttttttttttcataaatatttgcaagttattattttatttttcttct

SEQ ID NO: 218960 - DNA, 2986 bp, Cannabis indica
attaattataaaacttatacgatgtcggtagtcggtacctataacaatactcaaattaattacaaccccaagatacaacccattatcttttcattctagaactagggccagtctatcttcccaaggtgccattattacgtcagtgtgcaatttaaagaaatctatccatattacctaatattaagagtaaatatttattactatattgtaatataaaaaaaattaaaaaaatatctaattgatttttaaaaattattttaaatttattcattttttaaatatcagggttatattattgtatagggatcatacaaatagaattcttttctcttttttacattagttttagtatatttttatttctaaacatatttcaatagtaagtagtagtactctttaaatttgctactgttgtcacattattacttattttaattacaaatgctataccactatataaaagaataattggtgtgagatagataattgtaagtaagtatttaaaaaaaaaaaaacaggaagaaaaaataaaaagagaactgcactaatttagatataacaataccataacaattggtattgttatattaatttaaatataacaaaattgggataaaagagaatttttatttaaaattgagattaaaggaaataataaaattaaaaaatataacaacaaataatcaaacctaaaatcttataattatcaatttattgttttactatatttatacatatatttttcacacagctcttaattattgttttgacttttgagtagcctagctagaaagaaaggtgtatgagcctcaaagatatcgaatcatggaataggggagccattggaaaagcatttttgggcaatttccaataaaaaagataaattcattgcttagttttgatggtatgtacatgttgttttatttgtggtgtacgtagctgagcaaaattatcaacactttctctttttttgtaagcaagtgcttcaaaatttattcaggtggaattaatggaataaaccaccataaagatgatcttcctcttatgcttgatcattggataataaggaaaaagaaaatcacaaaatggaagaagagagtggttgtgtacaattttatggaaagctcacaatgaggccttattgggaacaaaaggctcctacaacaaaggttatatatagttagtacgtaatacagaaagattaattgtttgtaatagctagactgaattacataaaaaatggaaaacttagtacggtacacatgatagaatctagggggaagaagaattttcattataaattgcataatgtattgatcaaattaaggagaagaagaatttcattcaaattaagtaattaaaatcattaatacaacacattaaaaattgaaaagagcccccagcaaatacaaaacaaaactaatatataatcttattatcactgcagctttgttccaacactctcataaatatactttctatctctttgatgtgatgagtctgaagagagatgtgtacacataaattcccatttttaggaatatcatcataaatacttgctcttccttcactaactgaaattccacaaatccccaatgccaaaccccaaccaaaatcacaatcattaactggaaaattagcccaactattaatcccaaaatttggtgacttacatctcattttaagctcaaggcgttttgtattaggattaacttttaaaaaatcaataatcttaagtaatcatcatctctactcatcaaactttcatgtacaagcccaactgcataccataatggctttgattgaagatcaccagccaaagcctcagccatagcgtcaaaaactacattcccaaaatagccacgtggcagtggtggtcgcaatcttgaccgtccatcaacattgaaaaataatctagtctcttgatctttgggaagtgcacgtgctatgcatgcacatttccatataaggccagacataatacaaaatgtactaaagtacttattattattgttattaactaattctttagctttgtttttcaatttgttgagttgatccatggttactttaagaataaccactttgaagttttgttcgtcaacaatagatagtttaggttgattgggtagttggtattctttggtatgatcgaacattatttttggtggatttctaggattaagtaatgttcgatcaaaatatggtgtgattgtgttgggttggcctctaaaaatttcagaccatgacttgataatattgatagcagaatgcccatcaaatgcacgatgttctcctccaacacttagagaaattccaccacatccaaaataagttacctgtgtacgtacattttctcaactaattaaattagatgttttaaaaattcatataatattaaaagatgaatatagaaatttgggaatcaaaatcatatgtgggagaatcatgtgtaccaatatttttttattttttaaaattgaagttttataataattaactaattaactacattttatatataaaaattaatacatacctggaaggccattaaaggaaatgaagaaattccagcagagtaatgtgagggtggtggaattaagttagagatgattagtgaggagttggtaaaatctccaaggtcttcgatgtgggactttgtctcccccaccacaaacaaaacaccttcgtcgttgcatttaatctctaaccgctcttctcctccattctcggcccggctcaaccgccctgctaccggataatatagcacaagagtcttagcaagagcttccttgaggttgaggagatgatcatcaactgatgatgatgatgatgagttgttattgtagaaatagagtaatgtgctccttccctcattgtaaagttggtccaaattggataatggaatagtggaccatgatcttgaagggtctttctccgctggtctcactaagctactctcttttatcttcactttcatttcact

SEQ ID NO: 218961 - DNA, 4720 bp, Cannabis indica
gtcgatttaaaggttgatctttttatatgtaaatacaaattatctgcaaattttctaactatttattggactaattgttgacttttaattcttattcctgcagaaaatttccgagctctgtgcacaggtatacatatggttttagtttttttctctccttgaatttgctatttttttttacctttctattttgaaattgggagttaggtcgaatgtgatcaggggaaaagtaatgattttagagtgattgaatgttgtgacttatagagatgtaaaaaccaaatccagattgtgttgctactagcatactaggatataatgatctcggatttttgaatggagaggaaagcttctcagttagaagctattttagtgtgtgttgtttttcttaccttttgcttttgcaaatcatccaggagagaaaggcattggcaagagtggaaagccactacattacaaaggtagctcatttcacagaattattccaagcttcatgattcagggaggtgatttcacacttggtgatggaagaggtggtgaatcgatttacggtgacaagtttgctgatgagaatttcaagctaaagcacactggcccaggtaagaaccaatgaatctcctattgttgccgatctcggttcctcaagatcttgaaaggtacatgttatgaatgaaactgtgtctttcttgtaggatttttgtcaatggcaaatgctggtcctgacaccaacggttcacaattcttcattacaactgtgacaactagctggtaattggatacacattcaggcttttaacaaaactaataatcactgtctttgtttagttaattatttatggccttagtcaaaactgaatattttaccatttaaactatatacatatacaggttggatggaagacatgttgtgtttggaaaggtgatatctgggatggatgttgtttacaaggttgaagctgaaggaacacagagtggaacccctaagacaaaagttgtgattgcagacagtggtgaacttcctctttaaattactctaccctatatcagaatattttgtttgttttccttgtcaactagactggtttagttatatgttatgttcaattagaatttcatgttcaactctcttacctaacatggtaataagatgaagttttaatagttggctctaaagaactaattgtatcttctatttactttttttctacaacgaacgaatgccatgatcatttccaaattaattgtaacgatttccattttggcaaagttcgaacaaaggctactattattattatttggcaactgatcaaaggctattattattattttttgctggaaccaaagttcgaacaaaggctaatatttatatggtttagaatatgaaatatatttccattttggcaaaaattagtctctgagaagattttatgcaaagatgtactgcccaatcggatggaaaacgatttgaaattttactcttaagtattttattttgaatacataaaagaatatgcaatacatatttacaaagaaaaaaaaaacgcgcgtatagagatgtaagaaactaatggtggaaaggaaatgatttgctcaatttacagcaataattacagctttgagaggtatcaattaatatgttcctgtaatcaactttctcagcacttgtttctaaagtaaattaataaagctttctttgcactatagttcacttgtatgtaattaagaatcggattttttttttttttgtacgtactgaatagaatcactaatgaatttacgatgcagacattcgtaatcagcacaggaatcttcttgaacctgcatagctcattgtttacccgaagggcgtgctttgtcaaaccatgaactgctaaagtcaacaagcaatataataaaattataactttctcaaacagtacacctcaagtgcaagagctttaactgaatagtacgcgccaactcaataacatatcaagaatgttccaaaaatatctacaaaataaaataagataataatgaattaatcccctagcgatgatattaaaaccttaaaaagaaattctcaatagttagaagataacaactctcaaacaaataatataaacttattgataaaaactctgtaacagttgaccctcttcaaaactgacctacagattaacaaaacataaaactctattactatacaatataatgaaaaaatagttagtgtgaacaaaaatagtaaaacaaaccataatgtgaagacttgaaacacttatctgtcgaatttaaaaaatcgtttgtagaaaggcatgagtacaaaatgaaacacttctcgtacccatagatcatactacaaatctaccttaaacaattaggaacaagccctaaaaatgacacaaaagtcataataagcatgaaaaccataaaaaaatagtgtaaaccagcgaagtcatcgaacctaaattttcttttaaaaggtcttattgaactttaaaaaataaaatgaattttaaattataaaacaaaatagtgcagccaccaaataaggtacaaccagccaccaaaatgacactatcaacctccaatccacatattatttagccaccataaaaggttaaaataagagctaaacaaaataaaccattaagcaaattttacccacaaacattaaattattaaagggaaaaaataatcttcatattgactaaatttaaaataaaatctaggtaatacatattataaaaagttaatgattagaagtaatttataaaaggaaataaaatattacattatacataaaattaatatattactaataattagctttaaatatcaactattaaataaaagataataaaatttaatacaaattgaaactccataaaacaatttctaaaaatattaacataaaataaatataacaaattcagcaaaattttatattaatgttatactcgaaattcggctggtacatcagaagatgacacttattaatctcaaaaaatattaaccggcaaatataatggcacttatatttgtaaatattaaatggaataactccttaaatgtagaagttaatagggtatatttataactcgctgactgcacagtccttagcgagacaaggatgtacgaactgttgactcacgtattgacgagaaaccatttcgtgtcagaagacataatcgcaaggatgatatcgacaatacatagcgaagcgaggcataaacctcgcaatatgtagagaagtgttaacgaggcgaactggctgttagaacacttagcgtatgatatgcattatactaactaagtgtaatagcttgaaggacacggataatgaatagcaagacatccatcttgctgtaggaaggcatactcctggtaaactccaactcgctgccagggttgttgttgctattgagaaccctcaggacctggttgtctagtctgtaaggccttatagtcaaagagcagtccttaaatttgctcagtacattggtgctcatgtcattcctgcaagacttatgaataaatcaagttgtttatacaccaagcgagacgcctcaacgagatacgttttgcagcgcgtctgagtgaattagtataaaaagaaaagaatattctcttaattcaactaatatttttaaacctagttttcattctaccagacaactagtgttttgaaacttcttcttttctctcttctaattcataatcctatagtgttcttcacattaaattcgagccttagtgattgagtgcatgcccacccatagaaagttagtcctcaatcataatgtgtaagactgtgaagaatctaaacaactgaaggagtgtcgggctcaaatcttgattatactctacgacaaaaaggaacaagggttagagatctgagcagatggagtcatttaattccactgcaactaatgtaaggtttctcatactttatatgtgtttaattttcatcgttttaaaaattcatatttaagatgttaaaaacatacttattagtaaatttcggtcttggttaaatataatcctacagtataactaaatgataacttttgataatttagaatgtttaattgtaagtgaagtattttattaggtagaagataaatcattagcatatatgtatgtaggatatatttatttatttatttattttgttgaaatgagaacttcattaaatttagtcattctgaatacataatattcagcaaagctgctggagcattagacacacagatgctacgttcagataaagaccgggacatcctagcaacagcatgtgctagtcagtttgctgaacgttttacaaaatgaatttggatagaagggatagaagataaaagggtttggcaatcatggacaagaataccaaaaaccgaattaagaggaatactgcttcgaatagcttggacagaaagcagactatcagtctctagctcaatagtgtgtcagttatgacttttaatcaagcttacggcttccttgatgccaatgatttctgcaacttcgggtgtaaaggttccagaattacagtcagcttcgccatcaataagagtgcccgagttgttccttgcaaccatatcataaccatatctgttttcactagcaaacgtagcagcatcaacatttatcttgattgtgtttgtatccggtttagtccatagctcagccctgtctccattagtatggaaattaatggaagatagagaagtgttatcctgag

SEQ ID NO: 218962 - DNA, 4621 bp, Cannabis indica
gaatctcattgaaagatttctggagctgattagtgaagttaccagaagcgtgccttcctatagcgagatggacgcctcgctattagttgtttcgatttgcccgactattacacttagtttgtatgttgtgcattatacgctaagtgtcttaacagtcattatatctcacctatgtcgcgtcatgcgtaacgaggttgatgcctcgcctcacacattcgagggcatatgatttcttgttaacgcacgtgacaacagtttgtatagctttatctcgtgcaagatctttcagtcagcaagttgtaaatatactatgttacttccgcattaatgagttattccattttcaaatttaattagcgttacatacattaattcatattcttcctaatttgacacgtgtcctcctttgaaatgatggtcgaattttgggtataatatctgggaactcccttctgggtggcaactatcattccatgagactccttccagatttataggttagatatccgagaacataattccaagctttcttggggttattgcagaaagtggaaataaatgggcagattatgggcataaaatttggtagaaatggtccaacggtctctcatatcttctttctggatgacagtctagtgttttttgattcatcaagggaagcatgtcaccatttcacaaatgttttggagaagtattcacaagctttaagccaagttggcaactttcacaaatttgaaattagttttggaagaaaggtatcggttgctgtcaagaataatttggctacgtttatgggcatgaaggtggtagataatcatggcaaatatttggggctaccttcctttgtgggtagaaataaaaaacaattatttgatgtgatcaaaaataggatctggaacaagctgcgtggctggaaagggtcatagttctctatgactgggaaggaggtgttcattaaagccattgttcaggccatcccgacttacacaatgagctatttttgactgacaaaaagcactagtaataatattcacagaatggctgcacaattttagtggggatcctcaagtacaaatcaacgcatacattggtgtaaatggcctattctacacaaaccaaaagagcaagggggttggggttccgtgaattggagcttttcaatcaagcacttatcgctaaacaaatatggagaagtatccattttccattgtcattatgtagttaagttttgtaggctagctatttcccaaatggaggtgtgctggaagctaattgtggatctaatgcatcatttgtttggagaagtctctattgggggaagaaaattattttgggaggctattggtggcgtattggtaacggcaatggggtgcgcattttaaaggatccatggctgccaagacctctatacttcaaaatatatgacaagtcgagcatccctagggggttgtatgttattgatctgaaaaatgctgagggagtttgggatgagactttcattagagctattttcaatgaggaggatggagaagtcatacttaagcttccatgcatgggatgggatctcgacgataatattctttggcattatacacgtgatggagaatacactgtcaaagaatacactgtcaagagtggccaccgtatggcagctactttcaagaaagtggtgacctaatctaatgagactaaaatggaagcatggtggaaatacttgtggaaattacagattccatccaaagtgagacattttgtttagaagttggcccattcttggttacctacgaactcggttttagctgctagaggattacaaattgatcctagttgtaccaactgctctaccggtgcacgtgagaatgtgtttcatgccttatggtattgtaaagcacttcgggggtgtggaaaaattctagactgcaacaacaagtacaaagagttgggaatgaagatgtgttatcttttttggtcaacttgtcacaacatatggctcaaaatctgtttgagttatttctggttttgtcatggcaattatggttcattcgtaacaaaaccaaacatggtggtgtgaggccgaaaccagctgagatcttggactggtgtactaattatattgtgattttaaaggacaacgtgtccaagaaaatagagaagaagcaaggccaactgctcgctgggaagcaccagttgctggtgtgatgaagattaatgttgatgcaggggttaaaaaaaaggtacaaattgctctggaatcggttgtgtgatacgaaaccatcaggggcaggaggtgtatgcatcatctactgttctaccttgtgagtatccttctgttcaagttaaacttttcgccattcacgcaggtctccaagctggaatacaacgaagaatcccacattttttcatcgagtctgattgtatggcagtgatccaattaatccaacaaaaggaggatggttgtcgtgacattgacagagtgcttgaacatatattcgacatcttttgaattatgctaacgttgacaatctttcatttgtatttcgtgaagcaaatattgtaactcatgtattagccaatcatgctttaattaacaaaattagtaccatgtggattggaatttctctcccgtgtgtaaatcaagttattcggcaagacttgccaaatcctttgtaataattatttgtttcgtttgaatgaatatgctttcaaaaaaaaactgtttaaaatttaaggaatataagtaatactcatataagttaatgggcatgattttttcatggctaaaatagatttttatccataattttatgaatagtgtcgaactactactactccttttgcaaaataatttggtctctttatcattatcattatccaatagttattatttaagaaacaaaaattaaacacaaaaatcttcttttttttttcttaacaaacacaatgaattctctcaaaaaataaaagaaaaatacaatgaatcttaaattggtaaaagagaaaataaaattctgatatgaagaaatttgagtagttttatttatattcttaccaaactaaaaggtccaataaaaatgtgataggtagctagtactatgggaactatagaagtgggacagggagaatcaagctggttataataaataattctttatttaataaaacaataataagaaaaaggttgtcacttactgataacctctcaagttgccaaatcatttgtgtatataataaataaatatttatatatatgttatgtagagttagtacaacacattcagatttgtttttttactctttatattataagtggttggtgggcccatatcaggtcagtgctgtgtcatttacatatttgggtgtctgaaaacacacttgttttcgaaaaaatcaggttttttgggcaatataaagatttgtaaactaaatgtataaatatatgtatggtgcaagcatgggttttacatttcctaatatatatgataaggaaataatttattgatgctctcaacctcaagtagggtccattttttgtagttaaaaagaaagaaatgcaagtgtctttctcatattatcaaaatgaaatacaaagggaacaatctcaacaattaaataatctttatatatataaaaatattagcattggaaacatttcaaatattctcaccatattcttattttattttattactttttttaaaacctttgggatgatggggttgtagatctcgcaaagaaatcttattttgtaattttcttctctctttctttcttttgggattggccctttcacatggtccataccattataaatcacataaaattctccatccaaattagagagagagagagagagagagagagagggagggagcctttttttcctagggttggacttgtgagtgtcttcccaataaatagaaaccaactattaaaatgttttactaagcaaaatatatatatattaaaatgttctccatctacccctcaaaataaaaaagaaaaacaaaaaagaaaatgatatgtgtccttaggggtgttcacaaagtatccgatccaatccaatccgcacgatccaatccaatccaatccgcaaaatgcggatatccgcacttgtgcggattggattggattgaaaaatctaaaatccgcacttgtgcggattggatgttgtttgacctcaaaaagtaaccgatccaatccaatccgcacttaattatatatatttttaaaaaattataatatgtaatatatattaattaaaaaaagacacaaacttctaatttcttaatcttttttagtaatatattgagttggtgcattttatttattttgtaataaaaacacaagaaaaataattcttattcacatagacacatacacataaagtttaaatatatatatactagcttatttattttagtaattagatacatatatattttagtgtaaatctaaagataagtatatatattgatatatatgtatattggtttaatttgtatataaatagagatggaaatagattattattggagattaagaaacaatagtcttttttttaatttttttctataaatattaaataattattattaaaaataaccgatccaatccgcactat

SEQ ID NO: 218963 - DNA, 4901 bp, Cannabis indica
gtgcgggtgcggtttgaaaaattaaaaactttgtgcggattggtttgaaaaaatagttaaaaaccgcaccacccgcaccgcgattaccctaatccaaggattttgacccatgacccgatttgtgtgtctccatcaatgtctagttcttacacactgtcggtctattttacagatcccaatatttttttttttttgcaatgaataaattcaatcccaatattatttttttggttgttcgagagaaaagaaaaatcaaaagaagaaaggtcaaaggtcaaacatctaaggcaggctggttccttcttggttaaatgccctctgtttaggagcttaaacccagaaccagaagaagaagaagtgtgagtcaggaggaaaaatgtgtgggatttttgcctacttgaattacaacgtcaatagagagagaagctatattcttcaagtgctatttaatggccttcgtcgattggagtatagaggctatgattccgccgggatctctattgatgattccttttcttccgatccaaacattcctccatcgtcctcttcttcccattttcatcatccgctcgtctttcgtcaggaaggaaacatcgagtctctcatgggttgtttgtttcccgggaaaatgatgggaataaaatagtcattaaggttggagtactcttggtttacttacgggtcgacccgggagattaacgggttgatcttcccgctttgtctgagcaaattgcatgccttttctttttatccgtcattttcttttcttctgtgtttgatttaatttggcaattaaagttgagcaatttcgaattaaaagagaaataaaaatggaaaccaatattcaattattcttgcggtggagtattgaccccgtggacttaacacaagtattgtacattctccaatggtggttggttactttgtattgtattgtacgttctttttttattctgcaaccaaaacgaagtcttcttttttgagttattgattgttttccattttttttttaatttttttaacaatggggttcacatgcttgcccctctttgaaaaatcgctttaaatggtagaaacagaccaattttttatgatttccactcctttctttcatcatcaactatagtacaattgtgcatcttcagatgttggagtttatcttaatatcttgtcttcggttcagagttctaacaaatttctaactgtttaactttggatggctttgtttcaactttttttatttatctgctggttaatttaaagggatatggacagtaatgattcaaagctggaatattatgttgcactccaagctttaatattgtcaaattttgtttttcttttcttactgtgtgtatcactgtctcgcgcctcttatggcattctggttacagcatgatacttaccagagtagttgcacattgtaatgctgaattttgcagaggttgctgaaacggaacttaatttggaggaatctttttctgtccatgctggaatagcacatacccgttgggccactcatggagagccagctccaaggaatagccatccccagtcatcggatcctggaaatgaattcttggttgttcataatggagtcattactaattatgaggtttgcttagaacttcagcagaatggtttctctcccccactttttctgtttttgttttgagcttggcttttgagtgaaaagaattttttttaaatgtgatcaaattatgtgagtattttattattaaaggtaaattttgaccaaattttttgagggtttagaatgttatctatattgttataccaaattagttctccattggctctttccgagatctttctctgattccgcatgttttcaggtcttaaagcaaacactagttcgacatgggttcacatttgaatctgagacagacacggaagtcattccaaaacttgccaaatatgtctttgaccaagcaaataaagaaggtacttcttttggtttaagcatcttttttgcaagtgtaaatgaaaatgtgaaagtaaaatatgcccgaccagaagagggagaaatatgaatattttctgctttggcacttgcatggcctgtactttcacaatggaatactttttgaattgttaacttattactttacgtagtcttcgaattcagcagttagatttgacctttgattaatttatcatactcgtactgtgttttctctaaccttagagtgtcaattgtttttgtcacaggtgatcagactgtcacatttagtcaagttgtgcttgaagttatgaggcaccttgaaggtgcctatgcacttattttcaaaagcaagcattatcctaatgagttgattgcttgcaaacggggcagtccgctgcttcttggtgttaaagtgagttgcatgtaaatatatgcattgtttatacaatttatcttattttttttttgaatttttttttacattgctttaaatgttctgtagcttcttgaactcatcattgtttgagttctagtttagtcagtgctgatccttctatattctttttaattcatgtccaattttcataatatgcacatattttcttgcatttaacatgtgtcactggtttaagggagctctgtctcttccatgcacaaattacaaaaatataaaaaagctgaatattaatttcttttgtatggctagaaagccagtggtgccgttaattattagcatctgagtttgatctaatttatgcatgttatatatttatgtttgtttgaaaaaggtcgaaaaacccatcttagatgcatgagctgagtttttgacgatacagcttagatgtgcttctgcaggtttaattgactttctgatgtcatgtcaggaactgtccgaagatctaaatcatggatctgcgtttcatgatgataatttcctctcaaagaatgggcatcctaaagaactcttcttatccagtgatgctaatgccgtcgttgagcacacaaagaaagttctggtgattgaggatggtgaagtagtacatcttaaggtattttgaacctccaggggctcttgtctttctcctagaacttgtaaaataaataaaataataagaatagtaatttttttttgtcaggaaaataataagaataattgattattcatttttagtacaatacttggggacaatctagactgattctgtggatcctgggagaatttatttctttgcttttcttgcttgagatatgagttcatataatttctttgcttacatgtatgatatgatgccttatatttttaggatggaggtgtgttgatcctaaagtttgatagagaaaaaggcgatcatgggggtgccctttcaagagttgcgtccattcaacgcgcattgtccatacttgagatggaggtagaacaaataaacaaaggcaaatatgaacattatatgcagaaagagattcatgaacagccagcttctctaactaccacaatgagggggcggctcatccgaggaggttcctgcaaagccaagactgttctcctaggaggactgaaggatcatctgaaaacaatcaggcgcagcagaaggattgtgtttattgggtgtgggacaagctataatgctgctttagcagcaagacccatcctagaagaactttctggtgggtacgcctttcattttggtgaatgatttttctttttccagaaaacgcatctcattctctcttgtttatatcatttgaaccacgtaggtatccctgttaccatggaaattgctagtgatctattggatcgacagggaccgatatacagagaagatacagctgtctttgttagtcaatctggtgaaacagcagatacattgcaagcattagaatatgctttggaaaatggtgcattatgtgttggtataacaaacactgttggtagtataatagccagaaacacgcactgtggtgtgcatataaatgcaggttgcgagattggtgtcgccagtaccaaggtaaacaattgtagtaattgtctttattttgtcattcagacacttggttaaccattacttgtctcattattaggcatacacaagtcaaatagtcgtgatggccatggtagcactagcaataggtggtgacacaatgtctaatcaagcaagaagagaggctataatagatggtctatttgacttgccaagtaagtatccagttgatttttatgttttcttcatcaacaaaataatgtaaaaatcacatttttgaactggtttacaactgttcctttttatgttatatttttgcagacaaagtcagggaggtcctgaagctcgatgaagagatgaaagatcttgcaaaacaactaattgccgagcagtcacttcttgttttcgggagaggatacaattatgcaacagcccttgaaggtgctctgaaagtaaaggaagtggcacttatgcatagtgaaggaatacttgctggtgaaatgaaacatggtccattggctttagttgatgaaaatcttcccattgttgtcattgctaatcgcgatgcttgtttcaggttggttcccttgttgacattgtagaggagtagagtagttacatttcaccatcatggtctgaagtaagttgcctactttgtaactaacaattttaatctctgtcagcaagcaacagtctgtcatccagcagcttcgtgctcgcaaaggccgattgatagtgatgtgttcaaaaggagatgccgactctgtgtgccccagtggttcttgtcgagtgattgaagttccacaagttgaggattgtcttcaaccagtagttaatatagttccactacaggtaatattcacactagaatctgatatatgctataatattatgtgtttgtgttgctgtattatgtcttcacgagaattgttgaaaatattccatgccttaaaaca

SEQ ID NO: 218964 - DNA, 5481 bp, Cannabis indica
aaaaaaataaataaaggtcaccctgtgaatctcattttacttaccttgttgtagccaatggtgcactatgatattcacctagttcagaatgactaaataaaatttagtagtgcatattcatctagttcacttatcgcacataaaactgttttttaatatgtgcaactgtggattggttaacttccacaagtcctttgcaactgtggattgtttaactattcattggtcttttgcactttgatatattttactgtctgacaactatgagaaatctatattatgattatatggaaaagaatgatagaaagtgtccaagttttctcataaagttgagaaaacttcctatgtagccttcttttaatgtaacccatgagaaaattaattgaatccggctacaatactacatctgactatccatatccccatttttatttaaagagaactatatgtatttcacaccttcactttttttttttgaatagatttcacaccttcactttaagaatgtgaatttgaagaatacattttaaatactctactatgggtaaatctgaaaacaaaatattaacaactctcttttgaaattaaataaaatattaaagacttattaagtgtcccataaaaatacattgaaagatttacctgctttctatagactcctctaataaataaaataaaatgaaaaaaattgagggttttctgcatgggttcttgacttatacaaaaatgaaaattgtattattttttcagcatttgtttctaagtgttagaaacaaaattttatctctcaaatgtgctatatatcacagaaaaaaaaagtaaataaggctaaattcatgagtactgctgtagttaatattggaaggttaaattgaacacataatcttcttacctgagaggaggaaggtatgtagtctctaactggtgaatgactctattctgtaattggttagttgccccaaaatgaaatgaatctggttcttttatgtttgttgtggctctatattgaatgcaacaagcttaacgaactgtcatctgagtgaaataaaattgtattgagaatactagtggaaggcattgttttggaactgtagtttctttcagagtaattgtgagaatatattatgtctccacccacccctccttcttatagagtaatgagtgggttgtccttccatgggctttagttatactgtgcatatatcggtagatttggcccatttacttgtgtagatttgtttatacccatatatctcaactgtggtgttaagtgtatttatccaaaagtttaaagtttaacttttacagtagaagtcaataaattatttgatctgaataatcttagtaagaggttattgcattcaactattagttaagtattttgtatgacattgttattaaattattaagtcaagtaaattgtcattctaattgagaaagacaaaattaatgatgaagaaaattttttatattaagctatccgaaagtggactcatagcagcacaattctattcagtttaagtacattctcatgaagtggtgttcatagtccaacccccaccgcttcaaatactgattatattatctaaacccaacttgcattgccaatgtcaatacacaaaactgtccacttctaccttaattttacacccttcatataataacttgatagaaaaccaatagtttttaagtagtacagccctttttatttatcttaggcatctaaagggttgtgtctatatcccatgcctcagtcaatagttatcacttcgctgggttctttggcatgggcagcatgcacaaagatgtctccagcaacagtctgtattccattaagaataatacttagctgatctaggagctggcgaatcttgaatacaactgttctacaatcaagtgcagcacagcgaaggttctcagatttcgtggacacattgcgacggaggaacttcagtttcacattgtcagcctccttagcaaggcaagatttacacttgcctttccttggagatttcatttttccatatttccttactcgcggtgaggttggagaactcgattcctttttcacaaaggagtcagatgcaggtgattcttgttcattcttgcatatggttgaagttggtgttatttgtgggggtgatggtgaatctgattctttcttgcagatgtttgaagttaatgttattggggagggggattcagaactcggcaaagttctatatggggggtacaaagttggatactcattaggcagaacatcctctgaatcagagggctcttgcttaacaattgatgggggaaaaaggtttcgtgacaagttagacatttttgtatggaaattaatggttattttgtttaggaatgcaaattggttttttgaggtggtagtagagtgagccaccaacacctatttatatatgttttcaggccataaattccatctccaaccaattttttttattttatttttgtgccaatgacaaataggataatgccatgtgttattcacttactacacacatgttgaaagagttctccattatgattatcagttattgcacatgatttccatttgatattttgtcagtttagtatttagttcatggctaactctatttgtgaaatgattgttacctttccattagtcaccactattccatcttgatttgactaactaaattcttcaacttttcaaccaaaatggtttcgttttggtctagttaatgttgtatttattgcttccttaaattgagggttggataacctcatacagcaagaaaaatatatactgtcagctgaatatctgtgttggcagacccttatagtcctttatagatcttttttctgacaaaggaatagagaccacaaggttctacctgcctctcaacaccattctcatttatcttcccaaataaaagaaaaaaaaaactccattctcatttaaatacttctcatagtgaaagtattgaatggaaattaaggttctaaatttgaacacatgcataaagtctttgtttaaaagtgacagaatttgttcagtttaaatttttcactaaattgctgaataacttgcttttattatgtctgaggcatttgtttttttttaattttgtgtagtgttttttttttcacatgtctatccaactttagtacctattagtaagtacataatattatttattgacatgtatcaaatttatatttaaaccaactatcatattattcttaaaattaattaaagactcaaaataatataattacactaggcaatgcaggttcaccaaccaacctatgaaaaataaatgctaattagtgatggttgtaacaaccatattaatggcaacacatcttgatgtgttatatagccgaatgaaagagtttgttcctcaaacataagcaacttcaaaaatatattctactcaaaccaaaatatttgtcaagagtggagatttgattcataatttcatttagttgcaggttttatatgtggcagttactactttcattaatagtatgcattgtgatgttgtagatagatgctgctaatgaagagattatggaaaataattcagaccaagattgatacaaaatgtgcattaagcaatattaatttcccatcatacgtatcacagacattgaggtaataataagccaacttcttatttgcttcacaagttattctgagttaatttaataaagtactttttttagagtaagtaagttagatggtagattaaatcaaatatgaatccatggttgtttacatcaatagaatttagaactaataactttgttgtctttccatactttttgttctgttattttttcttcacactgtgtcatcaagttattttagctaatcttgtctttttttaagctcttatgttgttatattatgcatttcactttagataacatgttattatgactcctacaataaagatcacgtacaggataaatgatggcatggttatttatcttttctttctagtttgcttacatgtttaaaacaatcatgtaagtaattgattctgaacttaatttcagtgttttccttttccttgttatttcatccattaccattaggtttagccttttataattattacttaagaccatacaaaagtttatatgcaattaagtttggtatcatagctagattcataaacacccatcacaacatgattctaataacaacagttaacacataactaatttcttacaagttcattacatgattccataacagttaacacaaaactaatttcataccacataatagatgaaaagaaaaaacactatcatgctacttaaactaacaatcggttccactacaacaatttcaagggaatgtggctactactttagccatatttccatgaaaatgttatctcaaaagcaaatataaacataagatataacctaaaataaactgtagggagttgtaactaatgtcttagtacatcatattgcacatagtacccataggatgagcaagtgatccacttgccacagcttgcatggacatccaagtatggactgctacttgcatgtcagtcattccagcacttgtggaagccacagcttgttcaagggcatacacccttttacacagctcagaaatattatagttatacacttttgtttgctcctctagctgctgttccagatatgaaactctttgatgcaaggagttgttgatgtgctgctgctctagaaatgtaactctttgatgtagggagttgttatggatgagcatttgatgatattcattagcaaacaatgcattttgtgcatgaatggcttgcattgtgttcattgccatttgtaatacatacatgccatcagatgcatgtggttgttcccatgtgctagaaccaaaagttggttcattactaccagctgatacttccaattggtttgagaaatgaggtgagtaattcatctcaaagttgctgtttgaggtttttttttgaaaactaagatattctgtgtttgtgatttgcaaggaagtaaaatatagtgacatacaaaatgcataggctcctttatataggagcacaaaagagtgtggctttatctaaagaaggtggtattgctcttcagtttactattcttattacacaggtggcagaggcaggtggtatggctttgacatgaccattcttaatttagttactaagacattttactttaacttaacattacaatgaccactgttttcccctacaaatttgtttgtcattgtaattaaatgtgctggtttattaatttattggggaaattttgacgattgggacaagtcccttctggattggagatgtgctgttgttttagcagtgtataattcaactgtattttatatttttatgggtttacaaataactaccagttgatgtgagatttattccctgagcaagttatctcataatggagacctttttggagcgaaacacttgattggagacatgttcttat

SEQ ID NO: 218965 - DNA, 9563 bp, Cannabis indica
ggcaggctcatcagttgtgtattcacattattgttcattttctcttcagcttctgtagagacgcggtttctcgtcttcatctacatctttgatcagatatcttctttctttctttctttctttcttacttaacatttttaatagtttttaaagggtgaagagaacgatgaagacattattattatagaataatagagttcagttcttgtttacctgatgataacacaggagaatttgctcttccattttcatcaaatataaccacttcgaataatattattccaatgctcttcttcaaaacaaaggcacaaacatcacctactttcaaatcattatcttgaacaaattctttccaaccgcaaccaaatgcagttttcgaacaacctctgtactgtctataagagaaattaacaggccaggtcctcccgtcctcaaccttaaggatcacatcttgggacttacccaggtaagtttttgcaaacttaaatggaacattcttgacaaaacatgaagaagatcagagagtcaagtcagtatgataaatattttcaatttatagtttcaaaatcaacatgaaagaagcttatgtgttaccatactaaacccagctctaacataggttggttgcataggaactatgaaagaagggtctttagatttaaaatctttagctctcatgagaacttcagcctttgattttccactcaatttcctttttcttctaaattttccccttggttgtatggcacattctttatttgacaaatcaaacttaactgaaatagaatcaacagatcagtcaaaagatacaaaacaaaacaaaacaaccaaacctgttttcttggcaggctcaagtaaaaaggttgaatcttttctgctcagttgttgtccttgttcagttcttcttggtctcagagaaggaagtggtgatgtagaagaagaagggttgttatgatcttgatcagctccttctttttcttcttcttctggcctcttgggcagctcttgttgatgatcaatattactagtaactggatagcttatctcaattccatttgcatcaagtatgcccacaaggaatgtagattggttttcatgataaatgaaagacaatgtgtaatcttcagactttaataggttgtaatgtattgcaaagtcagcccaaccttttttcaaccaagtacgcccatcttcagattttgttaatttgaatttccatgttgctccaccatcatttggaacttttaggaacactgttggattagttgaagtgtctatattaggaccaaacttcaacataaactctcttggaatttcctgcagaaaaaatgtcaaaatatgtagttgtagtattagtaaaagtagtagttaaaaagtatggaaatttaaatattgtgtgtgagcttgattgagaagagatcagtagagtttacttacaaacttatttttgaagaaaagctttttagggttgctgagtttcttgaaaaattgaggagcaacatgagaaatagtactggtagacattgttgttttcctttcttttggtctgaaacaaagaactctattttgagttgaagctttggttaccttaccagttaccagttaccacttaccacttaccattctctctcagaatgtctaaaggcaatgtatgagaggaaaagaaagggataggaaggaaaggcaaaggcaaaggatctcgccagcttctaacatcacactttcttctttctgttctttttgtcctataaaactcattttacttgtgataccaaatatggaaataagcttactttaattacttgtcatttccttacctttcctcaacccacctactaacactcttcttcatcattacctactatgctattaccatacattaattttaggataattagcatttgtctcatttgtcatgtatgactttcaaatgtatatgactttaaataatacttcaatataattttatgatttttttattatattttatttaattttattataaaatcagtgacctagtaactagtaattgataaacgaatacaaattaaatatcttttactttttaataaatggtaaaaacaaaatattttttaggtttttaattgaaaaaatagttgaaattatatttaatttacatctatttatcaactactattcaccgcataacttaatccgccaactccatattgataaatgcaatgttcaactcaccaactcgtgaacctagctaactcagtcattacacgggcgggtacaggttcttgaacatcattattgttgtaacaacaatgttttgagggtgatctttcaccacaaatggtatcaaaactaagagtttagagtttaagaatcaccttcaaccaatcaagattcatcttcaacatttcaagaatcaaattcgaacttttaaaaaccagattcaagcaatagaacttgtttgaatggctacaccaaggtttgaggtggacaagtgttgtgaattttttaatacacaagtgcacgtatcgtttacaagtaataatagtgaaagtaaagtatcattccaatgaggactgtagttaagtaccaaataattaaattcctaattctatctggtgataataaatgaagaaatgtttaaatttaatttcaattgaatctacttcttatagcctaatataatttaatttcaattccaattttcatgtaatagcgaattaactaattcaatctacattctgattaagatatatagaatctaaatcatatggtaaagtcctacacttctgtggtagattacacatataacttacattaaacacaaaaattatatgctaatttcatcctattcatttcatttaatatgtttcttctcatttttaatttgtaatatgaattttactatttaaacttgaaacaagtagaaaacaagcgtaattctgcacaaaatgaatataatcaattgaaatgcacctctaaaatacttcgtaaaatgaatctaaaactagctaaagccaagaataatttcaagctatggagaatcaaaatgaaaggttttctggttcaccaaaggatctatgaggcacttgatgctgaagccatggaattgattgaagacaggaagaagaaacttgagatagaaggcaaggcacacaggttcattctcctcagtcttggtgatgaggttttaagggaagttttagatgaagacaaggccttgtgtctctagaacaagttggactcaatctacatgaagaaatctcttgcaaacaagtcgtatctcaagaacaagttgtacacactttgaatggatgagtcaaaaaaattgagaaagcctatagatgattataacaaaatcattatctaaataatcttggggtgaaaatcgatgatgaagaccaggctatagtcctattgagtttacttcccaagatgtatgagcactttgttaatacaatcttttatggcaaagaagctctgaccacgacagaggttaatgctacattgaattctaaagaaattcaaaacaaaggagatgagaaagtagagaacaatggggaaagattactcattgttaagggaaaatttcccaagaggggatataagggaaatcagaactcaaatggctacaaaggtaaccattcaagatccaattctagaaactccacagggggtcaagctctaatggagttgtaggaaagaaatgttattactgtaagaaggagggctactttagagacgattgtttgaatttgaaggctaagttgaagagagacaatcatcaaaagtccaagaagcatggaattgctgatgttgcagatggatgtgagtcatctgatgcacttgtagtgtcgtttgatgcacttgtgatgtctaattcagattcaggtggagattggattctagattcagggtgttcatttcaatgacaccaaacaaagaacttttcaagactttcagataatcacgggggcacacttcttgggaacaacaaatcttgtgagatcaaaggtgtggaaataatcttgttaaagaatcatgatagagtcatgaagaccctgcaacaggtcatgtatgtttcatttctcaaaagaaatcttctttatattggtatgtttgataaaatggggtgttaaaggaacccttgacactaggttagcttaaatgctagctgcaattcaaaagaggaagttgcagggtatgtggactatgactatgctggatgcatagacactaggagatcacttacaggttatgttttcacagctcaagctggatgcataagttagaaatcaaccatgcaaaatgcagaagctctgtcttccactgaagcagggtatatggcaatcactgaagtaattaaagaagccatatgggtgaaaggtttaactaaggaacttggcttcaatttagaaagcatcataatataccgtgacagccaaagtgccctacatttaatgaagaatcccatatttcatgagaggtcaaaatatattaacatcaaggtgtatttcatctgagacatcattggccaaaatgaagtacaagtaagcaagtgaacactaaggacaatccaactagcatgttcactaaaggggttcctattagcaagcttaggcattgcctaaggctactaattattgacaccaacacctaatgcccttagggggctcttggaacgatttattcttcattggtttagcttcactaacttcaattaaaggtagatttctggtgttagttaaagttagttaagtctagctactattcagttaaaacaaaaaaatttcttaaagcttcaatctcgacagttaagttagttagggacaattctgtctttccaacactcttggacaatatcttgatataccaaccttttctacaatcagaaataacctttcagaacttcttcttcctcctctcctaaattcttctagtacataaatgaaagctatagaactagatcctcatgtgagttcatagctgttggtgatcatcaccattataacaccaagtgtgaatcaataaagattgaagtcaaaggctgttccatcaggagagtaaacaattgtcattgctaagcaactaattgaacctcattaaattggtgtgatttgacttctcttttgcattttatgtttttcattctcttgattaattagtgcaatttattgcactaattgtcttctttgttcttgattgtttttcaaggtgattaaaacacaacaattacattttaatattaaattatttaatatttattaatatatatattttttcacatgactaacaacaaaataaaataaattattgttgttttatgtctccaataacaaattaaaacaaataaaaaataataataataataaattcaaaggaagaataaaaaaatgttgtatgtataaaaaatattacattttgttttaaattatatttttcttataaataatttataaaaataaaatatacatttgatttgctaagttttaaaatatatatatcatatgtattatatttttaattactagttattacaaatattaattgcatatataattttttttttaaaatatgtataaatagtgtgaattagatttgatcggttgttttaacatgtcaatcaacattcaatcctcacaaatgtaaattttagatttttcaatctaatctaatccgcacaaattagattgaattatatattttataaacacctctatttacaatgcaaggaaaaataattttcttaattaggagttgtatcgttttatattataaaaggcacttgcacaagccttttctaattcatagttaagagctatatgtcagtaattcagcactggtaattatggtaacatttagcaaagtagtcttcatttctttcaaggcagaagatcccttattacaaatctaggccaatggccatccaccaaccacataataaaatcagttcaccttaactacatgccaaattaacacatcccaaaatttcttcctcaataaacaaacagttgatcaggtagtaagtaatgaaaaggcaagctagctctagtaaatatataaaaacaagggtggtttgatctttgatgtggagaaaccataacttggcatgagtggcttaagagagtataataaagcaagtacatattttagtcactgtaattaattaagaatctaacaagcaaccaaaaaaactaaccttcaacagggtcatggtgaccaattacagtcaaaagctacaaactaatctaagtggcttggcaaatttgttggtaccaaaatgattcttatgatttgcataattacaacattgatattactgttgagccaaactactttgtctaaatatgtgaactttcatctcagcttgatatcccttaagtagctcaaagatgcacacatcacctacctgaagagagttgtctctcacaaaggcacaccatccactggaaaacttatgttctgctccattaacaattaaattcacatactgacattcctcaccaacccaaagaataatagtttgtgtttttccctctaaataatctcttgcaaaactcattggaatatactgcacaaagaagaatcaaatatttaatgttcactactaatactcacttgataaaagagtcatgctaataatgtacataataattataaggagtaacattttctaccataccagtctacgtctatgcacatgtgttgatcgcaaagtcacttgaaagtaaggattttttgagacgaattggcttggccctgaagatgaaagcctcttattagtgccttgattaaatttaaaaacaaaatgtaagctgaattttcatgagaatgtttttgacatacccaaaggtcgttcaactttgatgttctgttgttctctctttgcatttaagttgtaagaaataatgctggttttatcttcatcataattattaaaagattcaactttcacacacggttttctcactgtcccggaaagtgtagctgatctgctcatatttggagctgaaaacaacatacacatgtaagctaatactgtaatcatatatgaattctggacacaattataataacatatcattacctgtatagagttgttgctcttctcttattttctcttcacctatattgttacatacattattagcccaataaatatttgaagggtgtgaagggaaatgatcaagatagtactgttaccaataattatcattattatagagtaagtaatacagttcttgtttacctggtaacataggggaatttgcagctccattttcataaaatataaccactttgaataaaattactccaatgttttttctcaaaacaaaggcacaaacatcacctactttcaaatcattatcttgaacaaattccttccaaccacaacagaatcttgaatatcttgaagatccttcatactgtttataagagtacataacagaccaggtcctcccgccctgaaccttaaggatcacatcttgggacttactgaggtaagttcttgcaaagtgaaatggtacattcttgacaaaaaatgaaaaaggtcaatatgatcaatattttcaatgtctaatttgaaaatcacaacacgaaagaaacttattcattaccaaatgaaacttagctccaacaacagatggttgcataggaacaaagaaaaaggggtctttagatttaaaaccttcagctctcatgagagctttagcctttacttttccagtcaatctctgctttcttgtatatttttcaggttccatgcctcttggtacaggagattctccacatactttatctgacaaatcaaatttcactgaaaatagattctacagattagccaaaacatacaaaaaaggtgaaatcatcatgaaaaaaggttcaaggtgtcatgaattatcactatattgcctcataagtattaagatgatcaataccttcagatttatcacaaggactagttttcattttcttgtgagaactagcagaacatggtaatggagacttatccaagactttaattgaaatatcatctttagtatcatcaacactatgcttctcaaaatggctaggattagaaggataatcgatctccatagtatctttgtcgaatatggtaacatcaaacagagagttcccttcatatcgaaaaactaagagatttccacggcttaaagaacaatgttgtgcaaatttattccaaccctcttctatccatacattccatcactactttttgtcaacccaacctcccatgttgatccacatggaagcttaagaaatacttgactcgataaggagccacaatatttcacccaaaatgcctttggaatttgctgcacaagagaaaaccaaagccaaatgttgatggaaaatgtgttatcatttaagttaaaaagagttaccagaaaactgaactatatgactgcagcctacaaaaatgtgtgtgtgtgtgtgatctcctcttcataaaatctagccatggtgtagaagggtgaccaaccatgccataaaaatcaaaggcatatgatctgatgaaggcacatttgcttatggaaattttagaaagtctgtgacaaacaagttcatgctaaagctttaacaaacttcatgttgcagaaactatgattaattagtactaaaaaaattgcaaaatcgacatatcacaagactcactttaacatgtcaatgtcatactcatatatccggtacattgacaataaattcagacaaaagatattcgaaacagtaaaaaatgccataaaatgtacataatgaagctaccacaaaatgataataataagtttacaaatgtacatacatttatgtgtaatgtgagtagtgaagccctaatctggtgtagcagagggagagagagtagtgataatgtatacttactagcttggtgttggtgttgtcaggagtttgttgaagaataatcttgaaaaaatggggagcagtaggagaaaacaccatggttggacacttttttagctttcttttgctctgaaacaaataacccttttagattataattccataatttgtttagagtatttctgtgttttggagctcaaatctggcaatgcaagagaagttaatagcttggaaatggaaaccaacctgacctgactggatttttgtagaagaaatgcacccttcaagaccactttggttttttttttcttcttcattaatttgtgtagtagactctggtgtgtttttatagatctcttattcggtatagtttacagtaccaaggttccaacagttattgaccaagtgtccaagtatctaaaattttttggtctattatttatttatttattttatcattgtctatctaatacaacacttatattttaactattttttttaaaaaaataaaaattgaatgacttaaatgtcaatttacttaatatttaatactcaaatacttacataaagtttaaaattataacgtatgtattattactactaaaaattaaatttaagtatttatttataaacaaaaattaaactttaatatttatgctataaattactctatttatttaagtttatttttaaatttttaaatt

SEQ ID NO: 218966 - DNA, 3508 bp, Cannabis indica
tgaccttccccaggcggtgtgggattacacagcttacccagtatttccccttacggatcacgggactactgactgtcataattgctatcccccacttataaccataattgtttggatcactgtctctaaaaaacctctctccgagtaaacacctcaaaaagattcttttttgcatttttaaaattttgaacagaatgagcatctcgaccatacttccattttttgatctcagccttacaattttgaattcaagccttgcaattaccactataatccttaccccactctcctaacacctccccacaatacagaatttctcctgaatccccttgcccttacaaagatcccagctatctttaataatttagaaacataaaggttctcttaaccaagcattttcaaatctaaactgcttcttactagagatagccacctcattcttaggcacttaaaggatggggtaatgaacagaattagaaaggttaaagattaagtaacttaccatttggaaataaatcaagcaaagcatcagatacaagcgcacgatcgagccaaacttctatccaatcgggagtccctctactcctttcccacataaataggtagccaattgactctaagtcttgtaaatggtagtcatctacagcttgttgaaaccccgacaataaccaatcagggtaaggatcaccaccccatttgtcatcatgacctagaatattgttgaggtctcctataatacaccaaggtaacaaggattcagatgacaaatcatgaagtaaatcccaagtcttacgtcagagatgccaaatgggttctccatacaacccagttaactgccatgagggagcaccaaaaaccgtgattttcaagtcaatatgcaagtttgagaatcccagcaagttagcttcttcatcgaatctctaaagtagagtcagaccaccactatgtccttgcacttcaaccacaaataaaccttcaaagcccaacgatatgcgaactctccatgtagtctcttttgctaagagtcttgtataaaaagatgaaattgggtgtcttttagatcaccaaacccttaaggaattgtaaggcccacaggttcccaagcccatggcgattccaactaagtaggctcataattctcggtgggcctgaaaactaaagcccacctaaaaatcattttttgaccccacatttatagcattattatcattaccagtaaccatttcctcttccatgttggatggcccatcagacaggcccacatgggtcctacgtcttttagtatcaactaccacaagcatattactcgtgacatctgggatgtgattttaacctgtagaggagataaaattctcctgagtcagcgtacgagtatccccagaattgtgggattggttgacagagaatgttgggtcattattggcccctatcttctcgaccccatcaataattcccccaatcttctccacgtttgccgtgatcccagaagttaccatattcgaaccaccttcaatagttggcaaatttaactcctcaccagcatcagtaaattatgagcagttgcgtcaccacttggctccaatcttgtggtttcgatggcgtggttgtgctctcacaaacattccatatggcttcacaattttatcagggggagtagtgaacaaggtaggacaatatccatatgagtgtcccaatatcccacatataaaaaaaggaggacatgttcacattaaaaattgcaccagaactcctccgtggcatctttttttacacgcctccttctttttaatggcttattgacatcaattgtaactctcacatgtagataagttctccacattcccataaagttcttggaatttgactccacaaattttccaatataattgcccatgttcttcaccacgactttggacatgaaccctagacgaagatcatctagttaaacccaaatgtccattatattcaggtggacaaccaatggatcgtctcctggttttagtctctaaaacaccagtaaaaaaatcattaaacgtccaaaggcttttctcaatcatcctttgtatatcgacttcatgataaaattagaataaataccgattatcatccaattctttgacaaacattccccgacctggtgccacaatgaggccatcaggtgttttattgcatcaaattcaatacttcattgagtcaaaaatcaccccaccaaacaccaacgatcgtcaatagttgatgagaaggctaaaatatcttcatcttcatcctccaaagcaatattagcccgttgctttgacagatcttgaatccccatactactagaagccatcgatgaacagagacagaaaaaatcaacaaaataccaaaaagacaaaaaactaaacaacacgataaatcaacatgtcaccaggacaagacatataaactacttatattttttattctaaagaacaacaaaccatttactctagtctcttgtgtccatttcttttttcataaatgattattaatataaatgtatgtatacaaaaaattacatttaataggctaaaatattactataaattaattaaaaagtctatagaataaattatgattaaactgtataatgtttttttatgtactagatgaggttagcaggatgttcttaacttttttttatttcatttcatttatatttttatttatttaattatatttgtactagatgagtaatttctatttatttatataatttaatttttatatcttaattagttgaaaattataaaatacattactgatgatacaagaataagggataaattttttaaagtggacattataagtagtttggatattaatttttaaaatttaaattattataaatttcttgaaatttaataagatatcttaaataattaataactcttaaaaatttaatgaataatagatatatggttggagtcttagagaagaattaaaaatagaaagaggttacaaaagattattaggtgatgatgatttatataatgaaaacaaacagagcaaaagaagacaaaaccaaaaacccgtaaaatgaaaatatttatccaatttaaatttaaaaacaatgtaatgttaaaaaagacaaaaaataaaaaaaataaatacttgtaataaaatcatatttgtgagttgtttaaatgacattttggtaaaataacataataattgcacctcatgatgaaaaataatttaatattgtgtttaattattagaaaaattaagctagggaccattatggcaaatacatatgattaattttcatacaaattgaaatatatatttaaaatcaatgtacataaagcttttctggttttagagcgttctagtggcatgtgttccttctcttcggtaccaagcatggttcttctggtccacccaaagaagtgttgtggtggtttccatcctctcatttactctctttttcttttttctttttttgacgcgatgatcaaaatcacacatgattaacaaagcagcaatc

SEQ ID NO: 218967 - DNA, 7280 bp, Cannabis indica
ggaaggacaaaaaacttaaaagattttctatcttatatagtgagtgatgcaaaaaattttgttcttaaaatgttaaacaaagccaatatgagattgatgctcttcacctaacaaatagagagtttaattttacatgcttttgtagcttagcatgtgaattttagtaacattttaaatatattttaattttattttagttaatatttagggttttgaataattaacataatataatattcaaaactttgacgtaatcaaccaataaaaatattaactttatatatatttttaaataatgggtccccataaaagaagaacattgcacaagttgtataaattatcaaatttacaagtattcaatattgttttttcaccctataataaggttattatttatttatttatttttgataaagaagcaaaatttcataaaacaaacagaagtagcaacaaggtactacctccccaacttatataaaactacaagagttaattttaccctatgtgcaataatagttaaagagaattagcatccaacacagagagaaaaacagaagaacatttctaatctgtaatttttctatcatgcagactgatgtggttgactggtttcttgttttcagctgcaacaatggtcacacaacagcaaaaataaaacataagaattcttgaatgtcaaactcccaaagttaaaataatgtgtaagactcttgaatgtcaaaacgagtgattaagctgaactcagtcatctgcagaggcagaagaatggtgaggaaacgacgcccacacctctgtccatgtcctcagaccttccgatacatccttaactacagatgcagcatcttccacgttgacacggatttgatccttgctgtctctctccctgatggtcactgatgtggttgaatcgactgtgactgcaaagggtacaccgagttcatctgttctcgcgtatcttttcccgattgaggtacctgttcagtttgttcaaatacattagagccatactcaggacaatatcaaacagctagttccaacatttgcaaatcgattcagaagaacacaaatgttggctctgttcccaacctgtaatgtcgattttatgtgaaattccggcgacagtcaaggacttggaaatgtctttggcgaccttctcatacttttcattctgaaccagtggaaacactgtacatttaataggggcaacgagtggggggaaccgaaacacgttcaactgatcatcaccagctttgcttggtctggtgtagaaagaatgctcatacaggcaatatataatccgaccgataccaaaagatggctcgattacggatggtgtgaagaccctttggtggactttcttttctgcttggaaattgcaaccatactcttcttgatggagacatttttctcaagtgtgcacacataaaactccatctctccttttgtttccaaattcgctttcatctccaaagcttcttcctctttcattgccttacaaaagttaatatggggcatgatcaattacacaaaatacactacaatatcaaaaacaaaataataataaaaaaagcatctgtcaagtcacctccaaagcttcaacaacatttttttgctgtcctttgaatacaaggcctagctctttcttcacaggagttataatcaattcctgaaatcataagttatttgtcaatcatcaaataaagatgaccagcatctaaaacagttcatttgtcgaagagagttattgagctatgacactgtacaatcattagcgagataacagttggctttacctccacttctcttggttctgaaaatttctcagctgctacaaggggaacaccacttttttcctgtcatacatttgcaagtcatcagcagtgaatttctgtgctcttacatgatgtttgatgcaatataaactctaaaatgttttttgttttggttttataatcgcaaaacaaatccaaagaatacattcttaaatttctacatctcatcatcacactgacacagcatagcacaccaccatttcggttcaaaatgagcagaggttttttggatttgtagagaaaaaattactcactgtttccagcaccaaaaaaaaagacattaaagagaagaagaaagaaatacttactgaatgagcacgcaaatcaaaggcagatctgtctgcaataccaacacactcaatccaaccataggaacactcaatctcagcatcccaacagtcacatgcatagtgagccatttcatttgcaaggtgctggcggaaccgtaaacgatcttcatttataccaagacgggtgaggaaaagatacactctcccaatgaagtagccaagagtttcgttattaacaattccctaagtgacatgtaacacaatcatcatcatcatcatcatcatcgcatgcataaagacaaggaaagatactgaagaaaagttatttgaacgaaccccggcaactgcatcacccagacacaatttctttgcagactggccagacatttgttcttcccttgggaacatcagaaactccaattttgcaacttctgaaaagttcgggtgagatttgtcttcaggatccacaaagtgttcaatctcagcaagtgtaaattcacgaactctcagaagcccttgtcgaggagatatctgcaaattaatacaatattcatggagtgagatattgtttaaggtttcatttgaagagcaaaatagaccttgcacaactgccacagatcaaaatactcgttacaaagatggcatatccattacccaccagaaataatatgagcatgctatgcaaacataagtgctaaagtccaaagataagaacctcgtttctaaaagcctggccaatttgagcagcagcaaaaggtagcttgttcccattgtaatagtacaagtctttgaagttaacaaatatgccttgtgcagtttctgggcgcatgaacctacaacagaggagatttaattacatatcaatactacttaaacagaagtcttaataataataataataatagaatcactgaggataactagtaccaaaatgtaatgtgctcacccagagctcagaccagatggacctattgatgtctgaaacatgagattgaatggatatggatcagaaagaggattcttagtgtctggagctgtaatgccatactccttaagttttgcacccagctcttcagctgagagctcatccaagacagcaagtatgtgcttcagttctgcagcctccttggcagttatggaaaggtccttttgaagcttttcactgcaaaagtccttgagcaagtgatcagcacggtagcaagtcccggttttctcatctttaaccataaggtcagtaaatttatcaacatgaccagatgctttaagaacaacctctggggttacacagggacagtcaacctccaacatgttctcctcaagaacaaaatgctgcaacaaaacaaaacccatctcttaacagacttaacataatattatatatataaacacacattgggatcaagaaagcaaatatcgatgttattagaaaattggcactataaattcatggaaataacgaaaatttaaagaaaacttaacgggtatcgcatatatttgtctaaaaatagtaaaattaatggcaaaacttatacaataccaatagatttgaagaattataacaattcatccaatttaataacaaataaaaatcttatttagatgttataaaatagtcttgattatgtcgtcatataaatataataatatttcacattcaccctcaatgaggaaacatcactaccaaaatgaacttagaagaggttcaaaattattagtaaaacaattttaatcatcaatactgataccaatatgtttgcatgtaattctgaaccacgattttctatatatatcaatcattttattgcgttatatttttgaaaagacaaacaaagaaagaaaattgcattcaagcatcgtaaaaatttcccattttttgtcggaaaagatatattgctagcaaaattaagctgcctaaaaattcaaaatatgggtgaaaatgtcgatttttgcttcctcgattgagataaaagagcctacttccataatcacaactagcggaaacaatttgaattttctaatccagctaaacaaagttctaaaattctgctgaaacccgaagctccaaagttgtaattcatcgaaaatcaacgaaaaagtgactaacctgacgccaaaaggaaaggacattagacttgacagcacaacctggggggccatagtcataaagtccagcaacaccacgataaatcttgaaggaaggaatgtaaaacaaacggcgttctaatgtgttggataccaactgccggaattcctctctgctaacggagccatcaccacctgaaccagtaacggttgcttgaaggtctttctcgagagtggtcttctcaagcttgagggcattgagagcttggatggcagcatcgatatcagacttggatgctttggaggctttgagagcacgtacgttgtttccttgagcttccacagccgataacttatcagccagtgcttgacgaagcgattcctcggaagccattgatgatgatggcctgagagtgagataattgagggtgagacgagtgagtaatttatgaccaaatgaagatattgatgaggttgttaggaaattcaatggcatgaaatgaaatctggttgaaaatggtagaaatttgagagagattacctgagagaaattgccggtgagagaggagagttgtggagcctgaaaatcagagatagaggcggcttagtgagtgagaggtttagggttaaggagagagagaagtggtgtttggataggaaagggatggtgtagtgttgtagttgagtttttgattcctatgtttggttgccacactacaattggaaaactctattcactcacatcctatgaatccaatccaattagaagtattacgggtgttcaacaaaatttacaaaccgtccaactcgaataaattattcaaaccaaattgaataaactgacaaaaaatacatctcgtagtaatacaataaaaatccaaacttaatgtattgagtggtttacaaattattttaaactgcctaattaacctgaataaaccgaattaagacgatttatatatttttaataaatatatatattatattacataaattatatttatttattaaactattttgtatttaaagtttagacattttagtgtttaatttaaacttagatttatagttaataatttttgttgcatttggatattgaagttgaaatttaaaatctatactatattattacttttattattattattttatgtttactcaattatatttttcttatcttaaagttcttaatttttttattgagaaaaccttttatagataaattaaactaaacctcacggtcgttacaaataatgttcaataggatggttgacaagtcaaccatgccagtaaaattgttggcgttagtccacttagccacattataggctgcaaaattacaagatctagaaatgaacaaaaaattacaactcaaaaataaactagagagcttattacaatggtgaacatagttaacaataccccaactggaacaagtcacattcagcgccttggtaactatctccgagtcactctcaattagcacacaagagtgtttcaaaagcactgccttctctgtggccaattgacaagcagaagtttcgccaatcagaggattagtgaagtttagcatgttagtggccacccataaaatagaacccgtgtgatccctagccaaggccactctgcatagaatcgcaaccaactttcacatcacaattgattttgatccactcttccgggaggggtccaaccatgaggaatagcagcatcaggcaaggaaaacaaaacagacccgtaatctgcgtaacagaaagtgatagagccaacacaatggttaatgttactcagagaattgttgtgtaccttatcgttacgggccttccagattgtgtccaccacaatggaagcatagagaaataatttgtccacttcaacccctctagacttcagactccaaagaaatttgactcggtcccataatctcgcaccggagtcaacaacaagcatgatcccccaagaggaggaacgccacatgtgggacacaaagttacagtaaaggaaagtgtgctccattgattcctcaccctccccacaaagagggcaagagacatcttcaatatgcattcttttggcaaggagagcacggacaggaagggcaataaaaagaatgctccactagagaactttatggcactccaacactttagattcccaaagtctgtctcataaggctggagaaacagtgcactgagacgcgtggtccaagacttgaactaggtaggcagacttagttgagaataagccatttgaatccttggtctagatccatttatccctaccatcgccacaaggtttacatccttttaaaatgttgctaattgtttcttgatcaaactgaagatgaagtttagggatatcccaatctttattgtccaggagaaggtctgcaaccttatcccaatcttcatcctgatattggaatctctagcaaagatatgggaatcatgaacagtttcatcaacgaagaaagagaacaagacgaataatcaagaccctggtctgtgttggttttatggtactaaattaggtatctagggaaagaattcgtattatttaattatcattgtaccatagcccattgaatcttcaaatgtgtgtacattaaatcaaaacaataaaatacaagtttagaacatatatctcttgaagactattagggtatcctcaaaatttctcgtatgttgtatcctttaatgaagatgatgaagatgatgaaattggactcacaccagtgtcttccaaatcattccaccacacacaatgaatgatgcaagctataaggataatatgtatagtattgttcttgttgaattctctgagcaagaattgttcttgagagaaaaatattttttcttctctcaatggtgtattcaaaattttatgtagaagataagtgttctgatttctcaaatcagacttctatttatagtagttaaatctctttaattaaatcatatttaattgtttacataaaataaatatctataactgaattcggttactgatatttatgaaagaatctctcaactacttgaaagaatatctcaaccaatttgaaatatcttaaaccact

SEQ ID NO: 218968 - DNA, 4069 bp, Cannabis indica
tgttctatgttatatacaaatagatcattgttaatttatctaacagtttattctagtgtttttgatggtatgtctatttgaatatttggtgaacatttcttaaataaaccaagtttcagtactttaaatgacaatgagtagttacataattcaatgggtgaaatatgaacaagtttaatggccatgtcatataatatatatatatatatttatatatatatatatatctgcattttatgtctacctgttcaaaagctcaaattttaacttgctagtcctttaggggtaggtaataccatgagttttgtacaataagattaaatggatgattaatgagctgagcaaatatggtacaaagtatcatgattttccctaatgaatgaaagccttttttattggatctattcaaagaaaattgtactataatcattaaatcaagctatatttataataagccgagatttttttaaaaggtaaatggaaatatcattaattggaaaattgtacatagcctattatactaagaaatggtttatgaagtaaaatttacaaaagtaaattcattaagttgtttacaataatcaggagaaaattctaatattactttcaactaaataatgcataagtcgtaagtataaaatataaaaaggaaaccacttgaggctagctcacgtggtcatagggagtgcatgtgtgttggaggtcttgggttcgagtcccaagttatgtatgttgtaatatataaacgcttaaataaaaaaaaatataaaaaagaatacaaagaatgctatatttctaacccaaataaatatgtgataaatcatatctattataattaccatcaaatatatattaatttgttggtttgtttcaacactttgagatgagtatgctgcattcattgtatgtatgcatacacactgacactactatgtgtactatataatcagtattattaattaatagaattttgtattagttatttaaatagtatttctatatctttaaaatttatatgagaccatacaggtttttgtattatttttgattgttttgataacttttacagtttgtatgctttttatggtgtttgtgtcattttttatggcttgcctttatttgtttagaataattttgtgttatgatcaatgggcaagagaaataatctattttgtgctcatgatttctacttcaacgactttttacttttaacagataagtatttctaaatttttttaagtccttatatttaagatggattggtttactatcattctttcacattatctttttttcattatattgtgtggtaataaagtttattttttttattattttgtaggttgttttgtggaggactttacacctacaaagaatttaccgataagtttaattttaaatataatttgtttaatatttattttcagttgttttaaattaaggtgttaatatacatttggctagttatactttgaaattttgttggttttttttagttttattgtaatgttgatgatttaggttgtgtgttaatttctaagtttgttttttaatttttattttgaagattgtcattctaatataactttttagtttggtgtttcgatattttttcagttttgttagctctaaaacttttaataatgggaaggtatttttttaacgtgatagggtgttgttgaagacgttatagttttattgtttaaatttctggagcaattttgtcccatgtgacttgcgattagatattgcagctcatagtccccgagacaacccaatcaaaaactcacaaacataaagataaacaatgggcaaaaagaacatatgataagtaaaatattttactatgcaataaacataattattagataattaggagtatttaattaattgaaatacataaatataattaattatgaattaattcatgttgagatatttggaatttatttaattaagaaattgaagaatcaaaaggcacatatgtcctccatggcatgtgacatatgcgtgtaacttagtatcatctcactatgtgtacatgcatataatttttcaaaagagaattttgattcaataatttttaattattaaatataaagttaaataataaattattttaatatatgattaaaatattatatattatttaataaataaaattcaaaattggaataattcagttagatgattaaaatggattgaattgttttaaatcagttaaaactaataatatttaattattgattaattaaataaaatttatttttgaattaaataaattctctccattttaattaattaatttatttatttatatatatatatatagagaaaatgatataaaaaaaaagatacgatactttttcctaaatccctaaagcacacgcataggcttttctctgaagaaaaactaagttttcaaatttatcagatctcatgtgttgagcatattcaataaatggaaattcttatttcgttgtattacaagcccacactcgtctttgggttgtgagactgtcgaggaagcataagcaaactatttgttgaatgcggaaggaagtacaagggaatattgaaagaaaaaaatagtgatgctaatcgggaactggaaagtctaatgacaatgttgaaactctcttcaatgggaaaccagatgtgacaaactagtaatcccgaaagttcgagacatgccttatgctgctggttgggcaaactaccccagagcgttgcttcagctagtaaaacccaatcttggacttattcttctgcatgagttgggatctaatgctatagaaatacaatacctacaccggagtggggacctcaatctttcggtctacgcagagcatgtgccatctgtcaagaagtttgtatacttgcagaatgaactggatgggtgcaattcccacttcagcgcaaatattggagaagtagcactgagaggcaattgtgctctgcacagaatatgtgctcagctctagacatcgaatccatgtgtgtacacggttggtgactccccaagcacgaaggcctattccaacaaaggcctgatatatgatggacccgttccatggagtaatgttttagcaccttgtagttaagaaacttgttagagatctgatccatctcccattaagaggagttatatactattttaggagcagccatttaagattgctcctcattcggttccactccttgagtcgcatcctcaatcaactccactccctcgaggtcaaagatgtctgacatgatggttaatttgagagaaattaaaagaaaaccaagcagttaaatacccacgctaaagaaaatagtcagggtacgggagaatcgtcccctagaacttcttggagaggtcgccgctagacccgacatttggaagcaaaatccccatagaactttgctcccaaataatcagatcgggaacacaagagtaaacagaaagttcctagtgcttcatcaggaaccttaagagttccaaacaaagggtttcaaattcaaacatgttcaacaacatttagaattcgattcacagaaaatggataatcaatagagtttacaaatctttatttaagttatagacattatacatgccaaattatacacacaatctcaagaaagttctagacggtccaaaaacctaaattccacttaccatattctataacccacatgcaaaataccacctaaatcatcaacaagaaattcgtatgttctccctagaatttgaacaagcattttgaggaaagaaatcataatttaaaaagagtgaagtacttacttgttgaaggcgaaggatgtgggggtggcaagactcttggtggtgacacagtaacataaacctcatcgagatggcgaagtcaggcctgaagctcacaagcccaagagattagtctaatatctgctaaaatgaacttcacttattaactaaaataaaataaaaattgtaaagcggtaactaatcagtatgattggtataataaacaatctaatattttgtttttgaaaatagtaaaaatatatatattgttataaaataatataaaataatataaagtagatg

SEQ ID NO: 218969 - DNA, 4210 bp, Cannabis indica
atttttttaatttccgcattttatatacacattcatatatttcagtttatacatataaattgtctaacagttgagacatttaactatctttattcttaatcttagtttacctcaaactttgtaggttcaaagaaaaggtttgcctgccaagatgctagggaatcagagccctgcaaagtcaaacacaacttcaacaaatgatgccttgtaatgtttataagtcatagcagttgattctgtcacccttttcttggttttttaaaatttaattacctgaattacaaagcaacgtgtgtaagtactggaatcatcacagacaaaccattcacaaggtgaagagtgaagtgactgtagatccttagcagcctctagcttttccttttcaccagcagcaaccactgctgtcatagttgatgctgccatatatgctgcaacttcggatttatagatgcgagacgacggcaaactttctacttcctctgccaccgcttgttctttatcattatcgcatgaaccctctagctttgattccgaggcgattgaaaacatgtttttggctttggattgtacataagacgctgctgaggctgcgatatcatacgctacagaagcacggattggacgtttttgctctgaatccacagcttcattagctgaaacactaacttttctatcatctgaggaagaagatccaggtacctgagtagactcttggtctagcctagcttttactgctgctgcctcagccttcttttctaaagaagatgtcacaaattgtaggccaaaatacctttttaaatcctttgcctgcaaagaaattagctttgtcattatcttttgttatataataaacgaagtgaacaaacagagttgcttaattaattacctttatatctggtataacataagctatgttgcacaagaaagctagctgagaaagtagcttagtaccagaccatggtactctaaccagaaaccttttaaaagattcttgatccaatatcttttctccatgttcttcatcttcttcatctgaactataacttaccaaacaaccattatcatcttctccatcacaaccacaatcatgatgatcaatttcctcctcatcataatcatcacaaaccctgtcattaccttcatcaatttcctcattatttttaacccaatgacttctaatctccattagtctttccacccaattagctctcttgatttcttgttcttgttcttcttcactaatgacatgatcactactacttatctcctcaatgctctcatcctctgcagtcatagttgtttctttatctaccatactcatatctttgcttgtttccggatcaaacagaaacgaccgaagcgagtttgggagaattgaacccgaaaactgaaatgggaaaattcccattgaacgactgttcttcagttttggttgagttggtggtgaagcatgaatcttgttactgatgcagcagactaaattgttatctgaataagactttctcaacatggctctactttgaagatctttgcttgattcagacctcctcaggccattgatcatatggtctttgaaggtgcctcctttccttggagaggtgggaacattaaatgatgtacatgccatggctgtaataataatctcaccaaagagtttgtttgcttattcttgatcaacaagcttcattggcaactctgaataaaaagaatgaaaacaaaagtcgtaaacttagtgagcatataacatatagattccaaaattcagaactttttgtaaaatattgtttttgagttcttgatcaagcaaattaagtcatggcatatatatggactaccttataagcgaacatagaaaggtttctaaggcttctttgttaataacggtaacatttagactcaacaaccccttcaaagtactatgccaataataaaattgatattaacaataaccaaactgactattaataaataaaaaagaatgattgaatgatcaccaagaaatagttaattattatattcgataatatttttgtcactagtactatagttatttacgaagaacttgtagtgtagctacatatctatagcttaattaaacgattaaaaattttgatataagagaggcgtggacgaaaattctcatcaaattttatgataactagtcatatatataaaggagtctgcattaatattaattaaaaacagtattctatatctagctataccatcattttttttttttgataaaaaaaatcattgttttttaggaatataagtacctcgcattttatatttttctgaaaaataggtttgttacctctctgtacttttcaataaatatattaaaatcaactttttattataacttttatgtctgaaaatatatgttagaatattttaaaattttttttttaatgacagttttcgttatactgtaaattttaagaaaaattgaataatttataatactgaagatagaattcttaatatatcaatgttgaaaaaattttaaatatactttcagtacatgagtgcactaactctttttttttcttgttagtgtaactagtttgaagttctatgttgtatccagcgatagcttactgtacaagtaagtaccagaaaaattaaaaactttgaagacaggaaactaataacaaaacaaagtttatgagaaagatgttgattttgtttttttattagagcatctttataaatgatgaaaatgcaaactataactcgttaaaaatgtattctaataatatgctaaattatgatataaacatatgtaaagtttacatcccttaatattttttaataaatattaaataacatattaaatttgaatatgagcataataattaaaaaattaatgtaaatatatcacaaaattatttatggtacaaaaatatatagctcaaattttggagatggtcttactatataagttgtttcggaaatctcgaggttttatagtaataatgataatcataaatattctagtctcagattttattggaaagatatttttattattattaattatttaatttatttttgttttaaattagaactctaaacatgggttgttagtaggaccttaaaccaactcacttgcatgtgcgccaggtgtaattagactgcattgcatcactaaataaccattaaaactcagctttaatatctcaattaatcttgtcgctttccttctctttttttggttattattatttaaagagtactttatttggaagttttttcttaatagccatttcaaaaacaaaaaggtaaggtttttcgaagaaaagaaaaaaaaaattgtaacgtttttgtaacagaagtgagtgaatactctatcaagaaactataaatggtattattccataatttatttgtttgattaatactctaacaagaaagaaaaaaaaaacttcccaatttaaactctccaagactaaatacgttttattttatatatgaacatctgaaatcataattaatatgaaaggaaattaagaatagtgcatacctcaaattcagggaaaatcctggagacatattcccagccaaagaagatgaatgagttactgaagcatagagataaaagcaccaacatttatatatagagactgtaaacaaattcagaatagttgaagctctaaaccagaaaagtggaagtgaacccgggtaggaatgtctttattatatatacataaatatgtctctgtacattttgatctctaatatttgagacagaaaattattaagctttgaaatccctcttttcttctgatttccttctctcacacttagaaggagaaatcgatctagacattactataagcggaaggcttacatttatatagttaggaatggtcgctagctgggaagagtcatgggaatctgttcacgtggacgtaaagtactgccacttcaaaaccgtagttattatatattttatatatagacataaataaccctacctctaccactttaacaaattaatgatttttaagtcttcttatttgaattgttttcttatagtcctatttccttgacatgtcagagcattaatgctatatttcatactattggtgtcctgttatttattaagttagaatatactaaactccatattaaaatgcacacttggcacacggataatatatacactgatcaagatatacacattattttaaataaatttttt

SEQ ID NO: 218970 - DNA, 3863 bp, Cannabis indica
caagctagaatgatatatatatatatatatatatatataagttgggtagaagaaggaatatatgttatgttaattatgaagctagctagtttaatttatataaatatcatgatcaggtgggttaggagcaggaacaggtgctaaattcagcggaagtcgacattaattaatagttgtcatttgttaaagctagctttagcttttgttattgttgttgttttcggctttatttctttttttgggttggcgaatagctgaatttagcagatgggggttttagtcatcaacaaccttttgttcctgtttaatgtatatgtatatatacaggcctacattccaccttttattattaattaagagtgaaaaaagattacagaaaaacaatttaatgttgatcccaattattaattatattatttattttcattatatatatattacttactataaatttattaaatgggctagtatttatttatatatattattatatatatagagagagagttgttcaataatagaagagaatgagatgaaagtgagtggagatgattaaattttgattgggtgcctggctgagcagctttttcttttgttatataatttaaacatgtgatagtggaaatcagagggcagcccactgttgctgttttaattagggtttatctccttaacaaggatttgcatgtatacaaaaattaagatatgtatgagcaagcgagtgcgttctgatcgagcgtacacgccctttgtttgtatatttttgtataccattatatactgcgtgagttggacgatcctcaaccgtttgatcctatcgcttacgcaattattaatctatacgtttccataaaaaataatcagttttcttttgggatttcgactagcaattaaatactaagtttttttttaatatgtttggtaaggaaagggtgactgtttttttattctttttatcacttattattcctaatgttatctcattttttttaatgattacacatcttctgtaaagtggaaatatatattatccttaaaaacagctaaaacaagatcaatccttaattattatagttaatttaacacaattattacgtgtttcttgagttaactcgtttcggttgatcaactttttgttaaacttgtgaaaaagattttcaccacgcttttccctgcacgtgcttatggcaagcaattggccgcaaacacgcatatacctatttactttgtaattatataaaaaagaaataaattatttattattatcagtacagttaataattttagtagtatatatatatatgtacgtatacaaatattatctatatacatatgcccaaacaactgataaattgccaatttcggaaaaagaactaaaaggttggtgaatcatttcaaagtgaatcagtcccatcccatgtacccaaaatagatagctcaaataattaaacatgtagtactcataatgaaggtatgagattcaagttttttctggctacctagatactagatagcatgttatagtttgttgatccccaaatatatggaaaatgttcataatccacaaattaatgaatatattaagctcggctgtagactatattcccgtgtaaaagtaaattaatattagtatctcatgatgacatgaattttgttaacattgtgggtttttctcataataagttcgagagcgtttggatgtgttaaaaacgtactcatatataccaggattacacacactgcggcactgtgctactacaattaagttatttttttttttgaactggtataattaataagcatcttataggttagcttgtaaccataaaaaaataaaataaaataaaagaagaaaattaaggtatatggccacaagacccacacatatatatatatatacatatatattaatatgggaattaatggttttttttttttttctttaaacatgcaccgcaagttaattgatagaataaagataattttttttaataaaaatttgttgtattataaattaagcaaattaactatcaaaatataacttgaagatctgaaaagacaaaccctcactaaaccgaaaactaaaaaagaataagtctaacaaaaataataaaaacattgtttaaagaaataagtagacgcttacaatcagaaataatcaaagcaaatataaaaaaagcacttgatgtgtatgattcaattgcataaataattacttgacaatcagaaaataaattagtactaagattatctggtttttttttcctttctaaagtggtgataagaagataaattggtactaagattatctcaaaaagaatggtgttattcgtggtttcggcggaatgtttgttaaactcttaaacgttttatgaatgtttaacatataagcacagtaaaatctaatttaatttatatatgttttttcctttatcaagaaaagtttctttatacgttatagctttcaattaaagtttaagcttgttcagtctaataacaacaaaagtaattgattatgtgtatcattttaccttcaataagcatatccacgtcacagcataaaattccgacatgaaaagaaattaattgtcattcactaaattgcttacacaaattaataattcttaaaaaaagacgtagatagctatctagcgggtagacaagagaatttaaagtaaagaaccttgctccctgattggtcttttatatgatatcaattaggcttatagtgattcaggggaacaaattgaaaagcctaatcaagtatgcgaatttaaattaaaagaagcttaacattgaagaattccttgtgttgtgactaaaaaaatgactaatcattagaatgatattttttaaaaaagaaaaaaaaaactttaattgttaaatcttgctggttggtatcacttggcacctgctttttataattttattttattttttatcatttttaatgactttgtttgaattgattggccaaagggtatattataccatatacctctcccatccatggaattcaattctcaactctctcctgagatatggttacttattagttaaaaaaacgaacaaacatttatataaaaaggaatacttcaaaggaaaagcatattggcatcattgtgatgttagtaaagtaatatatgtgtgtgttaatatatctatgactttcagcaacttcaatcatactttaatgggaaaacctttttttttccttgttttggctaatcaatggccaaaccatgtttgtcttctgtcacaagctcttttgaacatgcttaaaaagcttggcctttttcttttcacctttggagatacctgattttacaacaaaagttatccatccacaaaaaaacagtttcaggccttaaagggctttaaacagttcatatatacataattgtttacaggtttgatataatttgtcaaagaagaaaaaaaaaagaaatgggcatagtatcgttttagattcttataagtgagtacagctagctagctttgtccattacaaccactttttctttttaacctctttgaatctagcagtaatgtttatctctcctcctctagaagactgatgaactatccatataataggaaaaaggttggtagtttcaggtcaagattgtttaaagtttttattttcagtacattacttgatatctaatacgaaaagttgatggctttaagggaaataaaagctttcaaagtatgatgaaaaagtggcagaagatttcccttttattattatttattttggttcattatattcatcaagcatgaaggtaacatcatcattatatatgctttgattctcatgatctgtggtttgaaaatttgagaaataagatcatgaagcaaaa

SEQ ID NO: 218971 - DNA, 3151 bp, Cannabis indica
aagatcctggtaaaataaatattccaacactttatacatcggctgtaaccgctttagtaatttccaactttcttttctacccccggacccagacttccataaaaaccagtgaaacgccacgtaaaccccagatcattttccaccaaggcatcgatatgagaaactgtaaaagatttggcctgaactttaacagagttagaccaaagcagagccaatccgccactctttcctttagcatcaacagaaaaacagccatcgtaaccaagttgcactcgaataaattccatcgcagcacttgaaagacgagtttcggacaagaagatcatcccgggatgaatctccttgacatgggatttgagagtagttaatgtccaaggattcccaagcccttggacattccaaaatagggcattcattgcgatcggcgacccaaaacagttgggttcgccgcttccaaagtagtatcaaggatcaaatctgtcaactttgaaatgttccttgaggcactgctcccatcttccttcattccaaccactgaattaaccaatcctgtattcaaaattccaccattcttgagacgtttcggagttatctttcttcgtttcgtctttccctcactcagtccagatttattaatattactctcataagtaaccggcacttcgaagagttgaacggtttctatagagctggccttttgtattgttgtcgataattgtggatcgagagagttcggagttgccaaaatggaagaggagttccccattagttcttcacgccaatcaccatttcgtttatggttaatcaagtttttttcctccggggtttgtgaaacttcatttatcaggcctgtcctttttcccacaaacttatcaatagaagatgagcccttctccacgatcacctccatatctgctataccagattcatgtgtatactgtgccactgcaatcgcaggaggagttaacaaagccgagttctttaacttcccctgttctgattcctttctcaagtttgtaggaattggattcctattgtcaatacaatgaggtataccagaattcaaattcgaacctgagcccatcgttcctttcccaaaaatatctgttatgtccttcttcccatccaccttgagccatgttccaaatccttgtttgatattattcgagtcttccaccactcgtcgggtaggatccaagcaaaccttcatttcgtgaccaatacaaccacaattaaaacacatataaggtaatctatcatacctgaatgggagccataatttacggccttcgtagggaaagaggaagcccggacatatgggtttgttcaaatcacaccaaactttgaacgtgaagaaacccttagaagaaatcttggcaacatccgctttctgcacctcgatgatttcacctgccatacccgcaagtctttctaggttcttttgagtgatcgatttagggggcaaggacaaaattctgccactcaattgaattctagagagacaagattcccaattagatggaatttccttcatacgttccaagattagggtaccattattcagaaaccatgggttcttgataagaattcggttcaaatcttgggacgatttgaaggagaataccaggaagatggcattcattgaagtgtgtttgatttcgacaccccaaactttctccggtaatccccacacccgacccagaatcgttttgatcaaggatcgattcattgtgcgattagaacagagacgtcctatagcacacagcttccccacttcggcacctccatcttcattgatttcccaaccatcttcatctagaacggtcaggttgttcgtctgagatagcagttcttccatggctgtcacgggcttgttcagcaatccttccggcaggctcttttcgggagagtgcatatatattttaaaaatgtgtcgctttccttttattatgccgccaacttataacattggaagttttaaaaacaaaacatataactgggaaaaaaaaattggtaaacattcctataatggataatttcccaaaataaaattatatggggtaaaaataaaaaatatagattttattaaaataaaataaaaatatatgtaaggtataaaataaaaaattattttataagggtaaaaataaaataaaattattaaaataaaatgaaaaattatttttataaggtaaaagttaaaatatttaaaaatatatatatatatacaaaattaatttataaaaaattaggggtgaatgaccccataataagacccactcccttggcgtagggttttcaaatttaccatatattgtatttgtataacattcaaaaggttactgtcctatatgttaatggttatgtacaatgttggagctaatctgttatgttatgattagaatttcaaaagaatagatacgcaagtgattaataatattacacaaaagattatatgtctacaaagtattcttgaatctaattagaatctaagagcgatcttctctaggtcagtaaaagaaattttatggatggggaaaataggctgaaacttacaaaatataagtatcccaaaaactttgcaagtgggatatctatagataaattaattataactgatgagacccattacccaccctccaaagttcatataaaaaagttaccaatgaaatctctacttgattagatcataatcttctcaagttgatttaaacttaatcatgtcataattttccaaaataaaaatattggtgggactcaatttcgggatcatgctataggatttcatgctcaagctcaaactgtatctaatctctcagtcttttatgatagcaattatataaataaattgatgacgagtgttcttctctgatattaattaaaactttttattatataattgtgagatgttatttagtgtgggttgtaataatactataaaaaaatttacctttagtcataacaaaatttatagataaaaattaaataattgtgactaattacaaattactatgtgactaaaaaattcgcagttaaaagtattagtcacaaaaatcacaaattgttttgactagatgtatttttagtcacaatatttgttgtgactaaaactaaattagttacaacttgtgtctaaatattatgttttagt

SEQ ID NO: 218972 - DNA, 2841 bp, Cannabis indica
agaggtatgtttcaaataaatataaattagaggtaaatttgattaattaatgaataaaagaggcatttttcaacttaccccttttttatattatttttctgttacttttatttggttttttttttattatatatgttcatgttttttttattagaataccataaaaatatataaaagaaaatctttcaagataaaatttaaaaattagtattttatgtataataaatactaaatgcatataaaatgaattgtctttaaatttggagtgatttttgtaatcatatataaaggaagttatttttgtaagtaaaacttattttaatattatgggcccaaaaacatggtagtcggcccaataaggaataacaatggatggtggtggcgaaagactggcggttgaaaaactgaattactctccaaacaaaacattacattaccaaacactctgaacgtacctcctcgactcgactcgactcgtagctcagaaaattcgagagacaaagatcagagatgtcatgcttgatttcttgctgtacgaccgcaacgtgcggtctatgcacctcggtggcctctggcttaactaataagtcagctagaatcgcttactgtggtcttttcggtgtatcactcgtcgtttcatggattctcagggaagttggagctcctctcttggagaaattcccttgtgagtttcactttctacttcattcattcttttcttatatgggtatttgaaatatctatttattattttcgcttaatttttatgtatgtgttttcttggagaaattcgcctgtggatgtaactttttttagctttcattcatattcctacctgccacattattttttcagctaattttttcatctgggtatcagaatatgttgtttcttgtagctaattttgatatataggctcctctcgtgaacaaattcttttttttttttttttcaaattaattcacgactgtttgttgttgttgttgttgttgttagtatcttaaatgttgattaagctgagctagttttgatatattcatcttcagcgatgtttttttggcttcttcagtgttatgctctgtttggttataacttagttactttctgctctgggtaaaatgaatctgttggttctgatgtcctgcgtggttacttttttaatttgttggatattcagttgaaattaaatatatattggattctgaatatggagaattcattcccctcttcattttgtttgtatacagggataagccattccgagactcacccgaaggaatggtatcagatacaggcagttcttcgtttgagcttggggaatttcttgttttttggaatatttgctcttataatgattggtgtgaaggaccaaaatgacagacgtgattcatggcatcatggtggatggattgcaaagatggtgatatggcttcttcttgtcgttcttgcatttttcattccaaatgccgttatctcattttacggttagtcaatttattacatagtagaactaatttagtttcaacacaatatttgccttgtaatgtgatactttaacctggtctaatggaaatttcttacatacatttgggttttattcttagaaatatctcacattgagaattttaaatggctttattaccagtgtaaatatctgtgaagaatagcctgttcatactctgctgtgagaatttatgtaaatgattgtgtgaggttactttttcaatctttacttgcatggtttttatacattgaacaacttatattttagtatggttacattttttgatggaatgagtacgtagctgggtctttgttgatttcatcagtaactattgagtctaacggctgacaatctttttatcttttcctcctatcggtctgtaatattttcattgtatttttgttcattagatttaatgccttttgtgctttctatacttgtagggactttgtcaatatttggagcaggtgcgtttttacttgttcaagtccttatcctgctagacttcactcactcatggaatgatgcttgggttgagaaagatgaacaaaaatggtttgtccaggcacttattatccactatcttttcccatcctagagcccccatttgatttctaaccgtgtaactggtatttattaggtacgttgctttactggttgtatctgctggatgctacattgccgcatttgccttctcaggaattctattcatttggttcaatccctctggtcaagactgtggcctgaacattttcttcattgtcatgaccatgattcttggatttgtatttgctattattgcattacatccagcagtaagtgagacaatttataccatacttaatatgcattttattcactggaatgtgcagtatatgttttcttgctatataagctcaatcagctgagttatattagattattatcttttatgtgctttccctgagaaaatgtttttgaaataaatagttgctaaatggtatgagagaaaaaaaattattataccaaatggctatatctttttaatcattggcaatagttgtcttttgggcaaaaaaggaagttaattagtgcatgagaagtaacattattttgtttgaaatgagcatcttgagttcactcaaagtacttacggaaaattgctatatcatggtaaaccctttttattgtttatcttagttccataagcattttatacagctgagtagcttgcatagacactacttattagagttaatctcacattgttaatgtgtggaaataaattgtcatatataagatgaatgggctactactcccattgctaattagttttgagatggaaccccattcacctt

SEQ ID NO: 218973 - DNA, 3657 bp, Cannabis indica
ttttcggtgttggttttttcggtgttcggacggtcggtgtattcggtttagtcggttttttggattttttttgtcacccctaggcagaggcccaagagatagggcatgcagttggggtgatgttaacccaccacaggttgcccaagattgggagaatagatttgcagcaatgcaagccagaattaatgagcaagacgaaaaaataggcgattgaggcagtagggtgctcctacaatacttgctcctgaggtgcaagtggctcctaccccttctgtgcaggttgggccagttgtcgttgtgaattgaatggaaccactatataaaaggttccgtaaacaggcacctccagtctttcggagaggtctggatgttatgaaagccgagcagtggctacctgttatcaaccgaattttaaatttcatgggagtcactagaaatgacagagtgacctacgctaccttccagttttaggaagataccttagtttggtgggatatggtagctcttacttgggatgtaactacaattacctgagaataatttcaagagttgtctaatgcaaagtactatagtgaggcagtccgtagtgcaaagaaaaaggagtttactcaaactcagaaagagaatatgttaggtaatggtgatgctatgaagaataaagaagaaggaaaaacaaaaaggggaaaaaaagaaatgatttgttagctgagaaaattttgtttgtttactttttatttttttaatgatatattttttattttttcaatgattcattttatttttaaatatttatttaggtggatcaataatattgtacaatcaaccatgtatacagtgtgttcacgtggacaatatatacatggacaaccaatgtagagttcaatgccaaaaatattgggagttcaccataaatgctaacagaacacgaatattaaaaattttatcgtcaaaatttaaattttaaaagttaattgctagtgaactgaaagtattaaagatttcggtgcaattaactcttaatattttattgtctttcatttctccaattccgagttgtaaaactcttcgattatttggggccgaagttgaatattactcaaagtaaggggtgaaaatgaaaatacccctgaaaggatttggaacgagagaaaggaatataccagagactagggtttcattatcgaagagaatataaatactccaactctgtgtgctgagcaacttcctttgacgagtggtgctttttttagtgaaactaaaccaacttcactctccgcctccactaatatcttcaatcgccatggctgtcaccttcacagatctccacaccgaagagggactcaaatcccttgatcaatatctctccagcaaaacctacatctctgggtattttgatcaaatcgtgaatttcattttattttagtttcttagttattttcaattcatatttaggctcgagtttgattggtgatgtaaattgtgttcttagagatgcattgacaaaggacgacattaaggtgtacgctgccgtggctgcaaagcccggggattcttatcctaatgcttgcaggtggtacgaaagcgtttcttcacagcttgcttccaggttggttcaccagattttctctatattagtatcagtatgtgttgaattttattgttttgaggtataatagtaatatataaatccaaattcacaattttgaggccttttttatttgattcgttagctttccgggcaaagctgttggtgttggaatcggtggcaaaggtgctcctgtagaagaacctaagaaggtatgttttgcttgtttgtgtattcagtggtattttaatttgtctttattaaatcaaattagtttgatttttgccctgtcctgtggaaatggttccggatctgaattgtagttttagatcagtatagttttttttttcttttcttagtttctttgttcgaccctttaggaattttgctttaatgtcatactggtgaatggttgggacaatgattcttgtttaactctacgtttaggtaacaaatgatcgatcataagaatggtatttggaaatttttgtttgttttctttttaattagattgatatatctgctgatactgtgccatcttatctttctttgaataaaggaaaaagaaccaaaatcatacttctactcacattctttagatgtttgagatgccctaccagtttcttttcttctgaattattcatattttgtgactttaattgtttgcaattgaatagagatatattatgcaatttatcatgcacgttttttctttcttaataatacaactttatgaccaagaggatatttggattgacatgctctcttgtatctattcaatttcttaggatgctcctgttgaagaggatgacgatgacctcgacctctttggtgatgagaccgaggaggacaagaaggccgctgaggagagggaggctgctaaaaaggcttcttctaagaagaaagagagtacgtataatgtgaatgcatgttttggagaactgccagaagtttccatcaattagaaatttacatgtgaaaattgttcttacatttactgatttattttctttaggtggaaaatcttctattctgatggatgtgaagccttgggacgatgagacagacatgaaaaagctagaagaagctgttaggagtgttgagatgcctggtctattgtggggagcatgtatggtttgccttaccctcaactcattgtgcctactttatttgtctagctctatgcaaaatataatgaaatccaaaatatcatcgattgtcatcttttctttgaggttttttttttcctaatagttattgtattctaatctttggtttttaatttgatttgtaacagcaaaattggttcccgttggttatggtataaagaagcttcagattatgcttacaattgtcgatgatctcgtgtctcccgacaacatcatcgaggactatcttactgccgagcctgctaatgaatacatccagagctgtgatatcgttgccttcaacaagatttaaatactttttttgtgttagttatttatggggctatttagttgtctaatttttcacattgtgtcatgcatttaaaatgtttttcttttttggccttgtgattttgtatcggtactgtttattttttcttgttacgataagaggaggaaagttaaatctttatgttctactaattagtagtattttaaccttgtgttgttacatcgtcaatctttattttttaaaaaaaattgacaatgctactggtctgaacatgaaagaaatggtaagagaaagaaaccaaaaaagaaaggaattaaatttgtgttttttttattttacattatttattatgttattttttaaaaaatatgtatttattttatttgaaaactagtttttattatatagaccaaaataataagggattttgaaagagtttcagagttaatttgagagttttgccaatattcccgaatattaacttatcactgtacgatccaattcaatctgtaaagtacggatattcgcatttgtgcggattggaatgttgattgacatataaagaaaatagtaatttaaaagtctgtatattctattcttatatatatttttttttctatatacaatttaaa

SEQ ID NO: 218974 - DNA, 6519 bp, Cannabis indica
tcttcagtctgacgctctcccaactgagctatccccgcaaccataccttagcttttaattactttaatcaacttcattattttgacatttccttaattagatgctaacattaagttgttggtaatggtggatttgaaaacattaaacatgaaaataaatatgttaagtacaactcgacgatcatattcaatccaagtcctattaccaataaacagacaaaccaactggtaccaccaacattgcaatgttctcagcattgagtgtaaaaaaaatgaactaacgaattttgtatttataatcggtataaatatgaaatgtatcgatatacaatttgtatcatacaaagcagctaataattccatggcagcactcaagaagccagtatctaaagtctcaataatgtttcaaaagcaagacacaagacagtaacaacaaaatcttcaccggccaacctgaatgggacccgagccacttagagacatggaagtagagagagtgtttttgagctcatcaaaagtagggtgaagccctcttccaccaatgttattcaggcgagtgttagacgacgatgccgcagcctctttcatcttctcaagcaaattgttcatttccattccctcctcttcagtcacaccatcaccaacactcctttccaataacttcacaacttgcctcattgttggtctctcattgggttcagggtgcacacaccacaaccccaaggacagcactctctcaacttcttccatgttatatccacccttactctttatcctctcatcaagaacacaaactacttcacctgtctcctccatcatcctccatacccaatgcaccaagcctggcaatccttcttgaatcggtcttcgcccgctgaccacctctagaacaagtactccaaaaccaaacacatctgtttgagctgagacccgaccggtttgaaccacttcaggagccatgtatcccacagttccaactactattgtggtactggctaatttctcatgatggtgcatcttggcaaggccaaagtctcctaaccttgcagtcatatccttgtcaagcaacacattgcttgccttgatatctctatgtaaaaccttaacttcccaaccttcatgcaagtaaaagatcccagatgctacatctttcaaaacctttaatctctcttcccaagttaatgccatactctcatcacagtcaaatatcctgttgtccaagctcccattttgcatataatcataaaccaaaatcaagtttcctttctctcttctacaccagcctcttaatccaaccaaattcctatgctttagtcttcccaagcttgaaatctcagccaaaaactctcttattccttgatcattcttgactgaaattctcttgactgcaatctctactcctcctggcaaaacccctttataaaccttcccattacctccatacccaattacatttttctccaagaacccctctgttgcttggtgaatctctttataaccaatcctgtgtggccaatactctgtttcccattcttcaatattctcctccacactcttgtttttcctgaccagaacaacatatccaattaccaaaaacacaatagctagtaaaccaccaccaatactgatccctagaataaacccttctgacttaaaaaccgacccttttggagccacaaaagaaggcaagttttgagtcaccagagcatcaccaatggagaaattagtattactaaagctccaagctaatatcctatgactctcaaccaactgcccagttgatccagaaaacccaacatacatttcatcaaagaataccccagaaagattaacagactcacttatcaatggccttcgaggccttcttcgacctgcaggagccatggttacgttaatccttgaatcaaaaaaatctatccagacttgataattaactccatttttaagctcagtttctctaaactgctcaccatcttcaccatcccaatacccagcagagtgagaagccacagaattaagcgaattaacgtttagacccacatggttatcatcaatatcttggaactcttggttctgaaacacatcaaattcgattccgagaatatggttaccggaatcaccattattggagaaattaaagagacccagattctgggatgaggtcccgcccactgtacctgtaaagggtacgaacacaaacacaaaaccatggccgggttggaagccatcgactgaggcgatggagaaaatgaaagaggtcgagaagggttctaccaaagtcgaagaattactgggttttgtggtgatttttgtagggaacagagatcttccaagggagaaggttgaggcatttgttaggctgaggatggaagactcaacagtagagtccccaaagagtaaaatattggatgagttgaagttagtgttgaagatgaactcagttgtagacgaaacccagttcaagttaaggattataactatgatggttggaaagaacaagccaaaaactttcagagacattggagaagccgagagaataatccaaggaattgtttttgggaaagtagaataccattttgttgtctctttcatttttatttctcagagagctcaatgtacaatccagttaaaaaaaaaagtcaaaaaagtacaattttaacttcataaaatatgaataagttgtttgtggatttggtggtaaaagggaaagtagtagaaaatactgacaatatacagagaacatgcatttattgtagtgttgaaattttgtgtttgtttgttctatgataattggctggcgctgtaggaaaagtttgacggataacataaaagtcttaacgtttggttgacaaaaaaacaggtgaacgttactaacatcttcttttgacttttcctcattctttctatcaagaataaaatatcttatcattattaatgtcattacgatgttttacattattatatagcgtaaaattcctcttttgacaaaaggaaaaggctgttctgaattttgaataacatcacgtccagaccagtccgctactccatgccagatattttggacgccatgcatgaaaacaactcctctgacaatataaagaaaactagggaccatacgtgtggtttgaaataaattcataatgccttttttttcttcttcttcttcttctccttctatctattattataaattgaaatactatatgaatattgccagaatacaattacggattcattctcacattacttctaaaaaggactctgggtctatgactgtattaaatgcagtaaatggagaggcctcttacagctctctatctagatttacctacctatacatggaataatcacaccaagtaagtactacgggaggagagcttagcatgctcttgtcactctcgttttctctctacattatctctaacaagtgaaaaggaatgaatgtgttgggtgccgtgggatcgtatatctatccagctacttgcttagaggcagacactggataagctagcccctgggaacccggtctgcttttgtcgattcttgttcttcgagcatattcttggatccggcgatcgtgctctttaagcatctgatccatgttattcgatgaaacaagtaaagggccggagacgtaaattttgttggacttggggttatgaccatgctggagaaggaaaacagaaacaaatgcatcagatatataacttggcaaattataacataatattcgtgatattcgaatcaacagtaactaatgattttgacaatgcaatacgaatcaacaggggaattatgttggaaaaaagaataatcaaaacaatgcattggatgaaagaaagatgagactaaccagacttgattctttgtcacaggcttttccatcatctacttgacgacgagaatgtgctactcttagcgagtgatgctttcggtcctgctttttagtagaatctgctccattatttgataatcgtaatctgccaccatcacttgtctcttgagagtgtgaggaaccagctttctcttgctgatcttcagatgatgcagtagtcctagctgccactaaaccagataacttagacaagttggctctagttgaaacattggaaggatcattacggtcccttccagctcttgttagtccatatccaggaattagtggccctgaatgagatgatgtcctcctgttatgatcatctctagaatcctttcttgaatctctaacaacccgggactgcttggttggatcaatcaaatatccagagtaagattcctctcttcgatggttaaacacttcactatggctctttgaattggaatgatcttgctttctctgtagccaattaagaaagaaattttaaaactaagtcaaaaagagaaaaagaaaatgttacatggtacaatacattagtgtactggttcaaacaagtatttttcgaatgccaatgagatttcaatagttccaaaatacagttcaagtaatatcctgatttcaaacatcaaacttttttgtttaaaatctaagttcaatcttcttttctattcattccatttttctctctttagtttataacaggacaatgtaacttgaaactaaaagatgacatgattaccccagcataagcatttgctgcatgaattgcttgagcttccctttgtcctcttctttcaagatcaatcttgtggccccttgctccttgtctgtacaagttatataaataattaactagaaaatacacaaatgcttctgtctaatgtaaataggagtgtaaaagggaactgatacataaccattaatctttcataaaatattagcaataggtgcattaaaaatgcaagaatctatattttatagaagaccatagatccttaaaaataacctcaattcttcaaaccaaaaaaagaatgttccaacatgtaccttctaacttcttcctctagaaatttagcatcaatctccttgctgggaggatatttgggtaaagttgaaggatcacaagcaagagggcttgtggtaaagaactgtgaaacaatattcaaagttagaggatagctaaagatcaggctcaataattatgcattaaacacaatataaaaacaccaaatctttcttgtttatattcttttcttaaaagattttttttccctagaaaatgccatagttttggtattaagattgaaataagattagtactctagatctttgatgcaccactaatatttttattgaaggtaagccaacataagcacaaaattcagctaaaaaagaaagtgggcatatacataagatataactaaaaagcaagtggacatatattaagatttatatatagtgactgggttttggtaattgggtaaatactgtgtttggtgtgactaaatctatccaaaaaaaaaaccttttgtggcactagtttgataatagatgctactaaagttaaaaatgattccattttctccttttcctatcaaccaaaagctaacgcattttggtattgtatctactgtcataaatattaaaagagcatggaaacatgctgaattaggttaatatttatttatatttcgaaagagaattcacacctcactcttgagagcaaaagatgctgtccttcgattggaaggatctatggaaagcaaggtctccataagctgcacagcaggagcaggaagttctttaaatgtctctgcaacacatcgtctgtaaggttgtggaggcttcattactgttgcatggcgtaagtgcaaattcctccaatattcttcagatggcgagccacagagcttaaagattttatgtagctgctcaacctacaaaagaaaaaagagtttatataagtgacatctagtatagcataatgttctagattcattagtgtatggaacgaaaggctactaacattcaacaatgtatacatttacctctgtttttccaggcaagataggtctgccagaatatagttctccgagaatgcaaccagtactccataaatccactgcaaccccataatgagaggctccaagtagaagttccggtggtctataccaaagagtaaccacgcggctcgtcaatgagacactattatgaggatcgtaaaaacttgccaagccgaaatccgcaattttcaagataccattattgtcaataagaagatttgaaccctttatgtcacgatgcagaacaccatgactatgacaatgatcaagtccgctcaaaagttgatgcatgtagcatttaacctaaagaaatttaggcaccacattacagtttaagcatcaaatcataccaaaaggaaacttccaaatattcattctttctgcataattttgttaaatggtcattgatgacgacaaaataataccagaacaaacagaaactctaacaagatgagtacctgcgattcggtgaattttataccaggacgagatgcaagtccagtaagatcatgttccatatactcaaatataaggtataagctgcaagaggtacgtgatgtgatcaacccttccaacttaa

SEQ ID NO: 218975 - DNA, 8271 bp, Cannabis indica
gtccacaacacacctacaacttcggaacgacttcaactgcccacaaaagtaggaaagcttcgtcagagtgtaactgccctattatctaggaatattctccatttgctatgtattctatataaagggccttaacccaacgtgaaagggacttgatttcatccattctacacatgcacttaagagctcagaagcactaagacattaaactctctctttttttctcatcacttcgtaagtctctaacacacattctcatcattgtaatactgaagagagccataactagaaattacaaggtttcagcttgtaatttgcatggtattatctcaagagtgaatacaataaaaggggagtaggtcattacctggtcaaaagagacgaatctctataaaatcttgtgtctttcatatttattatcattttgcacgtgacagtcataaacgatattaaattctagtcagactctgcgtcaattggctaaattcacagtcaataactacttttctataatccatcttgtgagaaataaaactcgaagttgacgtagctccattatagtcacgatacagagagtgaactactataaattgttgtgtctctcttatttatagttaacttttaataccttctcaccaatctagcaaatgagtgtggccaaatatctgtgtcaacagttatgaagttctataaatacatcgaacattcactggagtaatatgtatggagttttccacctttcaaagattctatctaatggagtataagttttaaattattgtatatgactcaattgtcaagaaaagaaataattcttactgccttatttcattacgtccataaaggtttacttgttattgtttgtttctagtttgtgtagaatttcggcgacatttacttggttcctacaaaaataagaactggcctttggcatctccaactccaactagacgactatgggacaaaatttcatgccagctagggggagattcaacaacacaacaatttttatatttatattgatatgcttaatattattattttacaatttattatattttttattttaataattttatttaatttttaaataataatattaagtgtacgaatataaacgctacaagaatgcacataaaaacagtctatattaataattgattaaatgacaccttaaatttattaacatttcagtaatttgaaagattttaaaatcaaaatttaagtaaagattaagtatagatgaaacgatatttgaaggagtttaaccgctaaaaatttgaaattatttgaccttcaaaatagtttctaaaaataataaatataaccatctatacttgggtcacggtacatgaacaacatatagcataaggcataatctgatctgattgtagttttcctcaatatcgaaacatagatccaaaaacatgacactaaacgttgagatatatatatatagggttgtgttgtgtgaggtcctgtatgttaatcaaatcaagataaattcaaaatcacagaacattaaagttaatcaaaatttcagagatgaccttcaataataacaaatccatcagattatagaattatgccccaattcagggaactgaattgtaaataataataataataaaataaaaatctaatcaaactcaaaagggttgggcagcagtatgaagtagagacgtcaatgagaaaagaaaccaaaaatgaaaatagagggcaaaagaataaaagtgttactatttcattcactagggaataggaaggaaaaaaagtgtccattgaacacttttcgccaagtccactccagtacatgctctaaatgaaatactaaacacaaaaagggctgtgggttgcacacaagggtgaggtgaggctgaggtgagatgagaacactgccataactcattcaatccaataaacccttttcttcaagtgcagctaattctgaaaaattattatatggttcttttttgcttacatctccttgttgtcttcttcagctccaactcttttcaactctttcaactttctgtagcccttgtcagttccaaatatcctgagagttcattgacaaaagttataacagcattataatgtgccttgagtatatacttgggacatcatgcattgtcttcgatacacgagttgtaaatgaaaaacataacaaggagaaatgaaaccatgccaattgccaagaataacaccatacagcacacagttgaaggttaggtatttcaaaaagtgaaatttagcaaggcagagagaaagcaatgcatttaataatagaaacaatctaatttacggataaagcgataagcctaagacttatattgtgcatcacaaaatgattaaatgaaatactaagtctctaatgtacataggctgagttgtcttagtgttttaattctattggtccagttgtaaccctaggtggcttaagtctttttaagaccaatacttataaatagagagggagcaacctcatttagattagcgtggaattaaatgagagtagaatctttgtggatagatcaatcctctaaaaaaattaggaatttggagagacgatcctcttgaaagcttgatattataacttcgtgactgtttttttaaaataaagatcatttgagaaattcattactggtatttcttttggaaaatagctgatagtatatttctactctaaagattattctatcaaaatggtgcggtgagctgcggacacgagacctcaaaaacagtcggagagaagtgattcctccatggtttcagaagaagatagtgaagctttggaagttgacacttctggaattaaggaatctctacatgaatcaatacgagagatagcacaacaacttcatcaacagttgtaagaatctctccaagaaatgtcacatcaacaaacaattcaagactttattggaagttcaaaaaaaaatccagaactgtctaagaacccaaagaagatgttaatgcagttgctggaaataaggaaaaggaggaaagcaagggcccagtgagccccctggcacctcaacacagcgctgcaacgctggaacagcgatcagctaccctctggcatcactcctatggcaggtttctgtctgaatcggagctcgaagcaggaattttttgacaagaactaacaagactcgcaattccgacatgaaaattggctcaagaagttgaagatgccgagttttgatggagagaatccaaacatatggatattacaagcagaaagattttctcttgtcatggatatgacagcaaccagaagattgaggctgccgtaatttcattttcaagggatgttctactataataaatatgaaattaaaatgcgagacatattaagttgggaagagataaaaaaactcatgctgaagcatttcaaaaacacacaaatgaggtccctttatgaccaatttctggcagtcaagcaaaagggtttcgtggctgaaaataataaaaaaattatctggctcttagctacatttgacaacatagcgccaaaagttcagttaggcacattttttaatgaattagtaccatcaataacggctgaattaagggtacatcgtccaagaaatgtggattgagcgatagaacacaaccaacgctcaagagatggaggggaaaaggagcccgggagcatctattaaggcaagaaccagtaagattcactcaaaacacaaccatggggctgccaaagtgccacctacatggtaatttcatggaaattagtttttcagcgaaagatcttttgaaagaggagaatcaagaactcattccagacacgagaagcaattaagagaactaaaatgccaacatttgacgaggaaaatttcaatggcatggcatggataataccgtccatgacgaaaagagcattgttctacccgagcagatggtgttgtcgctgatgaaaatctagctggttgaagtagtttgcaaggatggagagcaacagaacattagaaaagagacctcaaaggcacttccgaagaaggagtcagttttaagggggaaatttttaagaaaaatcacttgtttgttgcaagaaagacacatttattctctaccacagcagcacctacacgatggacagctgtcgcctgaagagaagaagatgccactggtcatgctacagcatctaataagatttcaaagtttaatcatcttcgttgatgaagaaacttgtatgagtagggtgcagaatacaccaggagtcttctacattcaatggattttcgataaagagaaaaccaatagaaaaagggaatacaaatcgaaacttagcccatcaccaagttcaccagcaggtcatgaagtgttgatcaagtggcactttctctcaaattttaaagcaagagaggaattatctaccattaatgaacaatttcaaagttttcgccttgaggataaggtgagggttcttggggggtattaataagcctaagacttatcttgtgcatcaaaaaatgattaaatgaaatacttagtctcttatgtacattgtctgagttgtcttagtgttttaattttattggtccaattgtaatcctaggtggcctgagtatttttaagaccaatgcttataaatagagagggagcaacctcatttagattagcttggaattaaataagagtagactctttgtggaaagaccaatcctctcgaaagattgggactttgaagagacaagcctctcgaaagttcaatattgtaacttcgtgactatttttcagaataaagaccatttgagaaattctggtatttattttaggaaatagctatagaatatttttactcttagattattctatcaataagcattacacatgagttaacatatggattgtaaaagactccaaaggagcttttcgatgatttattataaaattatttaatgactactagagattaacgcaagtaatgtaatcccaagtatttttttaagcttagtttcaaatatttaagaaaaaaaaagctagcctaaacagaataatatatagtttatcaaggcttaaaccatgacaacttaacaagaactatcatgaaagtggaaaatagcttttatgacatggcaggccaaacaaaaccaaacacaactatatcaatataaataacgatcagcaaacttgaataccccgtcttaactaagagaatgccttaaagtactgtttgtgcttgacattaggattacgtaaactgaaggttgttaggttaaaaaagactagtacaactaatgaacctcaaaccagcatgtcataggtaagactatggattattcctatgacatgctggccaataggaaagtaaatggtacgggtcagtcccgactcgctaccgacccactccgttaatattttgacccaccccacgccaccccattaaccttcatgtactgggttgagtcagccccgacctggactaactgggtcgggcttgacccaacccggccctatcgctagttttaattacaatttctaaaaaaataaaataatcctatttttttataattatgaatagaaaaaaaaaaaactaaatacaccacacaactgaaagttaatatactatcactacgccgcatgtcatacctatactttttttttagttttttcaaaaatacttttttatatgttttatttacaattttacaacctaaagttttatatataaaaatacgattttgaagtttcaaaatacaaaaatacgatttttttcaataaaagataagaaaacgactaaaaacaacaagaaatcaaactcataacaactataagtcaactataaaaaactataaaacaaccaaaaacaagaaaaacaccgacctcataacaactataaaacaaccaaaagaatatcgaacagtttactgaaatcgtattttataaataaaaaagttcaaaccgtaaaaatgaaaatttctgtgttttttaatctattatgtaatttttttttgggaagaaatgtcgtgccttgtacttgttagtaaaatatatattaaaagttattttgtcacacaactgaacaatttacataaaaatacaccacagaacggaaagttaatataaaatgaaaacaattggtaaatgcattaagaagaatagttcaatatcttaccagtccatgtaagtaaaggttgaagagtagttgcctgacttagtgtaaagtaagcgatgatgatagtcatggaaatcagcactgcagaataatgaagctgaagaactcagtaccaaataatttgagtacagaccaagtggctacacggttctaagtaaactcaaaaaggaaggtatacacactgacccgccatataaaggaaggaagtttgagaggctccatggaaaatggtacccacaatgtgcctcaactgtctccagcactcttactaccatccacaaccaaagtgttattagatggggaccagtgatagcaggaccaactatagtcgcaaagccaaggaacaatatctcagcagggtgagcatattcagatgtcagtccaaaaggtgttgcatatctgtatgttttaatacaccaatcagatcaccaaagtctaatcagtcataaaaattattgattattcgaatgaaaaagcaaatatataaagtaactctcacttactcatgatggacactgtgcacatgtttgtacagccattttgtatggagaaccctatgtccccagtaaaatacaaaatcctctaagatgaagtagaaaattatctgtgttaaaactattttcctgcaaagcgaaaacagaattatgctgaatgtattacgaaagagacgcatattatataatttagtgggaaatagaataacctccaaatatcttgaatataatcagtatccaacatgataatatctcaaaaagatgcttttgcatataaagaacctgaaaataccaggacggcagaggaagactacttctcatgcccatgtagctgaagacaggatatgagaaaatcataactggtaggttgacaccaaagtgatacagcaacaggcgagttatacatttctcctgagctgcagggctgttattttttgtctgtgtaaaatttagatgataaaagaagacaagtttatcattagactaaggaaatctaaataaataataacaataataaaaaaaaaaaggtcaaaagaataacagttaagctgattaactaaaaaagctgacaagattttaataatgctgtcattttgggaggggatgattagtgtgtagcattatgataagaaaatatctgtatgaatgaagtaaggagctataatgaagttgctctgctatataaagatattgtgcaagcacatatgcacagagagttgcacaagaggtctcttttacatttcttccattcacagttgatttgggacgtgtcaaaacagcacaggtgctacttggaaaatttcaaaaaaaaaaaatattgctatctgcttcaaaggtaacatctaagtcaacagattaaacctgaatcttgtacttgctaagccatcctgctctctcaagatatataaagggaagcccagataagaagaaaacactctcatggagaaagaagcttccaagacatgccagttgaaaatcactgaaatttgtgataagatactgcaccacaaaaagatggacataaatttcagacagataaataattttacagaacaacaaaacccagaaaaaaaaagtgttaaacatcaaacgaagtaccaaatccatacaacagtagaatcatacctacacacatcatgcatcccatcaaatgaacaaaaaggtcagcaacttcaatatatattgagtaaatatacaagcagaaaataacaattccacaagcaagccaaaaaaaaaatatggtgagagatgccaaagtacatagcttcatgtgcctaggccttggctcaaggtatgcgatccagagatagcaaatcatatatgcaaaaagtcgctacaattgcagccattactaagaaaatttctgacaatttcgtagtctttttgtttgatgaggaaattcaattctagcttttctctgcataggaataacagttaatggatatactatatattagatgccaatactgtccaaataagccatcaaatagaaggaagtgaattggatgttacaggcactagctcgattccgctctagatgttcaattcttagtgcctttccctatcaaaaatcccaattccaaactcccaacacgatttcgttcatatttccaagttacctaaatctataatagtaagaaagaaaga

SEQ ID NO: 218976 - DNA, 4454 bp, Cannabis indica
aatcacgtaatacgcctatgctagttagggtgttacattgtacatatccaaagcacagagatatagagtttcaggtaggagatcatgttttcctacaagtttcacctatgaaataagtgaagcgctttggctagaacagcaagttgaggaagaaccagtttagatcctcgatagaaatgatatagttctcaaaaataagagaataactttggtcaaggtactgtggagaaacaacaaggtggaggaaaccacatgggagttagagtccgatatgagggctcaatatctggagtttttctaattagatttcgagaagaaaatatttttaatgggggataatagtaattattgcatgcttagacatagaaattacaagctaattagtagattattagtgattgatcagttaaatacgattatatgtgtattagtatgagaataagtcctattattagaaataggtatttgtgttataatttctcaactatgaagattatattgaattttaagtgtgctaaatacgttgtatatatatatatgaaatgtgatatttttatgttttagtgtttgacaacggtggtaactcgatcaattggccaatagtatcacaatggttttagtattctagaattatcagggagaatttatggatagttagaatatcaaaattttgcaagaaattgggttatgaccatttaacccctaaatttagtgattacttagtagttaagaaaaggaaaaatagtgtcttttctaaatttaatgaccattagtgtttatgtgggttgtaaggacgaagggagattttccttctgtccataatagactcgatatttattttattttaatttttactagcttttattattttttgttagtttattatcttggggtaaatcttattatgttctatgttggttttgtagggaattttacagttatccaagctgaggcagtagctattatggtggcgttggattggtcgcttggaatcggtctccctctccattctattgagtctgattgcctagctttgatttctacttttcctaaaagatcttctctttgtaatgaccttggttctcttttagatgatatttctagtctactatctgattttcctgaggcgtccctaattcatgttcgtcggtcggctaatttggctgctcttgaactagctgtgcacgcacttagggtggatgatgagcttgtttagatggaggattttctatctttccttttcgatgtactgaacgctaaatgttgttcattgttcaaaaaaagaaggaaaagtagtgtcttttctaaataagttaatataattaattaattctttttctaatggattatggtgagatttgatgatatactctagaattttctaaataaatacaaaataagataaataaaaataaattcatctctttctcgaagccttctctctttccctgcctagacaaaacttaagggaatcaaagaatattcagaccaaattttaccagttcctgaaagaattcaagctataactcaagtgggattggaagctagttgaggtaacacttctaggtcttttattccctttgagttttgttgaattattttttatttctataaggattttgagagaataggatttgtagattatggtgttgggattttatgccctaataaaatccatctcaatataatattattagcttataaatgaatgatatagaagtcaattttatattacccttttcacatgatatttttgtgattatagttttgatatataaattctattaaatcctaaacttatggataatcatgattattgtgttatctatacaatggaaaataatcatgatcataggcttcaaacattatgtcacaagatttattagggcactgagtttacactaacgtgataatcatcaatgaggtttgcttgaacttagataagtggaatgcctttttcaaggaattagtaaagtaacctagcatcagatgtattggctacacatcggactggactgaaattcacagtagaaaagatgttgtaaacttaccataatatcttttctatataaatatcacttagttgattttagatcaaaggccttaatgctgagatggttaggttctggcacaactatactgcatgtgctctttgacttgttcgttacaagcttaccagagaattagctcaatacttacatattgggaacacggtagtacaattgagtggaagcattaatcatataaatagaatctatagcttttataaacagttataagtgaaatgatagtttccttagagcttggtaacaaacataaatttaagagctccttttcagtaattatattagtttactgaaatatcatttatgagaagctaggtgttttaagggtaaaatacattgaagggtaatatggtaatttttataactccctactagattagacacgttatcgtgattttaaactactgtgtgctttttaactattcttaaatacataagtacaaaacatattcctggaactcatttacaaagttaaaatctagtttataaaatacattagttacaaaagttgtcgcatagcaaccatcaaaataaagttttctgtcctaaagatcagaacacttcaggtctaactgcctcgatatgtacaatcttcatctagtccgagctcactattgttcagcctttgctttgtttttacctacacatgtaaacaatatctgtgagtcaatagacttagtaagataagcataaatataacataaacataaaccagactataaccaagcacccatacatccaatcacaatcctatcctatgtccaacgcatactaggtctggagcgttcatataatagtaagattaaccataatattagcttacactcagtactctagtcgtatctatgtgatatcatcaatttgtactttactcaactcgagaaagttttacttcttgccacatgtcaaatattgatgttcacgtcatcagggtctattttggggtaaacaaccaatatgccccattcgagcatgccatagcttagtttatgattgtacatttatccacagatgttgcacaaggaggcattattgtctggccatttaaaaaataaagtccatgtctttttgtgtccttcaataccagcaaagatcctctggtaatcttcatagttccattgatggttttgtgttaacatcctcatcatcaagagtaccaagagatatttaatttctttttaagtttggtatatgcctaagcctaaccttggtgaaaattttaacagtttgatcaaaacttttaattgcaattgatctcaatgcctatcatttggcacttgtgatcatttcccatgatcatacttcctctattaattttttcatagtcagtaaatcattctttattgagactcgtgtgataagtccatctactgtccaggatcaacttattataatccttctgttatgaactggtacaaacatctccatctatctaatttggatcatcacacacttttatcacaacaaagaggatatcaccatctgaactgtatgtgtcatctactactacatttgaaacactggacttctcttcttcttctttgtttctcttattcttgttcttgatctcccaaaaattctagatcaaatgtcctccttttccacaatgatgacacttttggtgtcttttggctttgactttgatcttgaaaaacttctgaatcttgaactactccttcttgtattccttactcgagccaataagctttcatattgcatggactcttgtttggtagcctttttgccaatctagtttagcatccctttatctgagtgtataacatcttgcagagttagagtatctcgactatacatgattacagtcctcatttctttaatttgatcaagaagaccattaagtagaatcacaacttgatcttcctctttaattttttcaccgatgttattaagaaataaaacaatcttatttgattcatcaagattttgttctaaagaattagttccattcattttaaaaccatagaacttccattttaagaagattttagttgtagtagacttagccatatagagttgattgagctttgtccagattttaaaagttgttctttcgccaataatctatctcaatacattatcagccaagttcataatgattgttgatcttgcttgcttaattatggtttatggatcatccttcctggaaccttcaattcctttctcagctttctcagattgatcttcaagtagggatgttcataaagtatctgatccgatccaatctgcacgatccaatccaatccaattcgcaaaatgtgaatatccgcacttgtacgaattggattggattgaaaaatttgaaatctatacttgtgcagattggatgttgtttgacctcaaaagtaactgatccaatccaatctacac

SEQ ID NO: 218977 - DNA, 5067 bp, Cannabis indica
gtgataaccactacaccacagcaacttagttttaatattaattataatagttaatttatttataataatatacgttatcactgcaagaattactttaatagtaatatatactttgttacaaaaaaaaaaaatagtaatatatacttttgattattatttttgtggtattatttgacaaaaaattcatatcaaatgcatatatttattatattcatacttaattaagatatcaatcaaaattgaatagggtcgatcgagccaaatcattcaaattttcttatagtgaaactgtaattatttcttgtacacaattattaaaatattcaaaagaaaaataaaataactaaaataactaaaataaaagcaacaatctcaatccaaaggattatttctaataataatgatcatattatttaatttaatttgttgctcgacaaaattttctaatctcgcctttagtagcatcagtgatgactccaattcgtcccatcttgaccatggcctccccaaacttttggcgaaagtccaccgaccctttagctagggcagacacgatgctcttggtctgagcatcattggctaacttttggtcgattgcaagaacacctcttttcattataagttgattgtagaacgacttgtctatgaccatagaactccttggtgtctgatctaagaaagcactgctaagggagcctggagggcattgcaacttgagtctgcttaccaaggatgagtccatggtcgggtcagctctgttgctaccaccgaagttgtatagacgatcttcgaagaaagtgcattctgatactcccaccgagtgaccgcctaaaatgcataaaacaatacatgtattaattaatacaccaaagattgtgttggataagcgtacataataatgtatttaatattaaaaatatagtgtttcaaaaaaaaaaaaatatatagtaaatttagatacagattcattaaatattattatcatgcttgaaattattataccacttacaaacttgaaactttgaatacttacgacgctatttatcatttagaaaaaaaatatatgatatttttcaaaataaaaatatttatatatatatataactttaaaaggaaaacctagtttgtctatacttagagccgggcctatacaatacctttattttatatcaaagatttcttttttggtaaagttttaatatcaaagattgaataaaattttctttcttcaaaattaagcaattaataatagtaattaattaaggtaggtgagtaattataccaagaagataaaccatgtcattaacaccaagtcctttttgctgaaaggccttaatagagtcagagactgatattttagtagaaggaagattaacatttgatgccttagattcttttccatctaatcttccattttctacaccataatctatttcaccactctgcatatttaataaatattcaaagtaattaatattatctttataataataatattaaaattaataatctaataataactttttacaaaataaccttctaatttgatcaagatctaaaattcgagtagttatctaaaaatttcgactatctattaaatttttttgaccagatatctaagatgttgatcgctattatttttttaaaaaaaaaaattatcaaaaataggtcaaagtgaaaaataacttaaaaatcgaagaccatttataccaatcgaaaccgaatagaaatataatttatccaatgttataaattatttaataattaagtattaattcatcaaaattcatgcattattatatatttacttacactagagaagaaaacagcatctcttgtagccatggtgatgatgtcagcacaagagacaacattagggcattgagtctcaaaaatgttctttatatcatctataatttcataacctcttacacttagatttgcacctgctcttttctctgttgctgccccatttttatttctatctattagaattgaagcatcacaaccctaatttcaaataatacagactcttagattaattagtaaaattaattagatcaacatataatgtaaattgattaattatttaattaatgattaccttaacaaaacagtcgtgaaactgcatacgaagaagagcagcaacaatactagcgtcatcattataagcttgtttcatggcagttctgacagtttgctcgacatcaactgatgatgttacagttcgggttcgtagtccactgaacccgacgctttccctacttagtggtggtgctcatgcattttaggtcgtgtaagtaaccacttcttctaaagcaccataacactccccacttaaccccataaaaattatggcaatgcccatataaactctaaacattattctattcatattcatattattagcttagtagtctaattatgtaattaacaacaataatgttatgaatgagtagttatagcaagtgatgagatttaatgagtatgttgtagttttaattagtcccctatactatagggttgtcatcatgagaattgatttattatattaattgttttttggtctactataattgaattgatatattagttgtacaaacgtggttgtatagtgtactagtatattgtgtcttgtattatatacttaaattaatgtattatgtatgtatatgatttgtgtgttgacttttcataagtcaaaatagtgtaactaatataacataacatatataggtatgtataggtaggggtgtttatttgaccaaatctaatgttttaagatatattcggatccgatccaattatatattagatgttaaattttacaattcggtccgttctaattaattttagtcatccagtcgatctaatagatattgaattggattggttctatccattaattaatgtatttcatgtatatatatatatatatttaatatttattgtattgaatcagattcatccaatattaatatatatccggtatttattgaattgaattaaattcattcaatctaaaaaaaagtaaaattttaatattaatttttatatatacatatatttttttatatataacaatataaaatttaattactatattaaatagtttaattggatgttaggtattaaatttttggacactccatctaatattcgattcaattggatattcaaagataatattcaattcgattcgatcacaattgagtattcaatatttgaaggtcaattataattaaattagttggttatcattgaattaaatcgatttatgcacatctaacataagtgcatgtgtatatatatttcaagggtgcatttttattattaatattttagaggctgcttttggttttaaatatgtgaaaatttaatgttatattagtggttaaaggctaaatcgtgcctcttcttcaaatactaatgactattaattattttaggaaattaacaagtattattagataattataatcttcatatatgtatattccgatattttcgcaaatttcatgttgtacgtacttttgcatatgattcaactagatacatacatttatgtgttgtattatttattatgtatttatgtgttggataaaagtctctaatttttcaaacattattattatcttattgctatacaagttttgcatagttgggtggatatgtcttctatttttggtttgattgtacaagagtgcaaacttttattattttcttttaataatgttaatatttatcatgttaaacgatctgctaacaaagccgcacactatttgacttgtaactcgtgttattggtctgatcgtagttttattgagaatactattcctgctactcttaagtcttttgtaattgcgaatttggctatctaataaaattcttgtacttccattcaatatatatacatatatatatatatatatatattacaaatagaatatatgtaaaaatgtttagaccttatgtcttaattataatcatttacaaaatacaaagtttaaaatagtattttaaaaaatttaagaaccaaattgtcaatttattaaaatacgatatctaaaaatagtttaaaatatactaatatttttttttataattttggggcctgagtgttcgggggcccgaggcacacgtttggcttgcctcagccctacccataattttttgtgttgtgtcagttccaggccatattttgtcgtgtcatgctcgtgtcgttctagaaaacttgtcccaaatatctagttgccaattgtcactagaagctgttcgcagcgcgggtggtgcagttttagactatttttttaaaccaaaatacatatgtgatttttgtaatttctcaaattgcaaccgcattgcaagaccataaaaccgtgaaaacaacactacagaaaaacggtatagtacagtacgatttagacgatttacactatcatcagtataaaatattaaaaaaaaaaatagtctaataaaacttaaataattaataaaagaaaatatcttatcaaacttttaccgtcataacatatataataatcaaattacatatatatatatatatatatatcaatagattaacaataagaaatgaacaaaaataaaataaaaaataagaataatttatatagatgttccttaaaaattaatagttttgtaacatataatgcggtacagtttgaactgtgattattaaattcggaatcgcaaaatgtaccgcatcgtacgatttggcgaaaacacaaactgtaactgcagtgtaaataattttaaatcgtattttttatgcggtatgatatggtacatagttttcgaatgagaatactaaagtctaacttatgtttggtatgcatttttaatttttttgagtgaggttttgagtttaccgtgggttactcttacctttacacaatagaaaaattaacatctctaaaaatgatgtgttttacttaccaggaaaatcaaaacctagcttggtgaagccgccgttctccacttcagttgttcccttcctcttcacttcactgaaccaggtatatctctctgttggatatttattttacc

SEQ ID NO: 218978 - DNA, 4548 bp, Cannabis indica
tagctgagattcctttatgggaaagacctattccagctgtgctgatccattgcgatagtgttgtgactattgcaaaagttaagaatcgttaatacaacagtaagagactacaactacgtcgtaagcacagttagagagtttctctcaataggaattgttagagtggatcatgtacgcactgatgataacttggctgatccttcgacaaaaggtttagctagagagaaagtacttaaaacatcaaaaggagtgggactattgcccttaaattgatgaatcactcataatggcaacccggcctatatactggagatccggagatcccaagaaataggttcaatggataataacaagttatgaagtgattaaaaagagatcatgctataattattcaaaaagtgaagcatgaattgctgaagcaatttaaggttgagttaatagaagctcttaatgagttctatactccaagtggagtggagtgccgagctacaggagtactcttgatagagtcacctatgtgaatatgagagtggggccgcttcgtgtgaaattttgggtaaaatttttagagcgttcagtatactgggatagacgtgcatggccattaacgcacgggcttttgactacacccttgaaaaggttattgcatggtatgatgttagagatagagtttaagactatacaggtcactctagtaaaatctaaatcgtattcactatgtagatgttcaaatcgaaagatacctttatttatgctcaatcttattgttgaatgatattgttagatgaaaatattttttaaaaattcaagtggaggattgctggaactttttacaaagttaatgaattttttacaaaatgagagtgtcctagtatgtgtgaaatagaatgagtcccacatgagatatgagcccttgtttataagggtatataaggtacaactttggcacttaggacaaggccccaaggggtacccaattttgtgcaaatgggtgaggacacatacttggcccaccacgtgtgcgccacctattcgattcgaaactggttggtgtggtgtgacactttattttttacaaaaaaattatttaataaagtaattattatattatttaatttatttgagaaacgtgtttaattgaaattgattgcttgatcgtatcagctcgtggtacacgttcaacaactactctccaggattcaaaaaacattcttcttcctgttataatttttcattctattggtctatataatgcgattgaattaaagggagaaacacatcttttcataccgagaaaaaaaaactcaattttcactaccaaaattttccatccgcgatatatattttcagggtgtatttgacggtttgttataatgcagtggttttccgatacagtgtacgaaaactgagttgttttatccttgggacgacccacaatatccgtctgcttgcacattcctgggcagtgccagaacaacttaaagagatcgacgtaatttgtaactcaactcaaaaatttcattcgataatatcgtcactacaaaaaattgctacttttagtgacaactttttagtcacaacataatttttttgtgaataaatgtgacttttagtcacaacaaaaaattacttgtgactaaaacatagcatttagacacaagttgtcactaatttagttttagtcacaataagtattctgactaaaaatatatttagtcacaataaattgtaatttttgtgactaatatctttagctacggaccttttagtcacaacatatgaataataatttataattagtcacagcttttttacttttagttacaaattttattgtgactaaaagtaagatttttgttgtgcattcgtgttttattttcagtagcagtttactcaacaattatgcatttcaataccaagtgttacggtcatccactttttcaacgactatccccaaaagtataaagtattaataatttatcgtactaacaaagttgttcatgatattagtttactacgcttgttaataaaatatttaaaagagtggtatcgtaattcgtaactacaatgaacaccggtaaaataaaaaaaatgaaaaaaaaaatactttttttagataataagcgtattcattccattaaataagcagttttagacctctcggtcaatacataaaaagtcctccggaactaaggagaccggaatagagccatacaacttcttaataaaagcccaattagccacattatgggccgcaaaattacaagttctattagcaaacacgaaattacaacaattaaaagagggataagatttagaacaaaatgagatatagttctcaagcgcccaataagactccgtcccattaagggcattgataaccactctcaaatcactctccaccaaagcatactttatcatatgtctttagggacaaaggttaaaaaagaaattaactaggagattgtgtttcaacacttttcttattttctatgctaagtgctaactttaataattactacaaaagtatgccttccaatgagtttttgccaaatttgtctactgtaatatctattattctcccactatgctttccttctctctcaccaaagcaaaaattcctagaccttaaattccactataaaaacactaatttcataaataatgataaaaaaaaaggtcatgcaggttttttttttttaaaaaaataaataatattttaatattttaatattttaatattcaaaattaaactacgacttattgtggtagtctttaattttttcatttgtctaagtggttaactaatactattttttagtatagttggtaactttatttttatcaatttaactcgtgaggttctttattacttctttatttaaattagtctcattttgaatattttttacagttggaagatcccctaattatatatggtgtagtattatttggggccgctctctccttaaaaaaggaatccgaaaaagagtaggaacatgagactctatattggtatttaaagatccttggctacctcagccatatttatttttaccttcatccaatagtattacacatccaaatttattggtcaaagatttaatagatgatacgagaagggtgtggaatttacctatgattcgacaattgtttaacgtcgcggatcagcaatgaattggttctatacctcttggaaagtttcctaaggctcattcatggctttggcattttacgtcggatggttcttattccgttaaaagtggttatgttgtggcttctacttttgatttgtatactcaatctccttccaaagatgtattttcaatttggtggaagaggttttggaggatgcatttacctaaaaagattttaaacttcgtatggcgaggctttcatgagatacttcctacaaatgttggtttgaagaaaaagaatattattgaccattccaactgtccactatgtggttacaattcggatacaaatagccatgctatttttttgtggaaattattaaagttcaaactcttaaatagtctctctatcgaagtttcttttcaacaaataatcattaaagcatctgaagtgttatcacagacagaatttgaagtattccttgtggcagcttggtatatttggggagagcgaaacaaagtagtgcatggacaccaaattcgttctcctgaagttatagtttcatgtattcaatccctttctgatgaatttaacagtatccaacatatcgccagtttaaaagagaagactatttgtacatcaacgtcaaggtggatcaccccaccattggggacctttaaattgaatgtggatgcatccgtggatgataaaagtgatacaattagaattgaagcaattattcgaaactcacaaagattagtgatggcatgcatgtcgaaatctttatttggtaatggtacttttgattaatgttttgctgatttagaaattttctatgatgttgtttctcacacttccaattaaggtatgaggttgggttcaatgtttatttgaattgtaaggaggaagggaggtttcccttctcttcataatagactcaatatttattttattctacattttactagcttttattatttttttagtttattatcttgaggtgaaacttattatgttctatgttggttttgtagagaattttatagttatccaagttgaggcaatagctattatggtggcgttggattggtcgcttggaattggtccccctctccattctattgagtctgattgcctagctgtgatttatgcttttcctaaaagatcttctctttataatgaccttggttctcttttagatgatatttctagtctactatttaattttcctgaggcgtccctgattcatgttcgtcagtcggccaatatggctgctcgtgaattagatgtgcatacacttagggtggatggtgagctagtttggatggaggattttccttctttcttttttgatgtactgaacgctaattttttttcaatgaaatttagttcattgttcaaaaaaaaaaa

SEQ ID NO: 218979 - DNA, 6417 bp, Cannabis indica
ttccaacaacaatgcctaaaatcaagagactttgaagcttggtttgagagaggtgacaccctataaaaatggtatctttttaagtgtttgattggatgaaagtgtatattttatcaaatagtattattagtaggcttttttttgtagagcttgaaagtagaaaatccaaacataatgaggccaaatatgtatgttgttcaaatgtcaaaaatctaccattgaattggcttatgtcatcatcattcatttatgtatctaaagaagaaaaaaaatgttcattcattattataatattttggtcaaatattaacacttttacaatgggagctattcactatataaccaaagtttgagtttttctttttaggcaaatgaattttctacatggggccataaaccaaacttgactaaatcataatttatgatgatgaattggtgggtgagtgagcttaactattttttttgaatttggaagacatctacacaataaataaagtgagaaggaaaagaaaagcatgaacccccatttggtagacctaaaagcaaacatctttatcttttgcttttgcttttttacctttttgtcttctttcttttatttctttattttttttttcaaaattcttgtggtggtaagtgagcaaggaaattacaccaatgtccaatctatcctttgatagacattgttaacaacttcctagggttttttttcttttacaaaacaaagttgttttatgagtaatgttagaggcatacttaaaatacttttttaatcatacactataatgtgttatcaatcttattcatttattgtttttatatgggaaattatagtgtataatttatgtgtgtctaatctaaattataatgtaaaataaagttgtaatctttacctttcatacttatttttcgtagagcttaagctacctactttgacaagttttactagtagcaacaaaacaatttcaccacaccacttaattaatcaaataaaaaaattacatacatgggagcttgagtatcacttttgttcctacggtaggatcgcttcctatttcttgtaataatatcttgttagttttgatttttttttttcaatattctaggatgtcgaaaataaatttcaaaatagtcaatcacatgcacacatgtagttgaaaatataaattttattttccggtatcataaattatttaaaaaattttgtgcatagtatgactataatgtaatgatattacaatttttctatgtacagaaaaaaaaaagagtgacaattacaattttttagtcaatttttatgtccgaaatcacatggcaaaatatttttttccttacatatttacattcattatagttacaatatcatccttgtaaattttttaaaatttttgaatagtttacagtactgaaaacaaagttcttgatattccagtctaccacgcgtattcaaaaaacttcaaataaactattcgaaaaatttacagaaatgacggtataactataatgaatgccatgaatttaatatgtgttttcaggcatagaaattgagtaaaattataataggagattgacggtagttaatcctctcacaaaaaaacgttcctctgtaatttttttttttctttttaaaatttttgttcaaaataataaaaggaaaaatagtgggtggtctcaagttcaacaaagaaagaggaaaataataatgaggacaagtaggattctttttcctaaatttcgacatgtactaaaatatgttctctaattttattttttttttgtcattgaaaattcctcatgtactattgatatttttttttttctggtggaaatattaacattattggatttaagaatttttgtccaatttcatttaattatattaattcattgattgtggatgtattaaattatacatcctaaactttgatatttattaaatcatttcaaactttgatatataccaaatcatgcctcttgtagtttgatttatgttaaacattttttattaaaattaaacaaaaattcttaaatctaataattttaataattcaagaacaatttttaacgaccttaacattcaaaggagatgagttagtacatgttaaattcgctaaaaatcgtaattgacctactaataataataataatttaaagcaaatagaaaatagagtttgattttgaaattgaaggtttgaagcttaggtggtaagtaaatgtggtcactgttcataatcaaatactgaaaaatccaacctctcaaatcattttcatttcccaaatttcccccaaaacaaaaattcaatctttagtttcttcaaaaaaaaaataataaaaattcaatctttttcattttcttcttcgattgtacggcatcatgtgggtagagatactgtgtggtctaatcctttacaaagtaatcaaacgcttcttctacgatgatgatattttagaggtcgaatcctccgattccaatgccctcttctccgtctccgatcggtacttctctctctctctctatatatatatatgtatatatgtatacacaggacaattgaagcaccaattcacttgcttttcaatctgggtttttctgttgtttacagacttgaaaagctttatggtgggaaaacctatgttggacttcggattcctgatgctgacaccggcactcgacagaatatcgatctggttcttctcaccgaagggtatgcaaatttcttccctaaaattatagattacaaataaaaatcttatctttatgtttttgttacattatgaaaatagtgtggggcttattagtaatttacttattaagtggtgtgtagggcattgtgtagtgattaatggaaagggaatgagaaattagaacttttggttcatttcgaaaattgatactgtctcgaagagtgcactttggaagatttttcttgtctcggagaggatctgttatgaaaaaataggggagactgacattgtctcgaagagtgcattttaggagatttttctggtctcgaagaggacctggtatgaaaaaatagaactttggttcatttgggagatttgaattgtcttgaatggtgcattttaggatatttttacgttatgaaaaaatagaatttggttcatttgagagattagcagtctcaaagagtgcattttaggaggcttgtccttgtgtcaaagatgattcgttacgtatcagttttcagctaattcaactcacaaacattcttagtaactaagatactctttcatgatataacattctttcatatttgatatttctgacaaagagttcactagctcaatttagtagaagaatggtagaaaactttctagttggaaaactcaatttggtttgtttgtttcttttattgtttttggttcagaggggcagtggttgtatctgtcaagaatcttgctggatttgttttgatcaatgcagatgggagctggtcttgtgagaccaaaaacaaaacagaacatcttcctaacccagttaagtagctttaaaaatcaatgctttatgaatagagcttcttaatcgcaatacttataagttatataattcaaatggggaaagaaatggatatattttatggaccgaacttatttatctcttgtctcttcccatgtttttggagcatgattatgttatgtcatggatagatatgcttaaacaaacttgcagattccgagtgtttttgtctggatttcggttttcaacttatttctttcatatttttaggtggaagagaccagaaaacaagcttcaattcttgaagcatatcttgaacaaagaggaatttctttgcccgaaggatacttgtcttgcaaagttatacttcccaatccgaaatgttggtatgtgatgctttttccttttagtatatttatttcacatatgaatctatagctttttttatggtgtttaaatttcagaaacagacatggtagttcctttaagtgatctttgtcctcagcatgcagtttacaacacccttctcggatagttccttatagtgatctacgttcccttctcaaagccatatattagatcataatgcgatgctgaaattataatttaaacccagaagagagttttttactattcgtttttgaaactaggcatccattcccgcataaccctacaatatttggggatcaagatagtatagcgatttctaagaaggcttaaaaacaagacaataggttgtcaattcgacgagtcattggccatacctttacaccgtctactttaactctctcaactcaaccccctcaaaacctaactctaaacgaacttcccacctccaatagacaaacttagggtgaattcgagaaatagcacgggcttctcaatgaacctcttaagctaaggggattttgtagaagtcattacaaactgtattaagttaagggcctgaattgtctttatgtactatgactgaacccgatagatattaaggtgaggaattcatttcaactagcttggaattagaaaagagtagactctttgtggagagaccaatcctctcgaaagatcgggaatttggaaagacgagcctctcgaaagctcgatattgtaacattgtcactgtttttagaataaagatcacttgaggaattattctactctaagattattctatcattctacttagagttttggctttagaaagtataaattgttggggtcacaaaattccaacaatgaaaattgggaattatcttgtagctgttgtagatactaacattggtgacatttaattgtcttccctttgattttcacagaaattattttcttgcagtacaattcaggcaggctcttttccaccagaagtcattacctatgaccaatggacacaacagaaaccagagacgaaaactatgttttcgggttggctaaagggtgcatttggaggtgggaagaaagagatgcaagaatcgatacaacaaaacctccattttactctcaatacagctccaatttgggataggtttgtcatctctatcataaatatacttatattctttcatataatattaggtacaaaaagattgttgctttagttgtctaaaccttaatgaagtatgaagtccttatataaatttagatgtagaaattcttaagctatcttatgatttgatcaattttcttagccttgtttaaatctaaccggtcattattatcggattgttaaatgctcaagtagactcgcgattccatccaatgctacgtgttggttaataaccttatcagttaggtttatagcgatcttccttatttacatgataggccgaggtgaaactatagcaaaaatagtgggaaactcattagcaataagaattaagggcgcctttccttttcggtaaagaccttttcatacaaattgaactgtttctttatttgaaaagtgaactttctgttagaggtgttcgttagaccacatctaatatttttaggcctatctagatccgatccaattatatattcaaaaataatattcaacccaatccgatcacaattggatatccaataattggttgtcagttgtcattagattgaatcgatttatgcacccctctactatctctggtgtatttttctcctgttcattatatacacttagaagggtccctataaagggaaataaatcaaagagcaaagacagaaaaattaggactatttctactatcctattatgacaaaataacatatttacagggttgagctaaaaggtaaatatgtacttggagaatttctagagttcaagggaaagcaagaagaccttcatgccttgagaaatatcaaaagatcgaaagttagtcgtctcgttactcagaagacaagtatgcttggattcggtaaatttttatttcgattgctcaactgttctttcaacgttctagtcttcggtttctataactcatgtgcattattcttttttgaaattgcccagcacatgcgacgctccaagttttgtactcgccaagggattatcgaagtgaaggagcttcagcttccgagtgggaagaggtatgcgtaaggtcgagtacagaggttgtcttccagcctcagaattcaaccaaagtccgaaaattcaagttatcttcagtgatctctatgacactcagtgcctaaaatcttaactcatctaaagccaaaatggcataaaactatatctagaattgttgtttatgttaaggttatttgtatatattattatggatatatatgagaaactagttccataatagacttttatgtcttttattttatgggattagaatcaatttgtaacctttttttccccttaaaactatttcttttgtagtagttttgcctcttatgcattttgttcatctttttataattgaaaatttatgtaacagatcaaaaaattgaaaaaaaaa

SEQ ID NO: 218980 - DNA, 3013 bp, Cannabis indica
tccccttttaaaagtttctattaatgttttctagaaaagattgctgttcaaatggctgaagttctagtctccactgtagttgaatcctgttcataactaatacctttcaaaacatttcttgtgcgtttacaacaatgattttggcagaacagaattggagcggatatcataatggctcttgatgatgtggtcaaaactactattactggtcctagaattgaggaggcaatgtatcgcactcttcgatggatagacagatgtatagctggtaagtgtctccggatcttgttcatctgattcctgagtattctgctttgacttgttgttgtgtgctgagtatattataatgttcattttttttttgcattgcttgttgtattcagctcacaagagaccaaaggagcagaacttatttggaattgtgcagggaggcttggatcctgttcttaggtgaaatttaattaatatcccgacgtgcattgatgatttgttgatttttctctacaatttttcactggcaccagtttctgctctgccaaacatctatctattgtaattactcatttaaagatgatatgcttatttgaatcagggatatttgtgtaagaggcttggtggatcgaaatttacctgggtatgttcatgttacttttagaagtttaggtttaaaattttaaattcattggctagcattttatttctatatcttatggctggtatgttgtatgctcgaatttcaaattgattcatcctcacccatatatataagcaactgaagttattgtctctaagtctcgtaagattgatgtctcgaatgtatttctgtgacagctatgccattggtggtcttgcaggtggtgaagataaagattcattttggcgcgttgttgctcagtgtactgctgcattgcccgaggataaaccacgatatgttatggtgctcatttttaatctgtctctgttctatttcattttatgcttactcgttttttccatgctctgaagttgttgagttttcttgtcctaatttcaatttcagggtgttggttatccactggatattgtagtttgcagtgccttaggtgctgatatgtatgactgcgtttatccaacccgtactgctcgttttggcacagctcttataccagaggtaataatagctcgctaataaatcccgactagattccctccttgggatactgattcgtatttactggctcattcatgcagggagttctgaaactaaaaaataaagcaatggctgatgatactcggcccatcgaccctacatgtgattgtatggtctgtaaaaattatagtagagcatgcattcattgtcttgtgacagtagatgcaatggggtctcaactagtttcatatcataatctgtattacatgatgaaggtattgataaaaaaaattctcaattccattaactctctggtaattgtttccttctaaaatttgtattttattttttcttttggttaaatgcagcttagcagagacttacactcctcaataattcagggaaaatttccagagtatgttattctttttcaaataatcatacaagtgttctaattttaccattctatttatataccgacgtttttcgttaaatctttttataggtttgtttgcgagtttctgcagacaatggtaagttctattccgaagcttacctattcgcacttcactgctcgttccatgcagtttttgttattctttccgtgtgtgtttgtatttctgttatcgatttttctttgctcgtggaactggcacatattctgtttgtcactgaaactttgttgttgtttgtagttcccaaagggtgatgttcctgaatgggtctgcaatgccatggaggtagctggaattgatatctcatcgtgttctcatcatgttgtcgtcacgagataggatatgactttatgtctagactaaatgcagttagtgaaaaacgagttactgatatgtcgcctggttcaagtttcgggcatcctcgagttaacccagaaaaagttgaaacacttcgtcgaacaacgactttcggacgcataatgagtaggtgcagacatttcatcaacagattaatgcagtgtttttcttagtatcttacctttgcttgctacaccacctcaagccatcatatgattacactactaatttttaggatatacttaaattagttttaatatgtgttaagcttatttatattattgctagaaacattaaatatttattacttaacccatttttgcattatgaattttgtataaataatacgaaaacagacggccgactaaggatcgccaacctctttactagagaaaggttacgccgacaaagcctttttgccgggcttagcgcgtatagctacttttttttttttttgggcgaaaattggaccgtcaaaagcagtttttttttttttttttgggtattgtaagatgaaatcaagttagaatatgttgggtcgactctgaggtgagacgaaggaggtaactactttagatatcatttttaaaaaaatttaaataaaattagtaataaaaaaaaaaaaataatgctcataatactaaacatatgttgcagtttagtcatataatttgattagagtaataattttaaggtttagagttcaaatcctaactaattttatttttattgataagtatacggtaaattagttctttattttataaaaatattatctgttacgcgttaattaagatgattgatgctaggttgaaatttcaactgtcggtctcaataactagctagtctaaaaattttgacaacatgtttgtggtgaattttcaccttcaaaacaagttcttacagtagtaacaatgttcaagaaacacaaaaaaattaaaattaattacaaaaccaaaatttgaacttaattgaaacaagacaaagaaaacttattttgataatgaatgaatgatggatatttattgaataggaatagcacataaattgttacagcagtaacaatgttcaa

SEQ ID NO: 218981 - DNA, 4467 bp, Cannabis indica
aaaaataacaaaagttagtatatcatgtaaatttcttttttttttttaattataaaaattgtaaatattgaaagaatttcgacacaaatatccttgattttatttttcgtccacttcaaacaactttagatcctaattgattgtccaacaaaaaaaagttacctttagtaataatctttttagttataacatatttttttattgactaaatgtagcttttaattacaagaaaaagttttccaattagtcatttgtattgctcatctcaaatttgtacaagttcccaactaccttttccattatatttaattcctcccatcaatttttctatccacacactctatcctctcaactcaattcccctaaactaatatttttaattatatccacaattactcttttaattctttaacaaaactatttacagttggaacatattgttccttatagctctatttctaactttccaaatcatatacacacaattattaaaaatcatcagtatgtatactctcctttttatgttactcaacttggctcgtcgaatctaatttaacacttctttgaaccagaattaattagacccaaaacttatctaattccacacttatttagtacattgcaaactgaaattacattgaaagaacaattgattatgagtctctggttctttctattctcatcttgtgaagtctatctggagtttttagacgattctaagccgctagccaggtaatgtacctttgctttgtcacactttgtctcatcacaagaaaaagttatttgtgactaaaatattatctttagatacaagttttaatttaattttagtcacaacaagtttatgactaaagctaattttttttgtagtgcatataatgtacatctgagagaaagtgtaccaaactttcctctcaaaactagggaaactataaccctagatatttgtttaactgtaacatccctgcttcaagcattcatcgggcatttccccacggaatgatggctcttatacacgagtatgtcactttggctgcttcctggactgacgactggccctacaaactagcacgagtgtttccaacatgctatgtcctcactcacacacttcttgggaaaacttctcaggaggtcacccatcctgaaattatccctatggagttcttttgtgatgggctaccaaaaaataagatgcacctcattgatataggtagtaccaatcaatctatttaagtcctcttcaactctgtagtctcatacctacacagtctcaaaattattacacttgaacttctcaggtaatgtgggattgcacaactttctcagtatttctctttgtggatcacggggctactgactgtcacaatcaccctccttacggggtctgacgtcctcgtcgatcacacttccagctgggttaagggtttgacaccatttgtgacgtccccgcttaaagcctccattgggccttcccctacggatttatggctcttatatatgggtacattgctttggttgctttctggaatgactattgaccctacaaaccaacatgagtattttcatgcatgctttgtcctcactctttcctaggaggtaacccattttaaaattactccaagtcaagcacgtgtaactatggagttctttcgtaatggaccaccagaaaataagatgcactttgttaatatatatatatatatatataatatcaatcaatctatttaaatctttttcaattgtgtagtcttatacctacatagtctcataatcatcacacttgtactttttctaggtaatgtgagattgcacaacttactcagtgttttcccttacaaatcactggactactaactatctcattaattagcacataaaacacaaatagatccaagagtgaattagtgaataggaacaaattagagctagggcacacaaatattattgagattcacccaaaattagggttacatcctcggtgacttactcagaaacttcgggctcatatggtactcataacgaaaaaatagttacaatcaaaggcaaagtggagattccagacatagaactttgtaaggtaatctcaatttcaacctctctctttcactaatttctttatcttttacaaatacctaaatcccccatctcacacatcccttgtctttttctcacaattcaaaaaaaaaacaacttaagtatctaagttggcctaatcagttgatacatatggggatcgaacccctttcttgcccccaactcacacacacacactcctcccatactattcgagctgattgcaattatgtcttaatagtcatgagttgatcagttaactcctctcatactattattccttttatctataattccttaattattgttggttagattagaactaattagcacacacacaaagccagtgatagctataattaatatgattattataaagatatatatatatggttatatatatatatatatatcacgacatattgcatgcatggtttctacgtacaagaacttggaatctcattatgaaaaatagtatttatttatattgaagaacatatatttaattttctacatgtaattgaagaattcatcatatgaaactcatattgtaacacaaaataattaaatttactacacttttttttcatgttcataaatgaactttttttaataactaatcactttcagtctttctttcttttgttttcagaaaagaagtcaaagtagacaaaactttgttggatcggtcaactttttaggctttaaagttaaaaagtttcttgtttgagaatattaattagtcgatcttagtaatttgagaattattaattatatatataaattattcgttaataattcttgaggatacacatacatataataattaatatatctatagtgagtgagaacattataataattctcattattattaacttaataattaaatattaatcgaagataaagtccacactaacattaaagaatatatatgtctcagctaaaaataccctagtagatcagtgcatggctagttttgaataatattatatatataaaaaagtttttaaaatgtaatatacataatgcatatatattataatattaaatttaaatatatatatatatatagtatgtgaaacagacaatataaattaatattttataataataataattttctaaaactgacttgactggaaaaagaaaaaaaagaagccaatattatgattataatgatgaatattattatggcttcaacttcaatattaactagaataatattaacttatataattagatatgatcatcccaaacattctagtaattataataagttattttttcccttattatgtactttttggtttaaccagataagctaaaccctagttaaatattacaatatataattagtactatcttattttgttttctcctcaatgaatcaaatctactttgaatattttatctttcatatttttttatcaatatcaacacaagattaatccaactctcacttatgtgagcaaattttattttgtagcagttatcacaataaaatatatattttttttttgaatcagttgagtatgtatttgatcatttcacaacttattatgtacaaactaatagcaccacttggcctgaaaagattctatctatgcttataattgagcaattaaatacttggttattatacttttcccaacaaaaaattattagtatttgtaatttgaaatctcataactcaagttgtataactcgcaaaagaaatcctttaaacattttatttatattgagcggtctctaatcctccttttctctgtctccattattttcattcttcatttaaatcgagttctagttgttgagacaattgaaacggtatttacttattctgggatcctttatctttgccttgaatctatctataacataaatttgttttcacaactgaaaatgaattctacttcttatcttactaaattttcttaacaattacatgaaaatattacacactttggtaccaaaattcttgttttgatttctccaaatgtggtatactgtagtggcttccattgtagcatacactttgcgcttacactttcacattttgttacttcgaagtcacttcaaaaggtcttgaacaatagtagttgaagtgttccaattcagccaattcttaagagcttccaaaatcttattactgtttgtacaaccaaaactgagatgttgaatggtctcttcatggctgccacaaactacacaagtactttccaatgcaatactaaatttaaacaatctatcttttgtttgccatctatcaagtatagtcaaccaaaagataaacttatactttagaaggctaaacttttcctaaactttcttcctctaatcaaccttggaaatagaattacaaagcacaacatattccatttctattttatt

SEQ ID NO: 218982 - DNA, 2573 bp, Cannabis indica
atatagttaatcttaattaaagttttaaaaggaaataaattaacaggttaatatcaggttacaggtcatttttaatttttttatttaatttctaaattaatcacaaccatttaatagtgatctaatggctaaaaaaaatataaccatgtggttacattaaaaatgtaatcattagaacctcctccaatatgtaatatatatatatatatatgtgtgtgtatattatgtattttttttaaagacaattcaacacaataacttgattagtatatacattatgacgaaaaatttgataagatattttttttcatttgtattaattgttgaaattttattagactaattattttattttaacgattgatatatagtgtaaaccgtctaaaccgtaccacactgcatcgcaattttgtagtgtaatttttgcaattttaattttgtagtgtaatttttgcaattttaaggtcttgcaattgtgatttgaaaaaataacttatattcacaccacccacaccgtgaacacccctagttttccatatataagaatttttttcttattgcttgttctactattttggcagataagcctattctctattgtaatcgttgcttgttgaatgaaagttctctccataaaacttagcaatatatatatagctggaaaaataagactaaacactctgtactcaaattatttgccaaagagctattcaacaattattttgagtataaaacttaattaatttaaattatatatatgttgtaacatttcttgtagtaaacatataaataataagaaaagcttacatacaattcaatatagggaaaacaataaggttacaacttacaagtacttacaagctcccatctctcaaaccctaaccctagctaatatatatgtatgtttttttaattcattcactaataattcttgcaacaataacagttatatcgtcgaactttcctccgatgaagggtttgccggccttggtggctgcttcagaaaaaggactctttcgatctttcttcaaagaataatggcgagagaactccgccaaccaaaaagcactactcagacttgattgtgtcttcaaaacttcttctatttccgaaacaaacatgttgtcgaatattccatcagttcccaaaacaataacatctcctggaaccatctcgattatctttactgtttcagcacagtctggagtgtcacaaccctgagagtttccaagctgataaggcgtgttgaatcctcgttgttgagtttttgacctatagatgagctcattatttctaaagatgatgaaaccgctatctccaacattaacactttgcataactccctcgttatgactaagtatgcatgcagttgaggagccttgaatctcagccttagcgttagccacaaaagcttcttttaaaatacttttgggatcggtgatgttgttgtcaacaatggctttgacagagttattcatgagttgtcgagcatactcaccagcatcgatgcctcgactagcccaaccaccaacaccatctgctactccaattatttcttgttcttcgcaaatgaagtaagaatcttcacctataacatcatctttaggtatgtaatgatattcacaaaccattttgattttcttcttattattatctgtgatctccatctcaaaatccatatccactatgtcatctttgttcatatccatatttatcctataattaatataatttttgtgtgttaatttcttgatctcaaaagtacgtagctagggttagttctttaatgatagctataatattatgtatactaattttgttcgtagtttggagaattataagtaataatgatttgaaattagttattaattatgatttatttatgttttctagaagagtgtactgtccgtacatctagcttaagatttttggatcagatattatttataattttaaataacgattttatttgtttttccataataataaaacatatcttttatccaataatattacaattatttaaaataatattctttctcgatttttaaaataactaatattttaaataagtaaattaaatatcttaaatattcatgtatttatatagaaccaaaattcaaaaaaaaaaaattacaaaaatatatctatgcgattttttatttttatttttatgctttgaatatttttatttataaaaatacttctacaataaaaataataaattatttttttttattattttatggtttatttatagttgtcatgagattgtttttataattgttttagttattttataattgatttatggtagtcgtgatattgatttctcgttgttttcttactttttgttaagaaagatgtatttttataattttaagacttttcaagtatatttttgtaaataagaactttagactgtaaacttacaataaaatataaaaaagggtatttttgaaaagttccctttaattgataattctctaatttaaggattgcttcttcaataatgggtttcctaaaattcccaataaacatgtcctcatttttttttttttttgttagaaata

SEQ ID NO: 218983 - DNA, 1875 bp, Cannabis indica
aactaagcgggctttacaaccagcctgccaaaattgattgaaatggctttcctttgccttatcagccaaaccatgtgtatcaaattccggtttaataatcttactggatatactattatatccataggagacacgacctgtaaaatgctaagggacaggaactgtaaatttaaaaggcatctagaaaagataggaaaaaagaaaaatttagcaaacctatcaataaataatcgataactagttaatcttcacaataatttaggcaaacaagaaactattcataaaatatctatatagtatcgtccaactatcaataaataactatatagataaattatttttggcaaacgagaaaccatcaataaatcattgatacagtattgataacctatcgacaaaataaaaatcattttaaaaacaaatacaagcaaaaaattcatccaacctatcgataaaccatcaataactggttaatctacaaaataatatagccaaactataaactttcaatatatatatatcgatatatatcattaagctattgataaacaaccatatggacaaattatattttacaaacttgaaaccatcgataaactatgaataaactatcgataacctatcgaaaaaatataaatccataaaaaaagatcaaaacctaaccaaaattatggataaaccatatataaagtgttgatatcctatcgacaaacagtttaaaaattggaagaaaaaaatagcaagtcacaatcctaaccaaaccatcgacaaacaatagaaagcctatcgataacttattgacaaacattaaaaaaaatttgaaaagtagttaagctaaagggatatttcaatatcaatacataataaatcctattaataatgtatcaaaaacctatcgttacactattaataaactatcaactgactcttggttccatattcaataacctatcgataaagtatcaatatgactttaaaaataatagaccaccatcaacaagacatagaattcacaatttgactgtgtataggttgtcattgttagtggtggtttgagctccattcttggtgatggtggtgtagtggtggtttgagctccgtcctttgtgatggtggcatgcgttcaatagttaaaatggtggtggtggtagttttgaacgtttattatgttaatgaagcacagaggggttttcaattttaggttttgggtggcgatggtggttggacaagagaagccaaggaggaagatataagtcgagggaggaagagaggtggggaagttgggggttggttatcttactttgtagccgttggggatcggcgtttgggttcagtggagagagaaaccaggggaacagagagagagagagggagaaattaaatgaaaagggtagtttgggaaaatagtatcattattttctacaaattagtggaaggtctaaattttgatatggattttttttatgtatagatagtgaaattttacttctaaaaaataaataaataataatgtcagtgcactatatatttctttatcctttttaaaataatcctgaaaaacttaattaagaaaaaaatattgatacaaagctatcaagtcaaaatagaatgtaaagaaccattctaaatacactcactatttaattctatgtctgattttgcaaaactgcgagttattttattatgagaaattataggaaatagcctcaaattatgagatgatgctagtaaatattctcattataaaaattgtagagaaatgaaccttttagactatttattatttatatactcttttcccacttaaaaaaatcaataattattttatgagaattagaagaaaattacttaaagattatggtatatctatattag

SEQ ID NO: 218984 - DNA, 6488 bp, Cannabis indica
tttttttttttttttcattgttatcattcatggttttcatttccttattgtgtttattagtatgacaaagaatatgtcgttgaagccaaattcaaagaactcgagaaagaaagttgtagtagtaattcttctgattcctctttcaagtgctctctcaaaaacaacactgatcttttggcctgcaaagctgaatactaccaccagtgtggtgaatatcaaaaatgctttgaactaacctccaagtaagtaggtaactattttggagctaaaatctcactttgattttagctccttgaaaatacatgaatacattttttttctacatgtgttcacatataatttttcttgttatatgttcgtgtataaattttattttattgttacattttttgtatagactccttgaaaaggaccctttccatctgaagagtacattggtacatcttgcagctgctatggagcttggccattcaaatgagctctatctgatggcatgcaatcttgttaaggattatcctcaaaagtgagactgattttattattctgcaaatttatttagttatactcttgaatgttgtttatttattatccttcgagttacccaggatagaaccctgtattttttgctgcatgtgtaaaatatttttcttgttagcaatgttaacaaaatccaaaattatgaaggaatttaggataaacgttttgtactgcatgcttttaaaaggaaaacaaaaatgttatgttgcattgttcattttcctcgataacctttctgcttgggtgtaaaagaaatatgtcttgtgtgattatgtgataaatattaacctttcatctgcagcacatctaatgattaccccattactttttagggctttgtcatggtttgctgttggttgctattactattgcatcaagaagtatgtccagtcgcgcagttatttcaggtatttcattgttgaagctgtaaccattgagttttgtacacctcctctatgttaggaattttaatctagttgagttttctattaccattgctgttggttcttctttttataagcgctggattttacttgtatcacgagccatttaactgtgtttttgttttcatagagcctcttattacgaatgtttctcaaaaagttcccatgtatcaagcctttccatagaggatataccgtggaaacttcctatgcgctacattttgacaaaaacttccttctattgttatatctattttgcacaagactcttcttcaaacttcaggtgtcaatgactaaaatgtagaaaatcttgaactaagtaatggagtaacatattttctttccacaatgtaatacacagtattttaggcataccaagtagcacttccggcctcttataaaagaattggaaaataaaaaaagaacaagaaaagatggaagttgcaatttggaggtgttgcactttgtggtctagtagtataagctcaagcttactagctttagatgatattctcacttgtggaattatttacagtactgacagtaatcggtgattttgttttgttctatgcaacagtaaggctaccagtctggatggaacctttcctcctgcatggataggctatggtaatgcttttgctgctctagaagaaggtgatcaagcaatgtcagcatatcggactgctgctcgtctctttccagggtaatttatgggtttgtattgtttttttttactctcgccctcttgctaatgatgttcctgtcactcgggtatatatcataaaggcagatgtttcgtgagcttttcaggcttgagttaagtggaactcattcttagcttttattgtcaatagaaattacggttatctatagctatgcacgtatacaattaatatgtcaatttaaagaaagtaaaagtagaatatacatcaataatcatggctgataatacgagcatcttattatttcgtttctcttattattattattattatattatatgcccgttttctatagctatgcccttttccaggtgccatttgccaactctgtacattgggatggagtatatgcgaacccgcagttataaacttggagagcaggtgccttactctctctatacatgtctagattttcattttcagataccctcttggtagctcgaatagtcattggtcagacacgtggtttgctaccacaaggtctgaggttcgagctcctttcttggtgctccctaaatagtttcgtagttaaataaaataaaactattatttttcggacttgctttttgtgagaaactgactgttttgaagatattatcacgcgaggtttgacaattttttttcttctgtgtttgtcatctatattcaatttcactaattatgtgaatgatttcccaaatttttagtctcaagtttacgaagaaacacacgaatgaatggacaagtgaaacataataaaatggatttagaagtttaaaagaacttgagtgtgatataaagcctagactaattaagtttcttacttgctcaagagtttacgtaaatctaaatcgtttaatttattaagcagtctatgttattataattacaaagcctatttatagattaacaacaactaggaagcaaacattataatacttcatctcttattggatagttatatatactattaagcaccacatgttcttttctaaatttatgattttatacatatttgctctgttttattgacaattttttttgtctgtcagttttttatgcaggctaagagtatttgcccatcggatccgcttgtatataatgaattaggagttgttgcttatcatatgaaggagtaagtgctttggtccccatattaatttcctaatgctctttttctttgtgacgaggtttctgaaaaactagctcaccttatatctgtgctgataatacaacgccaattatcgatgaaaatttctgaaagttttttttacaacattcagagttttctttctaaaagatatttcctaaaactttgtgaatgcttcttttcaatgatatttagtagtgtttcttagttcgaggagattgatgagtatgagctataaatgaataatgctattgtactatgataaaattctgatacatttgggatggtctaacatttggccttatgaataattgctttcgaaatatgttcattgggaaatctaatttaataaattttgagatgaaaaagatagatctaagttgctagcacaatcaagttcttgttctgttttcttgatttacaaattatactttcaataacgaacgttaaattgttagtatgattggagagttaaagaaattggaactaaaagtatgattgtttttccttctagaaattggaaaaagaaaagaaatttgtccattatgttttcatttttcttacattttaacaagaacactagtttatgctagtgacatttcctatttcggttctaatgtatgaaagtattcactctcgtttcagttatactaaagctatacggtggtttgaacaaacactggcttgcattccttctcctctaagtgaaatgtgggaaccgactatcgttaatcttgcccatgcattcagaaaattaaagtgcgtgaatttttactctgctttctattttcgataaaatatttcttacaaggtggatgccaattaatcttcaacactagatttaatatcattttcttcttttctgatcaacttaaataagttatagattgccttttcacctgtatagagtttctttctttacttagaaaaggattacttcatcttcaggctttgggaacttgttttcttttactaacttttgaaagaaataaccttttatatgtctcaggctatacgatgaagcaatttcatactacgaaaaagcacttgcattatcatcaaaaagtttgagcacttatgcaggtcttgcatatacctatcatctgcaggtatgtgaaattttcttcgcgtactttcttctgttatttcttaaactggtaaggtggtagctattcttttattgatgatcaacgatgattaattctttttcttgtttcatggtgggtaggataactatactgccgcaattacatactatcacaaagtaagtattcaatcgcttatctctctgtagtgtcttgtccgtctggctatctgttaagcggtttctgctgagaccttacttgggcatcgactgaaatgctttttaattaatacatacatagcaatccttgtagtttcatggtctccaataatcggggaagcctagttcaaaaaatgacactgcaaaactgagtgttgcatattgtgatgtttgtattatcatctggactgataacattctttgatttgaagtctttactatgacttaaatttcatagaatgccctcatgcccgaatttgacttgtacctcgtacggaactgatgtttgtaaatgtgctttcaggcgttgtggttgaaatctgatgatcagttctgcaccgaaatgttgagtatagctctagtagatgagtgtcggagtagcgtagacgctgcttaagttgagttctggtgaaacgaggcttacttcttatggtgtgctgctggtattaattctgcttaactttgtaagtaattattaccatatctccttgatcgattatacgagtcaatttcaagaaagtcagggccataattattatttgttgtaattttcttgtaaattgtcaggaattcaacttaattttggtgttgatcttgtgtttgaaactaaattagtttttcaatataactataaactaggggtcacaagtcagctagtgactgaattaattaattaatattttcaaaatcttgtatttttatacttttttttttcctttttgttaagtaaatatacttaatgttagtagtgactgaatatgtattttaaagatgttttgataactgattttaactataaaagtgaaccttttttatttttggagcaataaaagtgtaatatttgatacatattttagaaaatattgggtatttttctttttgagttccaataaaaagtcttcattttaactaaaaattatggcttaaattaagtggaaatctgctgagtacatgaaaacattcaaatacaagaataaaatacagataacaagcaattgtttagttattatttttttggcttaaaacttaaatcataataaacaacacacaactatacattaagtactaaaaataagttgcaagaaaacacaaaacttatttaacatttagtttggcaaaagggcattcaagtttagatttcgagtcttcatccccagattctgaaataggttttcctttcagaaaccctgcaattagctccgcagggtcatagtacacctccacttcctctaccttcagtgcctcatcaacctatacataattacagacatatacatacataaatatacaataaaaacacattagacctaaaccgagatggtgtcgtttcaagttgaagtaatatacaacaccaccaacgcaattcaagaatcaaatttttgaactgacgatgttgtacattactccaactttaacgacactggtatcaggattcaaaaacacgagtagtcgtagtagtgtgagaatgaaaaaccttgagagtggcaatgccataaaactgaaccatttcgccagtaggagcatgttgcttgtaagggccctcgaagaaaccccaatgcctaaacttgaacgcaataattgggggtcccgagtagacatgaattacttcccatgcaaatcctcttggaaaagctgatctaaacacttcatgtgatgattcaaaggtttcttcttctgctttgtagtattgaaactcttttggaagagaattcttcatcaatgcattgtagcttccaattcttagagtttcttctccatttaatccttctcttcctatgcaagaaagaaattttatttagaataatttggtattttgtccactgaactttatcacttatatgatcttgccccctgttaactcttgtaattacacaataggatagcggaaattcttgcagaaactttattgaattgatggaaaaaattacaaattacaagctttcgagaagcttgttctctcctattccaatctgttcgagaggattggggctctcctcatcaacccctaaaactaatacaactcggcgactattacacatcggcttttaattaaaacaaagagagttaacaactaagactaaagtctagtttaatctggtggcttatcagtagtgtattagcgttgttaaaaataccccctcaattttaacggttagtaaatatttagacttctgtttacattttgataattttgcttatgtggcatggcatggtggataatcacttaagtggctgaaaactagaaaaagggaaacaaattatgaaaacagaaacttacgtggcgtttggttggaggtaaggaaatggaatggaatggaaaggaaacaattttcattctattcctttgtttggtt

SEQ ID NO: 218985 - DNA, 2929 bp, Cannabis indica
aaaaattgcatgtgcgaattggtttggaaaaatagtcaaaaactactccacccgcaccacaaacaaccctaccaagcatgactaattttgttctaaaattggtcactcaaactccacatattgaaatatctaaaaggcatcctcccttcccattaatgtgcctgaagcgtgagaagggcaggactatgatcaaaatcacattcgggagaaaattcactttagcattaacaaacatgtccaactaagattgattccccaagactctatcaagcttagcttaaaccttactcaagccatcatgcttgttgttccaagtgaaaagaaagaaccattaaattttacaccataaagaaaggtctcgataacaaattccttcagttggtggtaatctttaatcccttttcctgccttcatcctctattctacatgccgtacatagttaaaattctctatcataatccagggaatgtttttttatttcgcaaaaaccttcattttggtaaaaagaccatctctttcatgacttccattatgagcataaatgaaagtgactgcaaatatattactattcttaggcgttattgtagtgtgtatatattgactatcacactccaaaatattgatatcaaatgacattgggttccaagcaagaataattcttccattaggatgataggaagaattggaagtaaaacaccaatttctaaacaaactaagatacaaattccttaaattatgaactttgaccctagtctccaagaggcaaccgattctcagacacttctcatacatatatctttcaatttctcaatactttcaaaaactatttatccctcagacattcaaacaaagaattctatccatttgaatcgagaggtactccccgcctcttctagattaaccatatcgagttttcccaacttgtgtttcctcttcatttaggacctgaaatggattgacactcaaactaggtccttttcactttcaaatttttcttgactttttccgctaaattcccaacactttgcttcacaggagctgacttagcaacaatttcattcacttactcttttcaagttctactggctttttttgcttatctgattgttccttgggggcccatttcctctgagtttggcctcctctttcacattgtgtctaagaatgacttattcttttacaacctttacatatgatagatatccattcatagtaagttcttaagtaagttatctcacccagtttattctcaaaaccattattcaggcatatcttgatctatgttaactttaatcattactcgagcagaggagagccaatctcgattttttggttgcatgatcatatttcaagatacacccaatcctatcccaaaattttcctcaaagaagtatcaccccaatatttgagatccaagttattcacttgaatccaaacaagtatgcaactcaaattctcatgacaagatttttcttgtgcattccaaggcttttataattataggtttcctatcaaagaacgcataccccctattattaccttattctttgtctgttactgtatgaaaacgaaccacagagaccccatattttaataaagaaactttatccacacctttatctttccagatattatgaaagaattaatccttccataacttgtaccgatagattggccccaaggacataacaaatcaggactgagttctagaaggaaacctcaacttcaatatcattaaaacctattttgactctgtcctttttcccctccttccccaatttagaatttaattgtaaaaccggaacaagttcagtaggggatttacctctgtagaatctttcctctgaagccttcataatcccaatccaaaaaaagatggttttagccttagtcaatttctcttgaggtgataaagattcaaacatgcccaatttccttgaatccaccattggcgcctgctccaaatgagaatccgaccgcttctcttcaaatcaataaatcaattaggttcctctatttcaagatcctataagtctgaaaattccatggcatatataccaattagttctgcatgggattttgtcttcaaaattattggatcctttgagcttggacatgtcctcttcgaatcagtcgtttctttcttcctattcaaaacttccttttcccactctttttgggtctctcacaacctgccatagtaccatcataagaaaacgaaagaaaaaaaaaatcaatgaaaaaaaaaggggacttatgaagtccctcactatattttgaggtgtgtaacacctctaatgagacaaaaaaaaatttattgtatcaaaattattttgacctgctagaaccggttttgtaaccggattgtacaaatttttgtgtcaggtaaataatttttttattggggttctttttatttattaataaaatacagttttaagggtagtattgtaaatataattttttggtgagatgtatctttcctcaactcatatgtattatgagagagagaaaatgttttttaaaatttaacatgtttacaagtatataaatagtttcatttggtatcaaatatgtttttctcttaatgcttttgatgattagtactaattaatttgattgagtagctaagattatgatgttgttggataattttattttaaatgcccattatacaatatgaatgtatttatttttggctaattaaaatttttgtttcttaaattttgacatgaacgaaattatgttcttgaactttttagaccattaaaaatttatgtcaaactattgagattatttgatttaatgacttctctccaatttcattcaattttactaatgtggtaattgtttatatattaaattgtgctctatgaactttgatatgtatcatatcgtgctatccaaactttattatgtactaaattgt

SEQ ID NO: 218986 - DNA, 1644 bp, Cannabis indica
aaaaacttacgagtgatcctatataactgcaatacacgcgatcatgaaaaataaaatagcttaaaaaactcttttaaatggtaaaacacattaaaaatctaccgaaacaatcctttaaaagtgtactacagacaaacctcagtgagtttggtggtcaacatttactaagtttggtggagaattactaagtttggtgaacaaacaagtacatgagatatttaataatgcaaaagatttacccttatatcacttatgcattaattaacttattattttaattaattcaatttttagtaacatgaaaattaaatattatgttactaatacatttttattctaatgatatcattttttttaaattttaaattatttatataaagcttttatttgagtaaaaaatacagaggctatacaatttaagattatgtacttcgccccattatcttgttttaaatctacatttttagaaattttattttaaatgtaatgttttcaaagattgtaatggagtctaagttaaaaaaaattaggactaaaatatttgagttatattaataaatttatgttaactacatcacttgtatgaaaatttattaatttttttttcacaaaaaatacaaataattgaggcgaatttatgataaaaatttctaaaatgtttcaaattcaaatagtgtgttttgtacatagtcattattaaaaattttattaacaacataactttttaaaagtttttattagtaaagaaaccatatttggtcgcaaaacatcataaatttacattattaaattatgcaaccattatagttattttacaacaataaatttgtaacgtgaccattatattatagtcgcacagtacaaattcaatgtgattatttacaagaatttataatgtgaccatgataatcaacgaatttacaagaatcttgaacttagaaattattaccgtaatttttaaagttaagaatttatttgcattaaagtaaattttttgagaacttataagttatgtcgcaattttatcttttcacattattatctcgggtaaattttttgttgaaattcattatttctattgtcaaaaaaaagttgaaacattttgggccacaaattgaggtagctcaattttcagaatgttagaataagttcttcatctctcactattaaaagaactttattacattttgtgaaaaagtagttaataaatgttttgttatccataattttttgttttttttttcaaggatatccattattcttttgttaagtaaacataaaaaataaaacatcctccataaaagaaaaagaattgtggtgaattttgtaaaatactattttttttttatatttatttacaattttacagtctattacaaaaatatgcttgtaaaattttaaaattacaaaaatacatactaagcgaaaagtaaataaacaacgagaaattaacctcacgacaactataaatcaaccataaaacaaccagaaatagtaatctcatgacaactataagtaaagtgaaatattattttggactttgtgttttacaaaagttaccaattggaccctctattttgttaaatgataaaatagatcttgtattttctaaaatagtactgataggaccctgaactgattttt

SEQ ID NO: 218987 - DNA, 3587 bp, Cannabis indica
actctcaaatgaaaacctcaactctttaatgtcaaaactacatttctacaatcattcatatgtccctcccctagggtcagcaggaggccttagtgtgtgttggaaaaatggtgtcggatgctccatacatttcgcagacaaaaacaagatcattgcttgtatcacatccgacccccctgataaaccatggctcttaatagggtcctacggccctcccacttatggtgaaaaagagtcctactggaacagtattggcaacttcatcagtgaatgtacccctcccagtcgctcttaataggggaccctttaatggaactcctctggatagcgaatgcctgaactactcctcttctagcaacatcgggcgatattccttcgatcttagaagaactgtcaaccgcactggtcttattgacctggggttccaaggcgtcaaattcacttggttcagaaaaggaccccgatccccatccggaacctgtttgaaaagagcaaggcttgacagggccttagcatctgttgattggaggcttgcctggcctaaagctattgtaaaccacctctctgcttcgacctcggatcacagccccattttactggataccgaagggggacgtagctgttccaacgcccaattcaaatacgagctgatgtgggaaagagacccgcgagtcttctgggtagttaaaaatgcttgggcaaatgcgcagcatcacaaccccatgataaacatgtatcgaaaaatcaagaccacgaaaaagcaccttgccaagtggaacaaaaaccagttcaggaatctctctactcaaatctccaaagctcgttccaccctttctgcgatcgaaaaatccgtaagctgtgacttcgagtctctctcgaaagctagaaattctcttgatgaggccctagcccgtgaagaagttttctggagacaaaaatcgcgaatttcttggttgaaagatggggaccgagccactaagttctttatggcaagtacagtgaccaggagaagaagaaactatgtgcaattcatcaaagatgaaaatggtcacaaactggaagaaatggatgatattgcccgtgcctttgtcggacacttcacaaggatattttccaagaaccaggggcgttcaagcatgctgcattatgactggtcctatgaagtctctacgcctgccctctctgatgatcttctcgccatccctgtcgcagaagaaatcataaaagccctttcctcgatgggtttggacaaggccccaggccccgatggcctcccagtcgccttcttccgctcccattgggaaactatcaaacatgatttccttgatatggtttgtcacttcttcacaacttcggaactcccattcttcatcaacgacactaacctagtcctcattccaaagaaggaaaacccgaacctcgtatctgactatcggcccatcgctctttgcaacgtggtatacaaatgtatctccaagatcattgcgctccgcctaagaccaatcttgcccttaattatatcccctgcccaaactgcctttatcaaaggtcgattcattgcagaaaactctgctgtggccaaggaaatcgtgcattctatgtctaaaagaaaaggcaaaaaggggtatatgatcatcaaactagacctggaaaaggccttcgacaaaatggattgggactttatcagtgaagctctccaatttcacgggatcaaagaaccactcctcaagtggatcaaaagctgcattcaaactagacgtttaaaccttttaatcaacgggactaagcatggcgagttctctccttcttgtggtctcaggcagggagacccgctctcccctgctctattcataattgcagctgaccttctttcccgcctaatcactgatttctgccttcaaggaaaactcaggggattcaaggtctccagaacggctcctccgatcacgcacctcatgtttgcggatgacatccttctgttcgggcaagcgacgccaaaagaagcaaaggccttccttcaatgtattcagacctattgttcttggtctggtcaggcagtgaacttccataagtccacggtttatttctctaaaggtgttcctagatcaaggagtactgagatagccgagatcttaggtatgagtaagatgaattcggatgctaaatatctcggccttccgctcttttgctcaaaggagaacaaacctcataattaccaattcctagtaaagaaggtcctggctagaatcgatggatggaagtcaagacttctctccaaggctggcagagcttgcttaatccaatcagtggggtgttctcttccaatctatgcggcttcctctgaagttcttccatctaacatcaccagcaaaatagataagggcctccgaaacttctggtggggagaaactgatgctaagaagaccctccacaccattgcttggaactccctatgcaaatctaagtttaatgggggcctcggttttaggcttgtgaaagatattaatagcgccttcattctcaaatggggatggaagattcttacggactctaccagcctctggagtatgatattcaacgagaaatacctcaaacgaaccaacttctttgacattgagcttaaatctacagactctaagctttggaaagcaatcctaaattgtagaccgctgctcagccaagccacttgcaggagaattggagacggtaaatcaacttctatttggttcgataaatgggtcccgactggagatcatcaaccgccacctcttcaagatgctactcagggggctaacttagtaagtgacttcatcaacgaaaataacagctggaatgaagctaagattagaaattggttcaggccccaagatgctgctaatattctaaacattggtctccccgcccttccccaaaaagactcctggtgttggttacaagaaaaaagtggggttttctcaactaaatcagctttccacctcattgctaatcactccaatgattaccatcctaacgggatttggaagaccatctggaactcccctcttcatgcaagatttaaactgctatggtggcaaatcctttctaactcccttccaacaagagagaagctggaaagagtcattccaatccctaccatggactgccctttatgcttatcagaagtagaatcctcctaccaccttttttggcagtgtccgttcgccaaagctgtctggtttggaagcttatggggcatcagaaccgactgtgtcaattgctcatcctgggaagattggatgacgtggtttcaaattggcctcaacagacctcgatgtctcactttccacgaattcatgttgggtgctctgtgcattttcgaagtcatctggaaagtgaggaatgatcttattcatggagtccaaaaaatgtctttagatgaggcaaccaagacagttcgtcttcgattttaaagatcactcatcagctgccacttctccagatcctggcttctcaactaatcttaccccacccatgggctggatttgttgtaccactgacgttagcataagcacagaccacactgttggggcggctgttttcagaactcc

SEQ ID NO: 218988 - DNA, 2132 bp, Cannabis indica
cctacacagtctcagaatcatcccactagaccttccccaggcgatgtgggattgcacagcttacccagtatttccccttacggatcacgggactactgcctgtcacatttataatatttatcaagctatagttttcttcaatttccacttagacttttcaaacttttttggacacttgataattacgtggaaatatagtttgacttcgatatatacatatagatatataaaattgagtaaaaatttattgaacacccttgtaaaatgatgttttcgacgtatattctaggttttttattaataattgtgtatattgtagttatatgtatattttttttatgaacacattgtagttatttatatgtatctataatttttaaattttatttgaataatttgcaatacaaaagtaaaattaaaaaatttaatgacaaattgatcggagtaaacatttataattattatcatcattattttttgatatgttcctaaatatggaccacaaaaaagcatcttggttaattatataattattaaaagtttttaaactcccaaatagtagaaatagatttataatatttttttatagtatggaaaaagttgctaatttttttctcaaaaaaaaaaaaaaattgctaattttgttttttggtaaagaaaaagttgctaaattatttttacaaaagaaagtgctatccaacggcaagtgatagtaacaaatattgagtcaaatactagacaagagagactacaaatttatatttttatatatctaactatttaattatgtatgctaacgagcattctactttgaggaaatggtccacttattatatactttatattttgaaatatatcctcagtctatttatatatgactgaaaataaatgaaagaaactccttgagactagctcaagctaggagagtgtgctggaagttctgggttcaaattttaaattaaatattgtgtaatatataaacacttaaataaaataataataataataaataaataaacaacaagattaattacatacaagggagctatctctcctctaaaatactgtctatttttttttttatttattcttcaaacttcaggtaagaaaatagagaaaagagagacgacataatttgagattcacttaattaattttgcttctaataagagagaatttattactattattattattgttgttgttttagagaaaccttattttttttatttaataatagaaagaagaaagttcaaatacaattctataagaagatgaacacagacacaaagtcgttacaaagtttcaaagctcaaccaagtaatttcatttggcacttttactaagatctaaataaaacatgagtcaatgaggagaaataaaattatttgagcaaagacttcgacaatttaactactaaaatgacaaaacacattgcttttaaaaagaaaaagagtggccaaatcactcagctgacctgatgcagagcactaaccgacaagctacaacattaacacaagccatctttaaggcagcaaaagcaaaaccttaacccaacacaaactaagaatcaaaactaaataaaatcattttagtgatgaactaaagattaaaactggttcaaaattattaaaaaaagatttaattgaaaacacaaaaggaacagacaaagataacctcctacaaaaactaaacggccacaaacagagaaaaggcgcacgtaaccctctatttctctctccatagcaaagagaaagaaagtggttcaaaagtcagtatcttgagtggctaatcgtgaaatctgcctggatccacaagaagggaaggaaatcgatgaagcgactatgaatactagattgaatttgattgttgatattctgagggaatgtcctgatgcgatccttgaagttgagaagccgataacagagggtatgaattgggttattgaagtgaaaaatgtgatagatcaggttgctgatcaggaagaacactaggaatcagcgaagaagatttggagctcattcacgaaggagaagatggcctacttgaatcccaaattgaatgtatgttcaaaagtttaattctcatgatttgtgagttcactgcatttagactgacatgataatcgacga

SEQ ID NO: 218989 - DNA, 5477 bp, Cannabis indica
ttacttgcaccacatagcacccgtgagtcacaaggacccaaaaagaaaagtagtaatacaatatcataaatcattattcaggtatccacagttgaactcaataatcataatcaaatattcgtacattactcgtatacataagtcgaagtcaatgaaaacactcgatcaaaattaacatcagtataaacatttagtaatatacccatactcatttaataatacaaaccatgtctattagttaataaaataaccatttttattgtttgttgaacaaaataagcctgatgcctaactcgacatcatactgttcttgtcattgcctaataagataaccttgatactagtttctagtattcaaatgtcacaatcattgtctaataagacaaccatgatacctaaataataatgtcgccttcaaactagacaacttagatacctagccaccagtatccctgacatgagaaatctaacaacaattttgatttatagtcatgaattttgatacctaacctttcagtattcaaatatcattgtctaataagacaacctaatcatcattgcttaataagagaacattttcatcattgcttaataagaaaatatttttatcattgcctaataagataaccatttcatcattgtgtaacaagacaatattttcatcattatctaataagatgatattttcatcacatagcggtaataactctattttaatctcaatatcaatcaattcacaaacgataataattatatcctaacataacatgttatgtagtacaaatataccttttttttttaccttaaattctatattcatgtatgtcggccaacccaaatgaagaaacgcctgacgatcctagcccttagtcttcataacaactttgaatcagctcctacctgaaaattagatggagaatagaggagttgtagtcgaaaaaattggtgctcacccttggctcttcttggccaagctttagggagagaaaaagtaatgatgagtctgtgtttttttaagcttatcttcactaacttaacccttaagttatactaacttaagtgaaatgacaaaaatgccctcaaagctaacccttaaaaatttccaaccctaggagtatttcggtcataactaaatatcccaaaataactcaatacctcaaaatctactaaattttctagtaccaccaataccacacattaacacagttgtgacatttctggccaccaatcaggtctccatagttgctgaatctaaaaatattttatatttcataaatagcatgtatgttatccacatatgctaataaaatctccaaattaataaattacactttttaaatcatttatgataaaatttcctgaattatattagtaagattataatcttacccattataccttaattaatccataatttataaaatatgtcctaattaatcattattagatttctgagatattacattcatataatgattcattcctaatatccactttcaattaaactttaagcagttgtaaaactaatggaatctactatttgaacttatgtatctctccatcttatccttggagtttggtattttctcaaacctttgctcctaatttaacaaagcatatggtggatctatatttccaccagtaaagcttttacggtgacctctaccgcaaccactacttgaggggaacatctagtcgttctgaccacttcaagccttaactactataccatgattcctaccagattgcctaaattcacgattactaaaatctaagcaagttagggatagtcctaatcgtattcttataccgcataacatggaaacttaatcaaatacttattcaactattttactattaacatgcttcatatcatactttatacttatactatctcatttaaaactaccaaagcatataaaagcttactaaaaattgtgagtcgagcttgtctcagatgacgattgtacgtatctagcctatctttggagaacaaacctagtgactctgataccaaattgtaactccctactacctaaggtacgttacagtattttcttaggtattgtgctaacctttgctaatcaaagaattttgacataaagtgtgtttagtaaaaaaatttcaatataattcaaacgttaataaacataaacacttttataaaatatttataatctgggattccgaaatttattatttataaaatatacaaaatatccaaaagtgtcatctaatgacacaactcaaaaagatgtcagtggtgtcccaaagatcgatatccttcaggcttagatgaccagatatatacaatctttaccaagctcattacccaccgtagttcagcatgatctttacctttacctacacataaaaatatatatgcgagttgatggactcagtaagaaaaatgtaatatacacaatctatatctaacttgtaattgagcgcccatacactcaattaccataagtctactaaccgcgtccaatgtgtatgtctgatatctgaacgttcgtaactatagtataactaacaataataccaaaccgcactctattgtctagtcgttctagtgttggtagtgttaattaatactttaagcactactgatcatattagatattagtatcctggtgtaactctatggacaccatatcactatctctattatgttaactgcatagcaatataacatacatgtatactaaacatgtgtatgtgtgcatctgaatactattcgtacctcaattcctaatttaggtgcgttggtaaacttgagtggaaaattattcgatgatcgcaaaccctaagtcacattagtggtaaactggtaagtgtcttgctaaaatactttctagaacttaaattcacaattagaagttttcctatcgatacatagagtggcaataccataaataccatgaaaacacgaaaaatcaaggtacttaaaaaagtccccaaccgggaaaccggatctacaactgggtccccagtttttcgggcactgccaggacaaccggtaatttggttcccgaccaggcacccagattgctgtagagacagaaaactcgagctatttctaacactacccagcatgttccgagccattttaaactttccagaataatttaatatagcattttaaacataatacaatagcctgaagacaaaagtaaccatagaatcaaattataccattaaagcttcaagctttgagcttgaaacttagaatttttacactaactattatttcagctgcacacaactctaaataaagtttagaatctaatccaaaaccttattttaacatcaacaaagacctaacaaactactgcatacaatttctaactaaagaaaacccataataaaaatttttcttcttttctcttcaagttaaacaccaagtcgctaattcccaaatgttccttctttaattcccctttgattacttgaatttaagatgaatttgatgaagaatttcttaggtatttgttgggggtcaactgagagaaaaatggagagaaagaactgatatttttggtttttctttacttgggtttgactgaaggaggagagagagaaagtaagagcttgtttggttgtgttttcagttttcagtttttaaaattgtgtttttaaaagtgagaatagaaaacagttttttgtcattttaaaaatttaatggtgtttgacataagttttctaaaattatttttaatttttttcttactaaaaaaaatcaatattttaacaccatactataatatgaacccattcgggtccggatctaggattcgagtatgtgagcaaaaatataaaatataatatgttagacaaaaaaaattatttttgaaaattgaaaacaacattttgatattttctattttttagttttttaaaactcggtttttaaaaaattttgccaaacaactcctattagtttttaaaaactgtaaattatgaagtcaaacagcccctaaattttctctataatgttccaccattctacactcattactaaatgtatcatctaataattagttaataaccgatttactcttcttaataataaaacatatacttaattcaagagtaaaataatcatttctcaaataactcatataatctcataatttttaattatttataaaaatactaaatacttctaaaatattaattcgtcgagttttcatcttcgaataaaagtaataaattacatattattcatatataacacacacataatttaataaaatttttataattaaaaaattatatcatattaaccaatttttaatacgttttatttttagtattgcacatattattttataattaattatattatactaattaattattaatttttatgtctaattaaaatgtggttataaaggtaatgttttataaaaattattaaattgaaatatttaataacgatataatacatctctcgtggacaccaccattattgccctataacatgtatgtctgacaattggtagccacatttgggtaaacaagctaaaattttctttggcttaaagcgagaaaagtttgggttaaaaaattaaagtttttagctatttttttttaacccattagcacgagactgctcttacaaaattaacttcggttatttatgattcgtgtcatttaattattaaagaaataataataattattaaataaataaattaaaaaaaaatctcctcctcaaaatctgacaaaagcatttaagtattgggacaaagctacagaaagtcgcgaaaccgtcgctgtcatctttccaacaaaaatcgagacatgttgttccaagcgtttcagtgttggggcccactactgaccactgataagctaccttgcttatcaaaatgtcgtaatgcttaccaaatgataagtatatctgcttatacctcgtgagtgccgccctattatataaataatcgtcatcacaacaacaattagctccagtctccatccacccatgtattgtattttgttagaagagagtgttcttctgtgaaagaaattcttttgaagagaatggagtgttgaaagttgaaacctttgtagttctttaatcaatcaatcacttcacttgctctgttattttgtgtgtgtgtgtactgtgttctcttctgttctgttctgtaagtaagcttatttctcctcttactttctttttaacttttttctgccactctaaaatgggttacttttgttttgtttctttcctacacatcactttctttccttcactccatattcttcttctttaaaaatcaccatatgggtcgtttaactttactgtttctcgtctctggaaaccctatttcttttttcttttctctttttcaaattggatgtgcgaattattgtttgaaggtctgaaatgttaaagatatttttttgtttcggtcaatggagttgagtggttgtggttcccttcatttcatgcttttttatccctt

SEQ ID NO: 218990 - DNA, 3313 bp, Cannabis indica
tggacgagcagaaatagcagttaataagtttcttaagggcgaactactatcagtccgcctgaagccatggagatatgatagggatcgaccctaacattatctgccatcatttaaatatcgatccaaactacccagtaaaaaggcagaaaaggagacctttggattccgagagacaaggggcactaaaacaggaagtggacaagttattagtcaatgactttatacgcgaggtgttttatccctcacggatagccaatcctgttctcatcccaaagcctaacggaacttggaaaacttgtattgatttttctaatctgaataaggcgtgcccaaaagactgtttcccactacccaggatcgaccagttagtggatgcaactactaggcacgagcttatgtcatatatggatggatattctggatataaccagataaaaatgcatgtcccagatcaggagcatacgagatttgtaatcaacatgggactctactgctacaacactacaaaaaaaatgtcatttctcggcgagctaggcccgtcaagattgactaatctcggcgggctacagccgcctttaatttgtgtgccgagatagattaagggtcaatcacggagggctaagcccctctatatatatgactaatgtcggtgagctaggcctcccgtaatagacccatctcgactgtcatttttccactttcaaataccaatcttgacacacttagcccgccgagataggtcacccatttaaaaaaaatataaacttttacagaaatcaaaataacaattacaataaataaaattcatacttgaattgattatatatccatttacttctttcaatttcaagtagagaatacaaacaagaagatacaaaaataaatttcaaatagatgactaggacaagtttctatacaagaataattcaaccaaaagaatccgaaaatagagtagaaataaaaaataaaataattattaaagctcagttaccaattctactttacaattatggtattttaaaatatgaactttccttctttgtacatttgtgatgccccataagctccttcatattattaccccgacacctcaataataaatatcatcaacactatgaagatcaaaataataatgttggtcttcttttggccctacaaagatgagataattactatagttaaaaaaaaaaaatatactataaactattaactatataacatttttttaaaaaaacaaaaaagtgtgatatgaaatatacaatttataattgtaaaactgaagatcttccataatggaattccacatcaataaacttcaacctctaattaaacttcaaatcttccataagcaataaaatttgcaattgacttaaaaaacaggaaaaaaaaatgaaagcaaaccaaataatcaaaagaagatattgaaatatcttaattggttcagttctcagtcactgagagaatggattgaacatctagcctgcaaccatagaaagaaaaaaaacaattagagagatgggatcatcaaaaagcagcgtagttcatccaaaaaaaataaataaggagaaataaattcatttgagttatcattaccaattcaaggaataaaatcaattcaaggaagcaaagattaattactatttctcacccaaattcaaagacacaatttataagatttttcttaaataaattttgctccaagacaatggaaaatcaacaaacaccaagagaataaacacaaaacaaacttaaaagagaacagtgcacaccaacaacacacgatggacacacatgtgatttacctctgacaaagctacatctacattcacttcaaactataattgagattacacttttggtctgtaattttctgcttagataaaacaagaagcttttcccaaaaaaaaaaaattattttgatcaaacaacatagtgagccccaacactaattctcattcaccacagtcagttgagtcaactgtttcaagtaccaaagactcttacattcatatttcctaacaacccttttctttattcttcatctgatgaatacctgctccatttagtgatactaacatgagcagtacagaacaacccaagtgatactaataaggagaaaaagattaatttatataaaataattcttataaaccataaatataacaaatttgagcagcactaaacaactcaatttaaaaacaaaatgactaaaaatctttagacactagaaattcctggttttgataacaaaagatgcaatcctaatagaaaagaataggaaaaacagaggcaaattaaataagtaaaaagaaaatacaaaaatgggaaataggaattgtagaagatgaatgtaaataaattttgactaacatttgagatgaagagaagaaggtgttactaacctattgtttaccttagggcagtatgtctcaaccttcattgtcccaagctacgatgctgtccctggcgttgtccccatcctgacatctttgccagcagtgtcatcgtcctagtagcgactatttcccaacaacgtcacacaacatctgcctgaaaaaaaatcaaaagaagaagaaaaagaaggaaacaaacacatatagagagactaatctcccaccgttcacgatgccgaggtctctgtgtttcattgcttctgccgccgaacctcaaaaatgaaaggaagaattagatgaagatggagatggagagctccatcgttcgtgagattcggcgctgaagatagagagagagagagagagagaaagggggaatttacagctgaggaagttagagatgattttaggtttttctttatcttttgaatatttggccctatctcgaggggcccagttggaactgccgagaattgttgctacgagaacccaatctcggcagttccaactgggcccgtcaagatagggtccaaaacttataatatttttgaaagtaaaatactttgcctaccaattacgacggttcaataagagtccgtcgagatagagaccaatctcggcgggctcgcgtgagccccccgagattggtgtgtcgagattgtttatatttcttgtagtgcaaagtcatgccgtttgggctgaagaacgttggggaaacatatcaacgatttttgaatgaaatattcgcaaatcagatcggacggaacatggaagtttacgtcgatgatatgttagtaaagtcaataaaaagcgggaatcataccacagaactcgcgaaatgcttcaaaatattaaagaagtataacatgaagttaaacccaaaaaaaatgttcctttggagtttcctcaaaaaaaaattt

SEQ ID NO: 218991 - DNA, 2060 bp, Cannabis indica
cttgtttttcggtagcccatcacgaaagaactccacggttaagcatgcttgacctggggtaatttcaggatgggtgacctcctggaaagttttcttaagaagcgtgcgagtgaggacaaagcacgctggaaacactcgtgttgatttgtagggtcagtcgtcagtccatgaagcagccagagtgacgtactagtgtataagagtcatcattccataggtgtaagggcccaatggagactttaagcgaggacgttatatatgtagtttgagttacttctaaatcttcttctaataaatttaaagcagagtctgtatttacgaaagtgaacgaaaaattataattttactaacattaagtacttatgccattataaataattataaaatttatatcatttacaatttcaaatacaaaagtttaagtacttatgtcaaaattatctcttattttaataatgacaccaaaaattctatctttccaaaggtggaacaaaattcagagcctattattggtcttaagtttatatattagaatcactatcacaaagacaatagtttcaactttatcaaaaaaaaaaagacaatagtttcaacaaaattaaaatttaaaatttattcaccaaaaaaatttaaaattttaaagtcatgtaagtgtgaaggtgacatgagtataatagcctcatattttttcaagctgtgaagcactaattacttagccgactctctctctatatatatgtatgtatatatagatatagtgtgtgtatatatataggtgaagtttgacgtcttaaaattcatgattttgaaaatatttctgataagtattacagctgcaactactttattatgtatattgattgattgattgtgttaattagtcgaatttcaatcccattttaagagaatttctaagtcaacatgccattgatcaaatatgccaaatgtagaattttttatgtgctactttgaatcatggaatttgcaatatatgaaataatttcacacaataattataaagttttaattatttggcttctcttagctaattgaatttattttcctaataaataactatcttatattaaattaatgtgattatttaactaaacaaattttttgaaagagatttaactaaatttattagtttaaagatttttaaaactaacaccattatgcttgttcaaaatgcattcggataaggctccgaggccaaatggtatggggccaagtttcttttggaaatacgagcacatagtgtccgatgttgttaagtttggttcgagatttcttttaggtattttgtgtaaaaataataataataataaaaatttaaaaaaatattctcaatgttgcataattctaattggaccaaaatgagataagatgtaatgtaggaaggaaaatttgaagaatacccaatttattatttttaaaaatacctaagattttgaaaaataaaagaataaaattacagaacatggaataaattacaaaattacgggaagaacataattataaggaaatttttgttattgattttattaagaaagtttgcaaaattatggatattttttttttttaagaaaaagttattttatgggaaaaatttgaaaagaaaaaagtataaagtaactagttatcctaaagaggtaattagttaccctaaactattctttccatatttttttaaccttaagaaaagtttccaataattttttttttttcaaaaagaatactaatcttttattgtattaaaactcataaaatatataatttcttttaattataaatacaaattttatttttctctaaaaatattcataacaatacaataaaagtataaatttgtaactatatgttccaattttataaccaatatttacaaatcaaacttttctatgtatttttgtaagaaaaattttatttgtatgcttaaaaaaatatcccatatcaaaatttagacttccaattaatttatacaaaataattcttttatttacatattttccttatttcacccttggctaataaaaaaaaagtaatcactctctctctct

SEQ ID NO: 218992 - DNA, 3285 bp, Cannabis indica
aaggttcttgagctttggtcaagcttattgtatgttattctttttctttcttctctaacttgtaattttgatgtaatacttttatttgtattttaagtattttgattgtaatcttcctattctcttttgtaatgagaatattttttaataaaaacatattgaggagttgatattattttacatattataattaagtcattgttttattatttttcattactttgtacttgtttttttttttatatttattttcatgttgtttgctaagtgtttttagagttattttttagttgttttatttaactgaaacataatatttttatatttttgatactttaacataatattttttaaaatttaatacaataaaaatgtaaaaaaaataaataaaaaagaatatatttttggtaagatctccaataaacaatgaagtgggcataatccgttgacccgacccattactctactgtaactgagctctagtgccattgctacagctactatcattacattccaattccactcccaagttccatggcacaatgacccttttcgctctctttcgccttaagcgcccaatcgaaacgccgtcgttattgctcccatttggcttgttttcagaattatctttcttacgatattcctctttctgtaaacgccactatttcccaccctcacagtcacaacaatcccctactcatccagtcccgaagaaagtcccatttcaagcctcttcccatggaagaacgtggcaagatcctttccattggatgtccaacaccaaagaccctgatctttctcgatatcttgatcgagaaaactcgtatgctcaagctttcatggctgacacacaaaacctgcaacgaactctcttctctgagatgactcaacgaatgcctgctacggtttccactcctcccgagccttggggaccatggtttgcccattccttaattttgacaaatttggtgtttttctttttgattggtaactgttcttgttttgacccaaggccccaagttacaaactagttaagttcattacaacctgctctgtactttgcatgaactcgccatgacctttctcagtgaatgctcccacggtctttaaaaattctgtgttgtttttattcttggattgaggattgaaagtgtgatggcagtttcgctatttttcaaattatgctttgttctttcttccttggttggtggaaatcatgttttaaagtatgtgaatgcccaataccacaaaaagtatgtcatcaaatataaaaaaacctgctaacaattaaggtgccagcttttgtaattgagtcatacttgatcattcaggttgtattaccaagacattccggaaggaaaggaatacccagtcttgtataggaaatcaaatgttggtaaaagtaattgggttaagactgctctccaatatgcaaggggtggaacagggagagaggaaattctgcttgattggaatgaaattgctgaggaatatggcaagttcttttctgttacttattcatatataaattttatatatttttctttataatatttgtaagtatatattagtaaatctgtgtgtacgttcgaaattgtaggttatgtgcatgtggggatgtgtagagtgtctccaaaccataattttcttgcatacacacttgatgtttctggtagtgaacagttcattcttcaagtaaaggaccttagaactggatgtattattccaaatttacaagttcatagagttgtgagtatagcatgggctcttgatggcaatacattgttttatacccagtcagatgagaatcaaagacctttcaggcaagttcttttatttttttttgtttacatgtagtgaaagatatttcctcaccttttttttttctctcagggttttgtactttaatttacactccagtaatacagatggtattcctgtatttacagagagcaattccagcttttgtgtagacataacaagcacaaaagacggcaagttcataactgtgaattcaaattcaaggacttcatccgaggaatgaatagaaatagctgtttaatcttttaaaatagtatctgcattgaaacattatctatttgactgttgtcaagactaactttatgcatgtgaaactacaggtttatgtaatagacgctgccaacccatcaggtgatctgcgaaaaatacgtgagcgtgtatctggtgtccaatacttccttgagcatcaccatggtttgttttatattcttacaaatgatccatcgagtgtaaaagaaggatggtctggtgaagattattacctagctagatgccctgttgaagatatacagtcgactaattggcaggtcgggtttgtttttacttcatttcttaaagaggatgtttcatgctctttgtcatcctccctctctgagattgtgccattctttagttattcaatgttgactcgttaaatagttcatcactctttttcatcatggcctcaattctcttttattagaatatcatcattccgcgaggaggtgtaaccatacaagatatggacatcttcgatggatatctggtgctttttgttgacaagaagggtaattgtaaccctgctttctgttccctcagttttcctatcaatgttgattgcgaggtactcatattcagcttcttacatacataaataatatctacctaaattatctaattcttgagttaatttgagtttatagctggattttgttctgttggtaatgcatggctgcccacaatctatcataagagaaaataaaattttgaaatgtctagtgtttacataccaaaatctaatcattgttatgttattttcttgttttataggacctattggagactgagaatcttaatacttggtttttccctctgccttcaaattcatgtagtgtcactcctggttcaaaccatgacttccttagctctgtattccgggtggtgctttcatctccagtggtacgaatttaactagcttgattgcaagggatacaatattatatgtatacctatttatgcataattttcagcccctctctctcattttagtaatcagctttttgttcagacttcgtatcagtagaatccatttatgatgtttggggcttacaaattatttccttaatttttttctactcagtttgtgagtattacattaatacgggaagatataggaaatgtttattatggttttaaaattttgaattggctttttcttgttctttttggagatttgacaagatgagctcaaggaaaccttcattc

SEQ ID NO: 218993 - DNA, 5100 bp, Cannabis indica
ttaatttagggggtattttaggaatcttttaaaattagaggaataaatttgtacaaattataaaagggtataaattttgatataggttatattattaagggcaaaaattgaaatttcccttgatttatataaaacacgtatacacttgaattctacatattttaatttataattattaactatttacatgaggtgacaccatatttgtttgaaatggtgtctattaattataacaatactaaggagaaaatcaatggcaaaattgctattaataaaaagactagtactacgaaggaagacctttattacaagatagagttggtctcggcaaaccaacactgaaacttgcataacaagtccatcaattatatgtcacaataattcatataaaatagctagctaagaattaaaaaaagtcaatatttaataaatgagctaaaataatttaaatttttattttatgtatagtgtttagttaaatgtagttaaacgttattttaattttagtatttaattataattttatttttacaatatattttatttaattgttagtacaaaaataaaaaaaaatatatattataaaatattttaaaaataagtaaaaactgaagagtactttaagaaagagggaagttgagttttgaaagttcccattattattattttaggataggaaattggcatattttaccaaaagttgaataatgtcgtcttatgacttatatgagataattggacaccaattatattagtagctacgattggttaccgttaaaagttattatcttagggaaatggtacacgatactttcttttgattaatcaaaatgtgcattagtccatctgaaattaatgcctgacttttcaaatctcttaattagctagaactttattcatattgaacattcaacttttcgccagagaccgttgtctatataaaaatagtgtgttataacaatgaaaatttgacatctctaatttagagaagaagcagagacaatatgaatatgaatttcccactatttactactctgccgcttcttttattgtactgccttatgatcacaacaatattggtggaggccaacactaacaatgttcgtttctattcatctttcataaattatatcatttctgaagtaagtcttccatctgagtttcttataataaactcttcaaatttttcattttatgagacaggttcacattgtttatatgggagaaaagcagcaccaggatcctgatttgatcactgattcccatcatcacttacttgccaaaatagttggaaggtgcatataaataaaacccaacaaattatggctaattagaatggttatttttagattatgttaattgttttaatgacttgtgttgtagtaaagagagagcttcagaattgatggtatacagttacagacatggcttctctggttttgctgctaagctcactcagtctcaagctcaacatattgctggtaattagctttttcatgtctctgcaattagtcaaacaaatttccatgtatatatatatatatatatatatatgtgtgtgcaaattatgtaacagtacaatatatgatgaacttcagagttaccgggtgttattcgagtcataccaaacacaatccacaaactacaaacaacgaggacttgggactctcttgacctcacaacaactaaagcaccttccaatcttcttcagaaaaccaacaatggcgatggagttattataggcgtattcgacacaggaatatggccagagtctaaatcctttagccaaaatgggctcggcccagttccctctcgctggaaaggtgtatgccagtccggccaaagcttcgaccccaaaaaacactgcaaccgaaaaatcataggagctcggtggtttgtcaatgggttcttggcagagtacaataagcccctaaacgcatcaggggagatcgagtacttatccgcaagagacgcaaatgggcacggcacccacacggctagtacggcagccggttcgtttgtgggcaatgtcagctacaaaggcctagccaacggcacggcacgcggtgctgcttcgaacgcgcgcgtggccgtatacaaggtgtgctggaacttcctgggcgggcagtgttcttcggcggatatactcaaagccttcgacgaggccatacacgacggagtggatgtgctgtcgctgtcgattgggtttaagattcccatgttttccgatgtggatgaacgagatggcatcgcaacggggtcgtttcacgctatggccagagggattactgtcgtttgtggagctgggaacgacgggccttcagctcagactgtacagaacactgctccttggattttgaccgtggcggcaagctctattgatcgagcgtttgttaattctattactttaggaaacaataaaactttaatggtactaataataactcatgtttatttgtttatatgttttctaagttaatttaatttgttagagtagctatagtagaagtatttcatgtatagatatttatacaattatgtaactatgtggatcaactttgagaagtataccacgtggctcaggaatatggaatacagtaaccatgtgagagtgtcacatgattctcaagagagttattctattgtgatgtgttggactattcaacatttaacacataactaaacagagttaacttagatttgcataactacaacgaaatgctaacatagttatctatcctacagttacttgtatgtatttggggtttagttttgcttagttaagtgttatggttgttaattatttctagggagaaggtagtctataagggaagggagattggtttgactggcttgttatatccagaggcgaacgggcttgatccaactgcatcagggtagctaaaatatgccacaattataacgagtttcaaaagtttaattgtagctgaagtaagcatgggttgatgtatacccttttggttttttgcagagtttgtcaagctcttcagctaaatcagaccaaggttgctggacaagtggtgctgtgcttcacctcaatgactcgaagagttgctatagtaagtgcagcagccactgtgaaagcaggcggtggagttggtcttattgtagccaagcatccaagcagtgccttatacccatgtcctggtgatttcccttgtattgaagttgactatgatgttggcaccaaaatcctcttttacattcggtcaaacaggttagatgttttgatactagcatatccttttgttccattgtgttttgttcttttggaaaaattaaaaaaaaataacttttttttgtttgtttcattttcacacacagaaatcctctagtgaagttgagcccttccaaaacagttgttggaagacctttatcagccgaagtggcccatttttcatcaaggggacctaactccattgaacctgcaatccttaaggttaatgacatttattatccttctttatttggtcttaatgcagttgttaaatggtttgaatctgttgaaacgatcaaaagttcattaaattttgagttgaagggctttcattgttcgtgaagttaactaagtcgagttaaagagacttcaacacaatgtgttggttcataccttaccactaaaaagtgtaacaagaaaaaaataataaataacaattatggcatctctaaaaattctttaaattgtgaccgaatatgtttgaagttacaacaaacttcattactgtattatttagaactaaaattatattaataataacttgtgactaaatgtgctaagattctgtgtaacagccagatatagcagcgcccggtgtgaacatcttagctgcaacttctcctcatgaccaatttgccgatggcgaatacgtcatgcactcaggaacttccatgtcaactccccacatttcaggcattgtagctcttctaaaagcattgcatcccacttggtctcctgctgccattaaatcagcacttatcacaactggtattactcttctcttctcttgacttagaatatgactaacccaaaagctcaatgatatacttaatactaattgatgattttaataatgtagcacggaggactagtccatctggttccccaataattgcagaagggtcaccccaaaaactggctgatccattcgattatggaggaggcattgtaaactccaaacgcagcagctgagcctggactagtttatgacatgggcatggctgactacattcattatctctgtgcaatgcattataacaacactgccatatctaggcttacagggaatgtcacaacttgtccagttcaaaaattgtctgttctagatgttaacttaccttctattatcataccaaacattaggagaggttccattacagtaacaagaacagtcacaaatgttggaacacaaaactcaacttacagaccaacaattgagcctccatctggtgtagctgtgtcagtaagacctggtgtattgatttttaactctactgttaagaagatctctttcaaggtcacattcaatacaactctcctaatgaatactcagtacatgtttgggagtttaacttggtcagacagagtgcattttgtgagaattcctttggctgtgagaacagagatgtttcaaccttatggtgatgggtactataattaaggccatttattaagctattatggaaaattggtcaataaatttgttagtatatctcaccttgtttctttatatttggagtaaatattctttaaaactacctttttgaagggaatttagttgaatttctcaataaaaaaaattcagatacagttctatttatttattttcaatgttctttgagttatttacaaatgttgatactaatttttggttcacaaatagttaccctttagttggtacccattatggtgtttgagcatagagcattggtaaacaagagttaaacattaaagttattgaaaatagaaaaatggttaacaataataatataataaaagaagaaatctctacttatattttaggtccatttaatataattactaaacactcttaaactcaactacatgtgaaaggtgaaggt

SEQ ID NO: 218994 - DNA, 6615 bp, Cannabis indica
ttagaaagttcatatttacggtgttaataaacatacttgtgagtagatctaagatcctggtaaaataatttccaacactttttcactgttcataaccccatccacatgaattttccatgtctacttaagactctaaaagctctagaatggccatatcaggactagtgaaatagcttatttctatcgtgaagtctgccaataaatggcctttttatctttctttgggaggtatgttatatcatacgctcccagctctatcgcccatttagccattctcctaagaaagtcctggtttgttaagagcttgtttcagggggtagtctgtcacgactgttattggatgggtttcaaagtatgtcttgagcttctttttagcgatgattaaggagagtgatagattttccatggtggtatacctattctttgcatctaggaccgtcttatggaaataaaaaagtagtttttgtttttgcccttcttttttaaagagtacaacactaactgctacctcgatgacttccaagtacaggtaaagctcctcattcagtttgggagtagatagaactggtggtgcactcaaataattcttgattcgttctagagcttcaactttctctactccccatagcttattcgagcccttcttaatgcaattaagaaaagacttacatttgttagaaatttttgaaatgaaccttttaagagctacgatcttcccatttactctttatacttctcgcatatttgcaggtttagttatctttgaaagagatttgagctgagttcgattatcttcaattcctcattatctaacgatgtaccccaagaatttttgtcaagttacgtcaaaatcacatttggtagaattaaatttcatttgatagagtccaacacattagagcattcttcgggatgctaaagatgatctcctcttctttgagattttaccaccatattgtcaatgtaaacttccattattcttttgagctgcttggcaaacaccttattcatcattctttgatatgtctctcctgcattttttaatgcaaaggacatgaccttataatagtataaccctttctttgttatgaaagttgtatgaattctatcctctttcatcattgtaatctagttatatcttgaatatatgttcatgaagctcattcactcacatccagtagtggcatcaattatctgatcaatctttgataatggggaactttctttcaaataagctttgttcaactttgtaaaatatttccacactcgcttcttcccattatttttttagtactaccactggattggatatgcaatagggataaacacattcttcaacaaaatcagccttcaacagtctttctacttcttctttaatcacttgattaatttttgtagctaacctcttagttttttgtttgactgcaggaagccccttggcaactatattcagctgatgtgtcattacttttgagctaatttctagtacgtcttgtggctcccaagcaaaggtctttcttcttcatctaagaacaatcatcatttcttccttctcctacttatccatttgggctcttaccaacagtgtctttttgagttcaaaagggttaagtggaacttcctcttgctcatccgccgttatatcccttacactattatcttcttctccctccaagtatttcagatatgctggcaaagagctctctatttgctatctctcttctttcgtagtgatctcctcaatcactgcattgaccttcctcattagagtacaacatttcttagtttgcttttgacatcctttaatattgattatatgtgttctgttgggggatggacatctaaagatctaatggagagtggatgatgctccttgcattcgatgtagccatcctcttcctattattgtgttgtatcctgacacaactttgattacaataaaatcaagtttcattgttctttagacaactatgacatggaactcaattactcccattggataaacctagttattgtcaaaggaacacattggcaaggttgaagctctaattctattttcatcaagtcccatgttgatcaatattttttatggtacttaataaggtatgcagcgaaagagtttcatattatctgattatcattgtaccataacccctaggatctccatatgtatgtacattaaatcaaaataatgaaagtaataagttaagagtatacctctttgaatcctattagggtatcctcgaaacttctcgtatgttgtagcctttaatccagctgatgaggaatatgcaatttagactcacaccagtgtcttccaaatcaatccaccacacacaaggaataatgtgggctatcaggataaagtgtatagctttgttcttgttgagttctcaacacatgagcaagagcaactgagagaaaagacaatttttttttctctctatagattttgaaaattactctgtaaagtgatgttttgatttctcaaattaggctcctatttatagtaagtaaatccctttagtaaatcaaaatttaattgtttaaataaatatctataaccaaattcggagactgatatttatgagagaatctcttaactacctgagagaatatctcaacaaccttaaagtatctataaccacttttcaaattagatatttacctaaatgaaaattaacaaaaaaaaaaaacaatccaatagggatagggacaatgctaggcgcctacctatgtctttaggacaagattattgtcttttcaattgacaaatcttgtctcgacaaattttatcttaacaattttttctttttccctatttcattaatttgaaaaattatttatttattacaaaaataaataattactattttttcaattcaaaatagattttttcaaatatttttatacaactatttatccctatccttgatagtgtttcaaggtggcaattcgaggatcatagacccataattctatgctccaataaattagattatttattgagtctcaccaaccaaataattatttgtttattaattccatgattactcctactataaatatagaattgtacttttagtatttataaaattatatttactgagttttactgcaatgtctattgatataatcaattctagtgattagccctccatgtgttggttcgtaattagttttggtcaaaaaatcattttacctttctcattagttcttgatcttttagttccattaatttactagtggatgtataattcaagatcccatctaaattttgtgtacaacattccagttccagaattaacacttaaagggaactaacattcaatcctttaggaaagtcaggattccataattgtacatcatattcccagccatccatgttattagattcccaaaacagaggttgtaagaatcatcttctctgagaaactttaacgagtgaatcaaaaaaattaataacatgaacatgagttcatgataactcagaatttaggtcgatctactattgatcatcgatatgatatgaattaagtctttatgataaacgtcatattaataaagacagctttattcatatcgatccttgtcatatatgatctctattatatacaataccttcacttagatgtctcactacatcaataatccgaaccaagattacttgcgccgaagaatgggcatcagtgaaccataccagcaaccattgattaaagattccataactttaatatattattcatatctaagtggtcttagttctttgtacagctacaagacacaatctcatatatgaatacataattttctgatatttaatataaattattcaataataaatattaacaatttaacattcacacatatatcaaatatttaactttttattcaatgatcaaaaatatctttataggctttcagggtataaaccctaacaatcaatgtctcgtagataaaatatctgcgctactctctccatccattaagattcttcctaaaagacaatcttgaatttgtagctgttccataacctcaaagactccttttgcttattacttcgatcatggtttttggtttggaaagaatgagctgctctcttagtaaagaacctttaagctcattcttattaaagtagcatgttgcatcatttgagattaccttgctcacttgatacattatatttaaaaacttttgtaagaactatcgaggatactctccttgttttctgtctctttttggattgtaggtccttttctttcttttttggctttttacatttccaccatacctgcagcaaagagctatgtgagctcatcaaaggaattaattgatccttctcttagttatttgaaccataacaaatttgattttgttaaggttgttgagaatgccttgcatctgattgctagattacttgtttctaatgccatcttttgttcaaattggagcacattctctaacagatctcctttgtcgttaaacaacataaaagttggcatagtaaaatctctcaacttaggttcatcaaagatccatttagcaaaaggatacttagctgcattcctcatcacaactctgtttggatcatccaactctaaaataattctttctccaaatttaaccatgatctctttcaacattttctcttttatctgtgataaatcatcttctatttgtacaaggttgggaaggctacgtcctaataacgattgttggccccttttgtgccattccttttatcaccgaatcacattccatccttacttgctcatcccttcctccttgattgaagtatctttggaatacctatttcgtattaacgacattgacaggttttggcactaaatcgtgatttccacttattgtagctatctttcttagttcttccaacactttttttccttttgctattagcattggctgattcctcatttctttctcaatacattggaagattgttacttgttgcaatcttttgcttgtatgttgtggttcagaaccatttgtttttgccaatctctcgctgagtttgagtgttatttacttttgctcgtatgtcagccatttcaatcataattttttgcatagtgcgattgaaattctcttgatgttgtctatttccatttatcttgttggcatttctcctcagccatatgctgttcttgctggaacttcctttctatgagacactgtatttcctccgtgtgtttggctcaagcagtcattctttgattcattccctcatttctatagccaatgcagtggttggatcgattattgggttaaaagtatctccttcggtttgcacattctcctgtgctttcttggattccatcttagtttgtaaccttgtcttcagctttttgttctgatgattcctgtagacgacactagttgttgatgctaaaaattagttcaacaacaaatttgtattctgactttgaattctttagatcatgtttggtctaattaaaatacatgctttctatcagtgtacacaattccctttcaacttttacaatctctttggttcgtctgcttcccgagctcaaggacttgatgtgagcaaaatacattaagtttggtcaacaacaaaaaatttagctcaacaataaatttgtactctgactttaaattctttacatcaggtttggtctaatcaaaatacatgctttctatcagtttacacaattccctctcaacttctacaatctcttggttcgtctgcttcccgagctcaaggacctgatgtgagctcaaggagctaaaaattagctcagcaacaaatttgtattctaactttgaattcattacactaggttggtctaatcaaaatacatgctttctatcagtttacacaattccccctcaacttctacaatctctttggttcgtctacttctcgagctcaaggacctgcttcccacccatgtctcgaggatgtattccaacaaaattttaactagcctgatgtgagcaagaattccttattttcgaatgatggggtcgtctatatacaggcgggaaggactattggacctttgcttttctcctgttctgattggtccatgtggattagttcttctttgtttcttcgcgcactttcctttcttactttcgctctcagagctcttaaaaatatgttctttatttccccaagttcaacttcgcgttcttctctggctgagctccatttttctgagttatcatttcttttaagtgaaattgtgtgttttggggaacctgtgatattattatattagcccttgtttatgatgaatgatgtggaattacttttatactcctaaggttattttaatcacttacagttaaatagtaatttttcctatttggtatttattttaactaattaatatatttagtaaaaaaaatttaaacaatcattatatgttaaaaacaaaatgaagcaaaatatttaaaatataaaaacggagaataaaatattttaaattcatagaaaattaaaacaaagtattttgaaaactaattatttattaaagtaatattagtttaatacaaaaatccaaataaaaaaaatacataaaaaataatatttttaaaaacttaaataacttgatataaataacatat

SEQ ID NO: 218995 - DNA, 8624 bp, Cannabis indica
cacgaatagtagacaatccatttagtgcttctccaaattgtgcataaacaggagatcttgtaatggaatccatgcgttttacttcacgagctgtactctgtgtgcatatgattaaaacaaaagggcccattttgagtaatacaatccaacagaatggttaacaaaaaagacatacttcatttcatattggttacttaattccaaatttgcataaatataattattttcaaaaccattttgataaatagtggccaaagctcaaagctcaattttttttgaaaaagagaaagagattacttgtcttggcctccccccgttatgaattgataccgtcacttatagcggaggaaaaccgtggtgaacaaaatctctattactaaaccattgaaaatttgttatcattatgatttaagttgcgggctccttcaacctccatttctatggcacatgttttgctatatttcaactgggttaaactaacaactatacagtacagagacacacaaatatctctatatcaatcttgtaagactgaatattatctgacattgtaggcttcattatactttctatatccatattgggggatgaaataataaattttttgatgatacagaggacaaataaagtttcggggtagcaacttggatttaacgagctaaaggatttaagggtgtatcatttcctgatcttagtagagattgggcaagtttctgtactagttatgtcttttgttttgcttctttttaatcttgatatttcccaagttttcctccaccaattttttaataaatttggtaggaagccacacaaggacatgtgacttgtctttttctttaattaacttttcttaaaaaattattgtgtgtacatttggaaaaaacacagcaaacaattaagcatacctgatagtacaaataggccatatagaacaggatcataagtggcatgatggcccagagggatattgtgctaacaattcctatcagcacaaaagttgaaagaagctgccacacctgacccagaaacccattcattaaatttgcaacatttcgatctacatcacctaaatcctttgcaaatctattgattatccgtccagttggattagtgtggaagaaaaccattggagctctcaatattgcatgtaacatggtgtcgtgcaatcttctggccgcacgaagactagacatgattaaccaaaaagaatttgccagtgtcacagacacctgaatcaaacacaggagccagcaattaacatggtgtcgtaaaatttgtttctacttatgcccagtttttatctgttttcaaaaatgaaaacacccaaacatttatacatgtgattgtatccctacccttttaccaacagcatacaaaaaatattacatgtaatgaatagtgaatacaatatactattgtagacatttcttacttaattttgaattcaatgtgctacttaaaaatctgttaaggcatgttgaaaatagttaagcatcaaaaccatttaaacagctgaaaatggcacgcttaggtagatgacaagcgcaaacgagagaacgagctaatttgtaaagaataacataactcgaaatatatatcaatatcacacacctgcccaaatgaaagaagtgcatatatgagaatgtagaatccaggtttataacttgttgatttgctttgatctgtccaaaaacttagccacgtgctacttgaaactcgaagaacttctgtcgataaatagcaaagtaagagaacgatgaccacccacatgcctcctagagcatttttatacctgagcaaaggacaagaatgaataactaaatttgcaagacatcataattagccagacttgtaatgtagggaaataattcactgcagcattgatataaatttgtcaaatttcatttcaggttctatgtttgagggttccaaattaatcatagcacgttttactgataccggcacatgcaaatgacatgtagttccccatgaaacaagacaaaacataaaagataaagtaacgattttcaaattatgtttcttagattaatgcatgatgttacctcatcaagacagtccaactgacaatgcctgtttctcgttcctcttgtttgatcagaacagacttcctcaatttccctctctttgaattgatttcatctatagaagaaccatttgcctccccattagaagctggaatcgaacttttccgggaacttccacttccatattttcttctatattttctcccatcttccctgcattttccattagtttttggaacaattttccatttttagtcagctcctcacaggttccctgctctgcaatcataccatcagatactagaatgattctgtcaacttgaggaaggaagtgtagctggttcgtgacaagtagcctagttttcccttctaactcttgtttgatacagttgttaaaaacctggagatgaagtgaccttacatgattaaaaatatgacttttacaaatatatcaagacaataagagagaccaattcagtatcggtattaagagccctaaaaattgcaagaagatctaatgagcatcagcaacggaaacaaagaaaaatacaaaaataaaagactttggttgttggtgttacaatccattatggttacaactcaaatataaacataattggaaatgcaacatcagtaagacacaaatacctgtctagcaacacgagcatctagagcacttaaagggtcatcaaatatgtatacatcagctgcagaatataaagctctagccattgaaattctctgcttttgtccaccactaatattcacaccccgctcacctatctctgttagatcgcgcccctttaaaataaaacgaggaaatgataatatttagccatcaattggcattccatataaatgagcaagctattacataaattcatatccactcaactggaagtatatcaagatcatgatgtaattcggttacgtcaatagccttccaatatcttgtagattcaaattcagatccaaataatatgttttctcgtacctggatggaagaacaacataaaaattaaaacacataatttagaattcaaaaggttgtattatgtacaatagaggggccaactaaactagaaattttgaaacaactcacagttgcattgaaaatccacgaaatttggggaacataagcaacacttcctctcaattcaatatgtgcattcgacacagaaggtatttcgcttatcatagctgatatcagtgacgtttttccttctccagtcccaccaacaatagcaactaagctaccgactggtatatccaaattaatatttgataaggttggtttatctgcctgaaaatagggaaacctttaccatcattcccattggaagttatcataggtaaattaacattatgcacatgactaatagcattatgcacccatatatatgtatatatattttatttatagcatattttctacatcttgagaaatttcctaaattagctatcagtaaatgagacttgtaccttgggtgtcaagagtgccttagcagaatttcaaagttcactgtagcactagccgatagatttaggagatttttcaaatgtagtaaatatttttgtaatgtatgttagcacaagaaaggtcatcaggaggtgttgacaaaggttaagaaagctgtaaggctcacattgaagaagtctactgagaaatattcctatataattagtaggtagcactgtttgataaaccaaattatattatatgcaaaaaaagtacagatgttgaaaagtttacctttgcgtcccatgaaaagtacccatccttaattgagatggctggaagcccaggttcaagaggggggtttggttgtagagttctctcttcagctaagaatagctcctccaaacgctgtaatgatatatttgcattcacaacctgtcaaagtagagtcatagcataagatatagcagagtcacgccatagttttattcaaccatcgatgaacaaaaaagagaaattgataacgcatagcaaacctcaaaagacacatactagaatatttatgtggtgatgctactaaggctgcccaaaaaagaaaaatgaaagaaaaaatagacattattagagtaaatacctgacttaatagattaggcagcatgttcagtggaaatcgcagcactgcaaagagagaaagtgatgtgaatgcccttgcaggagtcaaatcccctccaagaaacgtaaaaattccaaatgataccaccgttacaacaactgggatactgtttagtataaagctattaaactgcaatcaaaaagaaactattaaaaaaattacagttaagaaacaggacaaatcgaacatagcttgctctcttttagagacttgatcccacattattattataattatttttgcaatctaaatatcctttctaaccatatttatgtttcaactactatctacgagactacaacgtagcatcatgaaattttggcctttaaagataaactaaaacagataattaaatttcaatactagttttcacacatacagcagctagtaattgagctttacgaaaccatgatagctcatcatttcgcatatcttgaacacgagactggaagcttctttcccatgcatagcatctggaacatattcagcaaagtgtcagaatatttagttctgatgatatgaagctttataacaaaaataaaagataaaaaccatacttcacaatatccatggctgaaagaatttcattcatgaggccaactctcttgtcagtgcgtagtaatccttctttggtgagttttctcattttggaaagtataattgtctgttttgacacaaggaaaatcatcatatcaagaatcaaaagggagtatgctgaaagaaataaacatgtttgataacaaaatatcaaaccaaatacaatacacaacccttgatgctgcatttagctttcactgtttagatgaagaaacagaatttcaaatattagcaaggtagcaatgaaaccattagtgtatctacctggaccgggagcatgagaactagcattagtgccccaaaaagagatgcgactcctaattgctggtatagaagaaccagagctatgataatacgaaatggagatgaccataatccatgaagttgttggcatatttgctgaaaaatattgaacatggcatagttataatttgattaatggcctctggccccaatatattttttatgtgtgattgtaagtatataactaataaaagtacacaaaaaatagaatttatctgtagcatatttacctgaagtgaattagcatctgttgtaatcatatttgttatcttccctgtagagaaattcttgcgactctcatgagtcaatcgtaatgattttctaaatatagcagccacctaaaaagttggcagaattagacactataacataatttacagtagtaacataaaagagaggattttaccaaagttgatctcagccggaaaccaacacgcataacattctggaaatattgagattcggtcaacaccccaatagactgaaaaagttaaaatcaactagtcaataaacaagttaatcatcataaatttactctgttctaatctgattaaaaagatcatttaattttcaaaatgaacacaatcagctactctaatttccttctgttcctatcttctatgaattaaaacatgaagaaatctaaagaaattaagggaacatccaagaaaacatcaaacttcagtataaattttcatcagtgcatgactcaagaaatcagataatcatattttgcaatttcgcaatcacatataattgttcacaaagccaactttaggcattgtctactaattttattcgaaaacttggcaattcatacaaaagttaattataggcaaagtccataaaagtgattaaaatattcagacttcaacttgccactagttttgtacagaagagttccaattttaaccagaaagtacattactttaattgagtaaatgaaagatagaagccataccactccagcaaagattaagaaggcatatatataaccgatccaagctggatcccctcgttgcatggactgcagctcgtaacaagacaaatagaaagtccataattcaaattcaaaaactacactctacaatgcataacacaaatatgatggtaaaatggattgaaacagatttcgtttcacattgagctaatttattgttactatgtcaactatatagcttgattagcttctttttttaaaaaaaacttatgtcaaattatcttgggctaataacaaattatcttcagttccaaccataatcttggtgcataaatcaacttttagaccatatattttttttttcttttttcactttatgacaggtataacacctgaaatttatttaccaagacaagattaataaacatttacagaccaagttactatattctcatcttgcaaaattagaggcttccgattttaaaattattctcacataaaaaagatgtcacttttcctccttgcattattttttacaattatcattttttccataagaaattaagtattttactttcaaagcaaaagaaaaacatatgcaaacaaactttaaatggaaaagacctcttttggagctacaatattgaaggaaagttttttaggcttgccaagaaaggaactaacctgtaggagatgactcaaaacaacgggccccacaaactgagataggtcatatacaatctacaaggagttcagagcaagattaataagcatcttgagtcagttaaacatgagacaaacattgttttcataagcatcttgagttagagcaagtttcaatcattatgcactctttttcattttaaaaaaatgtagagtttctaattttaaaaacaattgtgacaagtcttagaaagaataacagggaataagatcattaccttgaatagggctccataccaaaacctacatacaacattttgtaaagaaggaaaaaaaattagatggaaataaaattattatctattggttaagttagaaatggaagaagaaaaacaactactgctaggtcaatacctccctccaagactacgatttagtgctcttaaaagccacgggttggacctttgagattcttcaacccaacatctctggaacctgaaaaatgaaaagcataattcatataatgatattgtttatgaaaaaaaaaaacatgtataacacattaaaagaaaccaactttttaatcaaagtctcagtttgatcccatgagtctaacttccagacatctttttcagtgatcggttttctataacctttctgcatgagtggggttatccatccgaaatatatttctgcagtagcgtgttataatatcagttaaaggattgaaggggagtttagagccaaatgaagggtaaatatatttctagcaaagacaatgaaaagggaaatatataggacaccataagcattttcttactgctaatgactattttaatacaagggacaccatatgaaatccagtgtttaaacccgatacaagcttaaattacttacttgaaaaaaattagcatgcctctcaggacaaatattatctccaccaggtagtgcttcatattcagcattgtcaatagactcgggttgaatcacaacataaccaggataagggtccaagtttggaagatatatggcaagaagaattcccaacaacacctatacaagaacattaatgcaatgacacatcaaatgtaactcgaggaaaacaatttaactattcagaaaaggaggccaatatcttgatgtaggttcaaaatgaaatataggttccaacagccttccatcaaaacgttctagattacaaaatgctatgttgtatcatccactttacatgcccttcgaatccaaaactggtaacattcttgataaaaatttgagcgacaagcagtcacttaatcaaggcaaggctaggtattgcaccatttatggctttgactcaagaaattttttctcgtggactgtcattgtaagtgtagtgtacttccattttatcacttatatgattacttaagactaaggcaagctgggttctcaagaattttagggtgtggcaaaacacagctcaggttgcacatcacttaaaattttgatggtaaacaagctcatgaataagccaaattctttgccaaataaaagaaaagaacaaagacgagaggaaaccaacctggacagggaccgtgcttatgtagagatagattgcatatctgtaaaataaagatagagcatctataagcatgtattttatctatcttatatgaattaaaaaaagatcctccagaaaatatttagtgcttccaatttcatcactgtcagttgcataacaattcaagggaacattaaagcaagaaaacaatataaaatatcctcagtgcagatatgaatactattgattgctcatattcacctccatatgcttgaagtcaaattaagaggtcaaactatttgtatttcacattgtgcgaaatgtatattattcggtgaatgggaaaagaactaacccagtgtagtaatccctaactgaaaagataaggttgaccaccacagcat

SEQ ID NO: 218996 - DNA, 2353 bp, Cannabis indica
attcaatcacggtgtctgcgattcgttcaaggaagctaaatttccatttatgctgagtaatgtgcaggtgcagacaccgatttatacaagcaagccaaaggtgcggttgttctttaattatttatcattttaagaaattttttactttatagtcacttgaccaaagaaaaatggttcttacaccaaaattccttataacagcagcaaaaactttaagaatatcaacaatttcggaagtaaaagaaaaaactgaacgctatgtaatatatgtatgctcaccacttcacctccataatgatctgctatctgtccctaaagttgtaaattactcaatttgctttgtttgatgttcttggatgcagaaatggaaaaactatttgtgtaaatcatctcatgagacaatcaatgaaacaatcagacttcagacagatttagcctttatcttaatcatattgtataccaatcatacagagtttctacaattttgaaaaatgtagaaaggttgtaaatagccacccacagttggagttacaactctgtttacaataacttattagcatataaaaacaaaaattcagccgccaatattcttaattgaattttggtttgagaacattacaagttttactgattttgagtgatgtgatggcatattaataatctttttgctttggtgtatatgtcatgaagagggatgattcatgttctttattgaagtttttggtgctgtttctccatcaacacatgtaatactaaattttcttgcttttgcattgttagggtctaagaggcaaaggaggagatcaacatctcaagagaactctgcatggaaaagcctttccgaagaagtatctataaagagccaggcagaaacaaaagctcctggatttcacgttgaagataatcctgccatgaattccatagaaaaaactcctgttagaagctcttcagatttaaggccacttgatcagacgagtacgaagagaaagtctcaaaaaggtaatgtggttgaaaatgagaatcatgagacagctgaaacagaagatgagaaagaacaaagatttgcacaaatgttgcgtgaaaatgcagaaatgattagctccattgtttctgagaatggaatgtatggagttggtaaggcggagaatggtgaagttggccaaaccaaatcagctgaatatgttaggcgtcaaggagataagctgattgcctgccttggagacattgtaaaatcccttgaccatctctgtgttcttgtccaagaatgtgaataatttaactgtagtagtcctcaaaattaacatgagaacaatattcttttttgttacattaattaatgttattgtagtgtaaatattgcatctgggttctcttaccatgctctttattattttggtctgaaattgagattttattgctgcttgcaattttttttttattttaagcgtttatatattacataatgtataatttgaaatttttatagcttcaagtggttaattgctgcctgcatttgaagttaagtaaaatttgcttatggtaagtgcaaggtaccgcatttttaagtactacttagacaaatgtttcaagatcttttccattatcagaatgttgatattataagctatatatttaggatttttatctcttcaactactaaatttccctttgaactgttgaaatataggactttttttttttttttttttttgagggtatgaaatataggactttcacgtggttaacaaaatattgatacagttgatgtgtcattatatcagtaatatttcttattaagttaattagaaaaggagtttcttaaatttttaaaaaacatttgcttaattatccacgtggtgcttatcaccactttattaactactagataaaacatagtaaaacatttgcttaatttttaaagattatatgaatgattcattttaataaagtaatctttgtatcattgtaattggttagtaaaacatagttgtgtatataagttatgatatgtacattggtattaataataaaaagtacattaattgcaatatttacataattataatgtaattagttttaatgtgaagaaataatttataataaatcataacaatatatgactttaacatttattatttatttttagaaaattcaaaggaacaatatatgtgttttgcaaaatttatagcaaacattatgtagcaaaaattaaagaaaaagtagcatcttaaaatagaggaaaaagattattaaataaagttttaatatagaatactattataaaattaaacaaatcatagtgaaactttatcctaatcttccatcgtctcagctgtttaaatggtattgatta

SEQ ID NO: 218997 - DNA, 3465 bp, Cannabis indica
gtcaccaaataagagatatttctatattatgttataataggagaaaaatacatttcaacaaaactatcacttacattcctgagggacaaactgccagattgccaccaatctgcaaagctcggatcgacatactctgctcaggatataaagctaaaaaaatacgaacatcgtttatttggtatcaaagataagaaaataaaaaacatcaacgagagcattggattagaaaacattcttacttcgaggagggtacataacgagaaaattgactacatctgccttcaaggaacttgttgtaacacatatcccccttgccacctttcctttaacatctcttagatttaaaccttctaaagttcctctgagaggctctggtaaacatgggaccgtgaacgttgggtcaagaacaagctgattgctgaataaatcctgacctgaagctaatctaacacccttgtactgcccgctctcctggaaaagttctcaagctcaaatgtttgtgagcttatatgatccttaagagtaataacttttaaggcataattattttaagcaatgcaatctgtaccttgtccataagcaatgaaatcactggcattctcagaacctgtataacaaagatctcaagattaataagcatgcataatcacggagtacatgcaatgcaacgttcggatttcgcagccagacaaaactatattataatccttgaagtgcaataatcactgagtatatcaagaacatgaaggtcaaattccaaattcttccatgtaaaatgtacaccggccgtgcaagaaagacgttatgaaggaagaaatatccaacaaaaacaactcttaaaggctatagatataaggagaaaaacacacacccaaataaagtcagcaatatactatggcataagtaaatcttaaagaaattatggaaatcaagttgaagtttcgcatgatatagaaaactagagataccaccttcagaacttacatgaatacaacctttgacagccgcacggcggcaaaaggcctgagataactctccatggccataaattggataaatcaaggcaccagacgcattcataaacctaagaacagcataagaattaaaaaaaaaaatgctcgtagaatactgatcatactagcttttcgaaataaactaaagatgaagtgtcaaacattaaaagaacatattgggttctaaattccatctcaaacatgaaactttaattcataatgtagctatatttcatattataatgaacacaaatatatttgtaaccttttataagtctcttaagattgtaccaagccttcaaattagcaaatatagaatatgaaatctaacctgccaactgatttgtgatacagagttaaacgttctatcccatgtctagtcttaagtatacctttgcaaagctctaagttgctttgatcataatccgccatggcaatagcatatagaataatcctgcataaatatatatacataaacatatatatatatatatatatataaatcatttactagactcaaaatctgaaatggcagaagaaaaaaaataaaaaattctcatttacagataaagaaaatcagtacgatttaatcttaggaggcaatcgcaatttcttcaagaattcaacaaaagggctttccaaatcctccatagaaatcctcgaactctcactactttcttcctcagaattctccaaatgctgctgaaccagcttaaagaatctcatcaactgattcttctccgtaagactaagactcttatccttaaaaatggccgctcgagagtctggaacactcgataacttcccattatcatcacaaacaaagctcgaatcaatacttttgaactcaacatactgattaacaccagatttcaatatcaaatcaatggctttatcagcacagaacaaaaccctaggtcccccgaggtcaatgttgaaacttctggagtgtttggcaatggtttcagcatcaaaagacgaaatctcaacatcagaataaagagaactgagattgagattgagattcagtacagtatagtttagatcatcatcatcatcatcagtggtggtagtggaaagttggggtttgaggaaagaagttaaatcagaaatggagagagaggtgaagtggctaccgtagtaagggttgggatcgaggtggagaacggtttttccggcggatgaggcggcggcggcgattatggattgaggtaaaccggtgccgatgaggatgagatcgaaggtgttgggctcaattggagggtatgaagagaattcgaattctgccatgtttgggtctcaaaaacataacaatttactaattcattcatcaaattctcttcaaaaaagatacttgtaacattttttgttaagtgaaatgctgaaaaaataagtatggtttattatataatttagagtaatttgtgatataaataaataagtttaacaataatttattgtatacatatttaaaatttattttagttataaataaatatttaagtttaatttttagcggtaataatacttaaaattataattttgaaacttctaataaattgtcatataccacgtgataataacttgacatttaatgttgagatacccacgaaagttttataaatataatttaggtattaacatcgttaaaaattaaacttatgtatttatttacaactagaagttaaacttaagtttaattatcggatagagataaatacttaagtttaattgttaacgttaataatatgtaagttaaacttcggtaggtacctaacccttttaagtgtcaagtattgtttttttattggtatattgaaataattaatatttaaataaaaaaataaaaattcaatgagatgtactaatcagagactgtcacgtgattattgacttgacacttaatgataggtacttacgtaagttccaaaaatataacttagatattgttatcgtcaaaaattaaatttaagtatttatttgtaatttgggattaagcttaagtatttatgtcgcaaattattctataatttaaaaaaaaaaatactaaaaaacacaagtaatgcttagcactctctttggtggtgctagttaccactggtaccaataatagtactctttaagagcaatactattaggtactagtggtgtccaatcctaaaggcaccatgcctccacgcatacgttagacctctgtctcttttcaacatggtgcatccgtcctatgcgcatatgcaaactagtccacgaatgactacatgtgccatctcgtgttgagactcgtggccaaggcacaccacaacgtctcttggaggtttaggccacgtcccgtgcaagcggcataccggcaagccaatagaaacgtacctgttaacctctggcagcgctattgggtcggtctgatagtgtccatgagtattccaactcatggagacatatgagtcccctcgtg

SEQ ID NO: 218998 - DNA, 4418 bp, Cannabis indica
tctactgatgttgcttgcttgtgatgatgattcaagtagagtgcatcttcaaaaaggtaccggaaaggagaagggatatgatgcacacaataactttcaagttttgcataccttgaaaaggtgagagaatatagaaagctagctatgcagttttcccatgtgagtattgctatgactctcagaacctgaaaacctcagatataaatttatatatgtatatatatacatatatttatatatatatatttgtcaaaagacaaaagcttggtgacaaaggatctgagctctaaaaaacactagtaatttctcattcacccttggcttcaaagtttgaaacttttgttttccttcattgtctcagtctgatcattttatattattaatattttttggctaaaatatgataataaaacataggtacctttcatttgttttatttttttctttcttgattaattaatgagctaactaaactgaataatgatcttttgtttaacacaacctatagtgaaacattgttccacaggtgttattctgttttaaaagtaaaaaaaactcatgttaggagttgggacagagaacaaacagaacatggatatgtctggtctggtcagagatttttatttacctattaaactatacttatattccttcttcaaacaccccaccataagacctctccaatttgagaataaaaaagagcataattcccttctctaatattctctcccttgtcatgagaaatctaaaccagcaaagaaagtcttttctttgttcttctttttgggattattgttaattttattttttactaaaaaaaatctcagattccttagttttttcagcatcttggtttctgattcctttcaagtgggttgtgaatatcccttctctaattattaaagttatatgagagtgagagttccaaatagaatatgtgcttatatgagagaacaattaaaagaaaagatacctggatttcagagtgtaaaacaccatgaagtgccataacttcataggcacaatatctcaaaacagctccaactttaacatactcacaccatggatagaagaaatgtctgaacctaccatgtggtggctcccactttgcagaattagcctaattttgtcatcaaatcaacaccaaaatcagacataaaatcttcttaagtaaaaacacaacatcacaaccctattaggtgacatttggtttaatagtaatgataatataagaatagtattatgttgtttgatttatttttgtaatggtaatgggaatgagtggtgtaattgacaaaaatattcttactataatttttctttggggtaatagaagggtataaattaaaggtataaggataattttatttttatataagttaattaaaatttttgttcttttgaactttgacgtgtatcaaattatgtttctgaactttcaaggccattaaaaattccttttaaactattgagattgttggatttaaggatttttatccaatttcaagaaatggtttaataaatatcaaagtttggcaaacatgatttagtacataaacaatcacggagttcgtaaaattaattgaaattgaacaaaagtttttaaatttaataatttcaaatgttccaacaaaatttttaatagccaaaaaaattcagacggtatgatttagtatatacggtaaaaatcaaacttgaattacacagtgtcaagctgtaatgcttattcataatcatataaatggtatattgttgattatattgtaaatgcttcaaaaccaaaccaaattaataatggaattgtaatggtgatttcattacaattacaattaggccaaatcaaacatggcctaataatgagtagtactactactacatgtcattcattattatatttagtataaacatttgagaaaagaagtttaagtattaccaaattctcaagtttagctgaggagttcaatgtggttttgcatttcttgtaagcaggctcatctgggaactcatccatgacagtcttgaagaactcagcatgttctgatccatctctgatagtactttctcacacattctatattttgatttttcaacacaaaacacattagcatatcattactttgtatatagtattatatttgaaattgtatttgtatatagtattatattgaattgtatcgtctaagtacaatctaccaaacacacttttaataattaaattatgtaccttcgagcgagtcagcgaccgagttgaaattcttaactatctccttatgcaattgctccccagcccagattggacaaaccagaacattcactagtacagccacaactcctccaatggcgatcgagtagagccgatccatggaagtccgcattggatttcccattcggtaaccggaaactatgatcaaacagtaggtgaagagtatgaccctgaatccatactcatatgggactaaagatggccataatttcatgaaggaagttatagtgccaactaaaaaaatgctaatgccaatgatgataggctcagctactcgaccagcacaaagggctagctgagctacaccaatggccaagattccagctagtaaactcccaagagctctattaaatcctctgttaaatgttgctcctatacaattaaaaattaaaaacaaataatcatacttgatgatattgataacaacaaaacacataacattttagtacagaactaaatcaaatgacaatttttcagtcgcaatatatatttaaatattacttatagtttaaaaaaattctaactttatcacaataaattatagttttgtgacgaaattaatgacacataagtataaatttgtttgttttgtttctttttgttataagttatagtcactaaaattaagagtatttttttttttttgttaatgttcatattagaaactttatgtgttgttgcaattaataaaaagtcatattatatatataaatataaatatatatatatatatatatttatatatatacataccaactgtgtattcgaacataatggcaacagtgagaatggaccaaatgatgttggtaccaaagacttcataaggtgctctgaatagaataagcaaagacacaagcaacactgcaagcccaactttaagtgcaaatattactctattagtgtcttctttagcaaattcccacaccctcttaatccaaccttcacatgaattcaagatcccgccaccaccagacctcttgccggccgcccccaccgccaccgcccctgtcgcctcgtgctgcttattactattacaagtgatactagctttggcagctgatgaaggaatgtcaatctcaatactacccttttttccattcattctccaaacaatgttatatttcttgttttgtcacaataagtttttttcttttggttggttcacaaatggaatgagattataatgagaatactactctattatatggtacataaaatttgagggtgtgtgggaaatgagtgatgagaaagttaatttaaagaggaatagtagtataagggttgctttaataatatatgcatgcaactagtttgggagataagtcattaggaggaaaaataaaagaataaaataaaatataataataataataatatgggaaagaaaaataaaattaaataaaatggaggttgctatatgaaactgaggataagaagatgcttaatttcaataatgttgcatggaagagagaattagaatatctcaaatttgcatggcaattaataatgctattcttctttcttcactccatgtatgaatatatataaatatatctttgctatatattgctctcctcttcttaattattaaaatgtcattttcatttaccattcatcatgcatatacatatatatacaatataataaacacacattatttctatttgtgatgtagattaattcaggatctatgattaaaattaaaaaaaaaaatatatatatatatatatatgtgataaagaatctgaaaattattgtttccatattacaccctatatataactatatatataagtgcaccaatattgaacaaattaaatcattaatctacaattaagctaataatgccagtaatgtgcatacattactcaatattgaccaatatttacattatcaagttctgcactttatactattaaaaaaaaagtactcgcgacggtgttaaaaacaatttttttaaaaaaaattaccgctataaaaataaattaagcgaatatttaaaactgtcgaaaaaataaaatattcctgacggttttaaacggtcgggaggtataggcgacaatttttaaacgtgctttaaaaaattatatgtatttttaaatgggaattgcttacggattttccatgcttgaatttaacgcgtttcaaatctaaa

SEQ ID NO: 218999 - DNA, 2551 bp, Cannabis indica
tgagaaattaattacttacaaagcaacaataaaggaaagaattttccacatcaaaacctttctgcttgaaaatggcaaagctacttttgacaattcatttgcacccgtcgcccagaagagcataattttcagaactcaaattctcaacttaagtttataggagggagattgatcagggtgttgttgctgccagttaatcatgttagctgtttaaggaaacattccttcaagatattcatcaaagtgatcgtcatcgtcgactttatgatcagagaccgaagctgaagctttctttcctgtagtgtgagaacaattagtaatacctcttacataaaacaatgtagaatgttgaatgtttagtgaagcagttatgctaaccttttttcctcttttctttgcttttctcgttatcagtatcattatcgtcatcactactcctcgaccgattcctgtaagtagattgtaagtatctctattcaaacatgagcctaatttcaagctacacgttttaagcaaaagaggtaccaagttaagtaaaaaaaatgggatcaaagttcacctcttttttgtatgctcttcctggtccaatttctcggatttctccttttctttccgctttttgtagtggagcttctcagcacacctgttaggaattaattgacccaataagttagagcaagccttgttccaatatgcctattcctttgttgtcaaaaatgtattgaaaagaagccgaaaaagattgcagtgtcgagcaagcattctaatggtgtaacaaattgagcaaaaatcgccatttgtgatgataacaaaaatagaaattaaagatgaaaatgaaaaaggggtcctagaacatagttgtcataacccacaaagaattttattattttccaggatttaaggaacactagcaagtacaagtagtctgtggtctaatgatagaaaatttaaattatagggaatataatgaataaaatcatatggttatatatctctaatcaagagccaccaacctacctctcacaagttaccaatttcacaagtgcttgtttgttttctccagcttcaaagtaagagaaatttacctgaaataagaaaagacaaggtaagataagataagacaaaaagattgtacacatgggcataactagttagttccataaatgtgataagacaaaaaagattgtatacatgggcataactagttacataaatatgataaagacaaacaaatgaaacacttaaactaaaaaacaaaaccagaaaaagctaatgaatagagataaatattgttgatgaatcatacaaactaaaaacacacgtgcctcatagcttgctaagccctctttttcatcacaatgtttgtttccgcatatgaactgtcctgacagtaaagggaaacaagtcacttctaaagtacagttgagtccctctgatgaagagactgacattccaacacacataaagattgaacagaaactctagatcatatgaagtaataagcctccatgcataaaaacatttgatcagaaaaatgaaataagatacaacttctctgcagtaaaatgtatatgcaaatgcaatctatggtattacctttaccggaaacaacttctttctctgttctccacctcagaccaatctaaaaggaaaaacatgcaaaagaagtttctttttagcattatgtaacaaagttgtaacacataacagtcacgtttaatgtttgtgtaatgttttgatgcataatttcggtgcacatatcatgacttgtttactaaaaaactgaaaagtccattaaagggctttccccttgagtattcgaagaaccaaatagaagcatgaaccttaacaaaaaaaaaaaattcacagtaaaagctagatgaataccttgccggttttgtaatgtgacatatcagctagacagtatctgagatgagtttaaggcaacaatgagttgctctatatccaaagaactgatcatgtgttgaaactcacaataagattataaaacagcccacctatatattcacatttaaaaattattcctattgattgcaaaggatactctttaaaaagcttatcatagtatcgcttcaccagcctttgctcccaagacgtatccatgtcatcttcctctgagcgtatgaacctatataaatataagtataaaagcggtgcaaatcatttaatctcaaaaaacaacttgaatatataaaacagttcttctggattgatggaaataatttggcagtaacaccatacaaataaacaaaagtgtaacacaaaaaagagacaactgcaatccagatagaaatggttcaaaacttaagtaccgatatccttctcttaaggtatcttgatcggttttgataggcaacctaatgtttgaaggtttctctttcccatagtgtacaactgcacacacaacacaaaacaaaggctatcatctttatgtagaaggccaatgaagtcccgctccgagacatctcgtgtcccgttgcatatggatccgaaagcgggaaaaatccaacacaaaccaaaaagaaaaaaa

SEQ ID NO: 219000 - DNA, 2922 bp, Cannabis indica
ggagtttgtggagttactcaagagtcgaggggtccatgtggaggcccacttctgtgacgatggattccacgccgttgagctctttgaaccagccaaagctgaagccttaaacgacgtcgttggccgtttcatccgaagtcatgacacgtgatgaatgatgatgccctcttattctcaatataaataacccaaaaaaaaaaaaataaattgcaatgcaagtcgtgtcatgacattagatattcatatagttgagtcagtaataaactattcaataagaagaacattaataattctttttctcagatggagatagatagcgctagttttttcgaacataaatattataaataatgaataaggcatgtgaaagacggactatttagttcattttcatataatgaaatgggcaatttcaattaaataatcgattattagtattagtactcttattaatcttttgacactacataatctctcctacacttttttaaaacccattaacatttttatctttaaattttgaccaacaccaataatttcccctttttattaaaatactaattttaagattaatattttttttattaattcttaaataattaaggaaaaattattataaaattttaataaagttcttaaattaataaacgctgggaatttttgtcccaatttttgtcaaacaagaaaaaatattagtgtgccattagctgccacaactattaataaagttaatgtgatatgtgaagaagttttctcaataaaattgaagagataagagaaaacagcctcatgtgcctacaattattaatttattttatgtctatcaatgtatttcgtaggaccaaataaagaatctagacgaataaaagaaataaacctcatggctaggaccatgagatcacatgtaaaaagggtttgatctttttctcttattggtattaagtcaaaacaacacaccaactatgtaaaaattatggtctccatatttctttttttttcctgctcttaatctttatttatttaattagttgtcgaaaatttcgatcaatattttgatactttagagtttgaagggccggaaagcttagtatccacattagtggtagtttcctatatcaaacattttttttttcacatgacccaaaaaataacagctactagcaaaacacccataagatttgtagataaatgagagaagagtatgagaaaaatgacgatagtgactcctcacatacccatacccatcaccactatcggcatcagagcagaagttagatccgatgaacaaccaaaaagtttagatgacggtaataaaatgcaaagccaagacatagtcccccatataggatccatcctcatgcaaggaacatccttgaacgttcttggtggaccctccttggccatccttgtggaagagtcatcctcgtgtaagaaccttcccttgaccattcttggtagaagtttcgtccttatgaaaaaattattctatggtcaaagatatatctttaaaatcctatgctcaaggagacaccttctaggagcccattcttaaggatgcaccctccaagagcccatgcttaaaaagacatctccaggatccatgctcaaggagcaaaatcccatgcttaaaaaggcttcctatggtaaaaatagtaaaaattaatgtaaatatatcataaaatcactttttgtatcaaatttaacataatttttacatttttttattgagatgtgttaggttatttttagtattaaatttagattaattttagcatattttttatctagtttaaatcatgtttggagcatttttacgctttttatcttttaattttgcagatttaaaatagatgaatagtttgaaaaatatcaatcgaaaaagataaaatatcacataaaaaatatcaaatttaagcccagaaaatgataaatcacgtggaatatggagcagaggagacacgggccgcggcacagctttagcatgctgcggcccgcctacgtggaagatcaacacaaatatccaaggaaggtcacacgagccgcggcacatctttagcatgtcacggcccgcctctgtttcggcagcaaaaaaatatcttggttctggaagttttccaaattcaaatccgaatagaaatttaaacatgtgcgttttatctatctttttaggccctcaatgcctatataaagggaagaagagagatgatttcaggaagtaatttcagagataaataaacagagaataaatattaacttattcttttagtcaaattatataacaaaataaataaaattatataggaaaataataatttagttacttaagatttaaaacagaaaagtttttttttttctataattagacacatttcatgaggtatgataattgaatagtctaattaagtgaacaaacaaatacacaaatctgtataattagctacaattacaaccaattcaaattcttgttggccttaaaagttcttcttaggtaaagtttcttttatatgatcaatgtagtaagttaattttattaaaaaaaaaaagaattatttcacaaatacataaaaataataaaatattataaaattacagttttcacgaaattttaaatatttttgcaatttttttgattttatttacaaaaaatacggtcttttatgttgtattcttgttaatttgttgttgatttttttattatttgtatgttatttttttttgttgttatttttgattgttatttttcattactaatttttattgtagttttttttttttttgtttgtattttgttattatttttatttaaaaaactgtaaaaaaaaaaagtaaataaatggtacataagtaattattttcaacctaaaacatattatattatttttagaaattatagtcctcttgtcattttttttttttttttgt

SEQ ID NO: 219001 - DNA, 3920 bp, Cannabis indica
tcggctaggagaagagatgacttcaaattcattaaggagaagctcctaaaccgtttggaggggtggaaagcgaaacagtaatcgtttgcgggaagacaaaccttgatcagtgctatgctcagtagtattccttgttatgctatgtcaactttgaaaatctctgtgactatatgttctgagatggatagcctagtgtcttggttctggtggacaggatcttcaaaaaatgggaagcggtatttagctttgaagaggtggggagattgttgccaacccaagcggcacggagggttgggtttcagaaagtttaaggatttcaacatggctcttttggcgaagcttgcttggcaattgctagatggggagcaaaacgataagccgtgggtgcaaattcttaaggcaaagtattgtgcagtccaagacttttggaatgttcaagttaagtcggatgactcgagagtttggaagggaattctatccacccgtgccctctgttctagtggtgcgggaattcttgtgggggaacgcaatgtggacatttggtccaggccgtgggtttcggggtttagtcctcaggatgtttgcaactctttctcttacaacgtgacgcatgcctttacctcagttgctgatctttttctcccaggaacccaaaggtggaatgaaagcttgattagacaatgcttcacttcgggtgtagctgaggccattttgcggatttggccgttgattaacaaaaaagatgttgtgttttggagggctagcagtaacggagagttttcagtcaatagtgcgtattggcatgctcagaaattcaggtttcatgaggagaagagggtgtggaaaagcttatggaagctcaagattcataacagacagaaaaatctactttggagaactctgagtggttgtctccctcttaaaagtcggttggggttcttgcaggagagtgataaactgtgtgtgttgtgccatgatggtaatgaaaccgatactcacctgtttagagattgccactttgcccgaagcttgtggttctccagcccttggggaatttgtaccactaaccattgcagactgtcgtttgaagaatggtttttgtggctcgttgacacaaagattgagtcggttatgttgtttggtgcttgtttagttgagcatatctggagttgcaggaataattctctgttcaaaggcacggttccaaatttggagctgtcgagaagatcactccttcgcaggttttaggagttcagtgatgcgctgattaaagatcaaccttctggagaggaccctgctgctggtgttggcctggcccaagggtgggaggcgtggttgagggttgatgcctcagttatggaagggattgcaggcattagtgcggtccactggtggaagcagaggagaatgcagtggtcttactgcagcacactttgttcgagagtgttcttgaagctgagttgcttgccattctcagtgcgctgacttgggcaagggaaagggacttcaagacagtgttggtggagtcggattcccaagttgctgtcaaggctctaaacagccgtgaacttccttacgcctaggggtctttccctgcttttcatgactgttgttgtttacttagctcttttgataaaagttctgtttcttttattcctcgtgtgagtaactcggttgctgattctttggctaggtattccaggatcgcgggagttaccatgagctgtgtgttcagggaggtagccccctttgtggctgccacttgactttgtgttggtgtgtttgaataaaggtttcttacttataaaaaaaaataaataaataaataaaagagagagaaagacacaccagaaggaaaaataatatgattgaagagatagattactttatttcggtaaaataatcttcagcctcggtataataatctttcgtattaagatcaatgaaatgactagaattatttttgtattatttttaatattacgtatattattacaaatttcacttttactttttatcctaattttttacgttaaaattctcagtaaaaaatattgtagtatcattcatttatttatttatttatttcaaatttatgaggctttctagtactaaaaaattaacttgaagagtttgtttatggcatgttgttgcatgtgcacttgattaaattttacacgtagataccttgttggcctcacgtaggttactccaattaaaatgggtgatacaaagtagttgagttcagcccatcaatccaagttatatatttttgagaccaattatgggtctatgttatggagcatatatacatccatccatttcgttgggtattttttttttcttttttttgactaatatataacttacaaaggaaaaacaaacacaacaagaagttagaagagtaccattccagcttcccctaaaactttcctagtcaaattatgagcattaatatgattacagtttccaagtgagaatacatattgttggttaacggttgagtatgcaataggcaatttattgtatgataaggactaccttgcaataaattatagagatatttctaataactactttttggacgtgggttccactatgtatatgattgaagattgttatattatttaatatagggtaaatactattttgaattctatattttgtaaaagttactaattaaactctctgttttgttaaatgataaatagaccttatattttctaaaatagtataaataaaatcttgagcttaatttttaacaattttatattttagtatatataactaactttaggacaatttctaacacgaacaaatacataaaatgtaatcagttttgtcataacatctatagattagattattattaagttttattttgacaaaaaatcagttccggattttatttgtacaattttgaaaaatacaagatctattttgtcatttaacaaaacaaagggtcaaactattaacttttgcaaaacaaaaggtctaaaatattatttatccatattaattattcaagaaatatatgtttaaattgtattaatataaagttaattgaaaaaaaattatacaatttgataatttgtatatggtaaatctgtttcagaaaaaaattctttaaggaattattagaatcattgatattatcttacattatattatgaaaaatgtaattttaacacagtatgtttgaaagacattgaaataaaagaaaattacacataattagaaaatgacataatagagttcttgtaataaaataatacattggatgatttgttactaaaataaaaaataatacatttgatagtaaactttaaaatgaaattacaattagaaattgacacaataataaagagttctttcaatcaaaattagtcatcaaaaatattaaaattaaaatgatcttgtttttgaagtagaatacaaaataatttatttttaatagaaaagatttactaaactacaaccacgggcgaatgtacatatagggttacagtggtcgtggcccctccttattttgtacaaatcatatatagtaattgatatacaattgcaactaatatacatagctacaaacaataataaaaaatactttgaaaattcaaaacaaaaaaatgtatgtgattgcatttcaaaagagtaaaaaaataatattttaatataaataataaaacataaattttaatttttaaaaagtaaaatattagttaaaataaatatttataactattattttttaaaaaagtaaatataaatataaatatataggatagggtaggataatagggaagggaacacatatacccgtacccaactttatatgtaacgccctaatgctaaggcacgctacagtgctttttcaattatagagcaatctttgctaatcaaagaattttctcgaaaaacgt

SEQ ID NO: 219002 - DNA, 4828 bp, Cannabis indica
gatatgagagagagggtaggcaacaatcgatttggagtgtggctaaaacgagaggtgggaagtcttcggattttcaatgactttgtttgttttttgttatccctgtcctacgtggcggattctcctttcttgcttggtagataacgttatcttattggtccaatccccatgcaaggttgcaagttacgaattttcaactggtgtccgatgtgtcattcactttcacgtcgtttcaatggtgtacggtttttctgtttctgggctcttcggaaacgtggttgggcttgctttggacggcccaatttgttaaattttatgttttttttttcagaaaaacaaaatcttgaaattcaatttttgacttgcattgccaaaaatacttggaatattcttttgtcaaaaacacttgcaatactcgtgactaatttctctttcagggttcgattatctaatagtaatacccattgaatgtggtaagagatattttctcttgccgttccataactggttgcaacttccagtttagctaaactcactctaatgactaataatatgattacgagtgttgcctaatgtaatgccatagttattactaatgtaatgctccgaagtcctaaatatctgtatttgtttgagagtgacataccgaacagtatgtgtaatttttttttgttcttgatgcatctccatatggattttttatttaggagtgtaagtttgttccctataaaatattatctttatcgcaatttgtgtacagttgtattatattggtttcatgcattaatttttgttgcactttaatgtttataggttttaaatagggaatttcatcttccatagcacttattttcgtaatacgcaaattgagtttgtttctccaagtggagtaagttgctcttgaattttcattcaaaatcctaacaaaatttgtggattcaacaactaatggacaatggatctgaactaaatgaatacaaaagaatgagaggaaaaaaaaaattcccaccctgtcctccatagtccacacctgtcacgaaaaaaataattaatgaaacaaatcagttcataaggcaatttgaaatttgattaaatcaccaccaaatatttatctacataaggacaacagaagcatataactcaataatgaaagcataggaaaagaaaagaaaagactagtcatttgttcaagaaaaaaagaagaagaataatacgtacttgcagaggaaaagatttaattaaaatcatcgccgcgtggattggagtgctgaagcagtggcgttaccaatatgattcacaagaatttcttgaggcagcagcctgtatttgatgccaagttcttcgaatattttctttaattccaatactagctccgatcttcggctgtttttgtcgccatagttctgaaaatttatggtatgagtaacgtagagagctattgatatcttgttcacatctttaatatccttaaccaccacactatgatcaggacgccagtgctgaggtttgctctccaggtacctgaaccaatattcaaatatacaacttcaatcttttttccatacacagtagaaaatgtctatatgatcattcttctagaagtaaatagttaaagactaaattaggaaaggtaagaagtaatgcacttacaatttcagtttttctttgagagctccaatagtctcaatcgatgtagagaaatcaatagcaaattcaacagcatcgctcatttcgggacttctgtagaagttgctgatgggcttcgtggacaggactgagttcggataaaagattttctcgttgtcatatttcaagaagactgttgtcaaaatgttcatctcttcaacaaccatctgtgatgcaatacacatgttaatataagcatgtcatttaactaaagccatggttggagtagtttagagggttacctgtactccatcaacaacgcaacggtctcctacatcaaacgggtgcatcacaaacacaaatacaatggcttcaaacacagtcttggcagtgttaccaaacacaaacacaatcagtaaaagctgagatgaaatgaagacaagtatttgtgttgttaaaaatcccatcatgatgaaccacacgatgatgatcacaataatcacaactgcagaggctagcctattaagttcctctatggctgttttcgtatcgtttagtgaatgtgctagtgatttgcgttcaaggtaaacattcacctgaaagaagaaaatttaactattaagaatcaatgaagacaaattgatagcaggtgcaatgaaaaatgaaacacatacgagccaattcttcaaagattttctccttattcgtttaggttctccagttccttcaaacatgggtagtataagatccacctcctctttcttaaggaaacgcaagaggtcatcttcatcaatgtacctagtgcatttaccaatgaatataacttaagaaaaactaggagaaaaatgagcaatcataagagaaattcctacaacttaaaagggtgttagtttcttacttgttaccaggcttggctacattctgaaatatctgaaatgcagcagccttagcttcccactcactgttaatctccttgtcctcatcatcttccaaagtattggaaatggtagacaagccagtaacccttatcacattgatcaaccctttcatggtccaagctgaaactttctctggcttcatctttttaagcttttccacatcaattacctcttctttccccatttgtttctcctcacccttttccttcttcaaatttatgaaactcagttgccctgtacttggtgttctgccaaccctttctgccatctccatcaatggaggcccagaaagggtcctcaaaacatactgatgaaaaatcgattcttgaattcgatcgaaaaatcgagtgcactgaaaggaagaagataacaacttcactaacaagttcttcagtaaccatatagctgcaccaatgagaaaagaagctaaagcccttgtaacataattaagaattttatttgtttttcttgaccgcttcactcctcgattgaacaacaaaccccaagccaaaagtatcaaactcaaccaaatgaagacctgaacactcttcttcaacccataaacgaaatacaaaaccttcttctgtaacagaaagttcatctcaatcaaaaagactaaaacattaataaaccactctgtgactagtctaccacatatgactaccaaaaccaaaacacaccatttccataactccaaaccccaaacgaatttcttttgcagtttatgaacagttaagcttgcagctaaaaatcccactatgcaaacaaaagaaaaccactcaatcaaacgcattactctgacttttggtttcttactcgagtaaacctgctttgctttaagattagctgttttatacacttcgtcatcctcgtcctcctcggattctggtgttccaatcaaaggcgttcgtggagtaatgggagctgatctttgagactctctgggagtagtggctgtgcttttccggtttggtgatgttaaattaggcgagcttctaagaggtgaactcgtgttcgattttgatggagccttgatctcttcagtacgatgaggcggtgactcaactagtctcgacttgggcttagaaaatggtgaccttgcaatcggagctttcgggggtttgatcgttgttgtcgtgctctgaagctcagttagctcgacatttgaacttttcgatacattcggagaaagcccactttttaaattcttagaaacagagtacgaagatgattctgtgcttgattctctagagccattgctagtttcttccgtacccgaaacctgtaatacgacatcgttcgtttcattcttctctaccacccgttgcccagtctccattcccgcttcaaagagtaatgagctccagcaagcttcgaaattctgggaaagttagaaactttccgggaaaataagcagaaaagaaaaaacttcagtacgaatctttttatgtcttctgagacaagcaaagcatcaacaacacagctttgttctttcctgggaaaaagaaactcaattaaattggtaaagttttagtaatggctaaggttttcaggggggacttaattaagttttataaaaacaagacaccaaaccacaaaagactctatataatattgcatagattgcgtttatgattttgtataggacgttgtttggaatgttttgagtggatttttctttttgttttactgaaaataggaattgtgaacaaaatttcgtacttactataaaataatgagtaaatgaatgtgaagaaaggagaaaaagtaggtaaacgtgtcaataataactcaatagtcagacagacataaatttaaagttcggtggatgaaagaaatgttgaattacgaaaatgaccttatagttatatattgtaattgttagaatatgaaagtgtgtggtttagaaggtaggatttaggtggtgtatgggaaggtgtatggagttttattttaaataatatatgaattttatctcaaaattaattaataattagggaagtaattcttatattttatgtatggtatttagtttttagattattaacgtgagacttttaacaataataattagggaagaatgggaatgggaattctgtgtgtaccatgtgcgcccatgctgacctatcccaattgcgggctagaagaactggtaaaacagatgagctggaatcactgtgtttgggtctcagtactttgagttttaagtctaatctttcaataataataataataataataataataatgaatgaatgaatgaa

SEQ ID NO: 219003 - DNA, 2432 bp, Cannabis indica
atttatagtgtacgtaaaccacaattttaatattcaaacttccaaaataccatggttgttgcaagcccttaaataggtgtaaatgtggtcataaatgttggagaatgaagttagaaacaagcccaacctttcccatgttgtggaagagttttttttgaaattgtagcctcaagcgacatgtcacctgacatagtttcaacataccaagtttggagttttgtcacttttctttttgatacggtctgtacctaccacctgacaccgagggaaagagaatgttagtgtaatgacagcatagttatattatgggaattagtagataattaaggatttaattattaattatgattatgtgctcttagtagataattaaggcttaccgttagaaataggctttaaattattacttttacaattatggtgatacttttgaattctagatgtaatatgtatgttatatatgaaattttacgtttttcatactttatgcttggtaacagtaaaatgctataatttggccactttgagtcacttggatacagttgggtattttaaaactagcaaggcaagatagttagacatttagcatgtcaagattatacaaggttatgattttggaccattttatccttaagtgataagttaagagcgaaatgatccttttaccataagatatgttattggttttagtaaattgaagatgaggattaatattttaatctgaataaaacaacttatgttgataagatttatccaaaataggaaaaaaatcacaagttatacccatctctctccctttagcttcggctcaaacaagaaccaaggagaagtaagtgatctctgtaattttgaccttaaaatcagaggattagaagcagggattcaagtattgttctagggtaagctttatatttcttttccttttgaaattttcagaaaaaaatgggttttgatgtatttttgggtatttggtttttgcatgatcttaggacatttagggtttgtttctgatgctatttctaagttatttatgcttttttaagtgagttttaatggttgttgttgagcttggacaaggtttgagctttcaagctcaaacttggtcctttaatggtagatttaaattttgggccttgatggtgtttatttttgttggtaattgttccttttgtctcaaataggtattctggagctttgtagaagttttggggtggatttaaaataaaaatgacattttatgaaaatctgcagtagaaaatggcataccttttttctagaaacagtctaccgtttttagtaggcagagactcaaaaaaacggtctggccattttttataaacgacctactattttttggagtattttttccgaagtattatttttatgtgttttcttgatatttaaggtattgccacgatatttatcgataggaaaatttttagttttaagtctacgttcccgaaaagtgatttagcaggtcacttaccagttttacgcaaattatgacttaggaccttaaatcgtcgagcagcagtttccactcaaggttaccgatattcttacattttaaatcaaggtaagattagtataataattgtatatatgagtacatgtttattgtgcatgtcagtttccgttagaataacatatcagggtatcagtgaggtgtgcatagagttgtactgagatgccaacaaatatattttaggtaaaccagtagccattagattagcatatcaagatattggtgaagtgtacatagagttgtactgagatatgaatagatatatgctaggttttatcatacaaaccttctagacctagtacgtgttgaatgcgagatagggttgtgattaggtgtatgggtacacgtttagtgtgcatgttagttttcgttagaataatatatcagggtatcagtgaggtgtgcatagaattacaccgagataccaacatatatattttaggcaaactagtagccattagattagcatatcaagatattggtgaagtgtacatagagttgtactgagatatcaacatatatatgctaggctttatcatacaaaccttccaaacctagtacgcgttgaatgctcgataggattgtgattaggtgtatgggcatctggttacaatctggttatatgttgtttatgtttatgctttttttactgagtctatcgactcacagttattacgtatatgtgcaagtaaagacaaaaactgaattagaatgagtttagagctgttgatgtacatatcaagacagttagacttaaagtgttccactttttgttggtcgctgagtgacagcttttgtataaataaattttgaaagtagttgtaaacttttaacaagatcccaaaattatagtttatttaaaagtttaaattaatcacatttttcaataaactcttttattagcaaa

SEQ ID NO: 219004 - DNA, 9393 bp, Cannabis indica
taccagtcgtagtcatgtttgtggttgttttgggcaagaaattcaatggtgggaatacggtggtaatgcttcttctgatgattcatgatgatgatagagtgatcaaattgatcagacaaaggctgctgcagcagattcatcctcatcatctcatcatctatatcattctctttcttcttcagctcccggaagagtgacagatcttcttcttcttcttgttcttggtaatctttgtgtttgtgtttagtaatctggtcttttctaactaacttattggacaacatcatcttcattaacatttaagattaatattggtctcactctgactaatcttgtcttgcttttatttccaaatgccggcctaatcctacctattattaccggccatgagttgacaatgacatctacttttgttttgtttcttatggacctgtccctctccgtttccattttgggggccatttatcatcaaatatgggctcactcaaagcccacttctctcatggactattaattaatgggctcactcaaagcacacttttctcatcaacaaactcacccggccatgagtcttgtgaccatgagatgagatgacactctactctatcatctactttctcgttttgtttcttatggacctgtccctcctccatttccattttgggggcccatttatcatcaagtatgggctcactcaaatggtggaaagaggcccaatccaactccataacctaagtctaaggagactcctacactcacactcttttctctctctctctgttaactgaaactgaggttggttcaagctctgccgtaaaaggccgccggcgactcaactcctttcttcttcgagaccaaacattccaatttccatctaagtaaccttctcactctttaattatgcttttttctttctttctttctttctgctattacatcatttctctgattgaatttgggggtagtagtacagcagtatcagtaacataagcaaagattttagcttttttgaaacatctttcacgatctataatagggtaaaacacatagttcaatatattacatacacaacttcaagccaaagagactacacatattaaaatttctttcgcattaagatgttgatagctccaaatttgtgcaaccttatttctttttattaggctgctctgttctcaagtgatcataaatcacctataaagtaatcatatgattcattcacctttaggttggtttatcaaagtattatgtatggaatatggatagattatatatttgctattgtattatttgtaattgattatcttccaaatgtaacttctaataatactatgctcaactcaagcaaaactgattatatttagattttcattaactaattctgtaatgaaatcaaaatttgtttttataatataatctttgttttagattcagctctgccaatcaactgctcaagctcaagatcaatcaatcactggagggagggagggagcaggaggatgacaatgggctcatccttccgtacaatagctagactcaggctctgctcaatttcctcttcttcctttctcctcaatttcactgctaccaattctaaatctaaatatcatctccttctcccaatccctatctcaacatccacaattcacgctaatcccaactcctccacaccactttttgccaaacacaacaatgctgcccacaactcggtggtcactcatcgccggtttcagtccacattggcagtggccacaaatgcagacttggagacggatgcgtattctgcaatagaagtggcgttggattctgtggtcaagatattcactgtttccagtggccccaactacttcctcccatggcagaacaagtctcagcgcgaatcgatgggctctggtatgctgttctctccctctctcgttgttgatttcaccgtccaattcagttcagtcagttcaattcaattcatcctgtttatatttggaataatgtttaggctttgtaatccatgggaaaaggattctcaccaatgcccacgtagtggctgatcacacttttgtacttgtaagaaagcatggctctcctaccaaatacagagcccaagtgcaagctgttggccatgagtgtgacttggccattctggccgttgaaaatgaagaattttgggagggtgtcaaccccctcgagctaggagacattcctttccttcaagaagctgttgctgttgttggatatcctcaaggtaacacactcatgacactttcctataacttatcaacttttacttatatgtaaagacaaacaaacaggcctttcaattctgtgccttgtttttggcaggcggggacaacatttctgtcactaaaggggttgtttccagagttgaacctacacaatatgtacatggtgccacccagctgatggctatacaaattgatgcagccatcaacccgggcaatagtggcggcccagcaatcatggccaaaaaggttgttggcgttgctttccaaaatctctcaggtgcagagaatattgggtgagtaccatggcataaatgattttatttagcacaataagcgatgccccactccttaatttttctcttctgtgattgcagttatataattccagtaccagtaattaagcattttattactggtgtagaagaaagtggaaaatatgtcggattctgctctctgggtttgtcatgccagccaactgaaaacgttcaactgagaaactattttcagatgcggaaagatatgactggtgtattagtgagcaaaattaaccctctttcagatgcacataaaattttgaagaaagatgatattattcttgcatttgatggagtgccaatagctaacgacggaacaggtaagtacttacaattcattggttccttttgtttagttttcttatttgttgtgacttagttgaaaatattgtgccatgctcgtttgataggacgaataaaaatgctttcaccattttgtattatgctctcttctgtttctttatagtcgacatattgccaatgtgaattcctatggtaacttgttgcgacacacattctaaatatttaaactaataaaaaagtggaagatactgtgaatattctgtgtatccttccaacaacatttctgtgcatgtagttgaaaatgtttttaagatattgagtttgttacttccataattgggttttagaaatcaggagacgagttattgatattttatctgagcatatctaataggcatgaacagaattatgtttgggtttaattcaataatatacctttgcatagtagttgcatccctagccttttaacttttgaatgatattttctattctagggatgtgctatacatatctgtaggtgggcaaagtgactggaccaatcaaccaaacttacttgggttggcttggtaaaggtagggatattagttaagttggttttcttgtagtcatcaaaggcaccatgaatcatcaccactggcaccaagccatatgacattgatttttcactgcattagtcatgttaaaacatgtcatatactgtatataaatatacatgagtggattcgatagtctctcttattaattgtctacagagttttttataggaaagaaaaaaaaaggcatccaaaataagtaattacaaatcaataatttgtacagtcaaataactaattacaagataagatgggaaagtacaaaaatgggaagtataaataagaaatttttgacagaatcttgtgtataccagtctatgaatgtgtaactcttaagttatgcaagattataatagttttaacaaatagaaaggaagaaataatagttttgttaaccattttttttgctcttgttgtgactccatacttttcttttacccaagaattaacaatgtcatcttcacctagatatagctttgagcatattatataagctttttatgcatgttgttcaagattgagcaatgttttgatgcttaaaaaggaaaatgtttgtaacgtgtatgatgatttctgcactacagtgtcttttcgaaatagagagcgtatcacctttgatcatttagtttctatgaagaaacccaatgaaacaactctaattagagttctgagaagtggtgaagaacaagaatttagtatcatccttcgacctgtaagtttttatattggatatgtaaccaaccttgtttttggctaaacaatgaagttattggatttgggttgggtaatgaatgcaattatgtatcactttgtgaatgatgcagttggacccactagttccagttcaccagtttgataaacttccaagttattatatttttgctggattggtttttattccactcacacaaccatatcttcacgagtatggagaagactggtataatacttgcccacgtcgcttgtgcgaacgtgcacttagggaattgcctaaaaaggctggggaacagcttgtcatcctttctcaggtatgcatgccttttcttgttcgaatatggactaagcagattataggtatctaatttcattttggtacatgcatccatgaattcttcaggtgctgatggatgatatcaatgctggttacgagcgccttgcagaaatgcaggtaccgtcttgatcatccacttgtttataactatgcacataatatgaaaaatggtttaagaaaaaattgattggtaattgaatgaacaggttaagaagattaatggggtagagatagaaaatctgaaacatttatgccaacttgtggagaagaacaaagaagagaatgtccgttttgatttggatgatgaaagggttgtcatattgaactatgaggttgcaaagattgctacttcaaaaattttgaagcggcaccggataccatctgccatgtccagtgatctagttgatgaaaggcaactaaattcttagtgaacttattctatgtgtacattcttaacttttaattcatggctcatgttgggttttgctaggattttattcatattgtattgtattgtttgtgctcaacagtccacaatacataccaaggaatttattatagggaggaatttgtaggccatcaaatcaaaaaacaataatttaaaactacgaaatgcagtgccttcttcttctccatacattacaatacaatacatatcaaggaatccaataaagaaattcaaaaataggacctgaaagtagaaaagaataccccttaaacagagctgaaagaaagaagaaatatacatcattctcttcaacaaatggacaagtagagccccgcacgtctatatctttgattactaaagtgtatatacatacaagccagccaccggccaaactaatcgattcaaaattccattcccacatgactcttcaaacaaaacaccatttctttttttaagatgggatttctctccattcccaacaacactggcaatttattattttgtaagcttttctcatccctgccataaaaaatcataccctttgggtgggtgggaatttagtgccctgctggatgaactttgacagttaccgcccagtgaaacagaagacatcattcttggatgtagcaggtggaaagtataatgcttttcttattcaaggattccaaggccaatcatgagtctgattttgatgcggtgaatgatgaaagtagacctgcagcttgagcaggtagaatgtcgccaaatgttgacattgcagcggttgatctatctttgaatatccccacttgcccgtctttaagtatggaccccaatttcagtgtgcttccaacctgtccaatacaaggaaaagcatgttgttcactaccctctaccatccaaacattcaggagatttcaaaatctattaatgctgacatctttttctccataaccactaaaaagttccaaacatgaagactggcaacaatcatatactattactgaaacattcttccacaacagcgacaaaaagatgccaagctaatttggcaaacttgctaaggtaccttttgtcaaacattcatttgcctctatgaaattactctactgtaatacaaatgattattaagtcccccaaaaaattgctaccatcaccttagatttacagggcaaacaccagcagttttataagttcgagaacatgtttcaacttttgaaaatacttacctgcatgaaagattttaagaatggtgttgcaaccccgaaacttgagtcatcatccatatcaatcttgtcgggaagctctccgttagtaaaagctttccaggaacttcttgacgagatatcttctgaagatgttgttatagaagccttagttgcccctcttgttgacaatgctggggcactggatagccaaaacaaaagttaatacattgtacaattgagaggttgaactttggaaatggttaaagggagctttaaaaagaaaaaaaaacaccattctaatagtaaccggaaaagttaatcatccctatcagttaagtaaggaaactacactctcgattcaggttaatataggaaggcaaatcaaattagataagagacacttgttgccagcatgcaaaaccaagttactcaaaactcaaaaaggatataattagacacacgcaagctaacctgataggaaggtatttgaagcgaggaactgaagagcatctcatgatattggactctgaattagtaggtagtttctgaacagtatctgtatacatacgattgagttggacaaagaaaccaaaaagaactgcattccgttggtatgactgcctctcattttcccagagatacggctcatacctaaagaataaaagaagtcaggaataatatcaaaagaaccaacacaatactcaaattgtcaacctttaagagaggaagagggagaggggattgaactgttagtcaatgatctactgatctttagattagctaatgtcaaataaaaattcaagtgatacaacaacaaataactttaggcagtaacgtaagtttcacattcaaaataatggtatgaactcaaaatttgaacgttgaatatatatcaacttacgtgagccagtctatggggtccagtctttgagaaagacgagccatcaaccggtcaacatactctctagtaactgattttgtttgggtttgatcctgcttccgtctaaaagcagttcttgctttcgggactctatatgattcctcaatcaaaacagaatcacctcccgacagaacatcagcaacaaatctcaagtccaacaagacctgcagaactcctttctctgagacttgagatccactctcttctctggtagaaagaaaatcctgataaatcccaatcacctacacaaaaatttgtggtcaaataaattgaaattgcaacataaaagcacataattattttcattttttaattaaacatgtataactctctaatgaaaaataaaatctgttataggttgagattatctaatatgtacttaatatcccttctactttaaaacaacctggctcttgtaagttccagagcatgtatatttttttttctttttcacctctactatggcaacagaagaaaggaaataatgatgatatgttgctgaaataaaataaaaagggacagtaaaaaaggatgcctaggaaaattacttactttttccaacaggcttaaagcaaatttttgcagaatggttctgtcaagtacatgaccgccaattcgatgaatttcttcacacgcacgaaagagaaatgacacaatatagagagaaggcatagaaggaagcaatattttcatatccgattggctatcatcagactgctcttgcttgactactgtctcttcccaaccctgcacaattattaggaaaatgactagattattaaacacaacaaaaacaaaatcaccgattgatacagaaaatgaaacacacccaacccattccaaactaaaaccattgtcccaatgtttctatagctgaatactttactttttcctcaaaccgaaactgagcaccattattaatcaaacagccacaaatgggctttgaaaagaaaaaagatgacaaatgtcagcaactaccctaccctcattgcctgtcctgacaaaatcctacagctacaaaatccatctctacatgattgttcgggatactcacaaacgataaattcaagttacagaatcccccatagtaccattttgaagttgtaagggcattgcaagcaaatagtttttgaaacctatcccattttcttgtcagcaactatcctaccctcattatctatcccttttgcctacggggaatttcttgtcctgaaaaatcctaaagctactaatcagtttctacatgataatcacctcagacatttttcacatttttggttgatggtctacaatttttttttttttggttaacattttactaaacagattttaaaaacaccaacattttcacttgattaccatccaaaaacttttatattacgaatgataatgctgtctagttagttttcaactggtcaacttattgtaaagtagaactattcgatttacattcaattaagaccaatacataacatactaagcttacatcctatatccatttgatgctttttttttgacttcatttattctggtaggagaacaacctaataataaatgtcagaaaacacaagctgaagtgaatttttcttaccctcaatggagttgtggatgacaaagcatcatcatgtccaagctcacgcgccagaataatagaaagctcgttagacaaccatgatatccacaagctgtgagctctgatacaaagatctcgtaaagtggaagtaagttcttcaagtttggggcttgcactatcagcagctccaagcaatgcagcagtggctgatgaggtctgtttcttagaaccagttcgggtttgctttccagacccatcaactgtacgagaaccagattgccttaacaaggagggcaacctatcaaaaacggcagacatggtgtcactaacccaaaacctcggaggaccaagtaggacaggaacatgttttgaatgattgaggaatgcaaacaatagtcttccaatgaaaagggctctttcgactgttatagcagcagaaatgggtcgatcctccttgtcttttccattttccatggcagcatccaaagactgaagctcctctttaagttgctgcaatatagtcgaaagacaatcgtagcacttggattggagataaggtgcaagactcttcaaccttagagatgcctttggagattccaagaaacccagaaggtcctctagaagactctggcagcagttatccacagcatctctgatctcactgatctgtggaccaagatagccattaagacaactcctaaactcatactcttcaggaggaattagctttaacccagacattgg

SEQ ID NO: 219005 - DNA, 3394 bp, Cannabis indica
ttcttccataattaatgttaaatcttttttaacaatgaaaattcacgaaaacaattatttctatgaaaatattaaatcatttttaatattaaatcgtttttaacgctggtcaaatttcatgaaagttagaaaattaatgaaaattgcattgtgattatataggtttttcactatgtgaaaaataaaacaaacacataatgtgggactaacataatatactcttccttcatttttccaacctatataacttatactattggagaatgaaaatataatttggaaacataatgagaatgagatttatggttatagggtgtctttcattgctagagatttctcccgtgtgtgagatgttgggaaaccgactgtgagactttctttctcttcttgtgagatttctttcgtttgttactgagagcttgccattgtattatggatatggaggataacgagatagtacagaatgaggatagcaacctggaagaattgcgtctacagttcattgaggaggctactttggagcttgaggcagattttgagattaacaatgaagttgccaaaactggggtggtggctaagctttgtgggtctcgacctctgtctagaggaagagtcaaacaaatacttactggtgtttggtctttgagaggaaagtggaggatgaaatcgttagaaaggggcctctggggtttcttttttgatcatctggaagacaaagaggagattcttaaacgaagaccttggattatagcaggtcaactattgaatattcgtgaatggcccctcgatggagcttggcagagggtgccactgaacaaggcagtcttttgggtagaaattcatggattaccaacaccctatcttgtctttcaaaactcaagggtgattggagctaaagtgggtgagttcttggagtcggacggtgtcgacaatagaatcatagctcgtagaggctttctaaagcttaaggtcgacatatttatcgatcaacgtcttccggcgggtttttacttgagcataacaagaggaaggaaggaatggattcagttcaagtataggaaggtgcccaagctgtgtttcaactgtggttatttgggacatgacagcagtaattgttcaagagatcgagcctatgccttccctcccattgggaaagccgtgccactttatgggccttggatcaaagctactgtgcctattcgaagctgtttttgataccaaaggtcctctcctactccggggaaagggctgagacgtcggaggcggatcgggcagcagggaatattcaggtcgaatggtacggtgacccctgacggtgcttggtactgaggcgtgtgcggaggccactacctcgtttgcaaaggtcgtacgtacggagagtacgagcaaaactgttatgggaatttcaaaaggaaccactgggggtatcgacacctggtaagacagctgggaattctagggtgtgcgatgagatccatccaatgaatcttttgggcaaaaacccagatgacgacaatgtcttggtctgtatgatggcccacgttggtccagatgcggcccaagttgtggagaggccccatcatgagttatgcaaatcacgtaccccacatcttcaccctgaacccgtgtttattgatgggcccattgataatgtggaggagattactaataagttacatgggcctcttcttgaggaagggatgggccttcttgacaaaagtgataaatggtttctttcaaaagactctcctgtcttgttgggctctgtttcaaagaaaagaaaggcgttgggtaatgtgaccccaattatccatctgactccgaatgtgtcatcatcttcagcagtgactgtggtgtctcctctagcttcctccctgaatgttccgttcaatcccggcaaatcgtcgcctaagaaacagtcttcaagctcgagcaagaagaagggtcgtcgtggctctctcaaaaatagagccattgtcactaaagatcttcctgagatagttatcaatgaaccaggtaccaactcaaattgtacactctctgagaattaaaatcacctttttgatgttagaattgagcaaaattttcaattgggcgaggaggcggcccttaccatgcccccccattcccaatgagggccctttcctggaattgccgcggtcttgctagaccggcggcaatccaagctctcaaggcttgggttaagaggctgaggcttgactgtttgttcttgatggagactaagataggtgtttctcagatggttaatatttgtagggggctaaatttcgattatggcaagtatattccttctcgtggtattgcggggggattctgttttttatggaataaagatgcaggaattgaggtcactgaggttcttgattccagattcctttgtaaggtggaagatattgcagtaaggcatgtgtggagtcttcttgcagtttatggtacgccttatgaagatcaaaaattggatttctgggatttcatgatttgtaagattaattctcagtcggggccttgggctctcatgggtgatctaaatgtcattctaaacaaggaagacaagtcgggtggcaatgcttttatgcgtcgtcatggcgcaattcttcagaattttcttttttcaacaggaggagtcgatttgggatacagtggatgtaggtatacatggcagaacaaaaggagtaatggtcatttggtcaaggagcgtctggacagggtaattgtggacacagattggtttgactgcttgtccttcggggagtgttcgcaatttcccgatcacatgctctgaccatagccccatcttgttcgattcctgtgcgactaaacccaaaggttttcggcctttcagatttttcgaagctttggtttgatgatccgtctagttgggaggtgattaaagaggcttggtgtaggggtgtttccagtgaagaattaagttatttggggaaaaagatcaacagacctcaaagtgctcttagatggtggggtaaacatgtttatggagactgtgatacgcgtataaagaatcttgaattggagctccaagctcttcaatccaaagaagtccatgaagttgatctagtggctgaggctacaattttaaataatctgggagatttgtggaaacgcaaggaatccatgtggaaacaaaggtctcgggaaacttggttggctaagggtgatagaaattcttcgttttttcatgcctctacggtggttcggagaaagaggaatcacatttggaaccttaaagatcccggtggcaacattgtctcaaatgagaaaggtatcgatatcatccttaatgattattttaaagttctctttgagtccaatggtccttcgtccttcgaggatcttgactctttgatttctaact

SEQ ID NO: 219006 - DNA, 3666 bp, Cannabis indica
tttttttttttttgataattgataaaagtaaaatctagtacatataaattacacaacttttttttttcctaaaatatgaagttttttattacattccgatatgttatgcatcaaacataaaaattagacagacagaaagaaagagaggcgagagagaaatcaatagactgtcattgagtgtatctgtgcaatagaaagctaagaaataagcatacgaaatggtagcagcgttgggtttctcggcaccactcagcttctcaatcacttctcacaacaaatcctcttctcttcctctttcttcttcttcttcttcttcttccttttccaggtatatcttttctcccccacctctctctatctcttcccatatctacttatagtacataagctcttttgactttctgtagaaacccaaagaggtccgtagtctcttctactttatcctctccctatggaaatttctcaacaactggtaaattttccttctttcccttatcctttttttcccctttgcctcacatactatataatttcatttgtacgaaaccaataattgtaaagagcataaattattgcatgcccagttattgttttcagcttaattgttcctgggtgcaatttatacgagcatttacaaaagatgcagtttttttttggtgcctttttatgcttttgaattcaatttacaaagtattatttttctgtttctttaattaaatattgtaggattatccagtaagacttctgggtcacctttgctgcttgatgagaagaattttcatggtaccagtacaaggtgcaatacttttcgtagtttgagcaatgtctttcatctaatattttaattgcactggagttaatgatatgaatctaggtataacatatttcttaaaaagaaaatgtctgataaaaatatatattcttgctcagttttgtcttttgtatattttctttctcattttttttctgcttcctggataataatttagtggatttttcagttattgattttgggtatataattatgtagttatggtcctatagcagccagaaaaggaaatccacccatgatgccagcagtgatgaccccaggaggacctttggatctcgctactgtgatgtttaggaaccggataatcttcataggccagccagtgaattcacaggtggctcaacgagtcatttcacagcttgtgacactggcaactattgatgaaaatgctgatattctggtgtgtttatacatttccaaattcaaatttactttatcagtcttgcctgtgagtttgacttcctagatagaatgtgatgttgttctgtaatgtgctgcagatgtatttgaattgcccaggtggaagtacatactccgtgttggcaatttatgattgcatgtcttgggtaagattattgatttttattttcttttcaagcatttctatcatagttctttgcagacaggttcaagatttgtcgttatcattttgtttctgtgtgtgattttagttcatgcccctctactaaaaaaacaaagaaaaaaagaaaggcagttacatacttatcatgaaattcaatgatgtggacacaagcataataaattttcaatgtattatgtacataatatttccttcaaccaggcatttttttttacaattagtgtaagcaattttttggcaatgatttgaaggcgaacactgaattgatagagtaatcctttttaattaaatagatgcacacagctgagcgtaatgaaatcaccttattgggagtcgggacccaactgaaatcaagtaataacactcagttaaccttgtaactttttcagaagatagtaaaattctgctataaagatatcagaaaaaagttttgtgcaaaagtttttattacgttcgattatagcgtattgttccatgcttttacttatctgacaaagggctaaggttgaagataagaattacaaaggggtcaaaagtaagcattgttgctaccatgttggacagttcattttaagtcctgaaaaagttttagagcattgctttgtttgatgtggtagatttcgtatttatttattgtggaggggtggattcgaacttgtaacctccattttcaaggagaggaacatgtgatttgatttttaagatatatttacaggacttgaacccatacctgttcacacacacttactccacctcatctaaccactcaagctaaccttaagtggaaaacatgtgacttgatcttgtcatttgtctattacgcatggaacatattcagttcagtttctttctcttttcagaggaaacttagattttgttacaatatgttatgttaccctttaacaattacttttactttcagataaagcctaaggttggcacagtatgttttggcgtagctgcaagccaaggagcacttcttcttgcgggtggtgaaaaggggatgcgctattcaatgcctaatacacgtattatgatacaccagccacaaagtggatgtggggtatgaactgatattgattgatccttttagttgtgaattttttaattctcttatcttctttaatttggttgacagcaaaactactcttcattagaaatccagttatgtaaaaaatgaatttggtatgagcaatttactttcacaacaactgtagttgtgattgtatattagctaacttatttctttattcctaaaatgcattgactgattattatttgtagggtcacgtggaagatgtgaggcgccaagttaatgaagcagttcaatctcgacatgtcagttgtttttcttgactcactttatgttgccttttctaattacaataagatgaaatatttttcgtgtacagcctcacattgcagctgatgaattttaaaatttcaattgcttccttgtgctaacgctgtgaaaaattcacgtcaccattttacggctcgtttgcataggctgtctatatgtctatgttactctcacttcatagtagtgtgagatatcactgtcagattgccgcaaagaataataaagcttttccatttccttttactttgattattctgatagaaatagttgtggcctaaaagctgatcaaagaaacaacggtgtggaatatttaatttagatggatttccatttagctcagtccaaatacatttttcatttagttgacctatataatatttctttctcttcatcaatgcagaaaattgacaaaatgtatgccgcatttactggccaatcaatagagaaagttcaacaatatactgagagggatcgtttcttatctgtttcggaggtaaagctgccaacatctcatttattgtcccttctcgtgatatagatatagatatggatttttatgtttgggttacattgtcattggcattagtgctggctaaaagtcctaagccaacttcagtcttcacctacacatcccaacagttagaaggcagtaatacttatagcagtagtataataataaaaagggataataccaaaatcgctctctttctctcggctaagtactcgtgttcaagcctttcttctcaaaaaactggaagtgtcatctattttctaaaacatgactacaggataccttcaatgttttttaatcaaacttctagctgaatttctgaataccacagttatgtctctaaaaatatttgatgtaat

SEQ ID NO: 219007 - DNA, 2599 bp, Cannabis indica
atcgctttgttcacgtccactttcatgttttcttcttcgtttccttgttttacaattgatgcctttgctgtcaacaccggcatctacagttgcagtttcaccaaggcttgcttctatagataatgcttcttcttgtgtcttaggagtggatgcagcctctttctcgcccacgtggatgatatcacttttacattttgcatctacagttgcactttcaccacaacttgcatctataaacactgcttcttgtgtctttggagtggatgcaggttcctttttgccaacgtggataatatcattctgttcacgtccacttttaccaatgttcacatcgacaattgcactttcaacaaggcctgcatctacagatactgcttcttgtgtcattggaatggatgcaggccccttttcacccacatgcatatccccaagttcagccattcgtttctccttttgtctgcgggcccgtttctccttttgtctgcgggccctagctatacgtttcatagttttaccattgatgctttcgccctcagcagcagcatgactcccatcaatagttttaccattgatgcttttgccctcagcagcagcatgactcccatcagtagttttagctccatgaagctctacatctcccttgctctttcgttgcttctcaatttcaagataccacttcgtcacaagtagacgagctgagtttgaaagacgagagccagagatagacatgtgaataggcctgcaaaagcttatattagccaaaggaaacaaaacaaaaaacacatgcatgcagtcatcatttatttcgagagtattaagtcagtaaagtcccaagcaaaaataatcagtctaccctcgaataatctgattgatgtaaacaaattctttgcatgaactgacaattactctcatatatataaattccaacatcaagcaaaacctgctctataaaaagatagcattaggacgttctcaccttagagaatgcaatcgtccaacaacagaagacttctcatgccaaagaaatggtgtgggtttaacatgcctcctgaagatagactgcataaacatatcaacaaaaatcagcttggcaaaaattatatatttgtgtgttttatacacatgaatatacaaacaaagccataaaaatagggagcagcacttttcgaatcaaaaagtttcaaccatgtggtcagtgcagcaagtttagtcactttctgggacatgtgattggaaagaaatagcacaattttcaaagaaagactagaaccagtaggaagaactcgggataatataaactttgggttgctacttggtagtaggtacacaaaactaatggttttgagggactatctatacataaatttgggtcacttaaaaggtgtgtttggtgctcaaaaccatgtttgttatccaaccacacaatttaattggaaaagctgagatgccagacatcaacaatgccacaaacaatttctagattaaatcaaacaaactaatgaaaacattgtttcacaaacacagataaatcattgataatgaaagttactaccactaatttttattaaacttttagaactcttttcaactcctgcacagaattatgttgcattaaacttccaagatttagaatataacggctagaaaaaacacaaaccattgtacctttttcggataatgaactccatttggtgctctaggaatgtgagcatggaaggcaggagaattgtagaacacggacctagataaacagaaataaagattcatcaaatatgatagcaaagataatcatttgaacaagaccagacaagatgcgaaaatagcatgcaacttacaagactttattgtcagcgatcatatccatgccatcaattggtgaatatatttgctcaggctgcactggtatattagaaacaaaaatgtaaccattcatcccatcactgcatgattaaggaaatacagcaaggttagcgccaaaattgtgaaaagctggcacgaaagaatagagttgcacttctctaatacaaatacctggattctggaacaatttcctgtttgatttgagtatcgatcaagctcaaatgatcaacattacttctatagaaagaaagtatattcattgctaaaggataagtcacatgaacaaacaacacatccatacccaatttgttcctttgacgctcctcttcctacatacatagatacccaatgagaaacctaacaagacaaaacccatcaaatactggaaaaatagttcatttgtatggttatagtcataacgggtaagcatttaggcacccgatgacattgattagttcgtaaagaaacgataggattgcagttcaaaagaataccgtcaattcattttctactctggcaatttctgagagaaggatggtttcctcgataaatggaagcttgtagatggcctggattccaagaaatacaaagtcatcaaattgttagcacaaacttaatctatagagttgccctatatgatactgaaatcaaactaatatctattttaatcaaacataaaaaaaaaaaataacaatgatgatgtagaaatctaagtcttttttatttttaaactataagt

SEQ ID NO: 219008 - DNA, 4925 bp, Cannabis indica
acccaaaaaaaaaaaagaggtaatttgcgatataaataggtaagtttaatttttagatacaaataaatatttaagttaaatttttaacgataatatttaagttatatttttagaatttcagtaggtacctgaccgttaagtgttaattattcatgtgtgattttcttattagtatatttaaattaatttttaagtaaaaaataaaatgttaatgtcctagttcaatacagaattgtaatgaaacaatttacttacacttaacagcaaggtgcttataaaaagttccaaaattataacttaagtagtattgcttttaaaaattaaacttgaatgtaatttatttgcaactgagaattaaacttaaatatttataatacaaattaatcatttaaaaatcaaaagtgccatcatttttatttaacgttcatgaaaaatatacataaatcttttctaatttggatgatggagtttcgtaccacaaatttgttgtttatttttttttataacaacaaatttgttgtttgttgtttgaatctttccttacatcattttaagctttttcttttttggtaaatatctatttgctactttatattttattaaaatacaaatttattaccttatatttttaataatgatcacttaataccatttgtttacaaatattataatttgggtaccctctcttcaaatttagtgaacttatatttttagtatgactagatcatctcttattttaatatttctaattttgatcttagacccatttgcaaccaattacatgttgatcagcaggcaaagatacaataattcaagtatggttcttctccaaagcctttatttcagtatccatcgcattgtcccattcaggaattccttgagcttgactgaaaaattctagttcaaaatggcttgatatagctagaatagtagctctgaaggcaggagacaacctgtggtacccaaaaacttgagataaaggatgagcagtaacaaaagaggcctgagaagaagtagcagtgtcattagtggccaaataacaattatattcatttaggtatgagggctttgtcacttgtctccatgatctagtatggggagagacatcatgagactcatgaggagtacacacatcaaaagaactagacatggcaggttcattaagagattgtgaagtacctgcattctaagaattatgggatcttgttgtgtgaaaaaatcaaaacaaaaaaaaagattcatgtgtaggaggaagcccagcaaaatgaacaaaaggaaagatatgttcataaaaataaacatctctagaattaaaagtcatgttggtgttcaaatcaagcaatttatatgctttcacgccagcaagatatccaaaaaaaatgtagggaacagacctaggagcaaacttagatatagattggcttaaagttgaagcatatgcaaggcatccaaaagcttttaggtgctcataggctggtggtttagagtaaagaacatcaaatggtgacttgttctttaggtttggcgtaggtgttctattaataagatatagtctgcagtagtaatacaatctcctcaataaaccagtggaacataggatttaaatagcaaagctaatgtttgtgttttctctcaataacagagttttgttgaggtctttgaacacacgaatgataatgtataatcccaaggtcagtgaacaattctttgaattgcaattccttcgtattatctgacctaacagctttgatagttttgttgaactggttttggacaagttttatgaactaaggaatagcaatttgagcatcaaattttatttaattagattgatctaggtgtacttggaacaatcatcaacaattgttataaagtacttgtatcccttagttgtcatggtgttgtatgctccccaaatgtgaacatggattagatcaaaatagttttcagcaatattgtgattagatatgaatcgcaattttttttttcttagcataatggcaaatagaacaatgaaatagagaattacaattggcatgaaacttgaaagctttattcaaaggatgagtctttacagaagaaggatggtctaatctatagtgtcatacagtttcatttgtcactttggaataaaaaatagaagaaaaaatagaaacaaattgtttattactgatctgattacaattcaagtagtataagttgccaaattttttacccatcccaatcacctttgtcttcaaagtgtcttggatgacacagtttccatgagaaaacaagaaagtgtaattagttgtagcagttaaagaattgacaaataacaaattgcacttgaaagagggaacataaaggacactttcaagaacaaggttagggagtcaaagtaattgttccaagacaagatatttcagtgtgcaaaccattaggcaaaagaacagtttttaggttaggagtgtaggtatttttgaacaaagaaatgtcaaggcatacatgatgtatagctcatgtatctatgatccaactgttattattaacaaaagaattcttaccagaaaaataggcattttttaggttagcatgtaggtattttttaggttagcaagtaatgccatgagtttctggcaatgcacactagacaagctagcaacaagatctctcaattggcatctcctctagtttttcttcatctatccttgaaaagttcacaccagaagactttcctagaggtcccttaacattgcacactaataagtcgtaccattaaatatcagtagctattactatcttttacctacaaataaatataagtaggtaacatattggtaagtaaaggccagatttcttgtagtaggggatatcccttaagcttatgacatctgccaattgtgtgtccattcatgcgacaatgagtataattgtactttgattgaaagggttgaacaactccagcaaactgtcaagcattactcgatgatgacttgtccaaatcagatgaattattatatccactagtcaatcctctttgcctctcttcttgaacaatagtagctagcaggccttgttcacacttgggagaggatcatgtattaagatctgagatcttgcaaagctgtaagagtcattcaatccaaccaaaaattccagcagtctatcttcttcctaatattcttgaataattttcattgcaccacatgtacaaacaggttatggtctatactctctaatctactcccatagagccttcaatcaagtgtaataggtcgttacagtgttcgatccttgagtaagactctgcatagtctttttagcctaaaagattcgaggagcattcttctcattgaattgtgcgtgtaactctatccaaatttcagtagcattccatgatacattatgctatctgcgattttatcagagatagcatgtaaaatccaagaaatgactgtgttgttgcatctacaccagctatcatagtcttcatgatcttcatcgagctaaggaagctttccactaacaaatttgaccttatttcgagcaatcagagcaatcaacattgctcttctccaagtactgtaattctcactgcctttgagaatttttagaacaagaacaacacatgaattattgccataggaaaggaagtacgaattcgagagatcattagcattagatgatcgagaattttcaccaagaaccaagaacaaagaacatgttcgaatcattagaagtattttcatattcttaatttcctcgaatatgaactcctcctcgagctcgagttccaccacctcgtgccattaatcaacaaacaaacaaggaagaggagcttatagagtatgctctaataccatattagcttgagagatctgaaacagagtatgagagaaggagagatagagagagaatgagcaaaacaaaattgtattgaatcaaatcattacagttacaataatgatgattagctacttatagtagctatgattacaaaggaaaacaaacacaataactcaatagctaactgtgacaacactaacctcttaacctcctaaatatttcaaaatctcattctacatatatgtaataaatatttataaaataaagtacatttataaataaaaaattaataataaataaacatatacaatatatatagtttaaattaagtgtttaatttactaaaaataatatatatattaaattttaataaaaataaaatagaaattgattattttttgaagtgaattgactttttaaattaaatatatatgagtagaaggtaaataaaataatacaattgcttattacttttttttttattttcttcttctagtacttctttcatttcttttaccaataagtcagtacacctattatagttgtatttttttacacatttaactcaaaatcgctcactaattgatcattttcattactaaagtagaagttgagatttacgaactcctctacttaagtgttagattatgttaaaattattttattcattaaaatttttgttttataaaatatatactaaatttaaatttaatgtgtgtcttaactagaagtgtagtaatattcccaatttggataatatagagtaaaatttgaattatatagtgtttttgttttattttaatattttattatagataattttcgacataagaaaccgtttttttagtatgtactataaaaattttatttgatactaaattaaattttggcccacctaacattcaagtcctagctctgcccctgttaataactaatttatgacatacctgtacacattgtcagcaaataattaataggtattgttaagcaaaaatttcacatttagaatattaaaaataaatgcgaaacacaatttcacctatgccaaaattatagcataagagtttattaatttaagttcgacccatccaagatta

SEQ ID NO: 219009 - DNA, 4856 bp, Cannabis indica
tgtgagaatttcatgttaatgtgctaaaaagcatgattagtcatcaatcttattttgttaataatcccacatcccacattgtttataaagtaatatacactataaataaattatttcttttataatttttatttttcccaaaatttatatttttttccttcttggataattaattaaattaatcttatctaattaactagttaataaataaaacactttagtctatcagtaggcaatattgccaaaccacaaaattcattcttgaaccaatgaacaagtgtggctttacattgttttttatttttatttttttatcaaactaaaaatctattattgaactaaatggaaaaatgaagaaaaagaaatcatttacacagcctaatgcacaaaggtaatatataaaagataatatccaaagccaaaagataactttcttataaggttacagattatagatgaggcaaaactgtgttccactttagcttttgtcatactaaatgtttcaccatgtatggcccttcaagctcataacccagtttcctatagtaatgccgtgttcctacaccagaaataacacctatcttcgtcgacctatgctccctgcgagcaatccgctcggcctcctccatcagaagagtaccataaccctgtgaacaaaaacaacaaaaggattaagaacttgtaatgattaggaacatttactttagcttctttattacttttggttgttttgtttagtagaagcattagtgtgtgtacctgatgctgcagtttgtctgcatccctcccatgaaccggaacagcagttccataaacatggagttcccgaacaatggaacatttccccatgagttcaggacaagttgtgtttcgtccacatttgcgtagccgcagcaggccaacaagaatatcctattgtcaacaaagaaaaaagaaaaaaagcatcttagatttcagcaggtccaaactgttttgctagcaaacagaaaacaacatggattcatctcgagcaccattgactgttaaacaattggctcagtatcaccagtaaattggttaacggcataggaaaccattcagtagccggggacaaaatattttcaggaaggtagatggggagagattccaaatacctggcgtatgtcttcatatgagaggaaggtttcccacccttcatttgctgcataatctcggcgtactagctcaacttgttcaggcttaattttgtggtggatatcctaaaacaatcaaacatattagcaagtattttggactttatttactttttcattgtgtcactttcttttcctttttctcttcccttttctgagaaacagaattaccgagtttctcacaattacataataagctaaatcccataatgagcacagttgtgcatacttacttggattccagcctctcttgttcgaacatcacgacattttaatcccaagtcctccatcctagctaaagccagctcccgaagatttcctttctcaacccccgatgtaactagaggcatgggaatatcccgctgtaccctgtagacacgtgtccaaggaggtaccaaggctagaatcctagctacaatgtccacaagttgctctggtggatagtttctatacctgcaaaatggaaaaaaatataaacattttttactaagatattcaacattgatcctcatgttaagccattgttagtgtttaactgccaaggtttgttccaaagacaagagaaatcatacactttaagcatctgcaatcactgaaagtaaaccacacaaagcaggaagagaaaggctttcttctttgggacaaatgaaaacatgaaaataaatattgaaattatacctgccagttttccagagctcataaagcccagttccacggatcacaagcgtaggatagattttaagtccatcagctcgaaatgatgggctctcaaaaaactcccgaaaactttccatgtccctctccacaccaacatttggaaggtcaggcatcatgtgtgcaacaacctaaagaatacacattagcatgagaaatgaaaacaagacacttgagaagcatttgtgtgcagcagattcacataacattcatgatgaaacatgtacaattagctgtccttgacacaaaaacataaaaaacttaaatcgagatgataaaaggatatgtaacaaaaacagaaaaagcatagcttttctggtagaaagaccacaagtagttgaaatagattcataatcagccattagaaattataatcacgtttatcatgtaacttgaacaaagacatgttaaggaataaaaacacaccttgaaaccagcatcctttgccaagcagaaacagtcggccacagcagcaactgtatgacctctgtttgtgtcacgagccacatcttcataagtactttgtactccaatctccagtcttgtgcaaccataggtaagcatttgccgcaggtgaggtccaaggcaataatctggcctcctgatgatttggatcgaagcaagaaataaggaaaattgtcaaatatctaaaaaccagagcaagaagtatagttacttttaatctttatttatttgtttttaagaaagggttggatacttgaaataaaaaattcagatatcgggacttcatatctatatacataaaatttagaactcacgtttcgattgtcatgccaatgcatttagtagcaccatgctctgagtaagccacggcctcttctacattcgcagaggtgtgtcccgacaaagcatcgtgaagattccttatgaaataatcacggtaatctgctggcagtgacataaacgtaccacccatcaaaatgaactcaacctgaaatcatatggtcatgctagtaagcaggtgacaatttgcttcaacatccataagcataaaatagttgttcaagtattttaaatgcaaacaaaccagaccttatctacactgtgacccaaacgcttcaactgatctatcctgcttctagcctggacatacgggttgtatctaaaaccagatataagagcgcaggtgaacaattattaacagaaaatatatcaaacattatactgcaaagaacaaaaaagtaatactgcatgttaatcacaatgactaatgaaatttcacaataccaaaaatcaaaattaaaaatcagtaagcaaataagcaagaaaagtaataataaaagaacaacaacaaccttaaggcattgttttgaaatgaatataagaagggagaaggaaaggggagtcagaagattggtgaataaattttggagagcaagattgtttgtgaagaggcatttttatagggaacatcctagacgatgatgttcaaataatcagtttcagccaaatctagatcccacattccatcattcctctagtactaccaaataattaatccaaagaagactgctttccttcctctaccatttcctttaaattctttcctacattcctacaaaacatagcattaatttcccatctaagatttacgtcaggtcacatgttcatgaaactaaaccacacaaacaaacaattcccagtctccaatattaggttatttacaaataatcagtttcagccaaatttagacatcttactatatcatttctctagtaccaaatacaaaaaagactgttatcctttctctaccctttcgtcatagcattaagttccccatctaagatctctgttaggtcacttgttcatgaaactaagccacactaacccaaacaaacacttaccatgatgagttcatttacaatccaacaattatgctcgactaagataattaaactgatgataacaaaaccgaaacatatatatataaagaagagtaagaactaataaaaaattgaaaccctaccttgctctaatggcgcgcatactagttggctcgtagccagtataagactgagtgctgtactcgaagtcagagtcaggtccaccagggcagtacacgcaaatattaccagtagtggcgatgtgagggcaccggtgaggcttagacatcacggccacgacggcgatgccggaggcggttcgaaccggcttggccctgagcttggggagcaacgactcgcgctccgaatcaggaagtgccgcaatcatctccacgagcttgggcgcacgcgccagaccgtacttgcggcaagcggctgacttgagtgcgttgaggtcgacattttcgcctttgtgagagaggtcgaccatggagcttacgatctcagctatggctctgactcgagcctcttcttcggatagtccatgggcttcgaacccgcctcgccccggccggggttgcttcttgtttggatcagccaccatcgcagtcgccatggaagagagtttgagtaaagagaaaaaacgaacaaaggaacactgaagagcagtgaatggaggcccagagaggtttataagtgtttttacgctgacgcacaaaacggcgtggttttgagggtagaagagttattattactctagtggtccctgactttgaagaaaatatcgctttgatcccaaaaattttatatttttttcggtttagccattttttttttgaaacaaagattgcaactttcattaaagccaatcagctaacaaaatagcatccaaaccagaagggacagaccccctactggaaatacgatcaggacatgaaccagaagaacgagctaaccagttagccgcttggttcccagatcgtttaacaaactgaactgaaatatgaaaattagaaaaggaccgtataagattaatacaatccgaaataataagaccaagaggagaaagaatgtggttcttgctattgatagcattaaccaacacaagacaatccgactccaaaat

SEQ ID NO: 219010 - DNA, 7035 bp, Cannabis indica
cttttaggtcacattaagcacaatactcctgcattgggcacacttcttttatttcttaaagcatttaacttaaattgggtctatttaaggtagacttttttggtttaagttttagcttcatagatttgaatttttaagtagatgttaagcattgttcacaatttaaaatggtggataatttttttgtatttaaatgcttttgtggttgtggttgtcatccaataatcaccacggattattagtatttctaatcttgtcacacaagtttcctactagtgggtgcatggtacattatcaaaggcatacataattatgtatgtacctgtgtgtttgtgtgtgtgatgtatagatgctgcttactgacggtcaaaatagatgtatgatctggcaacttatcttgttcatagccagtttactaattaacctcagttggttcactgttgccttttaattttatgatttttgaatgtatttacatgcattaaacttaaagcacaacctatgttatttataaaattttcacctttcatatatatatatttgctgaatgaaataacatattttcccacttgtgtggtagccttgaacatatgaaggggcaattcaatatataacaatttagaaatgatgctttgtatacttctcgagttatatcaaatgttgaaaattgtcactagatgtgtgcaggctgttatagttcgacctttatctacagtaagttccctcgttcgattcgctgaggagccccaaatgtttgctattgaattctgtgatgggtgtcccatccatgtaagcatttattcattttattatgcaactgctgctttttggggtggaaagtttctgatatctgtgacatttatttgtaggtttatgcaagcacatcacgtgataacttacttgcagcagtattggatttgttgcaaacagaagtaggtagatgtgttctctcttggatattgatgggtttttcacctgcgagattaatgttgcttacaattataaacaaatgacatggatattttctttaataactttcctattattattattattattattattatgcaatgcatatgttagtggcgtggttgaccttggtttattttttgtgcaggggcaatgtgcagtgccagtgttaccgagattgacaatgcctggtcatcgtgttgatcctccttgtggtagagttttcttacaatttggaaagcaaatccttggtgctgatacggagggtgcaaatatgcatttgaaacacctagcagcagctgcaaaagatgcagtttctgaaagtggttctattcctggatcaagagctaaactatggcgaagaattagggagtttaatgcgtgtataccatatactggtgttcctccaaatattgaagttcctgaggtgacattgatggccttgataactatgctcccatctacaccaaatcttcctcctgaatcccctccattgcctccaccttcacctaaagctgccgcaacagtaatgggcttcattgcatgtttacgtagattactagcttcaaagagtgcagcttcacatgtaatgtcttttcctgctgctgttgggagaataatgggcttacttcgaaatggctctgagggtgtggctgctgaagctgctgggcttgttgctgtacttattggcggtggtcctggggatacaattacaaatttgctaacagactcgaaaggggagcaacatgccacaatcatgcacacaaagtcagtgttatttgctcaacaaggctatgttatcattcttgtgaacagattaaagccaatgtctgtatctcctttactctcgatggcaatcgttgaagttctcgaggcaatgatatgtgatcctcatggtgaaactactcaatacacggtgtttgttgaattgctacgccaagtagctggtttaaaacgtcgcttgtttgcattgtttggacatcctgctgaaagtgtcagagaaactgtagctgtggttatgcgtacaattgcagaagaagacgctattgcggcagagtcgatgcgtgatgctgcattgcgtgatggtgctttgctacgacatttattgcatgcattttttctccctgttggtgagcggcgtgaggttagccgacaacttgttgctctttgggcagactcctatgaacctgctctggaactattgtctagagtgcttcctcctggacttgttgcttatctacatacacgttctgatggaatcccatcagaagaaggttctcaagatgtatccttgactagtagaagacagaggcggctactccaacaaaggaaaggtcgtgtaggtagaggaataacatctcaagagcattcattatcttctgcaaacaattatgaagttagtgatccaacaaagcagacaagcacttctgccattaaaggttcagattactatcaaaaatcaactatagatcctagttttggtcagtcttcaaccatccaaccttctgttgctcaaaccagtgaaaatctgagcagtgaaatgccttctacaggggttttacaaaatgaacattcggctagtgttccacctatggatacacatgatacttctgaagtaaatacttcaatttcaattgattctgatgccaatattgctggttttcagaatacaggcctcccagctcctgcacaggttgttgtagagaatactccagtgggttctggcagactactgtgtaattggcctgaattttggagagcttttagccttgaccataatcgtgccgatttgatatggaatgagcgtacgaggcaagaattgagggaggctctgcaggcggaggttcataaattagatgttgagaaagaacgcacagaagatattgttcctcgaggtgctacgattgagaataatcctgggcaagaaagtgtggcccaaatttcttggaactaccctgaatttaatgttagctatcctagtttgtctagagaagtttgtgttggccaatattatctgcgtttgctgcttgagagtggcagtggtggcagggctcaggattttcctttacgtgatccggttgttttctttagagcactgtatcataggtttttatgtgatgcggacatagggcttacagttgatggtgctgttcctgatgaactgggtgcatctgatgattggtgtgatatggggagattagatggctttggaggaggaggagggtcctctgttagagaactttgtgcaagggcaatggcaattgtatatgaacaacactacaaattaattggttcctttgagggctctgctcatattacagttctactggatcgaacagatgatagagcgttgaggcaccgccttcttcttctcttgaaggtaaaagtagatccttatttccctattatttctttaattcttctctttgattcagaatggtctagttgagcatgctgatatttgttttgcaaaaacttcaagagtaatatcattgtcttctgtgtattgaatattagttccgacgtctgagattgtacttattctgtttagattaaatatagccatttttcttaatttattcctttgtctatgtttgatggcttgcttgttattgtattaacaacagtggagtcattgtaaccattttgtttaattgaactaaaaagatatttgaagactttttccaataaggcttgctttgggaactgttttatagaatggccaatttccagacatggttttttgaatctttataggaaagtttgcatttaaaccagggtcagtcaaaatcatatctacagacttggcgggtatttgcagaatctaaatttgtatctactgtttaagcattgacgataatcactcttcatactactgcttgtgcaggctttaatgaaggttttatcaaatgttgaggtatgtgttctggttggagggtgtgtattagctgttgatctgctgacagtggcccatgaagctgcagaaaggactgccattcctttgcaatcaaatctgattgctgctacggcattcatggaaccactaaaggaatggatgtttgttgacaaggatggagcagaagttggacctgtggagaaggatgctataagaagattttggtcgaagaaggaaattgattggacaacacgatgctgggcttcagggatggtagactggaaaagattgagggatattcgtgaactacgctgggcattatctgctcgagttcctgttctcactccaactcaggtattgttatttgaaacttggggactaatgttcatgccctcaaacttgttgcgtttatcttgtgtaaaatttcttagatacttgttttggactgcagtttttttattttcaatgattgtgttagttcattccattattaagcctgggcaggacttaagttagtgttttgctattcatactgaactgtcagataaaaaaactagtacaatttactattatgtttgattattttttgtgcttcaatgccaaagagcatttagttttagagcttcttaaaatcttttaataatgttttttttctctctagtttaaatacctcgatgatgagttgtaaatgcttgcactttttcaaaattcaatgttactttccatttttatccacgggactgcaccattcttttcactttgtttcctagttagtacatttaatgatgtatataacacaacatcttgattttaaaaattcaggtgggggaggcagcattgtccatattacatagcatggtatccgctcattcagatttagatgatgcaggagagatagttaccccaactcctagagtaaaacgaatgttgtcaagtccacgatgccttccacatattgcacaggtgactcagagcagaattcctgttcaaattttttacagctttataaatgtgtagatatccaagtcagaagggaatacattgtattaaatgtgtgggaacgccgggttctttccattatagtttatgctttagcatgaagtcatgttatgtgaccaaccttacttttttaaccttaatgtcaaaataatttcaggctatgctttctggtgaaccaagcattgtggaaggtgctgctgcgttgttgaaggctgttgttactagaaatcccaaggcgatgattcgcctctacagcacaggtgcattttattttgccttggcttatcctggatctaatctcctttcaattgcccaactcttctcggtaactcatgtccatcaagcatttcacggtggtgaggaagctgcagtgtcatcttcattgccgctggctaagcgcagtgttttgggtggccttcttcctgcatccttgttgtatgtactggagcgaagtggtccagctgcatttgcggctgctatgatttctgattctgatactccagagattatatggactcacaaaatgcgagcagaaaatctgatctgtcaggtacttcagaagtttttatgctgataatgctcatgaccttaaaatctttatgtattttttcccccacatttaagcataatcgaaagctacaaattatgttctgattggaatcatagttatgaatttcttttctttctcacaggtcttgcagcatcttggtgattttccccagaaattatcacagcactgccatactctgtatgaatatgctccaatgccaccagttacttacccagagctacgggatgaaatgtggtgtcaccgatattacctgcggaacttatgtgatgaaattcggtttcctaactggcctattgttgagcatgttgagtttctgcaatcattactggtgatgtggcgtgaagagttgacaagaaggcctatggatctctctgaagaagaagcttgcagaatattagaaatatccttagaagatgtatctaatagtgatggcaataagaagcaatccttagaaattggcgatgagctatccatatcaaagcagattgaaaacattgatgaagagaaacttaagcgacaatatagaaaacttgctatgaagtatcatcctgacaaaaatcccgaaggaagggaaaagtttcttgctgtacagaaagcttacgagcgtctgcaggtaaacaatggtctgatgtgaagatgtatataatatgtatgtatgtctgtgttcaactggtggaaagatctcccaaaaggttgatttttactcgaaatctctctgtatgcatgatcgttgagcactccatattgggtggtgattgaccctcctatttagcataggtttctttcctatgactttatcttcttcatgatggatcaatatttttattgtctcctcaagtcttaaaactctgagaaaacctgttagtttgttttatattattatttgtttgtggacaacttttgcaatgtggtaggtgtacaatttttatctcatgacacgtgacattgatccccaagtgagaaatattccagtaaactttaaatatgagctgcaaaaattgacttccttgtgtgtcatatatcagctgtcaagttatggtttcatattatttcaagttttctaacgaaataaatatgattgttataggccaccatgcaaggcttgcaaggtcctcagccttggcggttattgctattgttgaaagggcagtgcatcctgtacagacgttatggaagtgtgcttgagccatttaaatatgctggttatcccatgttgctcaatgcagttactgtagataaagatgacagcaatttccttgcctcagatagagctcctctccttgtggcagcatcagagcttatttggctgacgtaaaatcctcatacttgcttttttactcgttcaagcttaatgtgctctgtgttagtttttagctcgatgcactgaactctatttttatgtaattttttttcatttttagatgtgcatcttctttgttaaatggtgaagaacttgtgagagatggtgggattcaacttattgcgactctcctttcccgttgcatgtgtgtagttcaatcaactactcctgcaagtgaaccatcagccattattgttactaatgtgatgcggacgttttctgtgttgaataagtttgaga

SEQ ID NO: 219011 - DNA, 7057 bp, Cannabis indica
ttcctaccccttttagacagatgtcaatccatgtctgaacttaagcaaattcatgctctgttactcgacttttcggctctaccaacaagaccaatattcctcaaaaatcttatctttctccgctatttttgattcccctaatgctgattactcctatcgattcttatcattgcaactctctaatccctcaacgtttgattggaataccgttataagaggttactccaagagccgtaatccaaaccggtctatatcggttttcatccaaatgttgagaggtgggttctcgcctgatcatttaacatacccttttcttgctaaggctgcggcttcattgatgaagctagaacttggtgtggctgttcatggtcacatatccaaacatgggtttgaaattcagataggtttattgggaattcaatgattcatatgtatgcttcttgtagggatattacttatgcacgtaaggtgtttgataatatgtttaagaaaatttagtttcgtggaattctatggttgatgggtacgcgaaatgtggcgatgtgaactcggcgcggggagtgtttgaattgatggaggagagggatgttgtgtcttggagttctttgattgatgggtatgttaaggctggggaatatgttgaggctttgaagctgtttgagctaatgcaatgtgaagggcccgaagcgaatgaggttactatggtgagtactttgtgtgcttgtgctcacttaggtgcccttgagcaaggaagggcaatgcatcgttacattgttgagaacaagttgttgttaaccttggtgctgcaaacgtcgcttgtggacatgtatgcgaaatgtggtgcgatagatgaggctttgagtgtgtttcgtgggggttggacacgaagaacagatgtgttgatttggaatgcgatgattggaggacttgcaactcatggatttgttaaagagtctcttgacttgtttgatgaaatgcgaacgattagaattgtcccggatgagattacttatctgtgcttgctaagtgcttgtgctcatggtggattagtgaaagaagcttggtacttctttgagtgtcttgataaacacgctatgacaccgaagagcgaacactatgcttgtatggtggatgttttggcacgagcgggagaagttgataaggcatttcgtttcatcaaccgaatgccaataaagccaacagcctcaatgttaggtgctttgctaaatggttgtatgaaccatggaaaatttgatctggcagaaataatcggaaggaagctaatagagattgagccagatcatgatggtagatatgtaggattgtcaaatatttacgctgtctccaagcgttgggatgatgcaaaaagtttgaggaaaaccatggagaagagaggagttaagaaatcccctggttttagctttgtggaggtttctggactgcttcatagattcattgcccatgataatgttcatcctgagtctaaacgaatttattcattcctgaattttatgacaaatcaaatcaaatgtgatgctatctttgaaaatcaagacttcatcttaccagtggaagatttttgcttttagtcttgagacaaatatactagttattttctttcttttgtcatttatttttagagcgcatagatgggataataaatagaaatcaatgtgaataagaattacatgagccaccctattcttccttttcttatttattggaacaaagtgaccagaactatgattattagctgataacatcgaacgccttcaatgtctaagaaaactatagcatcagctgtgatcagagaaattgatatgccagctgcagcagcaagataaaaatcttccatctggtactaacatggccagttttccagcttcccttccatgttcaagcagtcgggttcgtaaacaagtataccaggcattcttcaacttgccatagcttttatgagtctgagggaatcaagagatatcttctgtaaattttgtattgaagatgttttgattgcagacaatgagaagtagggatatagcagtgatttaaattgtactcattttaaaaactatgtggttctctacaccatttcagttgcaagtatctgatttctatggtcttaatctcttttcagttttccttctataactatgcaaatttattttcgggttttaggtcttattatcaaggttacaaaatgaatatggacatgatgataaagacattacagaaacgattcaagaaagttcgggatgaaatggaacggtgggaggaacttcaatctcgtttagtttctcaattcagcaatgcagcctccatcatcggccgattggaagtaagttcaccgaatttttttactcttcaaatttaatcactttttacttaattttttaaaattattattgctgaataaataaaggtgcttaaggatatcaagaattatggtaatttgagttgtatcgatggcattcaagaagctgtgttgaataagcaaatggattcattacagaatctttttcttttgatgaaagacacactgtaagaacatttttctttttaaataaattttgttctccattgtttagtgaagagttattgaaagtgaacattcgaatgccaattccaatttcagggaagagcttcacggtattactttgtctctcgggaaaattcatcgcgatgctaggcaattgattgaaggagggtctaatcagcttggttcgaaacagttgcatctacagattggcgtaaaacctactcttgcttattgcttagacgggcttaaacaacttcacgaaatgcatcaatccgagtatagaactactaccatttttgtattaaaaatcaacatttgtatctgtttttgttgaaccactgtacattaaacccaccttgttttctcatatttcaggtacaatcttaaaacatccttgttctcaggactttcagtacttaccttgaaacccaagtaagtaaactccctggttcttttcacttgcttcttatctcagctctctgaaactaatttagaaagtagtgtacttatgatttgagcttgaattcctatcttacctgactgaactcaataacataataagtgggtgaagaatatgtattatgtacatctcataagcttctgaaatatgcagtgttaggtagttttcggtagtaaatatgagccggactttttgacacggtataaaaccagcatgagcacaatccggcacgaaaaaatatgggcttagacacggtttgacatgacaaacccgaaatcacacaagcacgaaaagattagctcgaaagcataacacataatttgatagtaataacaataataaatatttatttatcaattaaaatgatagtggtgttcaaattataataattatatttttttatatataattgtgtgtaactattattagaaaaatatagaaaaataattagaactataaaatacacatattttagtatttcactcatcaattttaataaaaatgcaaaaatatagagcataaatttgaacccgtataagaaaacaggttggcttatttaagaaaaataggttggtaggaataaaacacggcacgaaattactaaacttgcaggccgtgccgagtttactctataaaattagatgtttgcaacccaacatttatattgggttggtaaaaatacactataacccgacaaaaccgatcgatgtacactccggttttcggtatgttagcctaaacagttgtgtgttagtgttaaatgcccttttactaactatggttttgttcataaattgcagtccaaacgatctaagtacactgcagcaactcttgatcgatcaaccgaacataccgaaagaggaaggtattattatggactattggagcactctcaaacttaacaagttacaattttgattatttctcttttttatctgatttttgctttgtcttttgactctttgcagttgaaaccctctttcaaaatatatttgcagaagatgattagattctaaaggatgagtttaataagtttgatggtattagtgaatttagattattacttaatcctattcttttatgttatggttagtttaattgagtaatttgttgctggtttttcttacatatattatacagttagaacttagaaatcatattttctaccaatgaaatagtattcttttgttttttttatttttctctattttacatttgatttttaagatggtatttataattttatatcagtatcacttttctatcaacatcaacaacaaggcgttaatttaatacaatttcttaatcactcatcaaaaagtaaaaaatgaattaatggtaatttactttttcatctttattaatggttaactaggatttttggtttctgaaattaaattttaacatgattaaatcatgctatgttaaaagtttcatccaaattgtaaaattgttaaatttaagaatttttgtttagttttattaacataagtttatagtttggtatatgttaaaatttgggagacacgatgtggtagtatcaaaatttggggcatgatttagtacatgatcaattgttatgttagtaaaatttaatggaattagataagagtttttgaatctaataattttaatagtttataagaaattaaaaagatcggggcatctgtagatccgtatgtgcattcgggtcaccctgagttacaagacaaaacagttcacagtctctttcgtttggatggtaaggagtgggacatggaaatcataaatgacttgttctctgcccgagacagggctcttattacatctatacagttgagctcaaacaatcatagtgattgctagtcttggaggttcgagaagagtggtctatttactgtaaaaagtgtgtatcggttcttggaaaatctcaagtatgattgggtgggtgatacaacactaatttttggaggaaaatgtggacattaaagattccccaaaggttagtaattttgcttggccagcagtttcgggtaccctcccaacctgtttgcaacttctcaagcgtcatgtggttattagtcccatttgtccgatatgtcaggaggctgaggaatctacttttcatgctctagtgggttgttgttttgctcgagcctgttggaatagatctttggttagtatttgtagttggtcagcggatagttttggctcttggtttcaagctctttcgacaaggatcagttctcaagcattggaggaagcgacgatggttacatggagtatctggaaggcccgtaatgaggttgtttggcaacaaagatctcctactgctgcatcagtggttttgtcggcaagatcattccttgatcaatttcgttttgcacagtcacggacgacgagttcgttgtctaacagttcgataggactgtcttcacgtgtgcattggattacaccaatttctgatcagatcaaggtcaatgttgatagtgctctatttaatgatgttagccgttttgggatgggttgcttagctcgtaaccatgctggtcaagttctcgaggccttcactagtagcagggagggaattgttaggccaaagattgctgaaatcatcgggatcaaagaggccttaagctggatccagcgtcataatcggcaaaatgttttgctagaaactgatagtttggtttgtgcttaggctatccagagtgagttgcacataccatctgagttcggtttactggttaatgcttgtacaattgttttatcttctttgagtcatgttgctattcagtttgttgaatgatctgtgaacaaagccgcccattgtttggtgcgtagctcttgtttttccccaagtcttacttttcaggattatcagttaagtcctgaattgcgtaatattgtaccggttaatgaaagtttactcttattcaaaaaaaaaaaaaaaatcggggcataatttgacacataagagtatcttgaacaagaataaagtaaagaataaagagtatatatttattaaaaaaaaaagactaaagagtatctagtaattagcacactaatcttgaaaataataaaaatttaatttgtcaaaaaaaatttgaatacctataattgttcacaaattataggaaaattttacaatgtacctttatctattttagcattcaagagatttttcactctaattttcttttttatggcagtgcacatcataataatttaagataaaaaaattaattcattgaaaataaggttcaaactgtttgttgcatgcatgtgtgattcattgctaactatattataaattattctgaatttttcaaaattttgcaaaaattagagtaaacttttttttatgaatatcaaaataaatagaggtgtattggtgtactattttaagaagtgtgcaccgcaaattatataattattataagtaatataatgagcgagttagtcataaaatctacactctaatttttttttctttagtttaaaaaaatcgttcatatatatttaaaacaaatatcttgactcaaatttaatttaattttattctttttaaatatatagttttttttgaaaatcttaattttaatatctttttatattttaaaaacaaatgtatatataatgtacattagagtacgaatttatttgagtactctaatagcaataaccatggacacgcctccaaataacaatggtatattttctttctcaatcttaatttccaacaaaaccaaattgaccatgtaattatataatttattattattattattttcttgttttatttttataggtacttcatcatctaataattcatatggaaataatttcacaactcataaaataactgtaactaggatcaggtaataataataagggtaaatatcattttggatcctctgttttgcaaaaattaccaattagaccctgtattttattaaatgacaaaatggaccctgtattttctaaaatagtacaaataggacactgaattgattttttgtcaaaataaaatttaattataatccgatctaaaagtgctatgacaaaactgtttacat

SEQ ID NO: 219012 - DNA, 5233 bp, Cannabis indica
agagagagagaagagaagagaaagaaatttaagtctctagacagagaaaaaagagagagagaaagtgtttgtttgtataccaaagggggggagtttattgggttttgttaaaagtccttttcttttgtttgtattggtgttagcaaaaaatcatcaaggattggagaaggttgaaaaaaaaaacacaaacaaaagagtcagattcttcttattctgatcatatatagttttttaactagtaatgagatttcttaaattttgtttgtttctatcttgtgtatctttttctctgtaatattattggcactgaatgagataattatatatattatgggtattcttgttggaaggaagagagctcttcttctgtattattattatgttgtacccttattattatttttattctttgtccaaacattttcacttgtttcggctctaaactacaccaccaaacagcaagttagtagtttgagactcgataggattcgaaggcacttggacaagattaacaagcctcctgtcatcaccataccggtatatttttctctttttcttttgtcctttgagaaatctgtatttatgtatatgcatgtgtttttttcttcttctataaaatacttatatatatatatataatgaatttgcagagcccagatggagatatcattgattgtgttcacaagagaaaacaaccagctttagaccatcctaaactaaagaatcacaagatccaggtactacttttttttgcatatataatgtaacaaaagggtgtacattattttttatgaaattttttaaaaaatgtagtatattttgaacagaaagtggcaccagaaatgccaaaatttaagaagaaaaaggaagaaaatgatgaaatggggagttcatcatcatcatcatcaaatagtggtagtagtaatgaagtgaaaggtgcaatgttaatgcaaatgtggcacacaaatggaacaagaagatgccctaaaggaacggtccccattcgccggagcaccactcatgatgtcttaagagcaaagtctttgtttgactttggtaagaaacaacggaacactaactctttattgcatcgccgccgtagagaagacgctccagatgttgtcagtggcaatggccatgaggtactactagtactagctagctatactccaatatcatcatcaatattactatatattattattatttatgtatacatatgtatagcatcaccataatataacatatatataatacccttaattggttgtgatgatgatgatgacatgaaacatgggtattaatgatcctatatttatgcaaattgccattcaatgttcattatctaattctttgcatctcattcaatatattggcactagtaccatagcatactcatcaaatcttttttcgaatcgcatctttaatggctcatttaattagtaattttttttttatatataatatatatttatataagacgctgattatatacattaattttttgcttatttcaaacgtaattgtacagaaatgttaattgccggtcgggtcggggtatgagcttcattattcatctaaaatgtataatgaatactcaaacttgtaacatacaattttgatcaataaaatagacagaattataccctaatataccgtttttttattattgaccatgaaaatataagataaatattatttaaaaattaggttagaacgttcattagattagtggtatatgattgagatttgagaagcagaatactttataataaaaattaaaataaatgcagtagattgatgatattgtttttgattggttttgggttggggttgcatggtaaatagcacgcgatagcgtacacaggatcatcagaagaagtgtacggggcaaaagcgaccataaacgtgtgggacccatcaatcgaagtggtgaacgagttcagtctctctcagatttgggttctttcgggatcattcgacggctcagatctcaacagcatagaagcaggatggcaggtactccttccatttccatgtcccttcccgcacacaatcccatactattattctgtatatacttatttcttaattataattaatattacatgatcttcattagaattttcttaagctttgattattctactagtcaggtcagtccggagctttatggtgacagcagacccagattgttcacttattggacggtcagatctctttctctatcttcctataaaatttgtcaaccccaatttaatttatttattaattattggttttattaattaatgcaccgaaattcgtaaatatttttatttagtcaaaatattcattatttataattagaatggaatcatttgggtatattaccatgtggtgtgttcccgtgtgctcaaattactatagtctctataggtcaaagtcaaccctatctatagctaccaatggatgtaatctccaatgtttcagatttaaaacgaaaaaaccaaccttggcttggaccttgatttattattattgtttttttttttctttttaaaagtgaagtatatcctgacaaaagtaaaagtaaagcaaaataatacacggaatgagaaagtcattatgtatattaattatgtactccatttaattttgtgatttaagtgattagctaacaagttttgtagattgtaatgatgaatgtcgtcgcataatatgcgtcactagattacaatatgtgtttttccaaaaagattacaatatgtttcttatataaaatattcaatagtttttcaaatttaattttagtatgaataagtaattttttgattatcttttatataaaattataaaaatattaactaatacatcaaaattaatttttactatctacctataataaaaattagcaacccatttcttaaagtattattataccatatttatatatcttatacccataaagttgtaattctgggtacttggtagaatgaaattatttcaaatttatttataaaattaaattaggtctatttaatatcatactgtctattttttttaatggattgtaagttctacattgccaaagtttattacattgtgattgtgacaatttagcaatgttgtttcagtttaagaaactatacttcgtaataaattcgagataatataatgttttttttaaacaataaaaataataattattgtctcctttgcttaaatttttacttttgcctataagataagtataaattatattttatttttactatttaaataactattatataaataatttttttaataaaaatactttttaaatatttgaatatcattacaaaatatattttttttttgagtaaattaagaattatataaattattttaattttaaaaataatttctaaaaaaatttgttggaagaagttacaaattctagtttttttcaaaacagcttttaaaattttttttttttaaaaaaaattatctaaatacacctgaaggactttttttaattgtaagaactaaaaaggaatttataataatgttagtttggctaattaattgagctgaaaaactacagacggattcgtatcaagcaacagggtgctacaatctcctctgcgcaggatttattcaaacaaatagcagaatagccattggagctgccatatccccagtttcttcattttctaccaaccaatacgatgtaaccattttgatttggaaggtacatatatttatacagctctctaatttttaatattagtttcgatatatatttactacaaaacatattttgtatgatccatatacttatttaatatttacttaaaaaaattctgaatttgtcactgcataatacacataggatccaaagcttggaaattggtggatgggatttggtgacaataccctagtagggtactggccggctgagctattcacacacctagcagaccacgccaccatggtggagtggggtggcgaggtggtgaactcaaggccgaatggcgagcacacgtcgacacagatgggttcggggcacttcgcagaagatgggtttggtaaagctagctattttaggaaccttgaggtggtggactcggacaacagcctcagctcggttagaggcatctccacattggctgagaataccaattgttataacataaagagcttctacaatgaccaatggggcacttacttctactatggtgggcctggaaaaaatccacaatgcccatgactcttaacattactactcctattatgtacaactattaatatttttcattatatatacaatattttcattattattgtcctctttaatcctcatcttctcttacattgtataattaactttcctaatttcaaaaatttccattatcaaaattctttaattctgtaattaaaaatgttattttcctactttaagttgttttgttttgcaaggatttattttgaacttaaataaattcaaaaataggctgtagttttgtttttattaattatgggaaaatatgtttagtttgtatgtacggtatatttaattaagtgcattatcaatttgttcttatgaattagtactaatttgctacttttcatttaaattttctattattgatctggataatagaaaaaaaaaaatacatcatattctctaattatgaaatatttcactcgtcttctctatcaacactgaagaaatagagtattgagattttcatccgatgtgttaaccattaaagttggtaaatctttattttgcagacagtcttgtacttttccgtaaaaggggctacatgttaaatgtatagttgattcatttcatgagttcaatagtagctttgggttaatagaaataaacacataacaaatatctactttgttgttgtggaggaaagggagacgcaaagctttaaagcaataataccacttgggaagggcattgttaaacattcacatagattatgaactatccaaacatacattaaacttgttcataatcattaaaaccaaaatctatactttatttagagcatcacaaatgtaaaacacatacctcccatattagtattctccatttgttgctaagacaccaaaactttcaattcaatgtgaataatcaccaagtttgtagaagagaacctatgagagaaaacccttttcttttcaccacacaccctctcttaactcatactaaacacatattacccttttttatatacaacacttaacccta

SEQ ID NO: 219013 - DNA, 2586 bp, Cannabis indica
ggagcatctagtcatgggaacgcgaagtcctgctcaccgtctcctaatgtcgtaagcatgctcacaagagcgagaggaacaagaaggatccatcgatgtctcggaagctcatgaagaggcacatgctcgagtcttaaccattaggtcacaaaagaaaaaccttagtcgccaagagcatcttctacaaggagcttgtcggtgtcatcgcccctctttgtttctccgcgagttctcctctccaactttggttgtcaaaagtggtttttaaatcagatgcagctatggtggctttagcacttgattagctgttgtgggctcgtgttgctagccctaagagagcctcagtggttgggtagactagaggctgtgttggcttcaacttttggtatttttgatccagtcaatatctgttatagggcggcatctattatgctcaaaaagtggttagccggttatcttgcacctttatatttggttaaaaaaaagattgtatcaaattttacttttagcctccaagcacaattgtaaaatttatataaaatttgatgtttgattaatgtttttattaaaatatataataaaataataataacttttaattttattatgtaaaacagtaaaaaataatataaatagttaatttaattttacaactaaataaaaataaaactagtgactttaataacaaatattgtgctaaatttaacaaagtaccatttttgtatccattaacataattttttactaaataagctatatttaagatttacatcacttgtttattggagatactcttatttccaaaatcaatttccaaacacgaaaacaaaaaccagaaatgatattgtagttgaagacaatggactattatcttgtcctctcaacagaaaaaatatttccaacaactggcagtttaaatccaaatatttaaaaaatatatatataaacatatattttcctaaattttaatgcctataacaaattcaagacaaaagaagaagacacggtgatattaatagtcatggctaccaattaattcatttataatcatatgtcactactcatgcagttggaataattggttgattgtattttcagtgcaaatcataaaataaataatattcaatggaaactcataccaataaaaaactcataatttcagcaacaggtgtgcgataaattcttaattaacacaaataaaatccaatgtcaataattgaatgctacattctagaaaagctcttcttaaagcagcaactaaaaactaggaacaaaatttcaaaattgagatcttcaattagcatgctgctaatcctaggtaccttgctctgctgcgaaaactcaagagacaaggttgtcagtcagtgacaatgcagccaaccgatcagttggactgctgacctgaggctgctgtgtctgttgagtgacattcctcaaaacatccatagcttcagcaactttggctttcaaggcatcaggagattcgagcaagtgcaaaacctcagtctggtccatttctagaagcatgccagtgactttagcagcattttcatgctccaactggtccacaagtgggtacaagttctctcccagcaactatacaagaaacgaaaatccaatgtcagaatagttccttctctatgatgttgatcaattaacatagtcaaaaacatagaatgaaacaaggaaatagtagggtaatcaagcaaacattcagcatattctgtgaagaagcagacttactgtcctctgctgttcgggtgtagaattggctagggcagtagccaaagcaccagtggacatgggttggttaaatgaagaatccctaaaaggaacaccgcccatattgtaaggaactggtagcatgccaccaggagcaccgccgatggatagatcaggcatgttgcgaccaggtgggaaacggtgataaccacgtcccctaggaagcatctgcttaccaccattgcaatcagagtatattaaaatatatatatcgaaaagggttttttaatattataagaacacataaaataaccagaacccaccattatatattgaaaatggtttttactctcattaaataaccagaaccaatcattacaagggtatcgtgactaaaagctagactacgtagactgcatattttacggtaaagcctacctgtggctgcacaagtggaggctgccgattttgttgtacaggccctgctccagcccgtctacccccaggacgttgattctgctgtcctggttggacaatgggcatgtaaaagtttggcctcaccccaggaagtaactgctgttgatacccaaagccgggctggaaaaaaaaagatggaatagtgatcagttgtcagcaatttaaagaaaatgaactactactgctgaaaacttactaaaaatcttgaattttagaaaacactattcaaaacaagcaaaagatgagctttttgtttagttgcagaagttagtttacctctaacaggcaattatcaattagacaatccacaagcaagcccaataaactatacgtacagcataagtaactagttataaaaaaattaggtaaacaagaacaagaaagatt

SEQ ID NO: 219014 - DNA, 7274 bp, Cannabis indica
caaatggaagagttgattgagaagtacccagttatggaacctgagaatgagagtgttcatgagattatggatggtttgaggttgaagttcaaggctgtatgtgcttcaatgggtgtgaaattggagtataatgggtacccaaaatcttcttcagatgcaaatgagatgggattttaacagtagaaaagaaaaatggtgatggagttttggtaatgtttaagaatcagttgtgtcaaactagcttttgagcttgtaatcaaaactacagtgtttgttctaattagattattgtctttgtttggaaaatgttatcttctttggtttatctaaatataaggttgttgtgaagattgccacttttggttggacttaattgggttctttcgtgcggaatcttaattaaaaaggtttgttcagattcgttgtctttggccacagctattaacaaatgaaggatgttctttaatgagttaggtgtattgcataggatgttatagctttattttctaaactttcgggggcaattttgtcttatgtagttcggaataagaattctacagcgcatggtttggtaaagcatgctcttcggttagacgaggagctatcctagtttgaggaggtgtcgctgccaattataaattgttactttattaatcatgtgtgatttgatcagtgcgtcaaaaataagtttgtgctgggcaattgaagttgagcggcttgcaaaggaagagagggtgtaagtgtgggtaaaggctacttcactgatttttcccaagagaaaatcattcaaagttacttgaagttggactttgaggatttattttaattttttattttgaatcacacataaaaaagaaagcattattctatgtaatgaaaacatccatggaatgaaatgttagagaatttcgctttgttatttatcatgaacacaaacatggagctctactctctcatgagtaaaccatacttgaaaacttcaattcaactcattttcaatctacatatttggtttcaatcaaatacaagtcctttttggaaatttattcatagaaaattcaaatttagttcatccacttaaaaattcaatgcaaaccaaataatatttttcaattgctttttagatcactcttgctctattttgcttgccacaaacatcttagacatcattgacataataaatatttatttcataatatgtaaagtgttcacatattatttctcaaaatttgataaaattcaggttctatgttggtgcacaatttaagctttagcaaactatctgagtgctctactcctctagcttgaataaaatgtcaagaaatttgaacttgaaagtattaatctataattgtttccttacagaaaattaactttcaaagaccaaataaaaacaccacttaagctgagcctgattctactttttttgttgctgatgaataagcctaattctacttgcttgacaaaaaaagatgtttttacttcaactttgtgtattcattctcaaactccttctgtaactgttctcttgatttggattttgcagccaacacaacatcatcaagaaatcccctttctggaaattcttctggcacgagagaccggtatgtctcaaactgctctgcagcctcttcctttttatcaagtaagctgtacacaatcccctgcaacaaatcccaaccatgttagttagttctacttcttagttcaaacggttttactatcgtctattttactgtgtatacccgattatgagaattgggaaaatcttaaaaatcatgagaaacattgtctgcttatcatgctacgaatatgttctcttagaacacctcaatttcaggagcagcaagcaagcaagcatatctcgaatttcggataagtttggaagtcacagattggagttctaatagcctaacaaaagaagagaaagggtaatagatttaagctaagccttagtttccaaccctatcattataatgtgtatcaaacttatacaacaaagaaaaacaatgtctcttcataatatgttctcattgcatggggtcatgaaatgatcactaactaaaattcatgtttccacaaagtcaactaactgaggagaattttcatggtgcattgatacaataccttcaatcattaacagagattttacaaaagaaaaataaaaaactcgaaatattagcagcgacaagaacaacattagaaagctcaccatgcagagataaggtctaaaatcacgatgatcctccttaaccagagtttgaaattccttcaaaccttcttccaatgccccctgatgagacacaagttttgtaacacaaattaacagttgctcaagcaactagaactacttaaacctaacataatctttcatatgagtatacaacataccattaccatcaattcaatttaaagaatacaaagatcacaagtcgttccaatccaaactcacccttacaacatgcatttgtgcaatcagaattcggatgtttctctcctcggtaacctttttttcacgccgagctaattctaaagccttattcagcatctcaaacactgctggaccttcatgatttttgtgcatcactaatgctagaccctgttgaacacaattattaagtttttcagcaatgacaatttggtaggatagaacagctattttgctatcagcccaaaaccatcaatgacactttaattaacaagagtaaattttatatatataggcaacaacaaagtatatagtaattgcaacttctcaaggagctcaacaagtaatagtctagttatttcaactcaactaatccattaagaaccagcaacctcatttcatcaacaaagactgaatttttaaagtggcaaactatatatacaatccaaatacataagagcaacatttataagttttaactagagagttgcaaccaataatgaaatcataaaagagagaaaagaccaagaatcatacatgcaaagctctaagcaagagaggcctctgtttcaagatttccttgagcaatcgttttgctgtactcagtttccccattgtctcataagaaagtgccagcaaaagcttccattcaacttcctgtggttccaactcaaccaacctctccacatatttaacagcctcctttgtgtcccctctcctcattttctcatacaaaaccaccattaaagcttcagtattattcggctccttcttcaaaacctcctggtaaaactcttccttttcaatttcttcactttgggtactactagagctggtcgtttgagcaggtaataaagccaaagctggtctcatactaaaaaacccaataaagaaagccgtcccaactacaaaccccacaattttttccaggagaaatcgatgaaaactatccttgggtgggagaaaacagctcaagtctgacccatttgagaaatgggtcttgactcttgatgggtttgtagaagttcggagtataaatggtttttgtatgtggggtttagggaaggagggtttaagagacttgaaatcaagcttaggattagaaaagagcttgggagtagaaaagatggtagtgtgagagcaaagagataaagcagaggaaaaccccataatggatttcaattttcaattcaattattattcagtgttcacccatttgagaagtaaaagctaaggctttgccggttttatgacgaaggagacgaagaacagaagagcaacggcgactatggtaggcacactgtgagaggaaattcgcctttaatttttattttatataaaaaaattaaaaataaattaaaattttaaatattaagaaaaaaaaaaaattaaaataaaaaatatataaaaaaaatttacaaaaaaaaaaaaatatatacataaattaaaaaagaattatgaaaatcaaatcaaaatacatattgaaattaatataaaataatatgagaaaaagatttaaaaaaattttaagagtaatttttaaattataataggatatatttatcattttatggggtacaaataaaactattattttttaattattttaccaattttgatttgccctaactttcttataaatctacatatttatctccaaaaaatacaatctattatatttaaaactatatcttaattatgtaaagatgtgagaataatttaagtacaatactcataaatagagatatatttaaattaaattttatttaaatataaatttagttaatgtatataaaaaaaaatattcgtcgatattattattattattgttcaaaacatattgttcctataatattattattttacgctataagcttttaaaatttcaatattaattggtcgatattttgagattagggcttaggtaatcccttccttaacttatataaatctcctaaaagaatgaccaattgagataaatcataacaatggtcagaaactccaaaaaaaaaatatgcaatcaaatatatactatatcttctcctaaaaacatattgatgttataaaatgtataatatgagaagagaactattataaaatttaaagaaaaaaaaaacaaaattaatacaagacactaataaaatcaagagtaatttatggtataaatatttaagttaaattcttagttataaataaatacttaaatttaattttttacggtaataatacttaaattatatttttagaattccataggtacatgaccgttaaattatccacgtatcattttttattggtatatttaaattaatttttttaaaaaataaaaatttaatgactttgaacaatcaagaattatcacgtgacgatttacttaacacttaacagctaagtacttacaaaagttcaagaattataacttaagtattattaccgctaaaaattaaacttaagtatttatttacaagaattaaacttaattatttatgatacaaattattttaaaaccaaacacccaaaagtaataagctacacatcctttagggccttaggttagttataaagtaaatttcaattaatagaggaaaataaaacaaccaattattctactctagcaataaatagtagtagtatcattgactgtagggatgcacacgggacgagaaattgtagggagtattctctctgtttctatccctgttaagaattttaatctctatttctattccatctcgtttatttctcgatggaacaggacagagaatctcctaatgaagtagaaaatcccctaatataaaaatatattttttaaaaaattaaatgtataaaaacattaaattatataaaaattaaaatatcacatcttatttattattcaatatattaattattatacaaaatatagcttaaaaaattataaaaataagactaatatatctaaaaaaatacaaacacatattttaaatattaataaaaagataactaatatattaagcaagtccctgtcggaacggggagtgtcatcactgtacctgtctcgtttaatatttagggacaaaaaatgatcttcgttccagccccattccctatttacacagaaaatctctatcccattaaaggtgagttctgacggaggcccatcccatgaaaaaaaaaatgtgcatatctaattgcatggcttatattttccattaaacattatatatcaatgtgttggcttttgaatttttgtctcaaatatttaaatatcccatattaaaattataatttatttgaagtatataggaatatttttttttaatgtttaatatgtaatagaagattctataatggttaggctgaaattctatgtcacaatttctacatctttatatttttggaagataatttatataatgcttatatatatagtattacaatcaatttcttagtttaatgtttcgttgtcctcaaaaatacatagtagagtatttttttttatgatggcttttgtacgtacgtagttatgatatatttttttgtataatttttttaaaaaatataaataatttataataccgaaaaataacataatatgtaaaaaaatattcaaatttgcatcaaattattaatgtgacaattgtgagataaaagagatctcaattcaatgccacaacacaacttacctactcaactctcataaaggcttgctcaaattaagcatgtgactatttctcattgtgaccaatctataattctataaaggttataggtaattaacttcattataataataataataataataataataataataataataattgaataaatcatgaaattttattaacaataattagttaaaataatagcatacaatttaattgaaacatttctcttgttagaatgtgaccaaaattaaaattaaaaaaaaaaataaactaaataatcagttgaacacttatattttatttcattcattcttcagaagacacaactgtaaaaattactttaacaagttcagcttcgtagcttgagcacttaactattatgtaaggtacgtaattgcactactaacaactcctttagtcgcaaaaatttattattcctaaccactaatagcgatataatggtgagttattgaagtacaaagaataactaacaacgaaacaaaataaaaccatgtcacatagacaagactaaaatacataaaactatgtaacacatacaagactaaaacactcaaaaccatatcacgcagacaaggctaaccgcaatagcaaaacacaaccccgatcaaaatgtacctaagcctagagaaagatggcgggccaagtcggagaaaaaaacaatattccatagctataaatttaggaagaaatttagattcttttattaatagtacttatatttttattattattattattattgtcaaagaaagaagaagaaattaaatagctagctagaggtccacgtgtccaaagatgattcgttttcgttctattatatatatgcataagaaatgttgagattattaaggatcatatataatatatggttgtttaattttactatataatatgtttgttaaattatgaagttttaattgttttaataattaagagatgaaagaagaagataatattaatggtagaatatgggactgtggtagtcctctatatgattcttatgaattggcttctatggctcatctttttcacaaccatactaacatcccatttttctcatcttcaacttctaatggccgccgttttgatcaacatggtacaaacatcatcatcaaacggccagattcaatcttggatcatcaggtaataatgtaaaaaggtataacaacaac

SEQ ID NO: 219015 - DNA, 3407 bp, Cannabis indica
aactcaaccaatgtcaaaagatgattgccttactctcttagaaggttcaagactactcttccttctacatctcaatctccttctcctgattaacttttggtgtcacactccaccggtaagttttcatctttctctacatgcacttggattcttgacccaggtgtcacccatcatgtgtgtcatgatttagccttgtttactcagacatatactcatgcttctttatcttcaattgcattgccaaatggtaaatttgctataggtttttgcattgacacgatttctatttcccatctattatattaattgatctccttcatatttccaaatttcattataattttatctgtgagtgctttcacttactcatctcactacactttcaatttttttataacaaatgtgtcattcaggacactactcagaatcagatggttgatcaagttgtaaaattttattacttacacactttaaattcaaatttactcaataaaactcgtcacttatttattttctatttctaaaacttctaatgatattgtgttgcattaccaattggggcatccctcctttataaagattatcatcctctcaataaagaattacatctttcttcctcttcttgtccttatttctattgttctattcgtcattatgccaaataaaagaaatttccttttatatctaatcataatatttcaccaaattattttgggaccctttttagcattaacagttaccgatattttataaccattatagatgatttttcttgggccacttaggtttattttcgtaagtaaaagtctaaaacatagcaagttatccttgcctttttaactcttgttaaaactaaatttgatgtccaattcaaagctattcgattatagtgcaaaggaatctcagttccctacattattcacttctctttgcattattcattatacttcatgtgtctaaaggctctaacaaaattttatacagaggaaacattaacatctcgctagaatcattcatgagttaaattgctttcgaaagctggccggacaacacttattaagtctgtaggtctcttgttacctatgtatgccatgtaaactaccaaagtctctaatcggctggttaccaagattgatggtatggtctatgacttcgggtggggttttgagaaggggaaccatgggttacacatgaaagcctgggataagctttgtcttcccaaatcaagaggaggccttggatttaggaaaaaaaataaaaaagatgaatctagccttcctggctaagtggggatggaacttatttaatggaagtcaatctttgtattgtaggattctggaagccaagtatttaaaaagggaaggagtttgcaagtataaagactcagactcctggttctggaagaaagtggtgaaagcaactggtatcctctaaaaaggagcgtgctaagtggtgtctgatggcaaggatacaagaatttgggatgatccttgggtgacacatggaacatctttctttcctaaatcaaatgggtgttcaacaattgggttcaatagggtggtagaccttttaactagttaggggaaattagacatcccaaaattgacaagcttgtttgatcatgatacaatagctgcaattctaaaagggggaaatctttctggtaatggttctcataagtggatttgggccaaggatcgtaatgaaaggttaacgtgcaaatcggcctatcttattcaggctttatagagagctcctaatagtgatgttgccccctctctttggaatagactttggaatagtaaaatcatggagagacgcaaagttctttggtggtgcattcttttgaatgccctccctcttagagccaacattaagaaaagattccatattgagaaatgaactaccctttatgtggatgagaagaagaatctgtagagcatttgttccattattgtgactttgcatttcacctttggagtatcgtccctctgggggatttatcctattactggtactgacattcgtgtctgggattgggttaaactcgtgtgggggctcagttctaaaggtttaaatgttgaggaagtctttatttatgcgtcagttgtggcggatactatatggcgtgccaggaatgaaaagatcctcaatattttctttcttaactcgaataattgtattgactctacccttgtgcttttacaaatttgaaaggtactttgttacccgctgtgacctcggtccagtgggaagactggcgccatcctccccgagattggttgaagcttactgtgatctaagagttggtttgggtagttcctgtattcctgtggttgctggaaaccatttggatgaggtggtctacgttcattcggctagactggactatgtggacgctttttgtggtgaggcagtggcttgttgcctagccttggatattgcaaagctcaacattcacaagttcgtcattgtggagagtggctctaggatcgtgatcaactctctcaattgtgtttcgtcttgttgggagattgagaactactctaattgttggtttgagctctctagattttttgatggttgcttgtttttgtctattcccagaatttttataattttgttgcccataatgtggctaagtgagcctttacccacaatcagtttggttgcttacctatttctcacatttcgaaaggcttattttgtaatgaccatgaggtctaattttcttattaatagacgatcatttaaaaaaaaatagagaaaggaagaaaatgtagtattttaattgttggggaggaaaaaaaaaaaacccaaaacgttcaaggcatatatacaaaatgacctctttactttagccttattatcttctttagattttcaaatccatttttctccatatctctcttccaagtacactaattcatcataatcgacaaactacaaatacaaatcaaaatacacttgctactagtcaaagattgtcggagaaaactaaattggtgaaatatggtacaacactatcgagcaactctagaaaataaaagacccacataaattttatattattttaatctatgtcattgtcgggcactagagaatcgctaaaaggcgttgtgtctagcacttttctcagcgtcatactcttattttatataacttaaggaaataatttttatagaatattgctaaccaatcgtgagacgctacttataaaaggtgttagacactacgagtacctaataacaatgctttgattactaagggcgatttcaacttcaaaggctttcagtgtgagcctccataattaaaggagaggtgagagaaattcaaccgtttcttgtccaggattatattttttgagtgattgccacctgagaatttagtatgttttctaacttatt

SEQ ID NO: 219016 - DNA, 2828 bp, Cannabis indica
tatacttttgtcaagttgtcaggccataatgttcttaatttataaaggttttactgtaacaaacactgcatgctggagtgaaccgacaattctgggagcagaaaagatggaggctcaaaatcaatgctttaaaggagttcccatcataaggcacaaacaaacttttactaacccaaaaacaacaaaagtcaactcattggtgccaacatatcacaagcaaagttaaccatattccgaaaaaacctagcatatacaaaacaattttgtaagaaatataaaattgaaacacacacaagttgagagaagttaaaaacagatgcagaaattaaaatatgacacaaagaaagaaagccaaaataaaattaaatcgaaaaggtaaacaacaatatcagagccctcagatctcatttgcaaaattttcaatcacatcttccagatgactcaacatcaaaccactacaaccaccaccacagatattcaccgcatccaccataacaaaaagaagaagaagaagaacaacaacaacaacaacaacaccaacagcaacaacaacaataataataataataataacaatgatgagtaatgatatccgcacacatatgtacgcaaccatcacacacaaaacatctggtggcatatggtgaatatctgcaatagtaggagcggaaagacagaagatcaaatatacaaactcattgcaacaatatgtcatcatcaggcattaagggtagaaaaccaaaacctactttgatgtaactaagacaatcaatactaaatgtcattagaaatatgccacttaaggtcttcaataacagataacataatatctagaaacaaacattattatttggtagacagagccctcagatctcatagttaatctcatcaacagtacaacacgagaattttcacaacgagccttcttacaatctagccaccctacgagaaacagtagagtgacacagagagatcacatatataaaattatgcgaatatgaataaattatatcaataacgatatgacatgtcataagataaggtaccttacagcacagaaagataatgtgaagagagagatagagagaatgacaaatgtaataaggctcgtgatgtaataccatgaactgcttcacgtgagttttaatcatcacaggggaaaactagatgcaggaaacatctttaacatgtacatgcgatgccctcagagatttatagttaaaaagtttcaaggatattgtaaaattcttttaaaagccgatcaaatcttcagggtttaaacaccgccactataaccaacaccaaaagcaaacatagatattcaaaaggggaaccgtggcgtctagtaccaccacaaagtgtgataacgctattggtacatgtatcaaatcctacatacttaataataaattgtactgaagatagttgaagcagaaaaaaatgtaatcacagggagctaaaataagaacacaacacccgatttttgtcgtttagtactcttttgagatacctacatcaacaggaggaaacagccttactggcttagcttcttattgataaacggccaatgtacaactcacaaggatggctacttccttgaagagaaatacagaacactctgatagacctcacttaacatatgtatatgctagaacgcacaggaaatctgacattgaggatgatgtagtggatacaactctctaattctgttatttgggcattgtttgggtaatgcaggggtacaccttaagtcctaggggctaagtataaataagagatttattttactttggggggtcgctagttattgagtaagaaatcttctcttgtaaggagggtccaagctctcgaaactcctggttattatacgaatacaaacacaattttccacaacttgttctccgttttctccttaattgcttatttcccattttgatatattaattcccatcacactcttgctcccaactaaactctcatactctcccaaaagcaaacctaaaaaaagcagctattacatccttctatgatgttagcaacaaggaataactaaccaggatattaaatataaagcccaccacggaatagctatattttgtctacttatattaaacaaaagcttcacaaaatatacagtgttgtcattgcccatgcttgatttgaatgaagcaaaatgcatccaatgatttcattataagagagaagaataacatgcaagtaattagaaacaatttgaatgaagcaaaatccatccaacaatttcataataagagaagaaaataacatacaggtaattagaaacaatctcatacgacaattacaggcaagttcagatatgtatccaactttttgcctaaaaaaaattcattggacattgaaaccgtctataataaacaacttcttgagaagaatgtgattatacaatctaacaaatagatacttgtcacagtaaaagagcattgtaaaacaaaatataagactttaatatccaaaagagtaaaacctttagcaataatgtactaaaaaacatgtaaaacatgtaatgaaatttgactatgtaaaacatgtaatgaaatttgacttagtataaataccccatagctatataaaagaactatcccaacacataaatatgccctcagagaagaagaactagagatatcatcatgtacattgaaaaccaatcacatcttcaaggtttaaacaccaccacttcaaccaccatcattggcattcaccacatccaacagacacaagaatcatcatcagcatcatcatcattgtcaccgccaccacctccaccacatgagaaaataataataataata

SEQ ID NO: 219017 - DNA, 3228 bp, Cannabis indica
aaccatgcaacataaaatgttattctgatatttattaataagtaaatcttattatattgaaatgggttttatttagagcacaaaacccaacaagttattccttcgatctcagttaatttcattttaaggaacctaacattgttaatgaaattctatgttaacaattttgtgctttcattgacagcctttgattgaaattaaaacttgaagaaaacacatctcctcagaaaaatcaaaacttcctcataatgaaaaacgctcaaccagatgagcgagtaagggaagaggaaacggtgcatcacccaagaaaagaaccccaagaaacttagactcatagcagaccaaatcaaggagggggtcctacaagaagggatttcgagagggatgttcatgaagaagagattttagagaggaagatttcaaatgcttatgaccccacgaggtatgttccaattgtaaaatgacttaaataacttctaatcttctattgataacaaataagataatattgaaataagttttatttagggcataaaatcctaacaagcacggtaggagaaccttgctatctagcctccgaatttcttcttcttattgattaagtcatgcttacatttctacaaacccttacttccaatctagaggagcctgaggtggactccttttggctaactctttgagatctaccacggcctctactgcatccacagggatattgggggttttgaccacccgaccacctctggtctcaaccatttcaccctaacttcttatgtttcactggacacccatattatgggacttagcctcgtttccataagttaggtaggttagataacgatcacatatattcctaatatagttttcatggattttaggcaatatatttaaacaaataacatgtttcctgtcatacttttcaaattaaataaattactaaataagtaaggacttactaaaccgtgagtagaacttatctctgatgatgattgtacatatcttaatggtctttagtaaataacttagtggctatgataccaaaaattgtaacgccctattgcttgggtgcgctatagtaattttctcaaaaatcgtgataaatttaaacttttaataaagctttaacttttataattatatatgcatacataaatatttatacaaaaatacaagattccatcttaaaaagccatattcatatacaaattatatttaataacatgtcgcatagcgacaacaaaataaatcttgaattgtcccgagaccaaactctctaggtcgaaccatcttgacatgtacaataattgctgagttcttaactcattggttctcaactttagcctttccttaaactacatattgcaaacaacacttgtgagttgacagaatcagtaagaaaagcacaaaatatgaaatgtaatgttgacttgtatctaggtgcccatacacctatttacaaggcttaacagatggtcaataacattcttatcagaagtacgacttctataccgcatgcacttaagtactcctcccatactagtgttggtagagttgaaccgtaccctcaggtactaatgagtgttgtaccgcatgcacaatgtactcatcccgtactagtgttggttacactgtatcgtacccattaaacatcatatactataccaatacactctgtatcactaccgtactagtgttagtagtatatgcatcacataatagtatgcaatttacatacatacacatatacatatacatatcttatgctagtctcaccttgcttccaaattcaagtgtgttagtcgacctgaatggaaaatcatgcgctgaacagaggcccaatgtcagaatcacataaatgggtaaaaaacatgctaaaaacttctcatgaacctaaactcaaaattagaagtttccctatcgataggctagtttctctggggttgtgtgttctcctttactgaattttaccctgcaggccttccctagcacacattcattgcaaaattctagcctttcttgccttttttccttgaacaacccttgtctgtttaattcttcaagtcccctttggctcacatgtccaagtctaaggtgccaaagcctacttcgacttgttgtagggttgagtacagcaagtactacactttcaatgattattttgccatctagaaaataaaggccattgttcagttgacctttgataagatcttgagatccatggccaattctcatcactccaccttcaatcttaactgagcaaacattctaatagacagtaggtttcttttatgttcagggacatacctgacttgttgaagggtttgcaattttccatcatgagtttcaatctaactgtgccaatttcctaaattgcacatgccttgttattgcctaggagcactattccattgtgttcttctaaaaaaagagctaagtagcttccatgtttggtgtcatgtgaaatgagcagcctgagtcaagcacccattctccacctgagtcaaaaattgatgccaccagaacatcaactgtctcacatccatctttaagatcagcttccccatgattcctggttcttgattgttgactatccctctttagttttactttcaaaggcagacattcatgtctgaagtgtccctcctttttacagtagaagcactgttttccagtgttgccccttgaattgaatcccccagctaaaccctttgcaccagttctaggctggtttgagttgtgatgattctgatttcccttctagctcatggaaaattttcctttgataatcaatagtccctccccattgctatgcccaccctcatgacctttcttctgaatttcttttgaattgagtgttgccttcatttttgttatagtgagggtgtccttaccatacaagatggttgtatggtatgaacaaaatgttcatacattttgggaagagaactaagaagtcttatggcctgatcttcatcatctattttgacaccaagattattaagatccaagataatcttgttgaaatcatcaagatgcttcctcaactctttggtttcatccatcttaagagtatataatctcttcttcaggtatagtttgttggctagtgatttcttcatgtaaattgaagaaagtttgttctgcagcccaagtgccttctcttcatcagacacttctctaacctcatccccaaggctaagaagaatgtgttgggatttatgccctaaa

SEQ ID NO: 219018 - DNA, 6137 bp, Cannabis indica
tagagagtatcttgaagtgacaggggtaaaattgatatagtgtttaaaaaaagaggtaaaaatgatagactttaaaaaagaatgtaaaaataaaagaggacaatataaaaaaagtatagagtgtaatttcctctgaaaaaaatatatttcagcaaagaaagtacaccttattttggaatttatattgtgcttctattgtttttttctcttttttcttttgaaaatttcgaatcttataaaataatttagataacatattttctttatttaacaaagttaatagagtattttatttaataaatttcaattacactcgtaatatttatccaattactctacattgttttaaaatctaaatgtataaattctatttttcttttcttctttcaaataattaaataaagagctttcaaaagttaggcataaattaatagtattataattttcttcctaaagaaaaatatcattatttttttttttgcaaggaaaaatattataaattctaatctctttgtgacaagtgtattagaaactttattatttattagattgagagtcaattaacaaaacttaaaaaatagttatgtggtgtgtttatgagtatgcttacattaaagtgatatgatcgtgttcttgataaaattgtaattataagttatttacattttttgttttttatttatgtttaataaaagaaaaatcactgttattttttttataaaaagtacaattttgtattgaaagtttttttatatatatttctacgttattttataaaaatatatataaaaaaaacaataaaattatatcaaaataacaagaaaataacactaaaatagtatatatctcaaaaaaaaaaaaacactaaaatagtataaaataatatacaaataataaaaaaaattaacaataaaataattaaagtacaatttaaaaatacattaaaaaccgtattttatataaataaatattaaaaattctatacaattctattttttgaattattttttatttttaattatatatgtacatacgagtatttttggttgtccagtaatataatatgtgacactgattggtttgggggaccattatattggtataactggacggtcaagatcaaaatgaaacattctataagccgttagatttgacacacctaatacatacaacaccatgaaaagacatatttagtagtgttcaagccattgacgtgcagctttcatggccagaatttcccaaaaagaaaacctcaaattatttattattattattattttatattaatacatctaatattttttttttcaaaaatataaatgtgcaataaaaatatacatataaacaattcatcttatcagttcattctaaaaagtagataattgtgaatgaattattattattgttattattattattataattattttgatattttaaaattattggttttctttataaaatcttcaatgtaaatataaatacatatgaatgaaccaaataggtgaccgtttaaagtcgttacttttacacaatgtctttagtaaccaattggagactcactgttacagtgccactcccacaaaccctgaaatctttctaccccagatatggaacccgggttcgttgtgtggctggagaagctttgccagaccacattaatggagggtcaaatgagaaaaagaagaagaagaaggtagttgttgttgggtctggttgggctggactaggagccgctcaccatctctgtaaccaggtaataattacagttcttggttaattagtttcgaactctatctgtttgatatttagtctcgctgaaagtttgagttttttttttggatttttatttcaggggtttgatgttactgttcttgatggagataatggttttggtggtcttgaagatgttggtattcgaggtaaggaagctttcaaggcttgaataattacttttactcaattgggattttgataaagattagtgtgagataatttacattttttgggagttaggatattggaatccgtacagaaacatttatagccttgttgatgagttgggtatcaaaccattcaccaactggacaaaatcagctcaatattcggaggagggacttgaggtagcatagagcttagttgcttttaataagagaacttaagttttcttcccaccattaaaacataaatgattttatgattgagttgaagcttagaatgagaggctggtcatgaattttcaggttgagtttccaatattccaagacctgcctcagctacctactcccttaggcaccttactctatacccaagtatgttttgcttcaatccttttgattcttgtctttgtatttctcttgcaattgcaaattcagcattgttgatctgattaagaaaatcaaagtatttccagtgtttatagcttgagtatctctgtcacttgtgttactcaataatcactgcctgttttgcagtttcttcagctcccattggcagatcgattaacttcacttcctttcatggcagcaggtatgtagcctactaagtccaaaattctgatactgaaagattgaccaaagagactttttcattataggcagagacatttactaacatatagcttttctctatttcagctattgactttgacaacacagatacagcatggagaaaatatgattccagtaaggatttttattgcagtatcataacttttaatcaatagattgaataaaccaaagatgaattgttgggatttcttatttagagatttgattggtagttaccgcgagggagcttttcaagcaatttggctgctcggaaaggttctataagaaagtgattgggccattacttcatgtcggtctgtttgctccagcagagcaatgtagtgctgctgcaactctgggaatgctgtactacatcatccttgctcaccaggtttgatgagttcagttccttttctagatttttcataaagtcccatttgaatatgaatatttactttttggtggatgtagaaagattttgatgcggtgtggtgtcgtgggactgttagagaaaagatttttgaaccgtggattgactccatgaaagcaaaaggatgtgaatttgcagagggtagaaaagtaactgatttttccctcagtgaagaaacaggctgtgtttcagcagtaacttgtggtaaagaaatatatgatgctgatgcagttattttagctgttggcatctctacacttcaagatcttattaagaacaggtgtgttgtgttttgtttctctttcgattgttgcattgtatgcggctgacaccctttacagtttcatatttgttctagctataagccaatgctaactgtggaagaactatatgtatagtgcagtgatgtgtacaagagaggaatttctcaagattttgaacttaaattccattgatgtactaagtgtcaaactttggcttgataaaaaggtgagtttttcttgatagagaaaaaatgtctgaaataactagaaatcaatcacaaatgatctgcattattatttaagatttttgccatgcttcttgaatttttctaaccgttaaaaatttccttaaattgttgagatttttagatttaaaaacttttgtctaatttcattcaattttactaattcagttattgtttatgtactaaatcatactccccaaactttgatatctacaaattatgtactctgaactttcaactacgttagatttttcttactaaaattagacaaaagtccttaaattcaacaatatcaatattgcaggaggaattttgaacgactttaaaagttcaagagacatgatttagtacatattaaagttcgaggagcaaaaatcctaattagccttgttattttaagccttattgtggtgaaagtgtttaagtgtttctctaactaggtacaaagaacaatgctcattactttacaggtaaatattccatatgcaagcaatgcctgctctggattcgatgcttcatttggatggaccttttttcacttgaatgcaattcaagacgagtttaaagacaatccagtctcggtaatacaggctgattttgtgagtatcgaaacctttccaatcctaaagaaattctttcaggcttattatatagaaatatacaccttatggcttatactttcttctatcaaatgtattttgggtgctgcagtaccatgccaatgagttattgccgctgaaggatgagtttatagtttcaaaagctatgtcttacctcacaaacataatcaatggcttggagaattgtacaattacagagaaagagattaaaagatttccaaaatccttgccacacttctttcctggtattcctttctataagactattcttttcaaacatatacttacattcataatgtacccttatattatgtttggtaggaaagatttttaggtgggaggagagaataaatcatgtgtttggtagagaggaaagatagaaggatacattttcccttcaaatgtacaaaatctaaatgacaaaataaagtatatcaaatgtcctaaatacccttcataacaaataaataataagctaattaggattttcgcccccagaactttgacatgcactaaatcatgtcccttgaatttttaaggctaaggaaagtctaatatggatgaaagttcagggggtatgatttggtacatgtcaaagtttgagaggcatgatttagcgcacaaacaatcaccgaattagtaaaactaaataaaattggacaaaaaactttaaatccaacaatctcaatagctcaaacgaaatttaaacagaaaaaaaagttcagtaatgggagacttgttatcctttccttccatcatccactcgtctttcttaaactctccatccttcctaatttccttccctctcaccaaacacagtaatgggattgattgatttatgataacaggttcatacaagttcatgacacgtagtccaacctctttcccaaacatgttcatggccggagactggatagtaaaccggcacggttcatgggcacaggttagaaatctcaacaaactttaactactcttttgagtcttttaacatatagagtaaagagtagttatagaaagagacaagagtagaggaatgtacagttttggattgttttgtttgacaggagaaatcttatgtgagtggacttgaatctgccaaccttgttgtggattatcttgaacaaggaagcttcgctaaaattataccagttgaggaagatgagcctcatattgaagctctacgcaccctaaacagaagaattaaggaacttacaacccagcttccattatcagattattttctttagttagagataattttaaagaaaatggttgtaggaaattttaaatatttttcagatttttataattttatttacaaaaaatataattgtatttttatgatatattcttatttatttgttatttttgtaattattttgatgctattttacttttatatagttttattttttgttgtttttattaataattaataaattattaaatatggattataattccatattaaaattataaaatattgttattagttattagtggtgtccaacactttttataggtggtgcttcatgattagttaacgatattccttaaaagttattttcttaaattatatggaaccgcatacttaattatatcaataatatgacaccgaaaaaagtattaggcctcaatataccttttaacaattatctaaattatatcaatgcgtggtattttcaatgcccattagcttttacaaagaatttaaatagaatataattttgaaaaaataacttataaaaataaaaacatatatctagttttgttatataaattactaaaatgatatagtgtgattatttatgagccaacatgattcatgtgaatgaaaaagacagccactttactttttaacaaactttgcactttcttatcatattccttaattgggtgacataataagtaactatttaggaaagacaaattgttttattattcaaccattaaaaaaaatttatcctatatactattttttcaacttttttttttttaattttactagttttgtagtttttaaagtggtt

SEQ ID NO: 219019 - DNA, 3864 bp, Cannabis indica
cttccgaggagaaccaccacttgttcttcttcttcttcgttccttgaatcttactgaaaataagtaattaaaaattgacgataaatcaatgaagatgaagtcaataaattttattagtgttgataacgaaccttgccgaagaaacctccgacgcaacacatcattgaatcgacgatcggagccatctgtgactgatttaggactcattttccccaattgatcaaagaaatagcacttgcaagcggcactttgcggaaacaaatcgcattgcgatacatctgaaaccaaacaaatttgaaaattaaaaataacgaaaaaaacagatagagaggaaaaatagtatgaatatgaccttctgctagtctgagatcttctctgagtctcaaaagctcttgctttcgctccttcgcctatatctccaccattgcagtagctcaatcaggctctttcagcctcaaaattaaaagagagcaaaaaagaaaaccgaaaagaaagatgtgtccgcagttgataaaggtattttaaactatcttggatcgaatccggagtcaatatttcacatttcggaaatgaaatcggagataatgaaacagtaggaagaagattcctaattaataagtttcgtggactttctcactaaccaaacaggacagagactaaaaagtaaaagtattgatttcgaaagaaataaacctttcgcttccatcggagaacgtcggagtcggaagcggaaggattaggcggctgattttggggaaagaacttggatcggagaagagaaatggctaacgccattctcagcttcggatcgtcccgccctgtattatctcccacttcactttcacttgccatttttctctctctaaagaaagatatagcgggaaattataacgtctattttatgtatttatactttccaacaaaccttttgatgattgctcaacgaaacgacatgcttgtttcttctttggtttttgtcgttatactgaaatggtccaatgaacattttctttgtcgtttaagtgctaataagaaactctgtttgtcgtttaagcataaaaggcaaaatctttaacatgattatatcaattacaaatccctatgctacaagggtaaattatttctttctaaaagtgattattttttttataatgatggttttattattattaaaattttataaatctcttctttataatattaaattaatcaagtctattgcattggtttatattggtaatgaaaatgctcatacttcatatggggaaactcgatgtccatttgagtaaacggtgcagcatattgcttccattttgtaattctttttgttcattgaagacgtgtgtgtcctcttgagccatgtaatgaaatagagatggtaactagttacaagttagatatagtttagtcagctataaacaatgcatgtcgtttaaattatttaaactgataaacgacattaagatagatccttaagtaagcaatatatgtatataattattaccaaaatcagggcattcaattagtatcagtagcaatgagtaccgccagaacagagcatgacacgaacacagaaccctaactaatgctaaaaggttctaatagtgcctatcaatatcgttattggttaactaagtatcgagtaccatatagtttaatataataacttctaagaaatatcactaactaatcacaatatgacatgtctataagtactaaacaccaatgccaaatagcaatgctgttatcaaaaacatactaaaagtaatgattcccactcccagtaaatttgctggagatactttaagcgtttttcttttcgttcactaattgatgtatcaagcaaccaattcacacgaggcaactaaacccatcaaaatcaaatcaattttatagctacatgcagagtcaaaaacaatcatcttaacactgtgtacctaccagcaaatcagacagtttaacaaggcaactaaaccccatcaaatcaactcatctctatagtatatgcagtgtccaattcacactatgcacctaaacacataaaatttcatccaaatcaacacagttctatagtatatgcagtagtgtcaagcaatctattcacactaagctactaaacccatcaaaattgcatcaaaatcaactcaaccttgtgaaacaatatattcacagtaggcaactaacccaacaaaacttgaccaaaatcagagcagtttatacaatttgcatttctcttcttcttcttttttattaattccagtttatattgaatgaatatcacaatctgtacaccacaaaggagatgatttaaaaggcaaggaagtgttacaacaaacttccaacctatctctgaatctggcattgcttgtctttaacaatataggcaaaggaaaacacacacctttctctacacaactctggtgtctaggcttaatcctcttatccaagctgaaagagaagtactgtggaaactccttcaactccctcaactctctccccatttcaaccacgaagtaatcaaatttgggttcaaaattctctttaatactgtaacaaaacagctgaggaaacctcctaaacatggacaccgcgtcacggtgagaaaacccaatcttctccaaatactcgattctgggcaagaatttttcctcgacggaacaggaaagcaagtcggtgtgtttgttcacctcggctattccaatgctctggagaaagtagagagtgggtctgagcctgttcttgacactacaaccgagcaatctgggccgtcggttgataacccttttgagatcggagccgttgacacgggcctcgcgagtgaggaaggtgaatactgggacgacgtcggagaccctcgaggataaaacatcagggcacatacccacgacgcggcgaaactcgatagctgtgaatccgacggttgagacgacgaaatcgacggtggatttcatgtcggagagtgggaaggttaaaatcggtgggtggtcttcgataagagagaggaagtcgatgcctattgagtccaaataaagcattttctgttcaaagtccgaagatgaagtgggctttgaagggggaggaagagtggtgtttgttttggtggaaagggagggaaaacgggggtttttgggttgagaaagtgagggaaaatcatggtttggagggagagggagatggggtctggaagggttagaagaaatggtagctctggtgtttgaaatggaaatggaaatggaggagaagatttgggtttcttgcatttggtggtgttttagagttgagtagtagtagagaggttgttcgacctcttcttctacatagtgatgatggcgataatggcggtaatggtggacaatggataagggtggaaagagcgtttttatctatataatatgctgtgtctgttctatctgtttgaaatccaagggagtgttctgaagaggtttggattggactttttttgtggtaattgataagtaagaaagagactaaaagaagaaaaagtggagaaaatgaatactgaatattatctgggaaatttacaaaaatactggaatttgagttaatttttacaaaaatactgttacatagaaatctttacaaaagtactgcatttttataaaacaccagtaaaatacaaagcagaacagctcaaaacaacaatagaacaccagtagaacaccagtaaaaacttaacacagtatattgtagtatgaaacttatagaaaaacatagtaaaaaagtaaaaaataccgtctggcagtatttttgtaagaaaataacaaaagttaatataccatgtaaatttctctattattataacaggctaagtttggagaatcatttggcccaagatataacagg

SEQ ID NO: 219020 - DNA, 4539 bp, Cannabis indica
gtttaaaccattattttgataatgaatttataggatcaagtttttcagagacaatgggattttcaatttcagtttttattttcaaggaaacaaacaaaacccagttgccgtttgatcttaagaaaacatttcatctccagggaaatacagcaatcacttgttgatattggtgacaaagatcctaattttgtcgggtcacgtgaatggataggtgccattgagctgagttttgttttggacaaactgttgggtgtaagtattctcagagttttcctcttatttctgtcatatatcattatcattgcatattactatattgagagggctgcatatgaaaaaagggctatattggccgatctttctaattaactgtatttcttagtgtattttctccattttcctagtattaatttgctaaatgttgtcatcaataaacgcgcagcccttcaccaaacatttttttttctcccttcttgaacaggtcggttgcaaaatcataaatgtaagatctggagctgagctacctgagaaatgtcgggagctggctttgcactttgagaatcaaggaaccccaattatgattggtgagcaatttgagcttttcttgactattctagaccggagaaataaaaaattaacgaactaaaagagaacactcaaacacatgtatgcaggtggtggagtacttgcgtatacccttctaggggtcgattacaatgaagttagcggagattgtgcatttcttatactcgatcctcactatacgggcaatgacgagcgcaagaaaatcataagtggggggtggtgtgggtggaaaaaggccgttgatagtaaggggaagaatttcttcttacatgataagttttataatcttttgctgccacaaaggcctaacatggtttgattttgaatctttgattagtctgtattagaccagttcagaatagagaaagtgactcctcttaacttcaacttgttcaaatgtaaaacagacctcattcattagtttatgtttgcagcaacaccaggataaaacagagtcaaagatgaaataaaatagaaggtttttactttttctcaaatatggaggtggagttttagttttatttttaacatggttatacttatattttcaaatatgagaagtcacatattttgacttttgattattattattttttttttatcaattttcaaattaaaatgttctcaacttcagaattttctcacaaattttttaaacatctcctatttggagataatatacatttccgttaattgatatagttctttttttcttaattcaaagatcagctttctttgctgatgaagattcaagaaattctaataccaaacatatagattgagtattgctagtgcctacagagtttttaatatctcacattattcatttttagtgcgaaatttacttttttttttaactactttatgttagaaagaatttttttaagttgagaacttaattaaaaaatttaatggtaaaatttacaatgtagccactaacatagatagttaattgcaacaaataagagtgtttgccgcaagcaattatcacttttgtaaatataaataatattccgtctttattattcagtctgtctatctaatccatttcccacactaatttaccgctcttcttcttcttcttcttcttctttttcgtcatcgaatctaatcaaatccactgaccactggtgtctccatagaacagacccaacaatcttcaacttcaacatgtctacaactgctttatgatatcaacacatagctcttcccaattccctgtttcattttttccccttaaacagccaattatggctctcacgtatcaacaatcacgactccactttccattaccctttatcatcactcgcagtctaaaccattattgcctcaaacctcacctctttctcatctccaaaacaactacactcttctctctcttcccaattcactcccttcctcctcctccgcactcttcttctcccattttcctcccatttctccaagaagaagaagaagaagaacaggaagtagaagaagaacaagtagtagaggaagagttagaccaagaagatgatgactcgaaagacccacttcgtagatttttcgagtctcgaacttcgacccaagaccctcaacgagagggcaaactctcccttcagaagaaccgtcgctcttcatggcaccttgctgctgataccgactttgtggacgaaactgaatctgggtctgtcgtggaagaactgcttgaagatgaaattgcaaatggggtcggagagtttgtataccagtccattagctgagaatgttgtgggagaaattttggaaattgcgaagactttgcctcaacatttgacacttggggaagctttgggtggttttgagaaaagggtttgtgggaaagagtgtgtggaggtgttgcggctgatgggtcaggagaggttgttcatggcttgcttgtatttctttgaatggatgggtttgcaggagccttcattggtgacttctcgggcttgttctgttttgtttcctttgctgggaagagctggtatgggtgataagttaatggttttctttaggaatttgccaaaggagaaggaattcagggatgttcatgtttataatcctgcaatttctggcctaatgtcttctaaaaggtatgacattttatcttcatatcttaatggttgcctcaatttggattataagataaatataagtgaaattgattatattagccttgtgaatggagctttttcttgtgaaagaactttagggactcacaaaggaagagtttttgtttctgtagacaatgcttgcatagtaggatgttacttgttgatgttggttattgaaatttatgaacttaattttaggtataatgatgcatggaaggtgtatgaggaaatggaagccaacaatgtttgtccggatcatgtgacatgttcgataatgataaccatcatgagaaaaaatggccgcagtgcaaaagaagcgtgggacttctttgatcgaatgaacaggaaaggtgtcaaatggagtccagaaattttaggcgctcttgtgaaatcattctgtgatgagggtctcaagagtgaagctcttatcatccaaatcgaaatggcaaagaaaggagtttttccaaatgccattgtgtttaataccctaatggatgctttcgcgaaatctaatcgagttgaagaagctgaaggtctctttgctgagatgaaaacaaaagggattaagccgacgtctgcctcctttaacatacttatggatgcatatggtagacgaatgcagcctgatattgttgaaaagcttttggaagaaatgcaggagctgggattggaaccaaatgccaaatcttatacatgtttgattagtgcttatgcaaggcagaagatgagtgacatggctgcagatgcctttttaaggatgaagaaagttggtatatctccaacttcacatacttatacagcccttatccatgcttattcagtcactggctggcacgagaaagcttatatagcatttgagaatatgcagaaggaaaagttaaagccctcaatagaaacttatactgctttattggatgcatttaggcgtgctggggataccgaaacattgatgagaatttggaagatgatgatgaaggaaaagatcgaggggactcgtgtaacgttcaatactcttgttgatggattcgcaaaagagggttgctacatggaagcaagagatgtgatttctgagtttgggaagattggtttgcagccaacggtgatgacttataatatgcttatgaatgcatatgcaagaggaggacaacactcaaagatgccacagctgttgaaagagatggaaaatctcaatttgaaaccagattcagtaacttattcaaccatgatctatgcttatgtccgggttcgcgatttcaagagagcgttttattatcacaagagcatggtgaagagtggacaagttcctgatgtcaagtcttatgagaagcttagatcaattttggatgtgaaagctgctagaaagaacaagaaggatcgaagcgccatacttgggataatcaatagcaaaatgggcatggtgcaagctagaaagaagggtaagaaagatgagttttggaagtacaagaaaaggcacgtaagaactataaactctactacttctagtaacagtgatgcatagtcgagttttttaataatgctttttaatcattcatcaaaatcttacagaactgttgttgtgcttcactctagttctctagaatcaaagcaagctaaattaagaagaatgttagaagctgtttagttagtaatctcagttgattagattcaacaacttgtggcctgagaactgaatgtagtgcaacctgtttgataattgtagatacagtagaacctctattcaagaatagacttgggactaaccaaattatattctaattgagaggttataactaaatagagttatactagaaaaaaaaattaaaatactaaaaaatat

SEQ ID NO: 219021 - DNA, 2256 bp, Cannabis indica
aaaatgacaaacataaaattataaaaatataaaatattattagatatataaaataaaatactaaacagcatagactctcgtttaacattcagagacaaaaaataatctccgtttccatcccgttctccacttagacaggaaattctcaccccattaaaacggcgggtctcgcggagccatccgaatgagagaaaaatgcatctctaattaccatattagccatttaggcaattaataattaacacgttgcaggtttacaacagtaaaaaaacaaaaaaaatatgatgttcagtacagtagtggtcacaaaggtaagaagaggtggtaatgacattatgtctttacaatagaaacacgagaatatataatattgttaaactgttttttaatttgtaaagagtaagaataaaagtaatagttgtttaattacacaaatgcataattgataatattattaaaacaaaatataaaaaataataaaaacagatctaattaaagtcgcctatacttatgtccaattagaaaatatgtttgatatcatatttaggattctaccaccgaaatttcagcacatatgtctaaagtcttagagaagatcaagtccatattatcatgaaaatagtactatgctagcattgtttagtttgtcctttaatatttatatatatgatatcattgaaaaacatgtaaatagtaaatattggtgtcctcataagcatataattatggtgatcttaaatactaggaagagtacgagatataaaggcacacaattcattttaattttttattacaaattgagaatagttcaccaatattatagtgatgatatgaacacacaatgctttcaatggggtaacaatggcacgtggtcatccgccagcacacaagtattttcctcaaaacaaaaaataagtaatcatttataatcacatgctggacggtaattttatatatatgtattctctaattaataatttattttaataaaaacatgtacttcaaaatctatcaaagtggagtgcagttgggtgatcatgttagctataagccaaaccaaaaccgaagaaaatattttcatgtaactgatcatacataattttatagatccaaaacagaatataacaaagtatgtaacggctatgaagctttgaaaggatcaatattttcgtccttaagtgtcaccaaacattatctctaaggaaatatggcaaattaataaagccaaaataatagatatatttatatgtatgtatattttattgtaattaactccaatgggtatggaacccttttcccttatgtccttttctttccctcgagggaatccacttcgtggggattgttaaaataattttaatttcttctcaaagtaattaaatctaacctaataattaatatataataacaataaaagaaaaaccttttaatacaatttaattacttatattatatgttgatcaacagtactattcctaaagcgtttttaactgaaccttcggccttcttgtgcatggattttagtgcacgtgctagaaattctgtgttatacgtttttttctttactttaaatttgttcctatatattttttaattaataggtataactacactagggttatatatattttatatataatatgtctcttatttttttatcctatatcatattttacagaggtacagatctgctttttgcagaaaatatattttctgttcagagtaaaaataaataaatatacatatcatatttgtatacatatggtctcactaaatatatgtcccataagtagttccaaatggtactattaattaatagcactatttaaacgacattcttttgggaattggcagcatggatgaatatatatggtattaataatatctggtcatgtgagccttacaaattcaaaaatttacgtaacaacttatttgaatcacaattattttcttttaaaataaataaataatctcaacaaaaaataataaataaacaacctaactagctattttgaactgtgagctatctatagatatatatatcaaaattaagaaagatattctggagtgtacataatatgttttttaggggagaaaaagtttgttttattggctctgatatgtcatttttgaggctctaccttcaagatatatatttttttcatcatcaagtgtgtttgggcatatgtaaatgtatgtatatatgtatatgtttgtgtgttaaactaaaagatgatgaggtaggaataattaccg

SEQ ID NO: 219022 - DNA, 2863 bp, Cannabis indica
gtaacatatatgtatgtgtcaaaagcagatacataaatatatatatatgtatgaattgtgcctttaatttagtaactatacactaaataatttgaaaaaattagctcccataaaaatatattatatctattttacggaagtgctgatataatgtatttgtttaattatagtttattgaaatataacttattgattttccaaaaaaatatatattatatctattaatgtatatattgtttattttaagtccccatttaaaaaataaaacctgatctcattacttaattatacctaataacaattagtagtattactttagcgtctatatatagctaacagatcactcttaataagtatttaaagaattagttaatgacaaaccaaattaataagctcatgaaaattaagcaactgccattaattaaaaaaagaaactatgtactttagtgataatttttaatcccaatataaatttttttgtgactaaatattatttgtaaatataataaaaattattacttttgattaaaaatacacttaaattgtaatttttataactaatacttttaattgcgaaatttttaataatagtataaaaataataatttataattagtttcattttttatacttttaataacaaattttatctagaaaacaatggctgaccaaggattagtctagctatgtacgtatttatatattattacatacataatttacttatttattaatctatagctaggttaagtatatatataattatttaattaattaactggaagcgttcaagatcatttactatacgtactcatggccaagtggcatgggtatattatgtacacaccatggtcaagaaatagattatattattctcagattgtgaaagaattgcattccttgtaacaaatatataactatttataatactctactctcatttagtcgtatataatacctttgtttttcctaaaaatgtgtctatattgattaaaaaagttctcttatcagtatgaacattaatttaaattatgttatttatagcaattttatctgttcagataaatttatgcatataaatatataggcttggcggagatgatgagttatatatgtattatttatttctcaacttttgtgtcattatgttcatttgttattagtctagggagaaaaattttaagtgcttacatatatatcctaattaataattaattaacttgtatttaatagaattaaatatataatttccattgttatttagtttctctagaaaaaataataataataaatggattcaaattaaaggaaattattcatgggcagaataactacacgtatatcatcatgtagtattaataatcaaatactatatatattgtatatataattcagttttcttttattttttttatatttacgatgtacgtacgtcctatatatataggaacattcgttacacaaacaatatataagataaatatcagaaatagattcaaaacttgtatacaatgtttaattagtttaaatttcttaaaacattattaattacatcaataaaccaaaattaggcagctgcttcatgaggtatagtgtagattataattaaataattataaattagctataaacctctatactaattatagttattaagtactgtactagtacttttactaattttctttgttataaatgtcaaactatgggccagtagcacagtgtgctgtggagaaaaacagctgcagcagaactgtgaaaaaaattaaactgaatgtttgataaattataaattttaaagtactatgaattgttaagatctagtataataataatgataatgttataatctagtttattataatcacaaatatataaaaacttattttatataatattttattttttatatatattttaaattactttttcaaagtataaatttatatgtatttggtaaaaataatttatagcatttttatattatatttatcaaatgtaaaaaaaaaatcagaaattcaagtatataagaaaaactctaagttgatgtgattcttaagtatattaaaataaaatataagttatttttttaaaattaaaatatttaattattatttattttattataattaatatatatatatattaaatattttaatttttctaatatataataaataagtaatacaaataaacttattatagtacgtcttttaattaaaatagtttttttttttaaaagttgggttgtaacagctttagcttttagcagtagcttttccattaattcttcaaaaaactgttttttaagtgcttgctaaacacattcttatcacagtttttttaagaagcagcttttagccgcatactcataatctaaaaactatcattaccaaaaaaacttatatttggtaacaactttttaattacaacatagattttttgtgactaaatgtgaattttagtcattacaaaaagttatttatgattaaaacataatatttagatacaagctatgactaatttagatttaatcacaataagtattgtgattaaaaatatatttagtcacaataaattgtgatttttgtgattaattacttttagttacagactttatagtcacaatatacgaatgataatttataattaaattgtgactaaaagtaaaaaaatttgtattgtataataacacatacatcaataattactatttgaacgaataaatcaatttattcttagtttctaatgttcaatatcgatcaaacataatttggttttttcactacaagaaatgttacttttgccagcacatttttgtgttggcaaaagttggtatagcgctggtaaaatagaatttacc

SEQ ID NO: 219023 - DNA, 3310 bp, Cannabis indica
tatttttctttgtttttttttttaaaattgtttagttttttttatctttccaaattgttataaaggattttgttgcttgagtggtgaaaagtcttttttcttaatttaagtttgatccccaatacattcccaagagggttgatgatgttgtgtgttctgataaaattaatgatgaggtcaaggtattaaaaaccggtttcttaatttattttgtttgtgtatttttgtatttatatgtatatcattacttactttttatgttttttttttgtcaaatattcaggtttctcatgaaaagttggaccatatttgtgttgaactgaattctattaaagagtgtcaacaacaaattaaggatggtatttctagtttgagaattgagtttttgggtgagtttgctaaattaggagaaattctcaatggattgaagaagaagagtgatggcagttctaaggattctaaattttttccatcccttataagagaggtaactagtttttttgtttagtgttatttgattatactatcgatgaaccatcgatattattgatggtttattgatggcaggatgacatattttttcttggtattttaattgattatcgatggtttatcgatagtatatcgatggtttgtcgatgattttgccttatttgattaattttgctatatctttttttggatcgaaatagtatcgatataccatcgaaaaagtgtcaaaaattgtcatctcttactttttaccctaattatcgagaagatgttgacatataatcgaaaaagcattgataattatagaattataaatattcaatgtaatagttttaattttaaatattcaatgttatatttaagtttactattattttaatttatttattcaatgttgtatttaatttattaataattgataaatatgtatctattattattaaattaaatgaattttgaatgtaccgtccttagcatgtcgtgcctttaaggctagtttattcgtatttacatgctatgcttatcgtgcttaaacatatatttttcgtatcatgtcatgtctaagtttatattttttgtacttaattgaactcgtacctttcggactcatgccaatctcatacctaatttcgtatcgtgtcaacaaatttagcatttatttacactgtcatttacagtgcaccaatttaggtccataggattcaccacatattatttttcttttaccaaccactttttataactccacatgttatttaaaaaaaaaaaaaaaacaagatttttcctaactctttcctttctttaacacatgtttaaatacaattgagaaaccaacttctctgtctctctcttaaagtaacacatctaatttattcgggtagttcaactcaaaaccaaaacaacccaaaagaaacctaaacccttacctctctcacccaaaatcagcaccaaatacaagccatgggggggaagatattagatatggaaaggtttgtttgttcttaactttcaatgtctatactcatttatttcttaacttgtttctttgctcaaacttcttggcaaatcataccccattatgggaaattattttgttcatattataaagtaattttggctgtgtgaaatgtatagttatacccatttatggtgttgataaaggttgataaattcatacacaaatactgaaatatagttgagtgttattaccatttcaatctaatactttgttttttcactacttaacttgtttattattaaggttgataaatgcacttctaactatgtttcaaatattacagaaaacttttcatgaatttgaagagtacttattgcttatttgattgttttatctattagaatttctattatcatttttaaggtatcaaactactctaaaatgacatttttgtaagttattatcggtaagaatttataatggataactaattgatatggtataatatgaaacttctttgggataatttatatgatttgaacattcttattagtaatctattacgactcttttgagaggtccatttgagttggtaaacatgttttctctctttaattcttttattttttaaaaaaaattctatacagtatgcaatcataatttaaaagtgcttgtgaactagttaaaattagctttgacatacctgcattttccccaagatctaaagtgaaaaggaagaaaaatagaacatagatcagacaaataatatgtaataaccttaactgctcactcattatatatgaatagaatctgttttggcataaacttgaaaagaaaaaaaagacagacagatagacatttcatacaagcacttaatattagaattggaaaagatatatacttatacatgtatatatacatataaaaacatttattgtctaataattattattgttctcttattttggacattgtcccacattgaacaatgatagagtattgagccatatacattatataaaaactctccattcattactaattggtattgagatgaaatccaaaagtaaaacatgttttgatcaagttaccctatcttgtgccagtatcttttattgtttttttttaaaaaacaatgttttacttttattacaaatcttgtcggagcttgactcacccacctgccgcatttttgtcgagaacctccccgtggaggtcgacaaaaatgatatccaaagtcgttttagtgagtttgggatgatactcgaggttcaagtgtaccagagaacactacatagcatcaatgtcatgtagtggtatcaaaacaatattctatgatagcatctatttaactccaatagtatagcatacatttaactctaatagtataacattcttgtattttgtcaaataagcaatccacataagcacgcattctctaaaatttaacatttggagatgctctaatagatccaatggaccactcaatttaagaggtcgcaccaacatagccattgctagggcttttcataggttgggctgaccgattaagactattttagtaggctaacccaataagattgacctattagatttgaactcagtcatattaaattttagttgtaaccaacccctacccattacattattacattattacattatgtattgacttgggttacaacccttattttgttacaattaattttcaattttatagtttttgaggtataagtttgcattcaaaaaaaaaaattattttattagaaaaaagttagaaaaatatatgggaaaaacaatataaagtaatttttttttttttgtaaacatgaaatatcaacttcattgaaataaagcatt

SEQ ID NO: 219024 - DNA, 1989 bp, Cannabis indica
ctgtactttttaggttttttttttttttaaaaaaaaaagagagaaagaggccacttatcttagagaacctcacttgtgaaaaaccgtggtaaagcaaaagtataagatattgatcacaaaaagcataaaaacaccgtataaacgaggaaatctctttcatagaggtagaaaaagagaaagaggccactcagtatcttttttcttctggtcgtctttggacctcatcatcataccatttgtatttttccttaaaccaataacggtcatcatgattcatcagtaaatgcatcaattataacctttaacgtttaaggtactcggtctacccctttttttcttttatatttccagttatcttctcctaaatctttgaggtccacatctctaagatctcccgtaagcacctttataatctattcaagttcaatatgtgattaaattaagaattctaaaattttgctaataaattatatgttttcaaaacagagttttaattatattaatgaaaagaacatgccacatggttacacaatgtacatgcaacatattttacaaagttgacaacactaaatccgtatttgtggatctctttctgtctcccacacgtcgctgtaaaatccataaatagagatgtaatcaaactctttgcaccgaaagaaaaatcttgttgcttacaataagaatcatccatactggactgagtgataggcgtatttaagtccctagtgaaataaaggaggtgctcgttatattcatataattaaaagttgctcttactgtggcactgcatttcacacacagcctaaaattacattgccgagacaaaaaagaaaggctccagtatcgtaccgatcgttacatacggtgcactcaaacggggattggaacacgcgaaggtgaagaaggccatggacgctatgagaaggatattattgtttctctcttcagctccgcatatgatccgcacatatgaagaaagcaattacattttgtgcagccataaagagcagcttattcatgatcactagaacttaatcttgattgacatcccaagcacttgatctcatcaacatgatgtttgttgcccatgttgacacgtggcatcggatgttgatggctgaaatgctgaattacattcttttggtcaacttgatcatcagtgaatgttataaggggtgtcatatcagtatagtgttgggcattttaaggtgtctaatagcaatgctccttatgaaaaacaaaggatggtagtggtgactgaaatgttgaatggccatatatctgcacaagtattaattaatttattaaccaaataaataagatagaaaaattaattagcatgctctgaatctgaattctattctagctatgatatattctcgatcttcctctcctatctaattcaaattccttaatcggtcattctaattagaaattgtacataagaacatatataaatagtatacataagcaaacaaggaagatattcaaaacatccaatacaagccttgccttaaagaaatggatcttgctgctcccgccatacccctctcagtaaatttatttgaagacaatcatcaacagcaaaaagtcccagtttgtaagaccaaaaagtggcttcaacccatcattggttttgcttattaggcacaagaaccatattcgggaaaactggcgcacaagctgcagcccttcatcactgattgcttggcatctgacgagtttctaatgtttcaaggtatgagcgtgcatcccattatcattgaaggaatagacttagtcaaaagaaaattccctcagtgaacacccatctaggggaaatattgggacctcctccatcagaataaaacattttaatggattcaagcattgaaccattccgagccagggctttaattacaacgttcatctgttagccttaaagttgttcacaaatacaggaaaggagaaatctgaaagcttactctgccagtctcttaccccaacaca

SEQ ID NO: 219025 - DNA, 9855 bp, Cannabis indica
cgatccctttcatagtgaagctagatccctatttatagggccttaatgtgtgaggaaaggtttcccttttgcttacaatatataaaataggaaagaatcataattacataattacaatgtacaaaataggaaaatagaataggtttccatattcctctgactcaatcccacgaatgtagggattgtctttgtgcttggacttcacaatatcattctgaagtagtcaagtcctgataagttgttcggaaagccaaacccattcctactcaaatagtctgccttttaccctgctcaggtaattagagattatacatgaagatgtgctactcgaagtctatttgggatatttatcttttcccagatgcaagaaatgtaggacacgcgtcacttatgtattctgccatgccatagtgcgaaaaatgggataatacatggtttgagaaagaaataaccatgaagttggaacatcttctcagtcagcactaagggtggtccaggaagatgaacttgatccacaaattggtgtggaatgtgtcatacaaccaatggaggaagtggaagaattattcatagatgatggagatcccaccaaggttatcttagttgggaaggacctgcctccgacaatgaaggaaaagattatttccatggtaaaggcaagaagtgacgtgttagcctggattcattctcatatgattggtattagtccccatgttattttccataataccgatcccaatgcagaaccagtccgataaaagcagagacctttagatctagtgacatcagaagtagacaagttgacaaacattgacttccttagggaagctttgtatcccatatggcttgtcaatctggttttggtaccaaagcctaatgggacatggagaatgtgtatagatttcacggatctaaacaaagcttgtcctaaagactattttccacttccgtgtaatgatcagatggttgatgctacctcagaatatcaactcttaaccttcatgaatgcgtactccgactacaacaaaataaaaagcatgtggctgatcaggagcgcaccattttccaaacggacaaaggaatctagttctacaagatcatgccactcaaattgaaaaatgatggagccacttaccagcgaatggtgaataaaatgtccaagaatgttctggggaagaatatggaggtttacgtcgatgacatgctggtaaaatcaaaaaccttcgaaagccaccacaaagatctagaagaggcctttgccataatctgggagtacgaaatgaagctgaacccaaagaaaattaaatctcttctaaacatgccttcacccaaaaaacacaaagatgttcagaagttgataggaagaatagcagcagttactagattcgtctccaaatccagagataagtgcataaaggaaataacaaatttgaatggacagcagaatgtgaagcagcatttcagcaactaaaagaacatctagtgaaggctctaattctgtcaaaactagttgatggagaactgttgtctttgtacttagtgcaatgagaaggaatagtacaatttccagtatattatgtaagcaagagactactaggcacaaagtccatatatcctatgattgagaagctttccttttgcttactaattgcttcacggaagttaagaccatactttcaagctcacgccataagggtactaaccaaccaccctcttcgttaagtgttatagaagccagagtcgtcaggaagactcctgaagtgggcaatggaattgagtcaattcgatatacaataccagcccaaaatttcaattaaaggtcaagccttagcttactttaatatggagtgcccaaggataaatgatgatcctgaaacgtcggtcccagagagagaagtgtggaagatctacgagacagagcatcaaatgaaaaaggttctagagccagaatcatcttaatatctccacagaacctccaactccaaagtgcacttcgtttcaagttcaaagcttccaataatgaagctgaacacgggctatgatttctgatttacaactagcaaaagaagttggtgctaaaaacattgaactctacagtgattcacaacttgtagtcaaccaattgtttgaggggtaccagacaaaaggagaaaaaatagctagttatgtagcaaaaaattaagagctattccaacattttaagcactattctgtgaagcgaatctcgagagataagaatacttttgtagatatgttggcaaaactagaaatagatccagaaatagaaaaatacaaactagtccccatcgcacatctgatcactctaagcacaaaacattgggggtattcgccattgacctctcaaattcttagatggctccaatacttagatacttggagataggtacacttccagaggaaagagctacgtcacggaagatccagaattaggcccttagatacatgatcatggatgggaaactctacagaagaggattgtagattttgtatctaatgtgcatagccaaaatagagataagcactatcatgcatgaaatacatgaaggattttgtggatatcacacatccggacccaacttttccaagaaaatcattcttcatggctatttttggcctactatgaagaaggattgcactgaatatgtccgtaaatgtgagcaatgctagtgttactcgaaagttccaagggccccaccaacagagataaccctcatgaacagtccttggcccttcactgtttgtggaatagactaagtgggatcacttctaactggaaagggaggagtcaaattcgccattgccactgttgactaattcattaaatgggtggaagttaaacccatgagtatagtaacttctaagaaggctctgacttgatatttaaaaacatagtatccagatatagacttccacacaagatagtgtctaataatggaaagaagttcgatagtgatcagttcactgacctttgtgccaaacatgaaataatcaaaagcttttctactatggccataccccaagcaaacggacaagtgaaagtcattaataaaattctaaagaccactttgaaaaagaacctttaggcttgcaaagcataatggccggaagaacttccaagagttctttgggcctacataaccactgaaagaacttctacatgccacactctatactccatgacttatggatgcgaggctgtaatcccagttgaatccatagtgcctacacacaggagggacacctacgacccaacttaaaaccatgctctacttcaagaatccttggatttaattgaagagcttcgagagcagtcacaattacaattctaaatgtatcaaaacaaaatctccaagaatttcaactataaagtcaagagcagaaggttcaaaatcaaagaccttgttttgagaagggtatttccatcctctaaagagctcagagtggggtcttaggaccaaactaagaaggtccataggacattatagataaaattggtgatttagcattttaagagactagatggaacaagaatcccaagagcatggaacgctgaccacctacgctgatactatcaaaaaactgggggtcattaggttcctttttatttctctttactttttattttagtattaattttcatgtacaccccaaagcaggaagtatttgaataaagaaaaagttttcatttcacatttggtctttgaaagttctgtcatgtaacaagtgattaaaagtctcaactattaatcacttggggtagcatatattatattgttataaataatattacctcttttgcaagaaacatctaaattaaattctcaagtataagagtagggagtatcgcctgaaactagaacctcaggaaactggaagtaagccactaccttattatatttgaagttaatctagcatttaaccaagtataagagtagggagtattgtccaaaaccagaacctaaaggaaccgaaagtaagacactaccttattatacttggaatcagttctaacatattaacagtttatccaggttaacttggaatagaagtttaggcttcatgattacctcaagttaacacagatagaagttcaggcttcatggttaactcaggttaacacaactaaagcgattgggctactttaataaattaattaatttagattaattaaatagttaagttttaaagccttgattataagttgtatttaccaagaaaggtccaattttaaagtaattaattagctcacattaattggttatttaagttttagagaaaccttccagtaaaaccactttcaaatatgtaagtctaaacatttaattaaaattctaaaggttcagaccttttgaaccataatctcacgaggctagaagcattcaaactagcaaatttgataaattaaagggtaaatatctagagagttaattaaacagtactacgtacttgaaaaccctgtggtaagggtataaaaatattttctacgcacacacaaaaagggggacccttgtcccccaaaataaaaatatatagtaaatataaagttgttgaaaaaaagaaaaggatggtctaggctgggatggatcctttggaaattgtgtatctttagttggaatgctagataagacctctgggatcgtagaggttgtcgaaataggaacattagaggccaaaagagctgagtcatccacgttatcacctacaggaatggtagttcccagatcgaccacttttgtcttctgagctacttccttagatttgtttgcctcctcaagggcacgaatcttaggcatcagatcttccttttcttcagcatcaaagaggtctaatacaaatttatcatgttgccatatggtatacaccgagtagacaaaggcatgttccaaagctttagtgtgctgggcttcttgctcttgcttctccaagatttcctgctgaagttgtccctttaaacttgagttttcaccctctattttggtgatcatttttagggattctttataggctttcctggatgactcctgtttagttttagcctcttcagccctctagataggctttgtctcagcttcctccgccttctgttgcaactcctaatgatgtttcacctttctctctagagtggtttcattaatgaacttctactatatgattttagcttgtttgtcatactcttgagatagggtggtaagcttatggtctttctcttggacatccatctttgcctactttaggtaggcctttaagtctttgattttggtaagagtggtggaatgaaagtccttatacttttctccacgcctctccatcttggttgccctctttttgcaagataaggccttgtccaaagattcagtcaccttctgctttacgatggcttccatactggcattggctttaaatagagcattggcagcttcatctctcctctgtttagcattggcatgctctgccctcagcacctcaagctcgtaggcctactgactgaccatggaactattcctctccaccattaagctcacctgtgaaaaaggaagtacacatgaattaaataatcgagagatatgaaatgttgattgatatcaaaggaaagtcaaacttacaacgttggcctgggtcctcatagcatctgccacatagattagatacctgtttgccatcatggcaatcctgtcagcttcgagtctacaacttgtagtagtactctgatccaatagatcaggcaaaaatagtaacatattagttccaacctgaggataaagcttctccgtcatctcaactctattcatgaggggaggacagggcttatcccatttgtcatagtcaacaaactcagcattacgtttggtggagatactcctggtcagtttcttcatttctttgtatttgctactacgcctcttttaataaaactgctcaatggcctccaggcgtgtgttgtctccttttgtcatcgacaaaggcctgataagaagggtgaaaggtgttggaggcaacgacagtaattcggttctctccctagacaactaagtagaggtggttggaataatcttagatgttaggggtggtggaaaggatcttgattgacccttgaagttttactgcttcgccttggtggccttccaccatcagatacatcagaccccttctaggactgagtttccatagcctaccttcttgaggctgccagttgtaagaccttctccttgatctccacccttgcctttatgctggcaccaccttcaaaagagctcaatcgtttcttattgatcacgattggtccatcgtaatcaaagatgtctctgccagagttctcgaaagggacttgcctcataggttccacatccagaacgagttcggttagattgatgatggaagtagacaagtcttttgtgcttagagccttagaggcaacctctggatttaaagctggaggtgctggctattgagatcctctcctagaagctttcccttctggcccttgtctctggcttccctagtaacttcccgaacctcgtcagacttggattgaatgttgccgagaaacctgtttagcagccccatttgtaaggtggctggttgatcttcataaaacaaacaaaatatccataaaaaaaggccatagtaaagaatacaattttcacaacaaattatcatggaagacatcaagaagatccaaaccattaattctagaataactgactttccccctagaaaaaagagcaatgtcttatcgacctaagttagtctcgtgttggaagaagcctgggaagaaaattttactaaaagcatccactctaaaatgatagtgtacaggtggaatgaagtggtcgggactccttacgatgtaatctactttatctatgtatttactgcaagggtatttacgatgatccaaattcaagaagtatggatcaaatccacactgatcaacaacatctaagtcagttagagtgggagccttacttatctgaaagggtgtctcaccactaccggaggtgcttgctcctggagcaccctcgttctgcactacctccttaaatatgatagtgagttcttcagcctcgcttaggctttttaggaattttctcctccaattcgccagccatttctcatcgacctttactgcctttaaggcctccttagcagtgatgactgggatagcctccttaaccttatctgaatcacctcagaaagcctcctaaacttggttcttcacaaaaagatggtcccatcatgatgtggagcgatgagacctacttcccataagttcttaatggtcacaatttaccttaactccttaggcaagaagggtttgtagaaggctatcctctcttacaactcaggggtcaagggccactgaggaaggcagtctaacagatgcgaaaaaatgtattagaatacatcaagcaagagaaaattcagaatcttaaagtccaagaaggaaccgatacttacttgcaatattgaaatcaaaactgatggtgggaaccctcttcagtgggaagccggaggtgtaaaagtaataatccttgtagtcgtgcgtgtacttcatggagctggtaggacaaggaatactcctagtgtatctttccagcctatagaagtcgacttaagacttgaacttatagaaatataagatctcctccaatgttgaacacagaaaacgtaccaccctgacaacaagcagtatgcctaaggaatgagttgaaaaggtgctactctagccacatcgcaaaagtttgcaaagtagcagctcaaaggcaagtgtgcacccatttcaatattggcccagctcaagacgccaaagccctcttccacacacttgttgggcctctccccatgaacaaaaagcctgttccagaacatccctagaacacttttgagccccctttgggtcttgtatttcctcaggttgttggagttcctaaacttgtttacatgtggtctatctcccatggacttttgttcagaatcaattttggagtgttttctcgctccataatctcctcctccaagtcagcttcctctcagcgatttcatctacacataatttatgtacaaaagaagaaaacccaagtagtcaaccaccctaactacttaacatagaaagggagctgggagtcctcccccatgaactgcttagagaggtcccaactagactaactgcccagaaacaaagactcccaaaaataattcattctagacagagagttaggagcgacacgaagaaaaaccacgacagagattagtagagaatccaaaaccaaaagaatttttggtcaagggaaaattttttctagcataactacagcagaatgctcaattccaagaaaccctatattcaagaaatagcacaagttatggtgtctaaattttctagtgatagtagtcacataaattgaaaaccctaaattgtataccagaccgaacatgtagaataattcacaaacccagaaaaaatgatctagaggcgaaaagagtaacatacctgatgtcgaaagtggggatgtcaaactaatcactgctgggtttagccgagacattcaatcgaacctttcatggagacgggaggctacggtgatcaacacgtcaacttctacgtcaaaatctagattcacaccttcttcctctggcgcaaaactcacaattgctgggggttatcaatgtggaaattctcgtgctttaatccttagtagaagatgatgcagaaattgacgacgctttccaaattgctaaaaataatttaactctaaggttggttcttggtctcgaaggatgaggagaaaattttaagctctaaacaatttaaaatttgaaaaggtgaaaaattaggaaatgagtgaaaaatggtaactggtcttcgtcaagggtatttatacaaccgagaagtgatccacgtgtaagagaatggagggtctacgattgatcttccagaaacacaagatgcatccaatggccaggaggttccacaatccacgcgtatcctcgcaattaatcttccccataattgaggcgcaaataaatgatgaaaatgcccttttcaatttttgcgccaagtagtgaacaaccgtaaaaaatatagccatttctaaaaaatgactcctcaatgggcgcgcccttccatcctcatgcgattgacacgtggatgtattatcatcacagacggaagccaccttctacggtcgagtaacattaaaaatgtcatgatgttatttctcaacctccacatttccatattgaaagagtgattcaagctccaccatacactatattctgaaagctcggggggtaaattttatccgcatttttggtattggacacatagaatccatgtcagcatccaagacccatcagtggaccctcagcaaaggtaaactgggccaagcccacttagataagtccttccaggaacgtatcccaattctgcaatcgtaaagccttctgccttcggtgaaccgtactcggaagcatatccagtaccatgagaccaaaggtacaagatagcactttcccggaagacccttccagttttccttttttattcttgcgcacaaataaagaaattctagctgccaaatcacaatagagtatcgtatcaggattaatggggaaacttcttatagtgaatattacgcaattaatttacagattaattgcccataatgagtgcacacggtgttgaccaaatcaatccaaatccaattcgcttagtcaggagatcatcttcttcataggttggacttcatgagacaacctaagtgtattatttactgtaaactccctaatagagatgtaaagtccttttttggcaagttagataccaaaatattt

SEQ ID NO: 219026 - DNA, 8061 bp, Cannabis indica
tgtcgacccactgtgacccattttgctattattgaagctagaattttaaagaaaaataatagatttaagttccataacttatatatagtttgttatatatataataaaaattaaaaagaaattaaaatatttataatttcatgaaaattaaatttaaatttttttaacttaatattgaatcactaaatatatatttttatataattatattattatatttaaaaaaatcgtattaaacgcgttatatttgtgttaagcgagttgtgtcgtgtttgatctgttttcatttcgtgttaagtcgtgtcgaccagttttcgactcgcgtttaattttttcgaccctaacccataaaattcgtatcgtgttcgtgtgcgtatcaaaacccttttttccacccttaattgctattctagtaacttttctaccttcttttctacgagagattagactaataagaagaaaaaaaacaaatatttattaaaataattagtcaagcagcaaattaagaagaatataagtacgaccaaccaagagacctctttttttattttatgttttctcatatgacccattcagcccaggcttgctatgaactttgagattcgtcgtgacacgtgaatgtggagccaaaattgagcctttgagacaatatataatataatggcctcaattattgttacattatgagtttacaaaataaaaaaataaattagtatccaggggtattgactagtaaaataatgcatttggtgaaaaaaagaaaagaaaaagattagtaaaatgatgattttaaaagtttgaagctttcgaattttccaaaaatgaatttattatattagattagatatattctgttgatgtgctaacaatacaatattgaagctataccaaactttataataacaataattaatcaaaggaaaaatgattggtttagttcgacttttggtttaattgaacgaagcgatcccattttacatcgtcatcattcatcaaccagctatatttgttgtttttggaagatcattcatgaacaagctttacgtgtaaaagataggaaatagtttatagtagtaattaatgaaaaaaaattacagtacataatgatttgtttactactggatcatagtatttaattggtagggaaagaaaatgagaaagggaataagaataagaataataatggaattaaatttaattattaatttttttttatctttttattggaatggacatttttttaatttcaaaataaaatagtcattctatcaaaataatggaaaagtcatttcattagaattctgatactttaaaatacaaccaaataaaggaatgaaattaaagttgtttcctttcaattccattctattttattatcttcaaccaaacaccacctaagtgttattagatgaatttttcatactatcacttaagtgttagtatattatgttagttaatacgtagttagttactgaagttagttaagttcgtttctttattttactactatgtaattgtaagtttggtttggacttcataaataaagatgctctcactaattgtgacttatctttttcaataattttctttgtcttttctatcaaattgcactatatgcaccactttcgttccttacatggtatcagaagtccctaactcacgtctatgctgtcttgaaccttagatcctggtactaccactgcacccatggctattgccacatcaaaccctgctccaaacccaactccatggaaccccttctctcattccctcacgtcatctctaacactcaaattagatcggctcgatttcctttcttggaaatcacaagtggtgcctacgatcattagtaatgacctagatgagattctattcactagagtttccccttgtaagctcatggttgctggtactcccaatccagagtatcgtcaatggcatcacaaagaccagcttttgctctcttggctctgatcgtctatgacagagagtcttcttgctttcgttgccaactacaccacctcttacactatgtggcgtgctcttgagcaaaagttttcctcacaaaccaaggctcgcagtctgcggttgaagggtcgattccccgttgttcaaagtgcaaatctcaccatatttgagtatgttgataaggtccagacgatctttgatgctcctgcagctgcagggtctctaggtagcgatcaagatcttgttctgcaactccttaatggtcttggtcttgactttgacttcgttgtctttggaatcacttcaagaagtgatacattatcaatcaaagaagttcagacattgcttctttctcataaaagtcgtctcaaacatcacaacgccgtgaatgatctcaatgtcaagcttcaagccaatcttgctgtaacgtcctattctatagggatacaacgtgtgtgattttataaactagtttaatactgatagattaattaatctaacgtgttccggggatggctgttaaacttgatatggccaaagcttttgacagagtggagtggattttcctgagcaagattatgcaaaagtttggctttccaatcaagttttcttccctaattatgaaatgtctgactactgctactttcaagtttaacataaatggtcatgcccttggacatgttgttccttcgagggggcttagacaagaggatcccctttcaccctaccttttcctactctgttttgagggtctctcttccattttaaagcattctgagctcactaaaaatgcttttggtcttaaaattgctcggactgccccaaaaatttctcatctcctctttgctgatgacagtatcctgttctgtcgtttgaatatctaagcttgcaatgctattaaagaggctctggccacgtatgagaacatcttaggaaaattggttaatttttaaaagtcctccatctttttttcccccaataccagactctcatccagaactacttgtagattcctttactaatcaccttgataaatatcttggattatctcaatgttttggtagatccaagaatcactctttcaaccctttcaaggacaaaatatggtcttacctttccaaatggtaaggtaaactcctttctaagggtcggaaagaagttcttctcaaagttgttatttaagccatccctacctatgctatgtcagtttttaaactcctggactccttgtgtagatttgttaagagggagatggttgatttctggtggggagctaaggatggagaacgcaaacttcattggaaaaagtggcgatccctatgtaattctaagagttcagggggtctaggctttagatcccttaaacctttcaaccaagttatgcttgccaaacaagcatggagaatccaaacaaaccaattctctctccttgccaccatttttaagtcaaataattcccctggtccacctttttgaatgcctctgggtcacttcccctcctatgtttggcaaagcttgcaccgggggaaatctctcctcaaggccgacctctgtaggagaatcggtaatggtgccactactcgcatccgtgaggatcactggattcctaattgtcgttttctccccatttccctccctaatcaccttacctacgtctctaacccgctcctccctaacggggatcggaacatcccccttcttcaaagacacttcccaaatgacattgtccatgagattcgatctcttcctccccctgacagtaaccttagtgattcttttttctggaaacatacttactctggccattactctctcaaaattggataccatattgccaagattatcgcccaccttgtccagccttcttcttctagcactgacacccttaagtcttggtggaagtccctttgggctctttgtattccccaaagataaaatattttatttatcgtctttgtcataacaccattctcactgttgaaaatcttttccatagaaaatgtctcaattcccctatttgtccccgtttgtcacattcatcctgagtctgtacattatgctctgtttgattgcaagggtattaagagggtgtgttcaggtacatctttcaaacatgatatgaatagtttaaaaggaatacatattctttatacgcttttatatattcagtcacacttttcaactgatacttttaatctttttgtatgcattctttggaagtgttggaatagtaggaactcatttattttcaggaatcagcaagagcaaccagtgagaatccatcaagaggcagaagaatatttgacattctaccaacaatcccaataataccagaagactcatcccccaattcatagccaagatagacaatcacaatggtccccccagcccctgactagttgaagctcaatgttgatggtgcaatttcggggaaaaaagggaaaacaagtatgggagctttggtacgaaactcctcggggcaagttgttgctaccatggctaagagccgtcaaggacatatgccaccaaaaatagttgaaggatgggcttcgcaagaagctttacgttggtgcggagaaaaacacattgatgttcaccaagtgaaagtagactgcctaaatcttattacagatatccaagctcatgacagtatttcatctagttttggagcaatcgtcagctctgttcgagaagtgttatcttcttttcctaccgtctccctccagcatatccataggcaagagaatacaagcgaagtaatttagtacaaatggctgttgggctagataacactttggaatgtcaatgatccctacttgctttcgatgtaaccttttagggtcgttccatctaaaaaaaaaattgtgaaaacacatgtaataaaataatggtagcagtagagcaaagaagaaaatagtaaagtagatgaggtggataaaataataaatacattttgcatattacacgtgggctgatttttagccgactgttgctgcagtaaggagaaccgcacgtggtgttaacatacagccgaaaccgtacggtattagacagtaaagctgagaagagaagagaagagaagagagagaacaaaatatctacacgagctacaacaactaaacgttcatagctttaataataataataataaagtccttaatttcacatgtaagtattttcaacaaaatgaaaagtctttacctctaaataaaattatattaaataaaaatggcagtagtcttttctcgtgtcccctgctctctctcttctcgatggtccactctctcagttgaagatcgtgagtcatgacactttggtgaacacaaagaaaaaactctctccaccaaaccaaaaacaagggccgaaaaactctctcctttggtaagcttccatttccatttttttctgtttctgtttgtatctggtggtaaatttgttgttttaactttgattactcttacgtgtcgctttttcgcgttctctctctctctcgttgaagaatttttggattttatagctttacttgtctcaatttttatacttaatggaatgcatgtaagccagaatagcttggtaatggtatttcttaatatacattttcagggtttggttttgtttgccccaaataatatgaaaaatctaaaaagaaaattgcaaactccttaaaataggcagacaaaggatcagttttttctgtctcatgggacctaaatttaagctacaattgttatttaatttggtctctttttctgtcccactgaataattcaatagagtatgtgtttactatctgatcttagtttttccttccctcttctgtttttacccaggccattttaatgtggttactgggtttgccatgttttttgtattattgtttaaaaaaagacaatatgttgatctatctccttggtgggtaggttggtacataattttgaatctttgactagtattacaaccttaattaggctagtcatattattaaccctgcatctggatatgtttgacccagagctacccaccttttgaatgttttgaagccattttttaacatgccattcatttaatgtatgtaactgatgttttgtagacttagtccatatgtcagttatcaattaactattctttcgttatgatgaccattgtaaattgaagttgagttgttctatggccagatttcagtatgactagcatttttcgtagacggaataatacccatcaagatcaggagaatgatccatcacagcgcgaaataaaggtatcagtgatcagtttcttatgtttaattgattgcccccatcaccatttacacggaaattaataagcatcaaatgaatcttcagagttcagaaactatcttataactctcagatattttttgttacttactactagtctgttaaaaatgtcagcttaatgagctcaagactgcaattggcccacttagtggacgcagtttacaatactgtactgatccatgctttaagaggtacttggaagctcggaattggaatgtagacaaatcaaagaaaatgctggaagagtcacttaaatggagatcagtttttaagcctgaagacatccgttgggtaggctttgtttttctctcttttatgaataacaaaactgtattcactttcattctgaaggttcatctaattttttatgggttatgctgtcaggaggatatagcagttgaaggcgagactggaaaaatctaccgggcaaattttcatgatcgacaaggaaggagtgttctaatattaagaccagcaaagcaggtaagtacccacctggagatctcgcgcattgcaactttgttaattaagcttctgtaatagttgaagactaatggtgtcaagaaatattgcagaacactgcttcactagacaatcagatgcgacatctagtgtatctcatagagaatgctatcctgaaccttccagagggtgaagaacagatggcatggttgatagacttcactggctggacattgagtacaagtgtgccgatcaaatcagctcgcgaaactgtaaatattttacagaaccactatcccgagaggctagctgtggcttttctgtacaaccccccacggatttttgaagcattctggaaggtttgatttcaaactctttactatatgaaatttttttgtggttttattttgtgtgtgtgtgtgtgcttgtttattcctctcttaggtttttcttggacattccgaaatatagtactctattgatatactcatctgataatagaagtagttcaactatgcttaactgttttttttctttccaaatactagtaactgttaatagttttttaaagggcattctttgcttatttactattgatgtagatcgtcaagtatttcttggacgccaagaccttccacaaggtcaagtttgtttaccccaagaacaaagatagcgtggagcttatgaagcagtattttgacgaggagaatcttccgacggactttggtggaaaagccgttttgaattatgactacgaagagttctcaagattaatggcccaagatgatgccaagtatgttgctttacatggttccaaggagaagctcagccaggccaccaatgggctctctggggctgaagtggctcctgaaccagccagttgagtcggtctgtaattttgaccacgatgaggctccctccctaaaactcatggtttggttgagttgatggccttaataacaatcagctcaatgaaaccataaatatattgtaatgataatttaaattgaagcttagctgttggtatgtaagcgagatcaggcttggattttaaggacgttgaaacatgtatactctgcaaacctttcaactctattgtatattgcttctctttttctcagttgtagaaaacgggaaggtggtaacatattttatatacatttctaagtttagtattacgattgagatatgaaaatcaaacacaacagctctatattttggaggaccatctaaatcagttgctgattttgtgtttagcttaggtgccgtttagtaacacttttttaatcagttttttgtttttaaaattaaaaaagtataaatatttttcaaaa

SEQ ID NO: 219027 - DNA, 2531 bp, Cannabis indica
atttatacattgaaatttcaaagtaaatatcatatactttaaaagttgaaatatactagtattaatagagaccatttcaaggtgtattaatatactatttatttgtcatttcacaaccatcatgctagcgaataatcacttttcacatcgtacaacctatcatgatcaaaataccctcgtaactaatggaatagagagaaaaagcttaacatgcatggagagaaacatgttttgaagcttgtcaacatttcatacaccattttaaagaatgaactcactcatcacctccccccccttctgaaagtcttcgatttacaaatagtttttcgaaacttgtataagtcaccaaacttactttccaacattttgaagaatgatccatctttgtcataagcttacaaaaaaggaaaattgtggaaagtatttatgtttcatagctagtagaaagtaaggaacttgtatcagcatccaaacttgcgtagcccactaaagcttgattaaacaagcggaatttgcagattccaagacctcccaaagccttcgattggcaaatagttttccatttgacccaataaatcttcctcttgtcaccattagagcccctaccaaaattatctaacaatggatgtcagtttctcgcatgtagctacaagaagttgaaaaacactcataagataagttgggatagcttgaagaatggacttaattagaaccttctagccaccaaccaaaaagaaactttatttccaaccccaaactcgctacttaaccttctcacaaatcccctcaaaagttcgtttcttattcctacccacaacagttgggagctctaaatacttatcatgagtagcaatagaagtcaaacctaaaatattcaataccacatcacaattggcttgacccacattcgaaataaaggtgatagctgacttcttaaaaataatcttctgtccggatgcattctcatacattattagtaggcgcttaattgtgtcggtatccccagcatccgctctggcaaaatcaagctatcatgagcgaaaaacaagtgagtaactcgtgggccaaatctagaacaacgaagacccatcaactcagaataattctctacctacaaaatcagtgaggagagcacttcagcacaaaaaaaaaataataattaaggggataagggacatccttgccataaatctctggtcggaagtacacgctcttttgggcgtccattgaccaagaagcatactctggcgttgtaacacaatccataatcaattttatccaaccatctgtaaagctaaattgtctcatgatacactctagaaaccctcattcaactcgatcgtaagttttactcatatcaagttttagtgttgtaaatcttcatctctcattatatttgttgcaaaatttattactatgcaagtgcacaaaatattgattattatgatctctaactagcctttcttttacttcttaaagaactacccaatttatcttcttcctactaaatattgacaaattgaattaagtagttcataatctagttaagacttacaaactcaatctatgtgacaacttcctatattcctatggcaaagtttaatcacaaagaaagcattaaataaactaactcataaaaatcatacaaataatctagatactttcgttctaaatcaatttccatccataacaatcaaagcatattcaaatcttactttttaaaattttgattcgaattcataaataacaattaacgatgattaatcaataattgcacaattaaatcatattgcatggaattgaaataatagaagaagatgaaattaaatatctactttaatccataaaagaaattcaagtggttcacaacacttaagcttttcaaaagctctcaaaatttatagccctagtcgcccatcattctccttcttcttctcttattttcgtgctcacatattgaggaaataacccacactattctatttggtatcttgagcacaatgtaagaccgtgaagcaactgttcatttcaagttttgaagattcaggttcagtacttgtttatactaagcgacagacaagaaaaaggttagagtactgaataaaaggagtcaaatttatgttgtaacaacctttgtaagaaatctcaaactcaattatcttctatgttcattaaaatgcaaagttgtaggaaatagttatttatgttaaatgtctttttacattaaaaataaaagatcctgcaaaattacttttcagcagcactgcggttacaactaatggagacgccactcttacatgtgttagtacgatttaacacccgaccaacacttctcccaccccatcatctcctacgtacataccacctgcaactaggggtgttcattggaccacatccaatgtttttaggcctatccagatccgatctaattatatattggatgttagattttaccatctgatctgatccaatcaatttcagtcatccaatcgaccaaacatccattggatgttggattggatcgattctat

SEQ ID NO: 219028 - DNA, 1715 bp, Cannabis indica
aaaaaaaataacaaaaaattaagtagaggatttatttttttaaaaaaaaaatacaatttaaattgtaatttaacagaacaaaaaaatataattatcgtttttgcaaaacacaatatcaaagatattattaaccctaaattttgtggtactaatacctataacaattttcaaatataaattaaagtagtagcactttgttgtagagtgatgtaacataaataaagtaaaagcatatagaaaaagaagatggtagtagttagtataatagtatcacaaaaaagaaaaagggattactctttctagcttctctaaagtttatagattcgattctttgttggtccaactttagctattcaagtctcctaaagtgtcaaacactcaatggttgatatacttttattcacctttttattctattttctttttactttcttgttttcaatttttttttttttcaattagttagaaattatttgcataaataattaatcatctagatcaagtacttgattaattatctttggagtctcacttctcatgtctttgaagcttgttatcctagaagttcgagttagagcaatgtttatctttgattaagttcacccatagcatgtccagattacttacaattgaccatcccaggttggccaacatgcaaaagttgatatctttaaaacttctaatgccaagaccccacaactcttaggcttgctgattgaatcccaacttagaagaaacaagaacctttcatttttgtttcttcctgtccaccataaaatgtaatcccaccgcttcacgcttccattggacccttacaccacagaatgatgactcttatattcgtgtacgtcactttggttgcttcatggactgacgactgatcctacagatatgagtatttcagtgtgctttgtcctcactcacacacttttggggagaacttctcaagaggtcacccaccctgaaattatcttaggtcaagcacgcctaattgtggaattcttttgtaatgtgcttctacaaaaaacaagatgcactttgttgatataagtactactaatcaatctatttaagctctcttcaattgtgtagtctcatacatacagtctcagaatcatcacacttgacctttcctagacgatgtgagattgtgcagcttacccgatgtttcccttacgaattatgggactactaactgtcacaaaaaacatctaactatagcatcaatgatgttggtagttttgacagggagatccaagacaaccattgaatatatacgaatagccgaaataacatttctaataagaacaaatctagcagcttgcgacagtaatcagccccccatccttccatacgatttatgactttttccacaatgaacttaaactattagccatattatccatgagaattagaggccaaccataacttacattaatctaaggggtataataagaatattatttataaaagtgagtatatctcaaaaattataaaaataaaaaataataaaataaaataaattaaatatacaatataattttctcgtaatactcactactaattgttttgtataacgtatgattataacccttgacaatattgggggtagttactactattaatggtacttatgtcatgtattgtgatttttatttatttatgtttgcactacacattaggggtgttcacaaagtatccgatccaatccaatc

SEQ ID NO: 219029 - DNA, 2942 bp, Cannabis indica
aaagtactgaccttgaaaagcatagactttcttccatcccaaactgagttcaaagagtatcaaatatttttctctgcttagttttagtcttaaatctcattgtggtgtgaattattaaaggtaagctcgaataacttcctgtttaggtttatatttctattttcagaatgttagttattatatgttgttgtattgaacttttctttttaactttctaggacaacgcctgttacaatcccagaacttgttaaaccttgggagtgatcttattgggtaccttgatttttgttgaagtcccatcactgaaattagggtctgcaggtcatgagtggttgtttggtatggaaatttcatttttccaattactttttgtttggttggcagatagatttgggttctctgttgtctgaatgattacatggtctaagaactgtgtttggttttggtattgagtgtcctatgatggataattcaggtttgggaggcgggtttttgtcaggtccaaatggggggttactagacttagagtcatcaattcatagacaccaaacaagccagttgggtcattccacattagcacacccacatcacatgaatataataggtggcattgagagtgaacaccatcccattacccttatggaagtgaaaggatcaacatcgaaaggcatttctgtgtttggaaaagggaaagcagttgccccgatgaccagtagtcatagttataacatgagtgaagaagatgaaccgagttatatggaagatgggagtggtgagaattatgatggagcaaaggggaaaaagggatctccgtggcagcgaatgaagtggactgatcatgtagttaagcttcttattgctgtggttgcttgtgtcggtgatgatggaatgattgcaggtggggatgggcctaagagaaaatctggtattttacagaagaaaggtaagtggaaaacggtttctaagataatgatcaaaaaaggttgtcatgtgtctcctcaacagtgtgaagacaagtttaatgacttgaacaaaaggtacaaaaggttgaatgacattctcgggaggggaacgagttgtagagtcgtggagaaccctgctcttatggactcaatgcctcagctttcagctaaggcaaaagatgatgttaaaaagatattgagctcaaaacacttattttacaaggaaatgtgtgcttatcataatgggcaaatgatacccgattgtcacgatattgatttacaaggttgttctttacctcttaggtgctcgaaagacagtaatccatctgaggaagatgctgaggaaaatcacgatagtgaggaagatgatttggacaatgatgatgatcatcacaacgacaatgatgaggagaggatgagacatttcggtgacaggaagaggatgaatgacgatgatggccatttctggacatcacctcaggaaacttttgaaggtgaaatgatggggtttttccaagatcccacaaaatcattatgggagcggaaggagtgggttgagaaacaaaaattgcatctccaagagcagagaatcaatttccaagctcaagcccttgaactcgagaagcagcggtttaggtggctgagatactgcagcaagaaagacagagagttggaaagactgaggttggaaaatgagagaatgagattagagaacgagcggaaagtactgcaactgaagcagaaggaactggaattagatttgaggaggccagaagcttccttagagcattcccctctcggtatcgatatggtaccagggagagatcagattgatcttggtagacatcagtagattctgagttcatcagattgatcgagtttgctcgatatcgatttcttgctatagcgtaggcacactaatcttgtgtgagtttttcttcagtgaattgctatataatatgctgtttttgttgctgtaaattagaaagacacacttgactaatcatatattaataaacaagcttgaaattgtattgtttttgatattgtattagataagaatggtgggaaattttgtaaaacaataatcttcagagactaaataagactgattacataaatgaagaaatccctcttacatattaattacaattaatgtggaatatatatagagagagatttgttctaatttcaggtgttgttaatgttcctctcatattggtggtagttatgtaaatatattttggaatcattaatacgatatgcctcgcaatttagtattttgcaaaatttatcgatcgaatcatttattttgctaataacagttgtgacattatgtttactaaaagtgtacaaaatagactataagtttaattcttatcaaattaaaacttaataataactaattaatatgaaggtattatgatcattatattttattgcatctgttcgtgttcgtgttagaaattaacttagttggttatactaaaaaaaaaacaaaattaagtttagagtctactattttagtaaaaacagaatttaaattatcatttaacaaaataaatagtttattcagcaaaataaaatagtatttactcttaattataatatcatgtcactaaaaaatgtagtagtgtaacaaatataaaatatgtctgtaattcatacacactaaaaataagacaacaatacaagcataagcattcatttataatttagtgcatcaataaaaggtgtcccaaaatttaaaaagtaatatataataaaaattagttagactgctagagagataactcccacaccaaacatattatatatgtgtaaacaactatatttggtacattgtctaatctataggactaaattaatcaacaacatttgaagttaaaacatgtaataattacaagaaataatataaaatcactctaattacaaatcatacattattttatttagtggggtgtcaaatctcacctaaaa

SEQ ID NO: 219030 - DNA, 4661 bp, Cannabis indica
cactgatcagtttcccatcttcgagttgaactcgtaaacccatacgaagaagaagaagacaacggtgatctactgaaaaatggttacccaaagacaaatcatacatagccctagccgaaggatcagaaagcgtagcgtaagcgttatgaatttcgatgaaatcaagcccatcagagatcgaatcatcttcgtcttcagcaacatctggatgatatagcttggctagattccgataagccattttgatttcagtctgagaagcattatgcttaactctgaggacgtcgtagaagcttccggtaatggtggatttaactctgggtctttccgttaccgtgaaagccttgacggcggagcttcgtctgcttcgattggaggaggaagaagacgacggagatgatgggaattttaggaaaggggcggaattgagtcgattttccggtgagagaaagagggttgggagaactagggttagggtttgggacataattggggattttgggggaaaattgagaagtggggtttttttgtatatggaaaaaatggggtttgaggagagagagtatatataagagtcaaagatgaggagagagaaagttgtttggagggtacgaaaatcgatgggaaaatggggaggaaagtggaaaccgtgtgttgtgttggttttgtaattaaagattggacttttattgttttttcagtgggtagtgatgatgacctggcatttttatttaaaataataataaataaatataaatattttttgttcttctagaagatctatctgtcgtttaataaaataatatcctatactaaatatcaatgcaagtagttttgttctttgccatttgtttagtttgtgaggtgttcaaccatgtatgaaattaaattcataattataagggaaatgctaattaagttattggtgtagtattgttattgatataatttttttgtagcattgttattgatataattgaattttgataattgttaaaatggtttagtatttttttgggtggtatatcaatattggtgtaattaagtattgagtctcatataatttaagaaaataattttagagaatatcgttaactaattgtaagacgtcatttataggaggtgctagacactattggtacctaatagcaatgctcttaaattttgggtcatatataagttggaaaatttctgtagtagtccctttaaagagtcgttctagtagactctatatctgtttcgacatttagaaaaaaattttagtctaattttttttatgattgtgtacgttatagctacttaggactacttgtaaatttttagaaaattctgaatagtttataatgtcgaaaataaggtttaattaataattacttaccacgcgtataagaaaaatagttgtgtgtgtaacaaaatatgtaaatcttatttaaattatttgaaattttgtgaaaatttacaggtggtcctaaatagctataacatacacaatcgtaaaaaaaatagactacaagatttttctgaataccgaaacagataggggtctaccgaaatatccctttagggaggtactatagacttaccctataatttaatatagtaatttttataaaatatcgccaatcatttttaaggcaccactcaagtccagccctggacataatttatctgatctctggtattcaacaagaaaatctgaaccccaagaaacaacaatatctaaagccatcatcttattattatgcactattttgttcctcctaaacaaaattcgtcacataatcaccaaagtcagttcaaaagatacaatcagtaaagggtccaaaacttgtggataaaatcataaaaatcatgacaaacaatgagtgggggtctcacaaagagatatcactaagtttacgacattctgctaaagaagagcatcctcatagagtatgatgggtcaattctaactgagtatcacaaataaggcatacttcatctgtcagtaaatcgtgctttgtaaggttgcatttggtaggaatccaatcgaaagagatctaccaagcgaacatcttcaccttaggagaaagattaagagaccaatatttttttcaccacccaaagaacccaaatgaagaagacgggcgacctacccacaggttgcgaacaacaaaccaataaccactcttggcagtataaaaactaaatttttcataaccccagatcaattcatcccaagttggtacaaatggccaaggaatagagagaaccgtcgcaacctcatcatgagcaaaaagaccacgaacaagctccaaatcccaaatccccgaatcagatctaagttgagaaatcgtacttccttcacataatagattaggtgacagaacaaagaaattagacagtatcaagacccacccgtcttcatatacttttacatctaactcgtttctaactctctaaatagacccaacatcaagcaattccttcctccataagatgttcttctagagaaagaaacttttcttaggcttaaccatagttccaaaagttttttcaagtgatagaagcctttcaaaaccctagtatatcaagggttttcaaatcatcataaagtctccacgcttgtttagctaacatagcttggttgaaaatgtataaatccctaaattccattctaccatcttccttatgccatcaaagtttctcctaggtatatataccagtgcatcttttgtttggtatcatcaccaccccatcagaatctggcacttatgccatggacactcttcacaaaagacatggggagtttgaaaagaaacactgtataagttagaatagattgaatgacaactttaataagcacttcacaacctgccatgaaaaaagatttccacttccatacattgaattttttccatgtgttcctgcacagaatgaaacaccccaatttggtatgactagtgaagcaaggaagactcaaatattccgtttacttgtaatcatgtacgattttaagcataagaaaattagattcgtgtttagaaaccgtgtctaataagaggttcagatttattttattattattttagatttattttattattattttagtgatatttacaacaattttaaaaattagtatcaataaactaaaagtgtatcatcatattccaatataaaattctccatcttatatgttcttctttcattattaaattattctaaaataaaattaccattaattgtgattatttagaagcctttatacattctatttaacactaaaaatatctatatatataataccaaattgaggaggggcaattagcaagtgttctctaatatttactattttttttttttgtttatttaagaaagaaaatacaataccaaattatcttatattcatattagagttagagcataaatagtgtgatttattgatttcaaatgaatttgtggctttaaacatggcttcaaggcttctagaagggtttcctaaaaaaaaaatcaataaataaaagaagaatgaaaaaaaaagagagaaactttgtaaattgtaatctctctctcaatatatacatactaaaaagctagttaagaagacttgttgaaaagtgaaacattatttatttattgggtccacacataaatttaatatagttttaaaatatatttttaatatgtttttgttttagggtatgataagattgaaaatttcacacgtaagatattaaaagaaagatccaattaaagattcaagaaatagaccactcaacctcaatttatggagtggaattttacacatttcattatataaaatacactataatttttataccaaatttttccatctagaagacctctatatatctctcatcaattaaggcttctagaagctataacattattaattatatctaaaatctttaattttgttgtattttattaaaagctataattagcctattaattactctaattataatatgagtaaagattattattaatattctagcttatatttatgttttgctatgttttctttttagattttaaaaaatcaaaatgattcagaaatgataaaatttattgtctacgagttaatttatatgttttattgatacaaaattacgattaacataaaatagttagagatatgcacttagaaaaataaagaataaaattttaagatttttgaataatcaaacacttagctaaattttgttgtacatattttacttttgtattaattaatggttcattattttgaatattgaatttgttgtttaattattatatttttattagaattgttagtttatatttggtaaaaacacattttgaattttttaaatgagctccatattgaagagagttcatgattttttactagctagataatttattagatttgaatgatgaaaatgaataattagttggattaatgaagctatgtacctattaaaaagaaaaaaaaattataaaaagaaattctttttagtaaggaaaatttatggcgaaactactaaaactttaaatttgttgcaaatagttaaaaaaacaaaagttaaaaaatctttttgacgaaaaatatgtgcatgtttggcatcataactaaaaaactgttttttatttttaaaaacagaaaattgcttttgaaaacaatttggcttgtt

SEQ ID NO: 219031 - DNA, 5708 bp, Cannabis indica
tatattcatccaataatttctcaaccccaggagaatcgagttaataagttgacatctcccaacataggagaggtgtttactagcccaggtgtgaagctgatttttaattctcttgagaataaccccacaatccttcgctttccactttgtaggcctcataggaatccctaggtactttagaggaaaatccccttcctcaatttgtaagatctcaagcaatgcagccttgtccatccttgaaattcccccaaagaaaacctgggatttagaaagattagctttgagccccgtcttgttgctaaactcctaaaatatctttttaacacaagtcaccgaacctttattagctttgcagaagataatgagatcatctgcaaaacaaaggttaataatcttgaggttcttacattgagggtgatatctaaactccttctcattggcaccatattgtaacatttgagttagatattccataaccaagacaaacaacatcggggagatggggtctccttgtataagacccttagctcccttgaaacttttttgtaaccagccattcatcataagcacatcggaagtatcccttaagcataccataatccagtgaatgaacatggtaggaaattggtaacttttcagtaactcttccaagaaactccaatccaccgtatcgtaggctttacttaggtctattttcagtaggggtgttcatcaaaccgcccgcaccgcaaaaaagaatacggtttgaaattctttgcggtgcggtcgcggtttgaatttactcaaaaccgtgcggtgcggtgcagtttgcggttttgaattattaatatgcggttcaaaccgcaccgcaccgcaccacatattataaaaataccaatttttatatttatttaggtccaatatgtgaaggctcaacctaagcccactaattattgtattgttgaaacttgaaacttttttgtcatttttattttcaagtcttatggtatttttgacaagtgttgctcaaactttgttgtatttatgatagtttaattatttagtgatagtccaaaccgtaaaaccgcatagatcgcacctttacggtgcggtttttgcggttttttagtttcgcggtgcaggtgcgatttggaaaaattaaaaaaattgcatgtgcgggttggtttgaaaaaatagtcaaaacccgcaccacccgcaccgcgaacacccctaatttcagggcacatcttggagaaacatttttcctactataattcttaatcaaatcttgaaagataagaatattatgaccgagagatctacctttaacaaaagctccctagttttggctgatcaacagaggaagcgcttcaaataagcgagtgtagatcatttcggaaatgcttttataaagtatattacagcacgaattggtctgtaatccactgctttacaaggcatttccacttcaggcataagggcaataaccgctttattgaactcttcaggcattctcccagtatcaaagaaattgagaattgcctcagctatctcatcactaattaaactccacatgactttatagaattcaaaattatgaccatcagctataaggcttttagtacttgttatgctaaataatgctttcttaacatcctcttttgtaaacttctttattaagctcaactgaagttcaacactaagacaaggacccatctccatacacctggcatcaaattgttatcatcgcctttggaaagccaagtaatcttactccgctgaacaagaaagctttgatacatagcggcctgttgttgaaacgtagcaacaacaactttttccttcaactgggccatttcttctgttggagcctcttgggcattggtcaaagcacattggtaatcaactttggcttgatgataattttgttccacatcatcaatttcctccttgttgaagcttttgagaacatgtttaagtctcatcaacttaatatacactcgctgaagaccaaacccagccataggtttattccaactagtggtcaccacttcttgaaacttgttgtgagaagtccataaattgtaaaactgaaacggtttaatccctaaagatccctgttgctgagttttaacaacacaataacagtgatcagaggatatttcccattgaaagacagccatcgagttgggaattttatctatccaatcctcattagtgaatgcgtgatcaatcttcgaataaactctatccttcccatcttgtttattcgaccaggtaaacttcgagccaatacacttaagtgcttccaccttggtctgagcaagccaagtcgtagaatccatcaaatcattagcactcactgctctgttgccagttttatcatcataacagaaaaccccattaaagtcacaaactattagccaaggagccccatgacaagtgatattagagagttccttccataattcaactctctcctctatggtatttaaaccatatacaaaagtaacaaagacaacaagttgagaactgacaaacttaacaaggcagtgcactagttgcttgtgatctctcaaaacttgcacctaaacaaatgacttcagccacaacactaaaattatcccttcacaatgatcacctctatggtaatcccagccatgatacaacttaaccatcacattatctactttgatattcttcaatttattctcaataagagcaccaacccttattttattcagcttcataagactaaggatatcatcctgcttatcccttttattcattcccttgacattccaactaagtatgttggtgcaatctatcacctccctcaaaagataggttacctttttcaacatctttaccctgttcctgtagaactttgaatgtgttttgaacattagcttgttcaatcactccaagtgttcttttcacctttgaattgcctactctttttggggtcttccatccttcaatacactcacgttctggagtagcaatcctagtctcttcactggttttagcttcctcagagacatccttccttttttcaccaatcgggtcttcagccacagtgacaccaaaattctattcccttattttttccacaccagcaggcttctctttctctttaattctcttctcttgttgctgatttttcttggcccaaacctttgaaccagttttcttgcactccgccatgttatggccatatcctttgcagttgttacacttgatggaaagccactcgcactcaacaaactactcctgaacttgacccttttcattttcaaaatgaattataaacggagggtcatctgtaatgtccatttcaaccagcaccctagcaaacctaatcatagacctctcctttgtgactttatcaaccataattggttttccaattgtactaaccaaagaactcaaaaatttaattccccaatattgaagatctaaattaggtaatcgaatccagagaggaacagaatgaactagcctcactgtatcgagatcctgtgtccatggtcttactatcgtcagtttcttgtcaaattgcacagtccctaactctagaacaaggtcccgagttgcctcatccttgaatttcactatagttagtccctggttcatcctaaccacccgctcaatgccaaggtatccccatatacgtttcacgaattcctcaaacaaagaaaatggaggattggccccgcatcaccatacacacaacaattgagttccattcctgagcttgttcagagacctcctccagatccagattagcaactttgaaaccaacttgaacaactggttatgcataatggaagtttgctgcaacattaattctctacccttcattaagcttcgcccagtgtttttgagcagaagattggaagtcgacctcatcagcccagttctccatcaaacccctgattggaacttcgtcctcctcagtcttcgaattctcattcaaatccagacccaaatcagcaaggtccagtgaattcgaattgcctaatttcttcactttttcctcttcctcaatctcctgtgtctacacgactattccaagcccataatcttcatccagatgctgctcctggagttttttggaggctcttccaattgagatctcgtagttggctttagagtaaccttcttctacctcatggagagagaatagtacctacgcacgccgtcctactccttaatctgtaattatttttcgaaggtaatatatttgtgttaatattaattataattttttatttcagcttttttttttcttcaacttactctaaaaatatatgttaagtattatatttttgtcatggtgtttattataggtacactataatttttattaatttttaaaagcttctaaatagtttgtaatatcgaaaatatgtttgaattttttgacatatggtagaagtagcaactatattttccatatggtaaactattcagaatattcttaaaaaatgataaaaataatgtagtaattataacgaattgtgatgaaataaaattaaaaaatgatgttctagcatgtattttaggatgctaaagttaaaataagaggttgatggtaacacttttctaagtgttattataaagatttaattatctttttattttttaatagacaatcaaatattattttttatttttatttttatttttttttaattttagaagtagacaattagttcatttatattagtagtaataaactaagagcaaacaaatcttattagaaaaccaaaaaaaaaaaaaagaaccaaatttgtgatgaatttgttatcaacaattgttttttttttctagtgcagtgggataggacagtgttgtaaatatgggttggactttttaacacgacacgaaatcagcacaagcccgaaaaacatggccgtcttaaatattttggaggtcatgttctaattttaaaaattgggcccctacaaaaaaaatgtaatttctaaataatatttttaaacattatcatacggttatatattttacaaaacaccaaaaaactccaattaatttataaaaattgttattgattgctgtacaacaaaaaaaaaaatgataggaaaaaaaatatgaaaggtttgaaaaaaaaaatagcaacaataaatttttatttttttgcttaaaaacaataatagaattgaaaatggattttgggaattgacaaaaaaaatgatcaatgataagtagttagctatttaaaaagttgggttcattaaaaaaaattaatgagcattaaaaaaaaacatatattaggccctttatttttttgggccctttattttttggggctctgtgcaatagcccaacttgcaccccttaagagtcgcccctgtcgaaaggcatgagcatgactaggcacgaaaaaatcattcccgacccatagggatggcaattatactcacaggttcgggtatccgcgggtacacgcccctaatgggtcaggtacgggggttgactttcgggggcgggggcaggggcgggtgtgggtttaaagattcatacctgagtcggaagcgggacaggggcgggggaatagatacccaccccgaatccgccccgatatgatatatgtatatatttaaattttaaaataataactactacaattaaaataacttcatgctttaggctttttattgattatactttttttttactatacacactattccacttaagtttat

SEQ ID NO: 219032 - DNA, 1693 bp, Cannabis indica
ttgattggtttttttttcttttccaaaagtgattttcattttttatttgcaagaagaaatgaaggccttttctttctttttttgtttctttagtacagtgtttttggggaaactagcataataattgacactaaattctgttagttgtcttcagtgagtgaccccttttttctttctgctttttgtaatgtaaatggatttttgaactttttgtcttttcactttaaagaatgaaacagccttgagctgtaaaatcacatagaaattatgatagttaccaaaacaatcagtcaaagattgaagaaacaaaaaatgtcaattaacttaattacaaactaaagattcatacacaaagcaaatttaccaagttttcatttttcattatggccttaagtctaaagatttacccaatgaaccaataataagcttctttagctgcaataacttatcttattgaatctgacttatgtcattattatctttttgtcttatatatagtaatagtatataaataaaataaatatgatcctatcttggttgaacatgtatagtttaaaaatgtggtgttcaaagtatgaaaagaatgattttgagttcaatgtcggatagactttgaatgtggaagacaatgtgccacgccattactatatatatatgatgtttgatacacattatttaatgttatgttgtgttgtgactctaacatgtgcattgccacatttagagttaataattagtatccccaccaagatttggacttcaaaggaaacctatatctatatgtctacactattactaatatatacattgggatatatatgatttaatattaagttattattactatttttattattggtgggaggatcttagcatttgaatcttgatgaagtacttcatcatgtatatataaaattgataaaatcacattctcaaatatgttgcacttttccctttcaaaaaaaaactgttgcactttttatagtacaagcacacttgtgccttgtacagccttcccttcgcatgcttgcattgcagtttattccttttctaacaaatatgtatcttatgtatacaacatatattttgtaacaatatcttaacactttattaattaatcattccattaagaagtattttcatacataagtatattaatatatatagttaaaggatagaataaataggattcccccttcaaatattactacattcaaattttgttttttgaatttttcatattagtaaaaattatttgtaattttttaattatacgcgcgtagcgctgaggtgacgctaccacctaaactcaaaaagtatcacataagcagtcttttggccacgtgtaactaaagggccaaaactctagaaaacactactacaaaaaatacttataatgtccatttttcatgtccaacaaaatttttattggacataaaaaagttttggagagttttctagtctagcaaaattggactagaaaaaaattttattatgtccaacaatattggactagaaaaattgtagtgaatgtgatatatatatatgtatattattttaaaaacaaattgctctattttcatgtccaactctattggactaggaaaatattttagaaattttgtagtctaacaaagttggacttgaaaaatattttaaaattttctagtctaacataattggactagaaaaa

SEQ ID NO: 219033 - DNA, 3028 bp, Cannabis indica
atatttttaaaatattttgttaaactaacaaaaataaatgacagttataaattaaaccaatagaaaaagttaattttatagtagtgtttatgcattatatataaaaaaaaaagacttaaaacctattaaattaacccaagtgtatttgaatatatatattttagttagaataatactaaaaaggtactggtagtgcttagtattatcctatgtgttaatattactattggtctaactatatcagatctcatatagtttaatataataacttttaaataatagtatcgctaaccaatcgtaaggtaacatgtctaaaaatactaggcaccactggtactcaataataacatgtatgcattagtatgtatgtatattagtacttaataacaataatttatccattaattaatataatatgcagatgaagcatataataagtggaccgaacattgttatgttttgttgaggaaatttatgcaaacttaattatctttcatgtcctaataattgctgctgatatctactatcatattattatcatatacatttatttaggcagctgttaaagaaataattactctaattagtgtgagaccagattaattggctacgactatatgtttggtacattttgaaaagtaaaatttagtagggaattaaagaaaaaaaactaacaaaataaaactttatattggtacagaaattttgttgagtgaatcaattttttttaagtaaaccagatattctctatctacttgtgagactttttcaattaaaattcatctgattctaatcttcacatcaaatttaattctctttataatagaaccaattgaatatatagttctcaaattcgatccaaaggccttattatttattaattaattaacattaaacatggtatatatacagcaggtggaagagtgtatataggtgaatatataattaaacatgtttttgaaatttattcaactttgaattatgtatgccctttaataaaccaattaatcacatatattgatctttccaatacttgagcactaaaatatatatggcaagtaaagaaatatgctctcatagctcacacaatctatctaatgagagaacaaatctgtgtttcaggattgatataattaaggacaaagcttaattactatatatccatctttgacctgatcataaccctcttttctgatgttatttaaagcatcaaatccatttttgactctaattagtaatatcaatattgctaaaactaagtatataacatgtcatataatttaatataataataacttttaagacatatcactaattaaccgtagggacatttttaaaaaatgctgtcgaatattaaataaacatatataatatatattaattatacatatccactgtgctaccaataatgataaatataataattctatccaactccagaaaagaactttgaagatcgaaacaactgtacccatcactcttttttggctataaaaacccttccatatagaaccaagtatactcatcaaaaacaaaatatttatattaataataattttgttacttactaattagctaataataagaattaattatggcttgtggtaagtggtactcatgcattgtgttggttcttattgttctgagtgtagtagctgctagaaatgtgccaatggacaataacaaagggcttaacgatcagaagaacttcctctcttacgggggtatcggtggatactccggtgttggcaatgacggactcccaattagcgggatgggtggcgtcattggtggaggcggtaacggtttaaatggggggattggtggtgggattggacttggtggtggcaatggtggattatttggtggactcggcggtactggtgttggtggtggtggtggtggttctggctttggtggtgttccttccccttgaattttattaacaaacaaaagtgatgatcatgaaattaagagttatgagtgagttttttgttttgtgataaagagtgtaatgtgtgtgagagtctcatttgttagttttaacaacttaattatattttctataatccaaggttgattatctaagggttttattctttaaccaatgtttgttttttgttttccatatgtaatattaaaacctatataaattaagttacatttttgttatctgatcagtgattattaattaatttatatataacctaaagcctatctctatataaatttataaaaaatgataaaagatattagtggtgtataatattttttgaaatgttatattatgattagtgtaattaaatattgaattttatataatttaatgtaacgaaatttataaaatatcattaatatgagtcatcctagctagttaaggtcctacgaagactattaaattcccgccatgcaaacaaaaatctagaaatatctttgaaattaaatatgccatgtatactttaataattaatttgttaatctcttactaaatattaataaaaaccccccacaaataagtagtttttataacaattaattaatcctcacaaaatataatttttcttctagctattttaatataatgatttttatgttagttaatataaataatatatatataaaaataaatatatattggcagaacatatatattagagttgctctagttatccaaatcgtatttcatacaattaatttatgcattatgtttttttttttagatttaaaatattaaatatatattggcagaacataattatgcattatgtagttcattaaacagtattatgcttaatccaacaatatttatgatataacttgaggctagctcaagtggtcataagtaggtgtgtgtcttggaggtcttgggttcgaatcctaggtaaaacatgattgtaatatataaacacttgaataaaaaaaaacaatatttatgatatatatgcatggaatgttatgatgcatattaattaatatattgatatctattctatataaagtgtgcctatataactaaaattcttggttt

SEQ ID NO: 219034 - DNA, 5386 bp, Cannabis indica
tctctcttttttttttttttttttttttttccatatttttgtaaatagcccaatgtatccctactgcttaattagcttcagttagttgtgaagatctaaagtatacccctgttgaacacaatgaatcaacacacgggtggtgattgagctttggcttcccatgtaactcttaaagtggtttaagagtagtgagctactacctcgtcaaagttctccacaatctgagcttcctatgttcaacccttctcttcttaatgcttgcatgaaaataaataagaaggtggaccatttttctgagacaataattaattgttataataaaggcccctataactaattttgagttttgagtttctttatctgaagtttaatttgattaatgaagtgaaaaccccaacaacacccactttaccgacttagatatgtgtacctaaatcatgttattgccgtagcgtgttaggttttctagtgttacccatgtttttcaattcagcatacgaaagatccatataatatatataaaaatacattgaattacgtagatcatgccaaatgtttaaatcactctgcagctcctatataaaaaacagatacgagtacaaaactcctataaaaaattatgaaaataatcacatgtaaccctcaataaaaagggttaaaagaatgaagtcataaatatctttttagtataattgaatcaggctacaaaatttggaatgaaacatgatgatatatctgcaaccccaagatgagtttgaacccgagattctaatcctgaaaaggaaagaataagagaaaaaacaacaaaaacatatttaattcatctataaaagtcatctttaactaccaactaagttattcaagatcaaaaagaaaaagaaaatattaacattggcacataaaatgctacgaagatttcaaagttgataagtagcctcttctaacaacacaaaggtgttgtgagaaaaaacatataagcttactgaaaaagcaataatgatattttaccaataattttttataggctagaggaaagcagcttgtacctcatgataagatgacaagacccaaatacattgatccacaaagaaatgtaaatgatatcattcccctgcaagtgtagtttattgcattaatattagtaaaaaatcattttacaatgagaaaatatacactctttttttgaaatgcaatcacaactattaaaattgattttgctaccaaatattcgcaattcagattaacaccagagtttccatcaagtttgttgttgaatttaaaattctgaagcaacctaacttttgaaaaaggtctagagagcaacaaaagattaatataaatgagttttaaacaacatgctcactcaccatatgactccccatccaacaccattgcaacaaggacaaatttcagcaaatttctcagcatcactggagttaactcttcgagatattaaatcatcatatatatctgtcatatgcctttgaatatcaaacacaagtgtagaattggtaatcaataaatcacttactaaaaagatgagtgttggtacataccatatactgaaaacaagctgttcatcacacctgcaatcaaccaaatcaaacataaagtagctgtaaattccaatccaatagatgtaataatacatgtaaaaagtaatagaggagtttgaccacataaataataagaagaaagtacctatgaaaagaataacgtaacgaaggatgcgaactgttgtcatttcttgcagaacccaaattaaggcaagaaaaatgatgaatcctgatagattttcaaccagtcagcatcagaacataacaaggaagcatatgaatatctagtattgaccttactttcaaatactcaataaaagtacataccgatacaaagtccacggagtgtccactgtgtgaagaataagatagaaaggaaaaattagtatgtcctcaatttaaagtagctgaagaaaaaaatatgcaataatgtttgcatgcgctgaaatatgtgaattagcaatcttacatttttagcaatacagagcaccacaaacagagcaaaaattaaacaaccagcagcaattcttgcagtgaggagatttgttgatgcaagtatcaaagtcattccccagaatgatgagccaagatctgacaatgtaaaattcatgcattttcagtcaaagataaagcatgaaatgtttcacttgcactttacaaacttgatagtgggatgtggactatagaaaaatagttgccagggaaaaaagtgcattacatcctgcaggcaatatcagccagtatacaccaccacgcgtttgtgtgacaccaccctcatttgcatggacttggattccctccacctgcacatgaggtcatattagtttgcgcgacttacttcaggaaccatgattaaataacttcacattatatgcattgagtagaaaaaagatcttctaacctgaccacacgtgagtttgcaagcaatagcatgacttgcttcatgcaagaacactgtgatgagcttaaagggtgtgaggagtactgttctccagagctacaacatgcacaacgacaaaaataatatcgttagagctgccaaattaatatcattaatatcaataagactatcataagttcagacatcttggcttttacaagtatcactaataaatagaggaaagaacacaggaaaagaagaggcagaaatagaaaatcaggaaacaataggattcatatgccttacagataatcctaaaatatctactgaatctgatattatcctaatcatattagcatccacataaaaatttaggttagaaatatccagttatttacaatttacttttttgaaaaagagacagaggtcaaatgtcttagactctcctaaatttattaaggggtaacataataaagcattaaagaaacagctataagctataacatataaagcctaatctcagctgaggtcttggaaggatagaccatcaaatatacagctgtttacaatagcccagtactattttaacatttcctgtcatttgtatataattaataattctctggggttggtacgttgattcttctttataggatcacactccttataacaattgatttttcctttttgaggtagctaggttagttgtatctaatatgtctgcaaacttggaagtcatttaaaggtggattggtcaaaccaacttgttgaacatgttaaactcaagctaacctaataaatctttgtcaaatttcactagcctctctatcatttgatttggcttaattcttatcattttgatccatgttcccttgataaaaactcgtacactcagacgcaccacacaccctaatcaatgcaagctcaaaatgacccaataaatctttaaaaagtagcaattacaattttccatttctgtctatttccgtacttatttgaccaagtgaatttcattgtgttaaaaccaatatcaaaagatatatacagagggccacaaacaaaatcacttctaataacttctatacatataaccatgtctcgatcatcccagtaagattaatctctaacaaattaactctattatcaaaatgtctgcactccattaagcaaggctaaaacttgcctgtttaatcaagcaagttctaaatgaccaacccaaatactaataatagttcttctgctatattttgtaagtaaatctagccaagattttaccaagagaaaaaaaaaacgcttcaagagcccacagtttaacaagttcaagatcacagaaaatgaataaattagatggagagtttttaactcaaaagctcatgattattgagaaaaatgtagaagtaatcaaaatcatgggcgagtgagtcccctttcatggtttcgttgactccattttttgtcaaaaaagaaagaaaaaagttttaccaagaggattacgacggtgaagactccaatagttgccaagaagacaacttggttgtgctggcaacagttcgtcaaggcccaattcggcattctgaatcttcaatatcccagaaatcagaaaaaagaaagtggaagagaattattgggagaaaacttttaagagaataattaaaaaagaaaaaaatggaaacgaaagcagttggggctctcttaacgtaacatataaccaaccaaaaagggcaattgcttggaagcagtaaacgtgaaagaattaacaattgtaatttgaaacaaatagttgtcgtttattgctgttgaaaatataaaggctgtttgtttgaattttgaagtgggagactgggttatgattagaggaatagagagagaagtaaaacaattgggtactggggtagaccacataaccaccaacagcgcgtctcgtttcatccactctggatcggatcggatctgatcgggtttggactaacccacccggatttgtgtttattatatggcccagacccatgtcgttgtcagagtaatctcgagtcgagagcagttcttgtgctttgttttcttaaataataataaaattataatgaaaggcctaactccggtcaaaatcaaactctttcttatttctttcatatttttaattatatgttatttgtcttttttgtttcatgtcattgttgaggagaaaatgcaacaagagaacaattctcaaaaagtttagttttccccgataaaagctaatttattagtcattaattagttgatcaggtgcaaaaaaggaagtcttcaaaattgtagaacattgaaccattctttcttttttacatctttgatgaaattatcaaaaatcattaaaacgtgttacattatgaaatagtgtagggcttattagtaattgttaaagagtgtgaattactataaatatgtgattgtgaggctattgtgagatatgaaatgagtaaatagaactttggttcaattgggagatggacactatcttgaagagtgcatttcagagatttgtcatgtcttgaagaggattattaactaacaattggtgctttcattgagagaaattacagtgaaagattcactgcaagaactctcaaccatggaagatgaagagattgttcaactcttcaaatctatggagtcatttttcaagcaaactttggattctcaatttgagaagattagttctatgctcgagcaacactttacagctattaacgataaatttgatcaattatatgtagcggcacaacctactctgagatccactcctgcagatgtggaggaattcgtggatgttgaagaactcattgaagaccatgtggtacctttagcattggatccaatggatgtttcttcaatcgatcatatcggtatcattcgagatggctgcgaagcattgccaaggttgaatcgcagtagaggaaaagctctctgctcg

SEQ ID NO: 219035 - DNA, 2239 bp, Cannabis indica
attccctatttagtactatttggtaaaacgtctctttctattttttccaaaacttaaataatttgtttcttgactagaaatattatgcatagtttattgaggagatttggtagctgcgatataatttatctagctatgcttggatagctttaaatttgtagttttagtggatcttatggtgtccatgaccagatttattgcttaaataattacttatctttcttttgcatactctgatattttggttgctcatcttcgcataacgacatactacaacttataattgtgttagtcatgtttaagtgacttttagttgtttgtttgtgcatatgtttcattctacttttgtttttgttcagtaatatatatatatatatatatcctccaaattgaaagataaggatgtgtaattggtttggttcttttaccaaactatcattgaatggggtttcattgatatacgtagtggcttttgagaatctttgtgataaagtcaagtttgctcgtttgaagatacaagtagtgggcaaattatagttatcctaatgtgttaaaaatttgaggttgattgcttttgtctgtaagttaaattaggcggaggattgtggatacttatatcaatacaagttcatttcatgacagtatacaatcttatgaagagaatttgagctttgagaatgtatttatcacctataaattgaacttgagctccttaagaaaaaaaaataatatcaactgaagttcaatatttgtttacttgtgttaatatgaatttgagcttttgcatactcttgtttgctcttgtagtaggataattttaattttactttcaaccattgatttataagcaggctgtagttactctagcgtcttataaatcacggttgaaaagcgatccttctgtctctcttcctccaaaaatcaactaataataatgtttgattcagacaaaaaaaaaaaaaaaaattataacaatgtttgctttgccaagtccttcaagaaaaaatctcaaaagacgtagggtgaatttgccgagaagcctgttaggtaaattaaaaacatttcttaattttgttaatggtgtagaaaatttagtctttttttatctattttttgaagtacaatagaggtacatcatttttgtagcagagatacatcacttttgttagggacatttttatttttagtacttagagacattataaccttatatttcttatatgattgtgtatgttgtagttatagtaaatattttactttatgattgtgtatattgtagttatgagaaaatataaaataataatcaagatgcgtgcaattaaatatttgagtaaaacaaggggcaatatgagtaaaaagttcaaagttcaatcaagctcaattgacacacaaagtcaagctcagtacaaggggcaatgtaagaaaaaggttcatatctcgtagtgtagactcccttgtaccaatccaattgttaattattaaccctcgaaaaaagggtaaacggttgcacttgtttaatgtgcatcaattatgattcactaggtctatgaataggaggagaacatatatagtgcgtcattggtaaaaaaataaaataaataaaccttcggtgttgtttgaaaattacgattaccactccaatttcacgcttaagaatgtttctaacgcttctcaaaattttccaaaaaaataaaaacaaccatcaaaaactgcaaatttgcaaattcctaatctttcagccaagtcaaaaacgcaaacttttggagcataagtatgtcagtgcatctatggagaatcgattagggctaagcaatggaccactaggaccgaccaaggctaagcatgtgtcttagcgccctgggttcctcagtattgttccaccaacaaaatgaaaccaacttcaactgaatgagagaaagttggaaatcgggttggtgagatttacgaggatctagatttactaccatgtatgttatttaacattctaaatatgaatttctaaaacaatgtaaataaagacatataaagtttaagaaaccttacagtgggtgcagcggaatattaatggctccttacccgaatgtccttctcttgattctagattcttcacagccttacacactatgattgagttaccgcttgatgtgtgtgggcacttactccatcactaaggtatgaaaaatatgaagagaagaagagaaggtttggttcgaaaataatagaagagaaggctcaggaa

SEQ ID NO: 219036 - DNA, 4713 bp, Cannabis indica
ataaagtttgatatttagaatgagaaaagaaaaatttgattgtccttttgagacccttttttctgttatttgtggcaagggcttttttgtccttttagttcagttcatttcagcagctagatacaagagtaattcagctggttgaatttgaagagagattttgtaagggaagagagagagagagtgtttaggacattcaactttttggttcaagaagtgaaatcaagggagagtagtcgaattgtatggaccttgaatactagtgccactaagctgtgacagtttagattatttgtcttgttgagtttttgtttgttgtttatgttagattctgcttgctttgagttgatttgtctgtgtttgaacaacaaatgcatagccaaagcatttcacacacctaaaatccgcctcgacagtggactggaagaagaagaagagccactattaccaaaatttatacccttgtacagaaaaccagattctgtagttgccaaattatagttgtgttcactacaatggccacagtttatcacctaagtaagccttaataactttttttagatagtatcattagaaatgatacctttatacaccattccattaatttcaacttggtaaggctccatgacttcttggattgcagaacacaatatctcaaagtcaacatcgattccaacctccttcataaccatgaaacacagcataaatatactttattttaaaccagtccaatcagaaaactaaaagtgaaaaacaaagacaactaagtgatagtagaaaaacacgataaagatgattaaaaagatgttcgtacttgtaaaatgaacatactcaaatacttgggcatcacccatcctataaaagttgctctcgtcaacagtaactcgattgataacagtattgtatttcagcaactgttacaaactaaaatacatatacaaatatttacataagagaattaggaagatgggaaacactatgactttgggcccaaaccagtaaaagggtggcttaattaagagctgtggattgatgagcacttgagaccgaggaatgcaacaaatcttcttaccaaaaacgcgatctaactcccactcataccttttttccagcaaagggcaataatccataacgaaagtttcaaaagatggtggcagtaaaccttcaaaaaagggtggcagcccttttactggaagtgactgcaagttggggcacatatagatgtgtagttctttcaaggatttgagttcttgaaaacccttctcttctaaagttttaagacaagcaacacccgagattttaagggaggtaagactagtcggcagcaacccttgctctagaaaagactccatatcttcgcattcataatcacctatacaaagctcgtcagattaggaagtgcttgtaaattccaattctttcgtgacgcaatgaacttgttgcattttctaatagtgagctcacgcaaattgaaaggcaactcaaatttggggagtgattccaaatttggacagtccaagataattagttctagcaaggacgggaggagacttgacaaatttttgggcagaaatttcaaattgtggcaagaacagaattcaagttgagtaagaatgggacaatgaatgttgctatctagatttaatgtgaaattagggcattgttggatggagagagttgataaagatttgaggctatttagcagtgagaaagactcaagactttcacaattacgaattgtgatattccaaatattgggaaaggaatctagagggagtaatttgaatgagcaaccctcgagatatagcttttccaaatcatcaaaattttgaagattactacatggtttgaatccaataatctttgcacaatgttggactcgtatagtggtgatagttggaatcactgggagtgaagaagcaagcttcggacaataaaaaatatcaagctccgttaaagatggtaagagccaaggcaaatctccagtcagtttctcacacctatgtatagtaagtgatgttagctttggaaatacttccaagtttgcttttggtggtgaccattccttccattttgacattctttttagtgtcaaggattccaacaatggaaacgacttggaagaactactcccataaaattcaagacccaccatctctactgatgcacattcttctatcaaaagagttacaagagaaggcaattgcccaagtggtggaagggtactaaattcacaaaagctcatgtagagatatctcaaattaatgagacgatgtatattcttagggaacttgacaagatgcttacagccgcataactttaatgtctgtaaattgtatagcaaacacacagatttgggcaactctttgattgaagtgtaagagagatccaggtggtgaagatgtattaattgacctattgacttaggcaactcactgacattttcataacctaaagataaaaatctcaaacgcctcaacttcatgatatctttcaacacatcttcatgtaatgtattcaaacggaggtaataatatttagtgacaggcataaatgtacgcaagcaaattgcttcagaaattattttgtatgtctcatgaaaatcatggcagttgatgtcctcttcaaatgcaatgtgtcggatttgcctcacgtgtccaatgtcatacctcttgcctttctctatgtaaacaaatttctttttagatacatgattagccaaatcaacgataagatcatgcattacaaaaacactactattgtatgtaccacttgcaagttgaaaaaaagatcgagaaactaagtcatcaaaatactcatatcccacttctttcatagtcttatttccacttgaatgctgcaataaatgatctaccatccatagcaagaccaactcctcctttctaaataagtagtctttgggaaacattgaacaataaacgaagcatcgttttaaatgtgatggcaaatagtagtagcttaatctcagagctggaagaatatttttctctccagctggtgaatccaaaatatcactctctactattcttttccactccttaatctttgtaaagcacaataggcttgcaactgccttcacggccaatggcaaacctttgcatttcttaacaagttctttgccaattctttccaagtttgaatttgttgttgtaaattcttcatttctagatacaagcttgaaaaataattcaaaacaagcttcttcctttaacacatctagatggtgcgacccagccgttcccacgattaaggcaactttttcgcttcttgttgtcacaattattttgctaccttgtgctccgacattgaaaagcatctttattgtatcccaaaaagagtactcttcattccagacgtcatccaaaactatcaaaaacttctttttgttcagcatttcttgaatcttttcttgcaacacactcaagtcctcaacaccactaacatctctagtcactgctacaagaacagttttcattaccttacaaacatcaaattcatctgagatgcaaacccatgccctcagttcaaagtactttttaacttcatcatcattataaacagcttgagtaagagtagttttgccgatcccacccaatcccacaataggaatcacacacattttttcagtactcacctcatttgacagcaacatccttttcaaaattttcttttcatcatctctaccgaaaaactcagaattatctatggaagatattgaaggtggtttctgtgattggatcttctcaacatctgcttgtatatcaaggatgtacctttgttttacaaaagtgtccagccgctttaaaatcttctccatttctgtctttcttttatgatcagtcaagttaaaattggagaaaattttacttactgtgcttttttggggttccgattcaatcttgagtttgagggcatcatactcgatttcctcaaagagatcagttgcatcttccacagcttcttgaagtttgtccagccacttctcaactctaggatttctaatttgtttctgctccgcgtctccgagcacctcagcaagagagaggaacataatctctagtttgtcaagaagcctatcaaaaccggaatcagcctttcccctcaagaagctccccacatcagaagaagtgatcttcttcagcaaaaaatcaacagaagcatagacagcaggtgcaaccagcaactctagagccatggttcgagtcagtcgttcagttgcaagtacaacaacaaacgattctcacggagcagtagagcactaatgtgtaaaaaagaaccaagatagaatgtctggattgttattattgtaagtaaaacataaaataaattagaacaaattagttaagaaaaataatatcatgtggcatgtaaattgaatatttcttttcagtttgtgtgttgtgacactaaactacaatattattaactaatttcaatgaatgttgttctctcaaatcaagcatatagatctaaccactttatcttcaatatcattctgtaaactatttctggctataattgttgcaattattcaaatgaactgacttttttgacaaattaattacagagaatgaacaatctaaatatttattcagattcaacaaatctttctaaagccaaaacagtctttacttatatacatatatatatatatatatatcactcttctattaagcttataaatatagcata

SEQ ID NO: 219037 - DNA, 6858 bp, Cannabis indica
tttttttctttcttttttctcaattcttgtgtactatcatacaaatcatcaataaaattgagcattattacttctctcttctagttatatgtttaacatatgtgtattgcttttcatttaattatttataacatatgatgttgtattgaagaaaaagagagattaccaatacattattattactatatatttattattaattatatgtgtatatatccctataaattgaaagttgcaaattaagcaaattaattaaattggaaacaatctgcacttgaaatgggtagctcaaattcccaaataaaggagaatatattataattgcttatatatatggaaaacttactattacaaaaaacagctacttttagtgacaattttttagtcacaacataaatttttagtcacaacaaaatgttacttatgattaaaacatagcatttagttacaagttgtcactaatttagttttagtcacaacaaatattgtgactaaaaacacatttagtcacaaagtacaaattgtaatttttgtgactaatacctttagctacggaccttttagtcgcaacataagaataatgttttataattagtcacaatttttttatttttagtcacaaattttgttgtgactgaaaataagattttttgtaatgtacaagagaaaaaaaaaagttataaatcactactgcttaagctcaatggctgtgattactttctctcaacaacataaataacaaaaattaaagaaattataatagatccagctcagcataaactaactactcaaaacagaacctaaagcctatataaacccagattgaagcccgaattgtatacatgctgtaattttcattctcttctagagagtttctccattgttgtaccgagaggaaagaaagaaagagagagttagtaaaagaaaaagaacagaaactaaatgcaatagaggaaaacactgaaaagattatctactaaattatgtgacatataatcttgcagaaacaaagaattgtacctgtttttgacgatagtggaaactcgagtttcattgaggcgagctcgacaaggacgtagcctaaaatttgggtgaacctggacaaaaatctcgtgttctttcgattcgatttgtttacatcttctcttcactctctcttcacttctagtttgattctcagatctatgtgtatttgtgtgtgattgaatctaaaaatcctaatttgaatgtgtgtgtatgttcatcgtgtttgagattcacaaaggagaggctcaagaaggttctgattaaacctaaagagttgctacagttttgatcactttgtaatgaatttgggtcggtgtggttaggccttttataactctcttagtagacgcattaagaatttttagattttcaccaaattttatgttactaaatgggccttatattagagaactagaggacattccactgaatgatcctattgaaacctctaaccctatctctgatttaattcaagcaaatttcatatgagtagcattaaaactgacattgataaatttgatggcttagatgattattggatctggagaagaaaaataagatcattgttggcacaatagaagcttctaagagttcttggagaatctattgaatggccagaagtaaccttcagcattcaaaaagaataaatccttgaaatggcaacatggatcatcattttctatctttatcatgcaattattaggttggtggacaaggaggaaactccagcgagaatctggaagaatttggaagacagcttcaacagaaatctttaactgagatattttctcaaggaaaggatctttggattaaagatgcacaggcaaaagaatctagaaaagaacctagatgatttttttaggatgcacaaaaaactttcaaattctggtgaaaatgaagctctaattgatgagaatcaagccattataatcatgaactcactaccatattcatgcagagaggtgaagacatatgcgagaacttttacaatcctagaggaagtaatctcgacactcaagtccatggatctgaagatgaagaatgaaaaactaagaagttccaagggagaagtacatttaagtcgtggaagaaataattaaaataatccatggaacaatagaggtcctaacagaggtgaagaacatggaaaaggaagttctcaatctagagggcctaaagacctaaatggatgctataccattgagggaaacttggacatttgaggagggatttttatttctggaataggaataagaacaagtctgattgaaatgaaactaatacttactaaggatttacaaaacagaaacctaagaaacaagaagctagcctaagtgatggacatgagagtagagaagtctacactattgctttaaattttcaagatgaatggactctagattctggttgtacatttcatatgaataactaacaataaaaatatgctttctaattacaatgaatctaaaggttaaaatttaatcctagcaacaatcaaacttatataaaaggatctggaacttcaagtttcaagatgtttgatggtgtggtaaggatactaacagaaataagatttgtgcctaacttagctagaaatctaacatctattagtgtgcttgatgattttagtgttgtaagtaagattgaagtaggtacaatgaaacttagcgaaggtgctatgaaaatcaggaaagggtacaaagaaggtgacctatattattacttacaaggagaactagtttctaattgtcacaatattttagctaagactccaaaagactttaaagttatcatatggcatagaattaaggatgggacacgtaagtgaaagtgatttgaaaattgtgagtgattaagacctatattatgtagagacaaagtaagtatatttaatttctctgaacaatgcatcctaggtatgcatcataggttgaaatttaaagttgtgattcaaaaatctaaagatattttagaatatatacattctgacttgtgaggtcctaaaaagacttatactcatggtggtcgtaattactttctatctataattgatgactatttaagaaatgtctgggtatttatattaaaatataaaaaatgatgaattttctaagtttcaagagtgaaaagttttaattaaaaacctgactaacaagaggttaaagactttaaggtcagataatggactacaattctgtaatgatttgtttgaatcttaatgtacaaagacatgtatttagaggaatgaaattgtgagttttaacacctcaatagaatggtgtggtagagagcttgaataggacaatcctaaacaaagctagatgcatgttatttcaaggaggattggctactagattatggggagaagttgtgctcactttagcatatttgatgaacaaatgtccctccattgcagtagaatttaagaatacaaaagagaggtggagtggtaaaccacgagatctgtctcacttaagagtatttgggtgtgcagcttatgcacaccagagtgttggtaaaattgagcttagagctcaaaaatatattttaataggcctgaaggtattaaaaagtatagactatgggtgaggaaaaaatctggtttaaaaactagtaacaatagagatgttatattcaatggaacatttttcccttgtgctactaaaaactctactattgttgaaaatagttctaaaactgacaatgcatttaatattgtaagttttgaccttggaactaggacacaggatgttgtacctgatctagaaggaactgatgatactaaactaaatgcaaatattgttcaagtggaaccggaagagaatgaagagaacaaatttcaggcggaaccttaagaacctatggagaacactagaaatgaacttgataactacaaacttgctagagacacagaaaggagagtgtccttaagcgtaattctaagtacaactataatatctggaaagaagaaaatgcctatgctttactaagcaccctatatgataacaagttgaatccaacgaagaagccataaaatgcaagtatgtgatgaagagatgaagtctctaattaaaataataagacttggctatttgtaaagggaagaatattgtttcctaaaggtggctataaagatagaaggaagggacaaccaaaggtgatccaataagataaaagaccagactagtggtcaaaaggtttactcaaaaaagaaaaaaaaaaggtattgactatactgagatttctctcttgagtcaaatacaacaatgataattatgttgtctttagctgctgatcagtacaacatggaagttgaccaaaggaatatcactctgcttttctacatggtgaactagaagatgacatctatatagaacaatctaaggctatgaggttaaaggaaaatgagatctggtttgtaagttgattaagtcactagctatatggactcaagcagtcttctaggcagtggaactagatctttgatagttttatgagtaagtaaggctttactagaagctaccatgacacatgcttatactttaatggaaccagaattaaacaagtcatttatttgctactctatgtagatgcacgacatgctgataatcagcaaggaaagagtcaaagttaacatggtaaagcaattcctaagttcaaagtttaagaaggaccttagagtggctactaagattttgggtatttctattgaaaagaatagaagaaaaggattccttaagttgtgtaaagaagactacatagagaaactatttgagaagtttcctatgaaggaggctaagaaaaaaattcagcctattactaatcagtaccaagtatttaagaaagactgccctactaccaagaatgagaaggaatagatgagtaaagtgtcatattctaatgttgtaaggtcagttacgtaccaaatggtgaacactagacctgatcttgctttttctataagtgtacttagtagttacatggctaatctaggaaaaaaaaaattagttgttatgaaatagatttccaggtatctaattaggactattgaaactagtttgatctataaacaaacaaaaaatcctactctaatagaagtattttgtgactctaactatgttggggatagagacaccagaagatctgattctgcctattattttttaataggtggaaaatgtgtgagttggagagttcaattgtgttgtattgtggcctagaaactaagtcttagatttatgctcctaggtatatttcccaattctgttagtaactgttataccgatttgttaggtatgtcggttaagttagttatgactacttatagacataactaactataggttaaagggctcaggagtttaattttggagtgtccctttcctgtaataaagattgagagctgagagtgtttgagagagagattgagttctggtgtgagaaaactagcaacttttggtgttgatttctctgatgtatcattgctttcaagctctcaattgggatcacccattcatgtgtaatctcaccttgtacaattgtttaatgggaattgcctcaatggctgaattttaaatttaatttttgtgtttgttttcaatctcatttttcactgctgttatctgtttttgcttttaatactttgatcattttgagttttttgttcttgattttggttactgtgaccgagttggatcacatcaaatggtatcaaagccgaggttcaattcaaggagatcaagaagggtttgattaaagtttcatagcagcaagattgaaatcaagaaatggcaacaaccaagtatgaggttgataagtttacatgagctaatgacttcagcctttggagaatcaagatgagggccttgctggtgcattaaggcattgctgaagccattaatgtagatgttttgaaggcaattgaagatgcaaagaagaaacaagaaatcgagacaaaagcacattctgtcatcttgctcaatcttggagatgaagtgctaagagaagttgctggtgaggagaaagctcttggattatggaagaagcttgctacaatctacatgaagaaatcccttgcaaataagttgtacttgaagaagaagctgtacaccttaaggatggaagatggcaaggaacttagaagacaccttgatgattttaacaagattgttcttgatctgaacaacattgctgtaaaggtagatgacgaggatcaagatattatcctactgagttctctgccaaaattgtatgaacactttgttgatacaattctttatggcaaagacactcttacaatgtcagaagtgaaagctgcattgaactccaaggaaattcaaagtaaatctgatgtaaaaacagagcacaatggtgaggggctgtttgtcaaaggaaggcatgacaagaagggtcacaagaactccaaatatggtggtgatcgagggaaccagaagataaagataggttcaagaaatacaactaacaagaaatgtttctattgcaagaaagaagggcatttcagggatgaatgccttgccctgaaaaacaaactgaagaaagaaaagaacaaagaaaaatggcaagtagatgttgttgatgggtatgattcagccggtgttcttgttgtgtctaatacagactctggacaagaatggatactcgacttaggctgttcctttcacatgtgttcttgtgaagaactgttttgcaatcttgagaagaaaacagggggtactgctttattgggtgacaacaaagcatgcacaattcaagggactggttcaattgtgatgcaaatgaatgatggtgttcaaagaaccatcactgatgtca

SEQ ID NO: 219038 - DNA, 4079 bp, Cannabis indica
aataaagattatttggttgatgcgactcaataaataatctagtttattagagcttagaattaggtccatggttcccgaatcgccaccttaaaatactgtcaagggaaaggataacgagttgtataatgttgtttgaaaaatctattttgaattggcaaaattataattatctatctttgtaataaatatataatttttcaaattatttaaataggaaaaagaccaaagttgttaagacaaaatttgtcaagataatatttgttgagacaaaagttgtcaagactataaacaccatccttgtcctaaataagacaatgtaggcgtctagcttatagtagtgtccataattttgttttttaaacaagagaaaatcttttattcaaaactgagaaaacatacaaagcaagactgaagacacaactttaaaacaatacaaaacgcatactgctaaaaccagcagttgctcccaaaacctactgccaactctttacaatattgagtagatacatgcccattttactaagtttataaggacccaaactcaaaactctacattggaaaaccttcctaatttccaagataatacttctagtcgtgctacaaaccaaattaaaaaatacacttgtttcagttcttccaaatcaagtataaagcaacagaaaacacaacattgacaagaagattcttgaagtcacgagtatccctcgaacaccactgctgaagatccacaaaggactttgaccaatgcatttttctgagccagttacaaatctcctcaaaaactcttatagagaaatcacagtccatgaacaaatggatgtgagtttctttttcagcgacacaaactaggaaaaaatcagtcgagaaattcatgaaccgactcaagagatcacaggtaagcaattgagagttataaacttgccagaaaagaaacatgtgctttggaataatgagcttattccaaactggtttagcatatttaacttcttgagccacaataatcgagtgataaaattgtttaactcaaaacttacctcccttttcagcctatctcaaggaaatctcatctgaattttgtcttagcttcaacaacttcttaaagtacaaactcattttttctttaataggaaggttccaaatgtcttgatccttcagataaaaagaattagtccatcttacccaaagactatcttgtttgctagcgatagcccaaagaaacttcgccatcaaagccatattaaacttcttgccttcttgaaaaccaacaccacttagcttttgggaagacaaaccttctcacaatacgcaatatgaagtttgctacgattctcttttgaaccccaaaggaagtcacaaaaacttttattgggagctataactttatagggaagaatgaaaatactcatctagaaatttctaattctaaacataactgagtgtatctattgggcatggaaaccaaatgacgaattcctactagcccaacaactgtggcctatagtgtagggcacgatttaaaaccgtcgcctatagtataggacacaatttaaaactgtcgcctataccttgttataggcgacggttttaaaccgccgggaactccacattagcgacggtttttaatcgtcatctattttgcccattttacgacggtcgtataggcgacagttatagaaactgacgggaatactttaaacgactgtttaaaaacgtgagaaaatttgtttttgtagtagtgaactcacagatcacagacaacatcaataaacctataaatttctaccctaaatcaataacctataaaccctttcatccaaaaatacaacaaaattaaaagggagggctcgaacacttaccgtagacattagtggtcgcgagtggtcatgggttggtgaaagttcgagatgttcgtgatcgttgttgggtggtcgtgggttggtgagaatctgagatggtggttttttggggttgggatgttggttgtggtggttcaattctagcaaagggagcaagagagaatagagggagagagatgagagtaagttgaaaaatgggaggggtaatttttgatttaatgtaaaattgacctattctaacaattttgataaacttatgtttagtataccaattttagcctaatgaatgcatataaaatcaaatttccaatcttaatgaactttatatagatgtgcaaaaaaatataagggactcatttggtaggccgtataagactcgtatgtattaaataacaaataatacttttgaaaaaatattatattgtattaatcattacgaccttatgttttaatacaatgtgaaccatattattttaatacataacaaatagtgtgtattagtttgtattataatatttacaaagggtctgggatgaactccagtcctagatctcgaactcaaaacctggactcaaatgcaaacctcagacccgaacctaaacctgccccagacccgaacccaaatcccaaacctgaccctggacttagacccagacccgacctcgggcctagacccgaactagggtccgaagtttagggccaggttctcgtctgggttcgggtctcgggttcgagtttggggttcgggtccaaggtttgaggccaattacgggtcttgggtccttattcgagtctgggtcggggtctgagtttgggttggggtccggatctcgggtctgaggtcgaggtttggggatgggatatgggtccaagtccaagccggggttggggtctgggtctcgggtctgaggtcgaggtttggggatgggatctgggtccaagtccaagccagggtcggggttggggtcgagtttattgtaaatatattataattttacataatctattaatacaacttaaaatcaaacatattattgtattaaataatattaatacaaaaggaagattcaatattgaatggttatgtatttataagagtcctagagagagagagatgagcgtgaatgttgatgtcgtgagagagagtcctaaagagagagagagagatgagtgtgaatgttgatgtcggcgccggaaggaaaagacctctgggagaatggtcttccatcaccctctccaccccgttttcttgtgccttttctctataatttctataacccattccttcttcttctctcaatcaaagttcctttctcatctatattttctattaattagtttaaaattgctctctagggggatggtcattcatcattctcttcaccttgctttcgtttgccatttctcttctcaccatccttcactcactttccttgtctggttccttggggcatcttttaggttttaggttgcctctggttttggtggtttggtttctgggttgtaattctgttctgggtgggttcttggggtcggatccggtttttggcctcccccggtgcttctttggccggggtagtaggtttggtctgttatggtggcgtcagtcaacttctggggctcttggttggggtcgacgtcaacataatattgtacaatacaataccatatacaacattatacaaacgagcccgtggagtatttttctttgtttttttattataactattgttctttattgtttgattgagttgcaaattagaagttattttcttctaagtttattttaacgtgatgcctgtgttgttttgtttcttaatctattaagttttaactcaaatagtgttgaacaagagaaaaaatagggttgatgtgtgtagcatagaagtggaatagttttgttcaaccaattttttctcaaagaaaaagaaagaatagtgggttgggcttatactcgtgtttgggctaacttactttttttctattaatttcaaaaatacctattttctatttacattgtagatttggggaaataaattgaaaaagtatgactatggattttgaggccttctgttttatgccaaacacaacaccaccaccacaaaagagtatctagcaaaaagattggatttatttgacgagttttttaaattttgaaccaatcatattaatgtaagatatatctcacttatttaaaattatctgcctgtctatttatatgtg

SEQ ID NO: 219039 - DNA, 3074 bp, Cannabis indica
agtatttttataacatatgtgattatgtgtaatgtgagttgtttgattgcttgggttttgtagtatgcttggaaaataaatcattgttttggtggtattttttaaactttttcttggcttttcttgcaatggccgaatttgatatggttgattgggattcttgtatttttttgatgtaatgtgagtgtttgatgcttgggttttgtagtatagatggtgggtaatgtgtttttggctttgattttgtgtaatttggtggaaaatgaagaaatttgaaacttttagttggttgtgttcttgtatattgaaggacaccatgaacatgaaaaaatttaattttccctccatttttccaattttcattctcaaaaaatgggtaaaaatgtgtttgttgggatgtgatacacttagaaaatttgtgggatgatcatgctttgtgtgggtgtcaagtgttgatctcaggtcacttttctagccacaccccaaggtatctctttgggggtcggggtggtataccccgagttgccttccattgggggtcggggtggtaccctgaggtgcacccacaccccgagttgcattccattgggggtcggggtttaccgccgtggccataatactggagacaccccgagttgcaccacccttgggggtcgggtatgtaccctgagacatcccctttgggggtcaggatatgtacctcgagacacccttttgggggtcagggtgtgtaccccgttattgcctctatgccctgagtttggattattgttatcccaagacacccccttttgaaatcagggtgtgtaccctgaaacacccccctttggggtcggggtatgtaccccatgttgcatctataccccgagctacacacaccgtgtgaccccaagcaaactcccatatatatatatactcattgcatatatagatgtcttattttaatttttattttgaaggagaacatacaccaaggctccccccataatgcctctacttgaccacatatatatatacattatatatttttcattctatatatatagacaacacaccccgagaccacatatatatgttctatgaaaagtctaagtttgtatatagtcaatagtcatgcatgcgtggcctgaaacttcttgttgtagatatatttattcattacacaacccgagactcaatgtgtcccatacaacctccaagtgaccatatatatatatgttcattacatatatatattttatcatgtttttaaagagcacacacaccccaagaaactcattccacaatgcctccacttgaccacatatatatattcattagatacatgtgtgtgttatagattacacacacaccccgagacaactcttcccatattgcctccataccccgagattggggtgtcaccccaatattgataggtcagggtacaccctgagtaagatccgcacactttttttttacgattgaggttgggctgagattatggattagaccaccccattactgccatgcagggatcggggtgtatcactctgagactactccatagggggtcggtgtgtgatgttttgccacaactgtagcgctgcttcacaggttagagatgactatttcttgcatcccttttggggtctcttatatatgctctcatgtgttatttttgcttcttgcacttagtaaaaaaatttaagcatgtaattgtcattgttggttcctccatttagctacatgaatggttattccctcgttgtaaatttttgttatacatgtttcccttctccttttacttttgttctagtaggtgagtccatcataaatagcctactagcattactcggtgtactcatctccctactttttcctttttgcagatgcgttatagcgattattggggaggtgagcaccgagtagacgagcatcttcttcaacatttgttcaaatattgtacatcgtcacctcgccacaactcgtccagggatgaggggtctagtagtgggtcaaaaatgcccaatcacctttatcgagagactataggtggtgaagcgtacaataggcatatctgggagcttggaaaggggatacgatcttacttgccctaagagtggatgtacacacttcctttcgatgagattaacattccaataggggtgcctattgaaccacccagggagcttcccctaaccaagactgttataaccactgcacagctgcctgtcatgttactcgccatggcgcgcactaaaaagaaaaattacgcatgttcttccagtaggtcctcatgcggcggaggtcattaccaagaggagggtattagatgatctcgagactggatctaacaatgaagctatggaagaaatagtgaaagcatttaaggagtgggccgaaaatgaagctgagaatactttccacaaagccaccattgagaaggaaacaatcgagggttccaagcaagtcaccctaaaagttaaggaatttgccctgagagtgattaaggaggtccgtactagccgttgcaaaactacccagactccttttgtggcccctcctagtagtcttagtgaggctcaattctggaatgtagaggaactgaccgtgaacgacaaagtctgccaaatgatactcccctcccccgaccagctagcacatgatcttggaaagggactgtgcacatggtcccatcaccatatcacttatggggggaactccccctccataattttttcaaagatgtggccgattattttggcattagtctggggcagttctcccccatggccatacaaattcttatccccatcttcgttatatacaaggtgatgatatggaattggccaacaggccatgctatacattatctctttgatttgagaccgaacaacaccaagcagtgatcgggctattttgggtttcagcatgggaaaatgaatgttaaattccttcatggcgtagacagggtgtcaaaagagggtgactccagaactctctacttcttggtgaaggacattgggtctaaacacaccacgtaacaccctaactagcataggcgtgttgacgtgattttaaacgtactgtgc

SEQ ID NO: 219040 - DNA, 3350 bp, Cannabis indica
ttgacttcccaaatatatctgaacgcattaaaatcgcatttgacaattaatgttcccaactctttttattacaatatctccgtatttattattcttccaattacttaattaatcttaaatacaatttatgtagatgccgaaaatagaaaataccccctacaataaaagcaaaggggaatcgttacctaaaaattttctaatacataccaaataattcatatttgctatatatatcttgatagactaatttaaataggaataaaataataatatgtcgattacacctatgatacatactctatatattatatacatattttcttaattagaaaaataaaaatatatgtatatcaacatactatatatctacatatcatctcctctcctatattcatagacaaaaaaaatctaactattttcatcaatggcggaattacctattagctatcaaccatgtcccacattggacaaaataaaccctaaaaccaccgtcaccggctaccctgttcgcaaaaaatcttcttcaaccaccaccgatcccgaattattaacttgttcgaaatggttaatagttctttttttcttgtgcctacttttaagtacagtttacgtttgttatctcctttttatattgtcttcttctaaccctgaaatctccgtcatctcaagttctgtagccactgtcgttgcctacaacgtctcaaccaactactacctcgtggatgatttgaaagtagggtttcaggccaagaatctcgccaagaaagatatggtgtacaaaaacattagtttgtttgtgtaccatcgtcataaaaaattctctggttcagtcatgctgactcccactcttttcgaggaaaagagtggggaaaataagaccatatggactactctacgcatgaggttaccaattgatgattggattggttcgaaaagcgacaacaagagtagtactagagatgatgattatgtcgtcgttggagttttggacttggaatttaggtttcaaggttggattatgaacaaaggttggtcaaaagaagagacagaattagttgttactaattgtggtgagactactatacaatttgttaacaaaacgacgtcgttggtggagtttcataggaacccatgtaattacgtagatatcagtgaatggtcttttagttcttttcaacttggcatgctcttattctttttaatgtcaggtatgtttgcttgcattgcggcaatggcaatgggcatttaatatatgttgattttcgttagtaaatgcatataaatatatgtttgagagtactatttttgttctccaattatactttttgatttttaatagaaaatttgcagttaaattttcttgtgttctactttttatacacttaacactcatattatatttttttagcaaatctcccttaactttaatttttttttttttgcaaattaatttgaggtgtcaatcactctgtacacttacgtatatgtgatactaaaacctcgaatatctaactaatgtagggttttactactaaaaaaaataaaagattaactatataaaaattaaaatattaattttttttactacaaattactctttttaatataatggtaatgatttctttgattattatggtgggtatctcacacataataattactttttttattttatttcttaacccatgattatatttataaaccaacccatgtatgtcgtccgtgtgagtaacgtattcagttttttttttttaataaaaaaagaataagttattcaatttgccatgcaaattaattaataaaattttaaaataaataaatgataacaaaaatatatattgagattgattgaaggctaaatagttttaaatttataagtgacgtttatttttagcgtcataagtatttaatgtttgttatcattgagtctagataaaaacatattatgtatcagttacttgcaattattcttttaataaattcaaaaaagtttgtactgacaaaattagagaaaaattacagcattgagtttatgccgcttataaatttaaaattttaggtatttatacccttatttaccctattgaataaataggaaaatttgaagggagaagtagtggagtagttactatatgaaattcagcattttattagcttgttaattttatttttatttttaaaaaatacctgttctttctttgttcccaaattcctaagaatgtatttttcttttttatttcagtaattgctatttcttttgatgggtttgtttgttaataggttgttcttcaagtatgtattgtagtagtaggagttcagttgtggttgtagtcatagtgagtcattggaaggaagagacttcagaaatttacagttctgtactttggaaataggttgaaaatgaggaccaaacaaatgagtttattatgtgggtttgctatgaaaatcccaaatgaaggtgttgaacttgaactggttaagaagaagaaagttgtgaaatcttgagagagcgttgttattgggcatcaatagtttttttgcaccttcttaatgtgttgctttactattggttaacgatactcactaaaagttattacattaaactaagacccgacacctaattgaaccaatattgatattgacatataggagggtactaagttcttgtggtgtagtcttttagcatttctcatctttataagggttgccttatgttgttcacaccactgaaacatgtaattacatgcttgaagttttgatgattcaaaagagggtgaaggatatggctgttgttttcgatttcatgcagaagaacaaggttcatcgagctttgaacacttatcttgttgtttacaaaggtctttacttaaagggtgaaattcaacaagcaccgattgcaatgaatgttatgtaaaaatagcctttataaattttttttagcaaaataattttctatggtcgtagaaacgatcatgaattatactgtgcgaccacatacgagtattaaattaacttaaattattttgcacatttaggtatttgaaatggttagttaagtaaatttctcgattgcgcttgagaagatgagaaatattgggtttgtatttgaaatggttagtttagccttcggaaagagaagggatactcaaactataatgtgtttgttagaagagatggaacatttgggattgaggcctaatatgtatacatttaacatatgcattagagctcttggaagggtggggaaattgatgaggctttctgtgtattgaagaaagtggaagaagagggatgatttacagattgagaggtatgaaactcattccctcaacacattacttgttggttta

SEQ ID NO: 219041 - DNA, 3716 bp, Cannabis indica
tcaatatatattgtgagtgaccgatctgaaaagaaagtggtgagggattaaattcatagcctatatttgaatattatgcatttaattcacatttgactctacaagaaagaagatttttttctgcacaaatttgttacggcaaaattagacacaatgtgctgcaaagttttgccaccaatgcctagtcagtaaaataggttttgctagcgcacttggtgaatgcaccggtaaaactactttacaccggtacttttcttttccgacgaaaggtggcttgtcgttgttaaacttcagctaaatgatcactgaaaagtttttttgacgtaattatgcatcaaagaaagttggtgcgcttttcatttggcgagtaagagttttactagtgcaaatatgcgcaggcaaaaattacacccgagcaatgaaatttggcgggtaatggttatactagcaaaaattttcgctagcaaaaccgttacctgccaaattctattatgcgggtgtaagttttgcccgtgcatatttgcgtgggctataaagtgtgtatgtgtgtttaaaatatttggatatataatttatactttaaaagaacataactaaatgaaaagcgatattcaaatatataattaaatagtatattggtcgagctactataaaaagaagttcaagttctaaagttagcaactaaacaaaagtactaaagtaaaatattaaaatatgtttgagaaaaaaaaatcaaattctaaagttaattataaaatacatatgattctacatactagtaatttcttcatcgttgttgttctgagttgagttgaggaacagtggaagtgggtccatagcaggcaagttggacacaaatactcattgaacatattcatggggatggtatggcagacataaaatttatatatgttgttgaacttttctctattttctcagatggagtaactgtaatctcatgaagtgtaatgtgttgtttgggctctacccctttagaatttttttcctcaatatttgcaccttatatttacctcttactccttttttttttaccaaagcttccacatactacatacatactatacatagagaacatattttcagatttaaaataaaatatttactacatattatgtaacaaaatatttgtgaattattatttgatattaaaatattattacaattacatttcatcatcattattaatatagtattattattaatgccactttctaattctcggcacctatcatttttctcctcaacatttgaaccatcttcttcgtcatcaacaatgaaattatttaaatcttgagttccaagattcacgcaatggatgtttagaactttatttgggtcaacatcatccaactgtgaaagttgtacaacaaattgtgttttggctgagttattttcctagacaatgaatgtattcccatcatcgttttagaaattccacacattctacgtgatgtaatcattgacaagcatccagtttttacctttcttaaaattagggaagtagtatatcaacttagcctgagatacaagtatgaacggttaactttaggatcactcccgtttgacagatatgctagtgaagataacataactatccattttgctccaatttgtgtcaaaccacttacactaaaataataaaacactacagtccttcaaataagtaaactctataattttttcaagtttgacataaaaattatgtccatcttcaccgagcaccataatactgctattttgtgtttttccattatcatccctctcctccacccaaaaatttacaccattcactatgcacttaggataaagataaattgttggataaagtatttatatatggttctacaggcgggtaatgtcatcgtcgtcgttcttctgagtcgagggatggcatggtgatgatccagcaccaagaagagcaaggaatgttggaagtggattcacagtaggaaagtttaaaccatgaacaacaatcaagatactcaaacttatcttggagtcactttaggtagagttattgtgttacatattgctacttcaattactaactttcttcttgtacctcctgaacctgacgttgtaaggcctcatattgttccatagtaacagtctgtaagtcagaagcagaaggcatgacaggtgcttttttggccccaactacctttagtctcagtagatggccaaaacctctcaaatgtcgaggccactctcccaatacttgcatcatgataggtaggtctagtggatattgggtgaggtctatatcatcctgaggaggctgatcacaagtgggtgctggttgatttttaaccagttcagccattttctcctacagattaaaaaaattaaataatcaatttgaatgccaaacaaattgaaagaaatgttcagaaattaataaatatcaatgtaaacttacataagcttgttgcatgtactcattgcacaaactttagaactttcaaaaacagtccacatcacttgaaagttctcctgtctcaaaattagcctatttttaagtagaaatgagtgtcatgattttttttttttttcatttttaagcaagtctttaattcctatctaccttgaattttcatcttaccctatttttttttgttttttgctcaccatgcctgaaattaatatatttcttttgaaagtaattatttattgttcgctataacgtaaagtattattaagaataataatttcgttacatacttattctttttctatactccaataagaaatgcaatcacttcgcacctcctaagttactcctaccagaggttattcatcctctcctctccaagtgactccttattttcaatcccctcttcttacaattgccatgcatttcatgcaaaaattttgatattgtgtacccagcatagtccaaaaaaatacaattatctcgtgggcacacaaactttatctgcaaaaaaagttacacattaaaattagtcattaagtataaattaaagaataatataataaatacctcaagtctatcccacactcaatcaatttcagctttggacgcaagtgctcaatgaaacttattcatgggaatagtgtggcagacatgaaatttacacatgttattcaacttttctccatttttcccgcatggagtgcccgtctcctcatgaagtgtaatgtgttgtttgggctccagccctatagaaatttctttcacaatgttttttttccttatatttacctcatacccctttctttttaccagagcttctacctactacagacatactatacatagagaactattttaaattttaagataaattatcatattcacaacatattatataataaaatattcgtgaattataatttaatattacaacattattactattacaattcatcgtcgtcgtcgtcatcattatcatcagttattgatacaatattatcatcactattattttctaattctaagcactcattatttttgtaaagagaccgcttagttttaatttggaaattagcagataattagggcttaattataaaaattatttatttatgatgatttatttgaattcagaatgcattttatatgtcttttatagaatttcataattttgtatgttttgtgcccagcaacattggaacgcggtgtttggctactagaatcacatcctagtatttttagtatagcaggacaatatagt

SEQ ID NO: 219042 - DNA, 2676 bp, Cannabis indica
taatgttgataaaaaagtaaatgcattgatatggaaagctataataagagcattgctataagacactagtggtgcttagcattatctcgacatgtcgcattgcgattggctagcgatactccctagcaactattatattaaattatatgggacccgatacttaattgaccaataacgatattgacacataggagggtgctagacaccaggtgccctctaacattactcctataataataatggtaatgtatagttgaagatttgtacttgtacacatacatatagaaatacacatggattgtgtacatgcatgtagttgattaataataattgagtttgactgatgagtgtgagattggagaataaagagaaagtgattattacctgcaattggtggtctctgtaaaaaggagaaaagtatggtctcttgatatttgaactccattagggaaagccaacccatctagcacaacatgagttgttttagttggaggatcatatctcagaagtcttccagtggcttctccttccaataatatatagaaatgatccctaaaattcaaattaacatttccattatattgtcatgaaaatttccaataacattatatatttgccaaattattctaatatcattgactaattatttcatcacttgatcatggtttaaattagacaaaatattttgaccaacatagtaatatttataaccgaaaagttaatattttaaagtagaagatataatcattaatgaagtaagaaattatgaaggaaacaaaagaaaatatatatatattttttctattgtttggtaaacaagaaaaaaaaaagttcaaatatgaaagttactgttttgtttgtataattttaattttaataattaatagtgaaggtaattagtaatttacatatttatctttgtccatactcaatttctctccaattttaagaggataaattttatttttctccctcccaaacacatttatttttattacactaatagttaccaaatattattataaataccatgttatagtttggtgtattttttttatcgaaaaaaaatcattttttacactctacttttatctcttaaattttctttaaacatatagggttatagttatgaccaatggccccaatatacaggtgagactagtcctgttttcttataaacatgaaaacacctttgctggcttttgattttgtcacttaacaaaatcaagaaaaacaattacttaatatatatttcgatttgtttaatatattctccattctagatttatatattttattatctttaattttttaaagaatttttttgatatttcaacaaattaatctaattattaaagctgaacataacttttgttcaattataaaagaaagcaataggtagacccatctgtattactatcactacaagacatgtgattaaatatgctgacaaaaatttgatattgcgcttgtaaaatatgaaatttacttctaatgtgttgacaaaaggggttgcgaatcaacgttggtattagaacttttggcagcacaaataaaaagcgttagcaaaaataatttttcccatcgcgtaaatgtgatggtaaaaattagatttagccactgcaaatgtgcgctgataaaactttgacatttttaccagtgcagtttgcaaaatgtgctagtaaaaattatttttacttacgcattagcgaactgtgctgataaaagtgacacttattatagtgtatttatatatagtatacaaattttttgttacttacattctgttgtatctcttactagtgtcggtgaagaaaatagagccattggtgtgaatgtcaaggtcattggcaaagagaatgggttttccatgtacatgggtagccaaaggagtggccacacctccttcactcccaacaacaagaatcccataatatgcatctgcaatgtacaatttcccactctctttatcaaatctcaaccccaatggccgaccacatctcttctctactttccattgcttttttgttgttgattcattcccttttgcacaaagcttctctgacctttcaacacaatcaaattcactacaattagctatacctaaaactaacattcatttatacatttatcattatagtaagacaatataaattaggatgacaaatttctaataagtttttaacaaagactaattaaggttagtgagaaatgtggctatctaataaaaagcctacacatttgctaattgataaataattttttttaattaaagtactaaatataatattacataatttatcaaaattaaagtccctaaaacacataatagagatatgatctataaaactaggtataaattaaaaataataaaaaaaaataggtttttataaaaataccgtattttggacaaaagtttacaattttactgtagccgaaattttttacaaaactatcgacttttataaaacaaccataaaataacaaaacagaataattaaaacaacagtggaactaaaaaataatcgtggaacaactgtaaaaacttaacacagtataaaacttacacaatatttaaagttaaaatttaaatatgtggtgttaaaaccccaaaaaaatataaaaattaaaatagaaaataaaaagggaataaaatttccaaaaccactcaccaat

SEQ ID NO: 219043 - DNA, 3085 bp, Cannabis indica
atgaagatgattttttaagctgtgtctctattgcataatcctagaaaacaaacagtaattgttatttatacaaatttaagcaagctggaaatccaatgcatcctgttattttggaaaaggcaaactaagtaccttgatgcgaactgatccagagggtatcattccttcgggaggttgatcccagtcactgcacattagaacaaaaaaaaaaaaacaacatgatgtgataattttatagctagtagagaaaatctaaacaaaaacaatgaaactaaaatggaacaatatatttcaatcttatcatagttcaccaaggcaagttgattataagaaacaccccagtgaagaatccaattcccaggaatatcacaacctaacagtaagctgccaatgctgttcattcttcccacgatctaatctgatgaagatctttccctcttcctaccaattccaaatcaaaccgatcaacaattactttcatataaaatctcaagaaccatctaagccatgcaatttacaaacattatttttttctatttttccattaaaaatataaattactcaataaaaaaaaaatagtaaaagattgcttcaagcttcaaattttctcgtaaataaattttcagagaaatacttttagaataaaccaaactaaatcaacagagactaacgccaatatagtattttcaaaaaaaaaaaatctaaccaatatagtttgcttcaaagggaaagtcttcttaaacgatacatcagaggatgtagaggtgtcaagaagagctgtatcggtggaactagctctaagaagaagaggtcgcggaggcttgaagttgcagaagaagcgtggttgggcatgggaggaggagaagaggttgttggggtgggcatagaaagaagaggaggagtggaatcgatttgatccggaaaagcaggtggcgtttcgtatacgagagtggtggaagagaggctctatagtaatggtcgacatggcttgggttgggccaatacagagctcccagcattaacaggagaagaaagaagacgacgaaactaatgggagtgtgtttgattttgtttcattccaatgcttttatatatatatctattttgttttgttccttttttcttcacaaaaatttgaacatcatatattctattatactcttcactttattttttaaaatatatatatataatattattaaagcttttactcataaatatccaataagagtagagatattttctgacgtggcatatgatcaaagagggtccccacttatatcattattagtgttatagtaaaaaaaacttaaaaattgaacatccgatccctcttacaaaattaaaaatctaaaatctcatataattttaaaattgtgtgttgtcatcaatatctcactagttctcgttacatttaaagaagattttcactgcataaacaaatcagagttaattatttactttttatatgtgaattttctattataaattcattacttcggcattttaatgtattttggcataaacctgacaaaccttgatcataaaagattatgttatgacctactttttcattatctaaacaaaattaaattagatgacacgattaaaacataaatttaaaaatgtgataaaattgagtatagataaaattatgtttttttttttttgctagaaaaaagaaatcgtgtggtgtagatttcgtctccatccctttggccttaaggtaactccagagaccacgtgctagctataggagtcttatatatcatcctgcgttacttgggtcatcaatacttacatctcatgaggattcctatcccaaatatagcccatcacatagcaaagttagccttcaaaggccaagtgtaatccctcgtaattgaggggtcaggtaagagtcgaactcttgacccaaacaagggagtaggctaccactataccacacaacacatggttatagttaaatatgttctttgagtaaatttatatatagaactatcttaaatgtatgatcactacactgaattgcgtaattttttttagaacaatgagttgtgtaaatggaagcttcatctagtaattaagtataaaaagaaaattgagtcatttgattgaatttgtcagattgagtcctttaattcgctcataattcactaagcactcaatgtattttatacgtacaaaaattttcttttaaattttttttaactagtaaacaacccgcgctttgcgtgcggttatatattgtttaatgatgattgagtcataaaaatatatcaaatttcaaattttgatattttttatatatattttaatgatataagtaactaatttattattttttcaatcttaataatacaaaagaaaattaatatcttacaaattattttaaacctagtaaattataatttttaattaatcaaattattattgctatattattgaataaattaaattgaaattcaaaaagtatatataatataacaattaataattttataaaaaactcatgatttcaaaactgttgttatcaccaaatttgacataattaccactacaatcaaagtcattatcatcgtcgtatctcacttataatcgtcactaccattcccaataagtttgctcctgtatacaaaataaattaaatattgagttagctactcacttttatacataaataaaactgtaaaagtatctaatcaaagtaaatcgtcactatcatttttaataagtttactctatataaaataaattaataaaataattggttaactattcacttttatacaaatgttatagtgaataaaatattaaaaatagataaatcctcacgaaaaaaatagagatataaaaaaagatgattgaatataaatctaaaaaaaaaaaaaaaaaaactctaactactatttcaaaattgttgtcatcatcatatcttatttgtagtcgtcaatatattcaaagtagatgtcatcaccaaataaaagaaatatagcaaataattattaccaaagtcattttagagtgcgtgtcataaaaatatataggctaattagtaatttttctcccctgaactttgacatgt

SEQ ID NO: 219044 - DNA, 3986 bp, Cannabis indica
atcttgataatactctgcgacataaaggatacaaggggttagagatctgagtggaaggagactttattccgctgcatcaatgtaaggtttcttaactttatctgtgtttaataatcattttagaaagttcatatttagggtgtttaaacaacatacttgtgagtagatctaagatcctggtaaaatgaattccaacacttatctccgggtccgcattgagctcgatgttgcccagccacttttgcgtggtacgggctttcatttccatggaatggcagccctggtttggcttgaatttcgtttcaaaaatctcccagatttctgtcattactgcggacgtcttagccatatcatgaaccattattatgagtttcttgcaaaatgtgattcctcctcggctcctcatttgctttgctatgatcaatctttaggggccaaaattcggatcactttaaatcccttttacattgcttgcttaagaactcggttgaggccacacatagctaacccaatctcattggcccccactcctcattaccgtcttcaccagcctccaatcatctcggaaggccttttcaatgagcccacttctgcttatggtgctcaacaattgagcaagccgcaaactactcctatggggttttatatggctcactcctcacccaatgtgctcacttcccacacccataaccttaatcaacccactcttcctactaccacatggctttaccctccagctcctgtcaccgccacacagactgctcacacccaaggtgaatccaatttcctcactcaaaccaataccattcccactagctcctcaccttccccacctatcaccacaactgagcaacttactatacctctcccaaaggccatatccacttcggccgagactattgtggccacaaatggtgcaccccagcatgttgtacctgtctcccaagctttctccaccattttggcggaccttaactcgattcagccactccgatttgttattggagcaccttctaatccagctcccactacttctggaatccgcaagaacagacccaagcggaccgattgcctgaatgctgctgaattcagaaaaatgctcaaacgcacacacaacttatccaagtcccttgatgaagagatagttgaagaggcgggtgacgctcaccgtacccgcctagagccatgagtatcatcagttggaatgctcgtggattagggagtaaacaagcatttcgttctctctcccttttagtgaagcaatatcgcccaactcttttgtatataatggagtctaaactccctgttggagctttaaataaatttgcttcgtgtcttaaatttcctaacggtcttgaagtcccacgtgtcgggcttagtggtggtcttttgttgctctggacacatgatgtggatgtaaccttactttcttataatataagttactttcactgttatattaaatttcctaattttattgcttttacttttactgctttttatggtgcgccaaaccctcaaaataagccgcactcatggcaattaattgatcgtctttgaactaactctcgattacaaccttggctcatcatgggtgattttaatgattacctttccctttctgacaaagtcgggggtgacatgtctcgtagtccatctactcaatttcaatccttcgttgatacccatgagcttcatcctatttatcctttgggtagtcccttcacttggactaaccgacaaaaatagccgtctcacacctaagagagacttgactggtgcctttctaatactgtttgggatgcaaattttcctaatcctcgtctttgtcatggagattttttttggctctgatcataagccattaatcctcactttgcataaccccgcagatcaaactaagctttccccaagattcatctttgataagctttggatgtccgagcctggttttgaggattgcctctgtgaatcttggacgttgaataaccagatcatcatactccattgcttggattcacagaaaaattgcataattgcttgtcccgtcttactcattggaagcaatctttaggacctcctcttgctactaaaattcgtgaaattcaatctcaactcaaacttgttcaatctctccctcggcccactaatgatcaattagaccagggaaggactcttgaaagagaattaaacagtttgttacagaaaaaggaagcatactggaaacaacggtcccgtgtcacatggcttcgactcggagataaaaatactcgatatttccatcgtatcgcttccatgaggcgtcaaactaacaaaattcattctctccaacactctgatggttccacggcaaatgatacaacctctattttgacaaccattgagcattattttcccacctgtttcaaagccaatcacccgatgacgatatcatcgattctgtactatcaggcattacagagtgtcttaccgaggcagaagttgagcttctccgggctaccttttctgctactgaaatcaagaaagctgcattccaacttgcaaatgacaaagcactggggctagatggtttcagtggttgtttctttcaaaataattggcatttgctggggaaagatatcattactgccgcccaaagctttctgaatggagatgcagacttagcgggtatcaacaagacgttaattgttcttatccctaaaaaaccaaaccctgagcagataacggactaccgtcctattagcctctgatccactttctacaaaatcatatctagggttctggttaaccgtctcaaaccaattcttagtcgcataatctcccctaaccaaagtgctttccttccaaactgtttaatctctgataacattatcattggtcaggaggtcatgcattccctatcccatcgtcaatcggggcgcctgggatggatggcactgaagcttgatatggccaaggcttttgatcacgtcgaatgggtttttgtccgccgagtaatggagaaattttcttttcctgagcgcttcattaaccttgttatggcccgtgtctctactgcaactttttccttctccattaaccactaggttcttgggcattttaagcatacccggggaattcgccaaggagatcctctttctccgtacttatttattttatgctctgaaggtctttcatctctcattcacctcaaaactcaacagatccaaccccgcagacattcacttagaattaaaattgccaggagagccccaagtatttctcatctcttctttgctgatgatagccttctttttagctctacttcccccgatgctgcaactattatcaagcaaattcttagtgattatagcctagcctctggccaattggtaaattttaccaaatcagcattgttcttttcgccgaataccaccactgagatcaaaaacagcgttgctactatccttggcatacctgtttgagatacctttgacaaatatttgggccttcctcaagcatttggaagaacaaaaaagtatgccttcaattacattaaggatcgggtttggtctcatcttaacaaatggaattccaagcttttttcaaaagggggtaaagaagtccttttaaaatctattgtccaagccatcccctcatatgctatggcctgctttaggctccctgcctcctttcattctaagcttgaatccatgatggctcggttttggtgggggggaacgaaatacaactgaaaaattcactggagagcatggtcttccctttgtttttcaaaataccatggaggtcttggttttcgatcaatgaaagctttcaatcaggcgatgctggccaaacaagcttggcggcttcttcagtcttctcactcacttgttgccaccttactcaaatcccgttactttccacactctagtttccttaattctggaaagggccataggccttctcttgtttggactagtatcacttggggcaaagaacttctc

SEQ ID NO: 219045 - DNA, 1846 bp, Cannabis indica
aatattaacctatactcagtactgtagtcgtactaatgtgatagtatcaatcaacacttgtgccaaacttatatccattagtattcagtgtaactctatgtacactaataccgacattactgatatgttaagtaataagaatttccaaacatgcacgctaaacatgtaatcacatatgatactattatactaatcttacctcaattctgaattcaagttttttggtaaacctgagtggaaccgttgctcgatggtttacaggcccctaagtcacaacatattcaaagtgatacgctaaataactttttggagacttaaactcataaataaaagtttttctattgatatatagcgtgactaaagcctaaacatcgagaaaacattgaaaaatgaggttcttaaaaaacaccaatagaaatggcaagtcgtttcctaaaaacggcaagccatttttttaggtctctaactgccaaaaatggtaagccatttttggaaaaacgacttgtcgatttttactaaagaatcacaagaaacttcataattcaaagaattcaatcctaacttaccaaaagttctagatcacgtaattagaccataactagcataaacaatatgaaaaatccatcatcaagctaaaaatttaacaaccacaactaaaggatcaaccttgagcttgagaactcaattcaagttaaaacatagctacagccatcaaaacctactcaaaactactcaaataataacataaaaactgtagaaacaaaataacaaattcatgcatgaaatctcacttattactaaagaaactaaagggtaaaggcttaccttggttaacacttggaatccctaccaaaatccttgctagatcataagaacgatgaatcaaaaaccttggttccttgctggttttaagagaggcccagagagagagacttagagacagtgagtaatttaggtttttctaatttgtgttattttggttaagtgtcaaacaaagagataaagttaacctcttaattaataattacaataaaagattatacaacaaatcaagaactaactcaagacaaagctaggggaaaaagataattctacctttgcttaaacataaaataaccaacatgcttagggctaatcagcaattctacaaagctactactcagagcagctggtactggaggaaaattatggaagtaaaaaataaaatcattaatctcatgaacccgacacaatttacagctcagaagtatcaaattgccactggttataagttacttcaacccaatgtagacaagataagatggtgtaaaaaagtgtggtcactactaagaaaatcttaaatatttaaccataatgaagtagattctgcgaatacaagtactccagtcggatgggtggataaattttgtattgttgatgtttttcatttgttctgtattgttttatttgttttgtttgttattttaggtatttttattacttttggaaacgtttaattacaattgttatgctgcagaaattttgataagattaagataaattttattgaaagaaagtcaatattttttttgttttctatattagaaaagttcactggttcgatattttttggatgtaatgcatattgaaaaaatatgtatgagagtattatcggtaccttacttgatattcccagcaaaactaaggatggtttaaatagtcgtttagatattgttaaaatgggtatacgacaatctctagcacctgaaaagaaaaaaggtgaacgattatatttgtctcctacttatcactttgtccaaaaaggaaaaccagatggtttgcagatcattttcaaatatgaaagtac

SEQ ID NO: 219046 - DNA, 5482 bp, Cannabis indica
ttttatattatttttgaatactgagtattattaaaaaaatggttgatagtcattggaaaattaaatctatcatattctcattttagaatagaaacctaatcttttttgcactcgttggttgctttgattagctttctaattttttttttgacacaaaatagcttctactttattagactttttcttcgtttttattgtttcaacttggtatgttattgttgattggttctgctctatcaacattatcttttcttaatgaactatcccatttacctattaataaatatttcatttacttttttttaaacaaatttacctacattttcttttttctcccaaccagcctagggaaactaacaaaatttcttgagaaaaagacagtaaaatatttggttttaagttccaaaagtcccactttgcggaaaaaaaaaagtcccaaaagtcccaaatatctgattaagaaagcaacgagacgatgcaattgagaaatcttaagacagggtttgcttgggcgttgagataagattgttgctgaactctgcggcaatgaaaagtagagagatgagtataacaacacactgaaatgtatttgtacagacagagagagacccaaatgtaaaagcaaccaaactttctcaaccaaacacaggatttttggcagctttttctttcatatgttaacacatacacacgtaaagtttctgcctatataacgctgctgttgcacgctttttttagttgggttttccttatcatcattttgcttcaagaatattggtgttcattgcttgatagaaaaaacaggggaacattttgattaagttgctattattggaaagatcttgatttcatagcataaaatataaattgtgaatcaagggtgaagaataaaaaaccccttgtcaataaaaatgggaagaacataatccggaacatgttatatagaagcactacattggcaatttcgattcctatgcacatttataagtttttaacttgtggtccatcttgttgggaacttgcaaagcaccagtaaatgattcctgaagtgcttctatcaatgaatttcagcggagctctaaccatctaaccggattggcttgtcgtcttttttaagctgttaaacttaactttgagatctctatcaggatcttgtgaagagcttggggctttgagaaaaatggtgagtgatcggcgcctttcaggcggaagactcgttctggagggtctgcatttatcatgctctgctggtgtgttatggatatggcattgtcttctggagtttctatgtaaaaccgcctcactgtcccgtatttcttgtcagaaagagagagcttctccaaggctggtgcaaatggaattggcctcattgaaacggatgccaatgcgacatccttgatcgggagaagcaaaagtgtagtcagaaaaagtaataaaatgtaaagagtgtttgtatttaggaaagatattaaagtgctgatacagtgccttctcataatttattacttaaatctcttcaatgtggtaagaaaagagataaacagtcataccttggaaggactttggttaaatagcaaatccttcagcagtgacttatctagatcaatagcagttggagggtgatcatttccatttgcatacaaaaatacctgggcctggcgcattaaatcatctgaaccagcctgcagtgtcttaagctttagtcataaaccatatttacatgcactgcacactttctttatagaaattacaaattcacaagtgggtcactccaaaattggattgccaagttctacaatctacatctatgtacatttgaacagagaaatgattttgctcagaaattccatggatactccaaaccaagcaaagaaacatggatatgaaagaaagtagtcttagtatcaggaatgtgtgggtttggaatggggggtaggaaggggtgagtagcccaagtacaatgagtatccgggcagatcaaacatcaaaaattaatgtcgaataagcacaaacgataagatataaagagtgtaacctgttgggagaacatatcaagagtactttgtccatttttcaacattgctgccgcaagaaaaacagccttcgaaattttaagaggaaatagctccatagcatatgcaatgcacgcaccaccaaaatcatgtcccaccaagatcacctgcacaatttgtccaaacaaatttctacatcaatatatatctagctagacccagctagaaaccactgtcattacaaaaagccagaaatatacaatatgtgcaatcacataaagtatctagtagtaaagcatttttttaaccaaagacgacatgtgagtagattagacaaatcaaatgtctaggaaataccttctctccctcagcaagtttttcaagaaaatcagtaagtggcttcacatattgtgaaaggtttgtaatgctatttgcatcagatgaatgaattccagagccagtcaagtctatcgcagtgactttaaaactgcattcttctaagagagcaatagttttataccaacaccaagcaccaaagccacctccatgaacaaggacaaaatggctggtttctaaatcatcatgctttacatcctgataccacaaaagaggatcgtcaggattctaggaagccaatgaataggcagagataattttgaaggaaagatgcttgagtcaataacatgtactagcatttaataaaggtatcagccacattgaactatgaaagaataaacagaattatgaaactaacatctagatgaaataatacaagaaagaaagcctgagcaaaaagaaaaaaaatacaaatttttaacttgtagttgtatcctctacagataattttgaacatctaatagaagtaaatctcagcagcattcatatgctgtaaattgtatgtatctgcatctggtaaaaaggtccaaatgtaataagattgaatcaaatcaatcactgtacaaatttattgatagtccaaaaatgtgacaaattttgtgcagagacatccacctatttctgtttgccaaagtatcatgaaccaaatcaggaccatgaatctctactcatacagaattgttatacatctagccttccacttcagggatatatgtttaccaattcgggttacttttcacatcatgtaaaccaaactacttacatattaatttatgtatgtatacttaataaatctacaaatgcgcctaaactgcattcttgcacccatcaagggcaaacataaaaataatgaagctatactacttcaagtatgactttttgttctctttgagtttgaggtgggtattggggcctggcaaggaaaaataacataatttcataaatgattggagcccaccaactcttcaattttgaaagagcttaccaacgactaaacatttattctatatggccaccttaaatgaagagggtgcagtccgtaaatgtaactaataaagatagaacagacttctagatttgataattaccctcgtatccaatctacattgttctaatagcttataaaaaaaaaaggataaaatacacagccaaacagagctacatgtactattatataggtgtcactctgtgtccataaccacggtttgtagtcgtgtttagaagacacagatgccatcaaaaatcaaactttgaaatcattatttatcaatgaatcaatgagaatatggcacaaagttaccacatcaagaatctcgaattcatgagcacaaaccgacaaagtcaataagaccaaaaaaaaaatgtggaaagaaactctaaagcgccacattatgaaactttaaatcattaattatttcctttccttttaataaaaagggatcaagtttcaatatgtaaaaatctctcaccaaactaaaagccaagcaaaacaattgtgtatactatcaaagtcataacaaacatataagaagggactcaaaagctaatatttgagatatacccaacccaagtacaaatttgatgttttacttccataaccattttcaaacaaacaaaaatagaagtaaacaaaagcccataaagtcgaacctggttaacaagctgttgcggctgcagcagagggtcagtgagggaccgagctcgggagcttgaacttctgggcaaggtgttactgctcttcttggagttagaattcgggtaccgaagcgaagaggaacggtcaaaagggagagacccattttggctgtggtgctgctgaaagaggatcgcggcggcgagagcttgttcacgaagcaaaccgtcgtcgagcttctccttccgggaggatcggatccgggcccatcggttgctcgaattggcatgcggcggcgggttttggaggcgcttcgtgggctttttcttcactgatttgggtgcgaggcaagcacatagattgcccattaatggcggttatcatgtatataaaaataataaatataaataaaaaaaatcccagataggataaaagctttggaggcggcagagagagaaaacagaggtcgatgatggtgatgaactgggcctcacgagaaaggaggagagattggtttggtgatggacatagtcatgagcaggtaacgactgaagaggaggactttatatataatacgtatgactattttagagaaaagagagagatactgtaatggcaactatagtaaatattgtattattaaatctgacttttttttaaaaaaaaattattaaatctgactttctttttttttttttgaaacagcttaaatctgacttcatgaaaggcaattaattagttttaattaattgaataaaccttatgaggtttgatgggttgataattataacatcttattacaattctaaattaactattctatttgaattcattgaaattatttttttttatttttttttaaaaatcgtatttgttctagtaatagtattatttttgtaatttttaaaatttttctgaataatttaccgtaccgaaaatagagtttttgatattctaatttatcaagcgtgtttaaaaaacatcaaatgtattttcggtacggtaaactatttaatttttttaaaaaaattacaggaataatgttgtaagcataacaaataccgctatgaaaaaaaaaatttaacatgtattttcaaacaattaaagttaattaaaagattgtaataaacagtagttgacggcatcactccttaaaaaataaacgtatatatttattttacattaatcatctgtaggtaatttgtgcgtttcatattatagtaattaccaaactgattttactaattgaataaatatatttgatatgattttatataaaaataaataaataaataataataataattgaatgaattatgaacccaagtttcaaagtaaacattatatatatatatatgttttttgcattacatttaaattgattgaaatctataaaaaatctataaaaaaacaaccccattttgcaattttattttttata

SEQ ID NO: 219047 - DNA, 3911 bp, Cannabis indica
accaataacttcctacgagaagtattttattactaacccagtacttgtccagaagctaaatgggacatggagaacgtgcatatatttctttgacttgaataaagcttgcccgaaagactacttttcactaccgaggattgaccaatttgtagatgtgacagtaagacatgaattaatgactttcatgtttgcatattcttgttataaccagattaaaatgcatgtctcagatcaagagcatacaagctccataacaaatatgggacagtattgttataaagttatgacattcagattgaagaatgctggagcaacatatcagtccctcatgaatggtatgttcaaaaaccacatactcgtgagtacattcaaaaactaaagacaacaccttcaacatggttcacctcacaattgtctaactgcaataagcatctcacgtatgcctaagtcatcattaatggaagaacgcaagaagtattacttgacgtatacttagacactgatttttatgataaagcatctaaaagataattgttacattacgagaagaatgaagcttagtcaacataattgcctatagataaagttaaaagagcaataatgaaaagttacttttaattatcccatgtgcggaaatatgatatgtgaggattgtccatgtttcaaaaatagttacaagtaataagattccaagagaataactatcatcatagactcttataaatagagacagaatctacggaacaagggatggccaattaggaaaaagaagagaattatatccatcatctattctataaaacaatttattgtattctatatacaatttatcaatccctgaataagatagacttgtggactatgaagagttgacttcaaaaatacgtaaaagatcctcttgtcatttattactattatgattattagtcactgcccatttaattctgaagtatatgaattacaaaaaaggcttatttattaattaataaaaatctacgttaacacctctcaatgcctctctctcaacacaataggaacttaaggaatccccttcaaattgggtaccattatcagtgatgattgtgtaaggcacccttaacaaacatattaagaacttattaatgaaggataccacttgcttagcggtgaagctgaccaaggctttcgcttctacccatttagtgtaataatctatttccaccacaacatatttcaccccagccctacttgttggtaaaaccctaattagatcaatcccccacatggcaagcgaccatagactagtcatgcttgtgagctcgaccgggggtgccggttgtagttagcgcgtctttaacatttgtcacattttcttacgaactctgttgcatccttctacaagataggctagtagtatccttatttcaacactttacttgacatcgaataacatcccgcatggttcccgcattccccttcgtttattttcagataaaacttgatgcacttcactttctcttatgcagcacatgagtagagtaaagaaacttttcttgtataggacccatccattaaaacatatctagcaaatttatactagattgtcctagcctccttcttgtccaagggaaaattcccttcttggatgtactcgatgtacgacatcatctagaagggttcttcacttcctacttgtagaactccaccaacacagaatctaaaatgtcaatctcttgggttgatgcaagcttagctaaggcatcggcattgataattctttcccttgggatttgctcaactgtgaaatggtgtagctgctcctggtagcatttaactttggacatgtacgccgccattcttggctccttcgcttggtattctcaccgtacttggaaactactagttgcgagtcactaaaaatccgtagtcgagtaactttcaattccttagggagtctcaacgcaaccaacattctttcgtacccagcttcgctgtttgaagccttgaatctaaaccttatcgtacaatacatttaggttcctccaagagatgtcatcaccaccctagctcatgctccattgtcagttgaggctccgtctacatacagctccaaggtggcctctctctttccactttctaccaactcttcaccgatctcctgctcttgatccttcccatccgaacgataggttaattctgccatgaaatcggacatcacttgaccgttgattgatactctcggggtgtaagtgatgctgaattagcttagctcctatggataattttgttagaaatattttaccaacatgtagatttactaacatgtatgttggattataattgcataatctaacatcctaaatatatgaatttcctaaaaacaataaattaaacatgtaaaagttatagaaaaccttacattgatggcagcaaaataatatgactccctccgtttagatctctaactcttgatcctttctgttgtagattgtgatcaagattcaaacctggattcttcttctggtgacaattggacaacatagtcttcctcactattctgagcattgctttgaaatgtgtgggcaagttctcaacactaaggagcatgaattttgatgaagaaatccaagagaaaataacctcaaaatttttgaaaatttaagagaagaagaagtgagctttttaaggttttctagcttagaatgtcatcatcaaacaaagctctcttctctttctatttgtaggcttcacttagggttaggtttagatgagatgggcttaaaataaagacttgagctgaatcaactcttaggaccgaattgtatatgggctttagagttagatttatgccgccttattttatttaaatgaaacaatgtgtttttttttaatttaaccacgtatctcttctaattatttaaatgttaattttatttattaatcataaatagttatcaaagaaaataaaatttaaatatatttattaattagacccacagagtgtcttaattaataaataaatccatatttctcttttcttctcaaatatgctcttctttagtaaaattcataaataagacatagtaattattattaatcttaattgattacataaatcaattaattgagactacaaaataatatcatcacagttagtgtggggaccatgagtctatttaacaaagctcctaataagtaattctaaaatttaccgagtaaattctctattttatttattcttcctgactccactatagattcagaattgcactcttgactacataaacgctctattcactgagaatagatacgctataaattatccattatttcaatcaaaataataaaagatcctctatagatgatttgcattgagtaaggatgaatttacaattttaccgttcaatgtattttatccttaaaacacttagcttcttataaatggtatttcaacaaactaatataattactgaaataagagctcttccatttatgtctgttactcaagctctaagaaaattatcattttacttctaaataattatagaagctatagattctatatctatgattagcactctcaccaattgcactaccgtgttccccagatgtaagtattgagttgatcctctagtaagcttgcaatgaacaactcaaagaacacacgtagaacagttaagctagaacctaaccatctcaagattaagacctttaatctaagattaactaagtgacattgaattagaaaaaatacaacagtaagtttgtgatatcttttctactattaatataggtctagtccaatgtatagctaatacatctgatactactatactttgctaataccttagaaaggacattccacatatcactatgtaagtacattttatcgttgattatcatgtcagtgtaaatccaatgcattgataaat

SEQ ID NO: 219048 - DNA, 3838 bp, Cannabis indica
tttgatccattaatcaaaattatattatatttcattaaaatttagtcactttttaaaagtaaattgcccaatataccctcaccctttacttaagtctagcacataatttacattaacctaagggatataataaggacatcatctataaaagtaagtatatcttaaaaattatacaaataaagataaaaattaaaacatataaaataaaataaatatacaatatatattcctaaaaaaatcaaatactggttaaatgatatcacttagtgatgatatttagtatttattattattattttttatgtatatagtgttatctgctgtaagtagacttgtgtttaatatttacgtataacatttacaaaatacaactgcctagaattatctccactacacctttcaaatcaactcctttggtacaaatttgatgattcctgttgttcaagaagctgttcctttggattcttgaacttctaactcatgttcagcaactaagatacacgaatcggcttcgagagttgaggaggaagagtttttcgactttaatattgattccttagaagatgttaacatatctgcagtgcactgtacatcaggagtaatgccaactttatcaatgtcatgaagcgccggggataagtactttgccaccgtaacaaacaaggccgatccatcattaagctcggtcacagtctgcagatagagatattagctgtaatgttgaagggtatctttaaactcaatgagttttgtgttttgataaagtaaaaataaaaacaaacaaggacctttgacagttggtgaatacctggattcttcctttcccaaaggttttgcgtccaacaagaatagctctgccgttgtcatggagtgctcccgccaagatctcacttgcacttgcacttccctcattgacctgtttgacatgacgaaaaccagatcaccaatcaaaacatattatgagaaggagtttatattgtctgaagagtttgaatattaactcacaagaacagcaagtggatcatgggttatagcatgtccattgaccatgttaattggttgcatattcccctctcgatcgattgcattgaccagagtctcatccccgtctaaccatatttcggcaacctcaagtcctgctcttactagtcccccctgagtcacaaataacaggatcatatagcagagtaagctaccaaatgtttaaagccaaacataaaaccttttaaagattttccatttatgaaagtggaaatgtaaacagaaaacattaccgggttattccgcagatccaatatgtatgaatgcacaccctgatcttccatttgatgaatagcattctccatgtccggggcagcagtctgtcaaaagtcgcatgaaaggattaggaacacccagttaaaggtgtcgtcgtatcactaggctatgcctatgattacaagcaatattgatatataattttacattttctttggacttgtatataatgggcttattgttatcctataagtattatggttattattaataataataaaaagaaaaccaagcacttgcatggttcaaaacccttgtgcatggtaacttacctgagaaaattctctcagcttgacataaccagtctttgttacatgtccatctggggttatgtgattgataatagcacttgaaattggagaaaacatgatcttctcacgagaaagtttgaccttcaaaaagagatatctcattacaaaaatggttaatcttgattaatactataaaaatacatgaatgctatcagaatattatagagtcaaagatttaagatgctcattcaggcatattagcctttcatcaagttatgcccatatactaatgaatgatctaaattctaatacctctcttaatggagactcatttctggaatttgttccctgcataacataacatatcgtcagttgaaacaattatgtatttacgaagacataagtcaaacttgtatgctcgaaatgccatcccaaaccagtttcaagaaaattggttaagctcaagactaagaatcaaagaaattatattccagatttctgctataacttcggaaaaaaggggtcgaaaattacactttgaacttttaatgtaaccgttgttccagcacgacctctaagcttcattgcagcggcttcactgtctataccatcaagcctctctcctgaagtcaaaccaaaatcatttgaaattgttttaagcaaaaagtgaatctgtagtataatttctcttcagacagtttgctggatacaatgtgacaaagttaaaaggttctaacttcattcaatctaaagatatgatttcattttgttacatagtaagaagggtgagatgcataaaaagtaatataccgttaatttccaccaactcatctccgtcttggataccagcacgagcagctgggctatcctctacactagacaaaacaacctgcatttcaaattcagaagtgaatgagaaaagaaaaacacaaagaattatgctattgttaatgctattgtaaaatcaaaatattttgcttacttcaaaactctattaccaacaaatattttgcttcaatttataaaagcacaaggtgttttgtctaactagggtgacaaattatccttctgttatcatttggtattagatgcagataaatatgcacccccaaagattaacatccaagctatgaggaatatagaagaacagatgattcaaacagaatccatatcgatgcaataaagattagaagggccagaaagtattgttttctaaatatacctaccaaatggccagtgtttggttcaacagatatgaaaagtccaactccctgaagatttccatcactctcaatcctaaaactttggtaatcctgcaagtacaacagattattagttgggcaccaatgattatttctgatgtagagtttcacaattcattaaagaaagatttgttgactccaactcaatactcaagttcaaacaccaagtaaacaaaaatgaaactacataaacatgtattgtagccaataaattcaattatgtctgtgaatcataaccaaatacaaattttaacaccagaggaaataaatgaatagtaaaaccttgggactgataatcctagtaaaagggtctccaagtgtagagagcattgcactgattttggtatatgctgcatcagctgagttaaggggaaacatctacaccattgtctgctgcaacttcagatcccaatctgtaaaaccactctcttcaatttaactaaacacttgcaaattataaattataactttgtgaaacaaacaacccattaccttgatgattaaatgttgggtcaacagatgtctctctaatcaaaccccaagcctccacaagagttcgttgaactctattcacctaagcaaacaagacaaaaacacttcattcaatcagtgattcatccaaattttcagcccaaacataaaaaaagatcccaaaatgtcaatcacctcaggagctcgagaaacaggaaaagcaacagtaagagactcagcaagagccggggaatcgcaataaaccgaaaacaaagccgccgcagccgctgcaaacccaacaaagccttttcccatcgatttcaaccatacccggctgcccatttccgacttggaagtagtagcctcctccatgtgccgagaacagcaaaatgacaccctccatttagagctcaaacgtcgatttgaggtttgatatcgatcaaaaggcagagaaggcgaagtgggcagtgcaaattttgatggtataagcgaaaaccggggtgttcttatggtgctgaggtcgagactgggactggg

SEQ ID NO: 219049 - DNA, 2880 bp, Cannabis indica
gtttataatcatcataccagcccccacaatacctactccatcatcctagcattcacgtacaaaaaaataatttatcaatcaatactttagtctaaattcctatcaaaacacagagtaacttgaaaaagagggtcaaaattaagaaaaacttacttatggtacgatgcgaggatgaaggaggacgagagtagttggccttgaaatcaagagcccagcaaagaacttgatcaaagcctgcttgaatgtcgatggtcttggacgaatggaggtggctcacaatcgggttcaaaggcggtgctactggaaaatccctcgcttagatttgtagtaaaaggtggatgagaacattgcaaagctcactcattcaccgaagaatgtaacttgggatttcttgcatttttctttacaatttttcttctttgctaaaaagaaggttgattctcaaagtttgaagatgaaaactcaaaatttcaaaaatacaaaaatggtgaacataggtccctcatgcctatatataggtgaggatggcgatcctcgtgctttgtgatcaagagccaagatcccttcgtaagaaacacacattgcaaaccaacagacatggaattgaagggacgactttaaatgccttaattcctttatgggaattgaggcattttagcatcattaatactcgcctcggggccctcatagacaataaataatcatcatcttatcatttcgcacaaaccatgccttctcggggtgcatgatggtcatgaacccaataagtggtaacacatgggtaacgccaactgttttgcaagacagtctttaactcttcactgtcaagtaccaaaaggagaaaaatacttccaccactttcaaaattgtccatgtgtctaaaatggccaaggtcgtttgggaggaaggctgcaagcttccaccactctcaagtctcagaagctttgggggtaaatattatcgataatttttagaagagacaagtagcagaactagaaaataatcaccatttaaaagtaagccaaagttggatccagaacgggcccaggcctaacaaaggtttaggactttccctccaagacatgtcactttcctaaaattcggaagcctacctagcctttcaagacatggaaggactgaaggcctcttaatgaagataagggcctacctggagacagcatgtaaatgatgacattcgaaagcctacttcacattgggagccggatgtctaccacagggtgagaggcgaatgtctacccttgaacgatgtgtcctcttctctaacattagatcggataatatcccctacgtcggaccatagtagtgtgtctaccaccaatacccctttttgtctgacgactccactgatatctttgtctgccaggcatgatctccgcgcaacacgtgccctgcaccaataatggtcctagtcgtacgaaacctttgccccacaagtggagaccttctaaggggcccaatagtcatgtatataatattttaccccagtaatggggaagcttttgacaagaaccctaaacaggtcgcgggtatgcctaaacctgtactttcgcctatataaaccccttcatttctttataagggggatcgagaaagggatagtcgaagctctaccaaaatatcgtctaagctttcttcttattcaagagaaagctagagaaacagagttagggtttcatattttaaacacaacttgtaatacatttcaaaagcctaaaggccaatatactaactcgtggactagggataattaacacttgaaccttgtaaaatcctttgtcttagttatttaacagtcatttaatttctaaagctttcatttaattagttttcaaaaatctcaataaacaggatctttatctcattttcatcgagcagcttcatcttaatattgtactccttgaagaatacactgaatgattgatgtatatttgttgacacagtttttcatcaacagactaagaagatcataaacaagcaagataaacacaagtattcttcaatcaaagtaaactaatttatcgaaaaagagatttaacaaagatgaacacaagaattttatagtggttcaccccctttcagcggtaataggctattccacatgggttcattggtctcaatgcttgaggagagttctccaaagttacgttcttcaagagttcaatcctcaagtgagtttttaggatgagagagtgagagttcgtgagaatgagtttctctcctttacaattgatatcacctttatataggtttttatcttggaatctattagggtttaaaatctcttaaccctagatgcaccttctcctagctatagtcgggttaagtttaaaatacaaattgataacgaaatcatatttcaaaataaaataaatatctaaaaaaaatgataactgctgaaaatgtctttaatccacacgtggtagcttatttttgccacgaggagtacatgtgtaataccctaaggtttaataaccggattaggaatcctaactaggttaattatgtattaataagaaattatattattatacgatttaatatgtggaactattatgatttattacattttaagaccccgttggtgcgtcatagatatttttgtaattttgacctgagatgggtaaaatcgtaattttttggtacacaatgcttttgacctatattattatatagaatgtttattctatctttttgaatgtgatttctgacaagtcggggcagtatagtcacaaacaggaattttgggtcaaaccagatccggagcccaaaatacatttttgggatttatttgtggaatttatgtgataaatgagaaaaattgatttatgtgatatgtgtgtgagtggaaatgaccagctt

SEQ ID NO: 219050 - DNA, 5102 bp, Cannabis indica
ttggttagataatgccatatttagtggtatttactttttatgccatatttatcataaccttaataatttttcccatatttttgaaaatagtcctactttaaaacccaaatgcttaaagagctttatgtttgatattgtgtaatttgttgtgatgctcttatttatttatttatcaagtttgtaaaagggcaatgataatcttaaagagcttggtatgtgcattcatttaacctcaaatggagattcatgttgttatgagctaattctcattttgtggagattatgtttttggatttgataaagatatcaaacagctttacaatcttggaaaacaaaagaaatatttagtacttcttgatgacattttcggacaaacttcaatttaaggagttacattctctcaatatgaaaccagtatcgagattttacttgttggttttattcactaaccacagtgtcttaataataatgagagacaggatctgtttgaaaacaagtctttatatcttacaaatgatctaacaactaaaccacatatttccctctacttatgtttgtatatttcacatgagcataatatttaatacttatatcaatttttggtgttatgaatgagttgtttttttttacttaaaaccttttaacatttagtacttatatcaattgtgtttgtgttaatgattttttagtttagttgataataataaaagtagccctctttggcaatggttatttcttcaaaaatgaactattattatgatattgatggtagaagttgaggttatctaacattagaaatttataaatattgtcgggtgtttaaattagattatttctcacataacgaattatcgtaaccaaataatatgtttaaaaggacaattttcttgggctttttgaattattttctttttatatatgataccataatattagtagaaaaatttgtttatattgattgatagttaaagattatttatgtcatgattatataacttaattagaaatctctattaggatgaatatatatcctcatttttatctatttattagcaatacatctatgtgggatactgtaaaattatttattaatgttttaaatcatgtcaatgcaaaccattcattcatgcattaacataaaggtgaacaagataataataaaatattttggatggcatacgagattgtttggtgtgttgtttttaacataaaataatatattatacatgaattaggttatagagtcggttctgagttaaaattggccttaagaatgagttcttattataaaaataaatagtacttttaaaaattattaaaaaatatgtataattttttaaaaatattttttttattcgggttcttaagataggtagaccttaggcatgagcctaccccgtcttagcatggaaccaactctgtcagattatatacaagcaagaaaagacttaaagattcatcatataaacagttttaatttcttaaagacattataaactgctctattgtaattcttatcagataaccctaattaatgttaatagtatattctaataataggcgactataatgttcaatttattattctcaacttggatctcacgagacaaaccttagaaagtattagtataagagaaagagcaaaatcgttgataaaagtaagatgtattgtaaactgatattcttctgaatcatatgtattttttgaaaatgtaccaattagtgcacttagtccattacatgcttatctaagtcttatcaactctgtaaatgactcaactcattccaagctgaattcccaaagatcatcatagattcataacataaattcacctttagtctatcttttcactttgaagattttgttggaaccccccattgacacatgaatgatttctaagtagaaatagaggaacataatcatatgagccagccacaaagaagctgctaccctttctttattatcattattatatgtgaaatctgcatttatttgcttgtaatctatattagcatataatgttatctaatataggcataaagcattcatatatgtgtgtaatcttatcacttcctttttccaatttaaactatttacatgttttattggcacctatacctactattagacttgacaatgtgaatcaaccaccgaaaggtggttagagaagaaaaaaaaaaaacagtggtgaaaaagattagaagggcatgctatattctacatcatcagtaaatagtactataaggtgacgtcttataaatggttattgtttttttacaatctttattaaaataaaataagggtgaccaatagcgagattacactcacaagcagacccgactctaagcatagataagctaaatttgtgcttaaggccacctagcccaagggccaaaaaaaaaaaagttttttcctcttaaaattttacaattttttaatgattttaaaaaatactatattttattctaaataagggccaatttttaggaccggccctataacccactaaattttaggaccggccttgctcggaagtgttagacactacgtgtgtcttttatcatttctttttatgtatatgtatgtataagtatgtaagttgaggaccactaaccaaccaacaacaacccccaatgcccacaaatcatcatcattatagactagagagcatattttcactttttatttgggggtaaaacattttaggggtttaggaggaagagcacatgaagaggcgtgcataataaagtttgaaaattttcaatcattcacacccaaagaaagataaaccaaaggtcccacctcctccttccaatcccatctcataatgcaaaaaaagaataataaaaatatctccatacttttttctctttttttcatatcaagtaccttttgtatttcatttttcatttcatattatttatgttttgatgatttgagttgaagatttgagtagtgatgtcctttgactggctcaaggttaatgatctagttcaagtttgtcatttttttaccatatttttttatcatacaaattaaattaaattatgcatggaagaagagatttgatgatgatttaatgaccaaaaatcaagaataggggtgtatatggggacaagcaatgcgggaaatgtattccctgtcccccgtatgcaactctattcttgaatggagacttgtagaaatgacccatatacgcattgttctattacaatggtgatttaatggcaagtcaagagtaaggatgcacatggtaacaaggcagtgcaaggaatatggtctcgctcttgttcgtgtttcgtcctactttattttaagcagagaacggagcagaaaatccccattagtaataaagacagtaatagagacccgtttattttggaaaagctccacgggaataggacccgtaggaacatatgccagcaacactaatagatagatgttgatagatgagaagaattgtaggccaaaattatagagtagatgattgatttggataaataacaactccttttatataaatatatgctttcttttcttgtccaactaaaaaaataaagaaggttatattatactttgattgatttagttgcatgttacctaaattggcccctcttcttttctttccccaaacaataagttatgttagaaatacatcaaattaggatgaaatgataaatttaatccatattttctttttcctaattgaaattagtaaaattcaatctaagataattatagtaagaattgttatgtcactttaccactaattgtgtatctaatatttagtggtggctaatggtcgaatcttttacgacattcaaatttgtattaaagattaaattttattaactgctataaacattaactggtaaaattgctaaaaaaatagatagagtggctaaaatatatattttttttcaaatattaaatataattatataaaactgcattaaataaagagggactaaaatgtaattttttcaaatattaaatataattatataaaattgtagtagaaataaaaaaaaaaaaatgggagaagccaagctattacttccacttggtgttgttgtacttgttaaggttgatatatagtttttaagtaggttgattgaatattaaagattaaaattttcagaaaaaaaaaagaattaaagattaaaggaaacattatattaatgaatttttagtgtatacaatagtgtaaatttccctttttcaattgggaaactactcatataatatttgtaaaatctctatgcattaaataaaagaataaagtatatacaaaaggagaaagtgtaatttttctttttttgacagaaagtctaatttggtaaagctaattaaataattaaattgtataattaattattaattataaaataatttacgatataaatatttaaatttaatttttaataataacacataaattataattttaaaattttagtataattcttaattaatctatcttattaaaattttacttttttttaaaaaaattaatttaaatataataataaaaaaataatttataaataataaattattaccttaaaaaattaaatgtaattatttatatttagaaagttaaaattatctatttatatcacaaattaatattaattttgtattttgtgttatctgaaactgctgttgaaatcgactacaaacaaaccactccactcttcttctcttctctctatccataaatattattattatttttattattataaaaaaataaaaataaaaataaaaatcgaattttgatgaagatggtacacaaaagttaagattttggaggtttccgatcgatcattatacagttttggcggcgtaaaatgctcctcctccgccactcttaccaactctttcactttcaggtatattcattcactttctccgatctctctttttctttatattttattaatttatatatatatatatatatatatgtgtgtgtgtgtgtgtgatcgccataataatcttatccactttttctcgccggagtttgctgaaacccagtcagatctgattagtgctgaattgacttatgaaaatagtcttgtatgtgtggattattctg

SEQ ID NO: 219051 - DNA, 6142 bp, Cannabis indica
gacagggggcaaagtcagtatattaatgtgataaaaataaatctcaatgtcattactaacatatcacttaaagagtatggaattttaaaaattctttccatgaatattttttaaaaattgtatctcagatcggggacaaagttggtacattaatgagataaaagacaagtgagggcgctccaatgagccataagttaaaaaattctgcttaacaaagacatctcgaatggcctacaattgagaattggacaagtgggttgtgtactaaaattgagtaactaaagagttaaggcccatgtggacaactcactcaaactagaaaaaacacaagtcaccattggtaataaaattaatgttatctttaaaaccccatgttacaaagataataagcatcgaaataaaataagtaaaaaaatatattcaacttaaaattccaaagtcactaagatatggaataaaataagttatatatgcttaaaaaattccaaagatgtgaaaaagatctgttagttttaactagcaagcactccacaccaagtggacataagtaaacccacccatgtgggcccaagtatcaatatacaaccaagataaatgtatatggtaaaaggagacaaacacaatacactcacataaaagaataaaatgcataaagtaaagcatggagagcactgctacatgacaactgtcgcatgaaatatcattccatggagagcactgccacatggcagcttttgcatgaaataccactccaagggggagcactgccaacatcccaccactctccgatgtcattcctcttctcaagattttggggctggttgagaagtggcctcttttcccttctcctcagtcgcagtcgcctcagtccttgcgacaatgttcctcgaactcacctaaaaatttactcatgaacttgaagtccaagtcatctagcatcaacataatatgagaaattccgcggagttttccttggtataagttttaatgcgattaatctaccttttaatctatcttaagttactcaataatctccaaggcatttatgttctccgaatccagcttaccattggctatgacataattgtcactcaagagttttcactcagcctcaagtttcagaagcttggcattcaaggtaccaagctcatcatttttggctttagccttgtcttcagtagccttctacttggtgcctgcttcttttaacttcttcttagatgcatcttgagaaggagcaagcttttcttcaagctccttaattttcaatgtggcttccgaattatgcttctcaaggtctttacacttctctgcatagattttatgagaaacgttggttcttttggaaaaggctaaagtaataaaaaagaaacgccaaagataaagcaatacaattatctacgtcataagtccccacataacaaaaaaataaaacacacaaaaagactaaagtggtaaagtccaattaccataatgagagagccaaagcattgttgatccaaattattgattgggacgaggtcactatcaaaggccccactggttgaagtgtgtaaggtcgagattcgggtgctaatgttttttaacacttccccactctgggcaacgtaagcatcagaggccttttcctggaatacgagaccctgggctaactcctagaaaatattttggtctgcggcagtactaggtgatggtcccatgactaggtgccgaggctacttaaagggaggagccaccaatggaacagacgacctcgtaggtaatgctacaatagccactaaaggcaacaagctagatcagcccaagcccaatggtgaggcggctgtaggagaggggcctgcagatgtggagacttcatgtgaaggtgcggcagtggcattcagtaagacctttaggaatggagcaactgtagctgaagaaggttacttagccggagggggaggcatggctttttcatcaaaggaaaatgcacatgtcaaccactacaagaattatgaaacagcaagctaagtgcatttcataattatgggaaacaacataaaggcaaaatgcaaccacaagcatatatccaagtcacgtcaagacattaagcaaggaaataaaggaatgaccttttcctaaagctatatgcgctctctccaagggaagcactaaagttttatcttttccaaacataaggtttgagccatttgatccaaccccaatgcatacaataccttaaaagtggggatgctcgcatagagcatctccctaatcatcaacaaatgatcccacctatggactttcccatctacttcgtcatacagaggcaaggtatatttatgatcattatgggtataaatggggagatgcttagagagaagtgtagaggaccaccaagctctacttgaaagcctaagatacaagtcacacactttacctcccggcttgctggtttcacactcattgtgctcagggcacagggcttagacaggggtgttaagagtcaacactagtttggctcgttgtttctgagaaggatgagttggatcacatactctaaggtggttttcatggaggagaaagagaaggtttcacttgtggacatcaatgatctaaagaaaactcactctctcaatcaactagtcctatggttggatgggaatgacccttaaaaaggcaagaatgcaagtaagtacttacaaaaaacaaataataattatcgaatggagccaaagtgcaatgtgtagtacttatgcacttaaagccatggttgccaggtggatcccacatctagaagaactcattcttcttgtcaagtggctgattgggaaggccttctattattattggagttgtcacacaactaagatagtaaaatatgttgccgtgttttctcttcccagtaggataggccctcggttgatacatgtataacaccttcgcatgtgttgggtttccaagctccaacatatggtaaagagacttaagccctaccagaatcctataactattggaagacaactgaaagggagccagtcccaaggctccaagaatgttccaaaagtaggaggccaatggaagcatgcccaccccatgagtagggaggatcctcacacatacaattctcatgtggaggggaacaactgtgctcattggatgcaggagctctaccgaacactttgccaccaaagctaagctcatggactttgacacaatcacaaacctagaacatactttcgaaataagaggcgatacgacttgcttcaaaatatactctcacagctttagtcttagtcctattcctttgtgtaggtttgctggtactaggggaaggatgactactggaaaattcttctacatctacaagcacgttatttgatgacatggcttttgatcccacaatcctctttttgttcctacaaaattaacaaaaacaaaaaaaggaagttagggccccaaaaaagtaattatggcaagaacgagattacttatttttcttggaaaaggtgacatggcctattaaactaagaaaaggcattcaaaaaaggtgtcttccatatgtttggtagagcccatgtgtaattctaaagtcatggaaaaatagactgagttgcctatgcgaccttatgctcgacaatattcaacctccacctacatggtacaatggcgcacccatggagattaccattgacacttgtggttatgtggcaatggtccatcgtaaaggactatgtgcttagagtaaggatgaggtgctataataatgggattttgtcatttagggttctcggccgtgagaactcccacatggtgagatgccacttattcaatcaagataaggataatttgacaacacgagtaatcaaacacagtatttgaaaagttgcatgtgtccgagcacccaaagtgaaaaaaacacatatttttctcacttggtaatttcatcgaacatttggtgggactaattttccatcatccaaacctatacccaaaagtttgtaattcttccccaaatttatatatttgaattctaattactcaaattccatcaccaaaatcaataccaatacaaaataaattcaaatcctatccaaattctattcccacaacacatagccaaatacattcaagaaaatacaaaatcaaacctaatttatatttccacaactattccattcatgcaatttgtaccaaaactaatcactagttatcaagaaagtgaaaggagctagaaattaccttaaagaattcaaaaaagccttgaaattttttgaaaaactcttctcccttcaccaatagatggccacggctatgacaagaatttttgggcctttgtgaattttaaatataattggtggatcagaagagagaatggaaaataatgaagagaaaaaaaataaccttgaagttggtcgtggatttgctttgcttaaggtgaaacaattgttggctccctttgaatgtttggtttgaatgaatgaagtttgaatgtgttgtttgaaagaaagagtaggtttatttaaaggaaaaaagaggcccttgtgtccatgcaccctaattggccaaggatttccaaaaatacccttggcacaactaacccatgctcttcatttaaaatgctgatggcactcctctccctttgacacttgtcacttgcatagataaaatttgtgatttatacatttaattatgtgaaagaaaaaaagaattatcatccttagacaaattaaatttctattcaaaacttcagaatgattgaatggttatgtacttagtgtacaccattactagattcagggatgtcctgatcctgaacttaagaaaagatagaactgttaactaaggtttccatgtttgatagctattttaaagtgattaggggcggaccatccaatggtcatcaagataagaaagtatttttttttcaacaaatactacttttctaagaacataaataaatttgaaaacaaagtagcaaagtagaggagatattttccattccatagtgttctatcatcttactctatataagatggtctcactgcctctgttgtcttgacacaaccgatgaggacaataccattaatgttcttagatagatagtcacgataccttatcgtagtgggaggatttcaaggatccgaccctgttatgacttggaagacacttgtgataaaatccattgttagtttaaacaagtaatggattatcaaaataaggaactaagaaggaaagccaagagaactgtggttaaaaccattcatatggaataaccaaaagttttctatacaaagacaagaacaaaaattttgaaaataagtcttttcaatggacttaacaaaacttcctgatcctagtattataggtttgagattatctaaacttgctgcttgtgatatgcctggtaagttatttactcaagtgcaagcaacttacttatgtaagatgctagagcattattctagtggataactctataggaagtcttttggctccaaaacatagattacatttatctaaggaatagtttcaactattctagaaaaggtaaaagtcatgaaaggaattccttaggatcaataatgagaggtctcattatgctcttgtatgcatatagagaggaatagtttccaaatagtaaagaacacagtatcactataggagtacacatatagagaggaatttaactatatcaaggattttgtgattaaggagatgtaatggtggagaaagtttgcattgaatacaactaatcagatcctattacagagataatactacatactacacttgatctagatatcaatttgagattaattggaattcaattttagttttataataccgcaagtgggattttgttggattttgtgccctaaataaaacttatttcaatataatcagatttacttattaataaaagatcaatacaagagcattcatgaacctgctgttgagtgggagttttgagtaggtaacagtttaatccaggaaaggaacattggaagacaatcaagtaaatctaaagatcaaaagaggaactatatgttagccgataagggtggtattttaatactcttagactacaccaaatcaagtttttggacttgcgttgatgctagaaagtctacctatgagatggtgattactctggaggtgg

SEQ ID NO: 219052 - DNA, 2102 bp, Cannabis indica
tgtggaagaatattttatggggcaagaaatatttttattttggggcagttttacgtgttgggaatgggaaggacattgctattaatatatataattggatccttatagcattgacctttgtcttgacatctccccatcgacttgatccttcaagcaaggtctctttgttaagggatgttttgagggtgggataaagacttgatttgatctagatttatagaaagtgaagcagaggctaccctttctattcctttgtaatgaccatatacttcgaatatggattaatagactattcgcattaattaattattttatgtgttgtgagatctattttaagaaataggtatttgaattataatttctcaattccaaaaattttattaaattttagatgtattatatatgataagcatgaaatttaatatttttatgatttatgcccagtaacgagaaaaatgcgacaatttggctgttaaagtcacatacatatggtttagtaccgtttgtttagcgggtcaagataattgagcatttagaatgtcatgtttatacgagataataattttttactattttacccttagatatttatgttacttaagagggaagacaagggcattttaatcttttttcccaaagttaattactaagtaagattagtggaatttttagtacatccctttagtcttttatgggctgattataatgttagataaaacaaaaagagattaggttaataataggacaatactaaatttaagaacaaaaaataaaaccctcacgttttatctttctctctctcgatttggaattccaaagaacaaactactatttcaaacctcttgcatccaattcaagcttgtttccatcaaggttttctaaggttttgtcaaggaaaaatcaaaggtaaacctagcttcttttctttgtttgatttttaaagaaaatagtttgctttgagtgtgccatttttagaactacgttttgtctgagcttaagggattttgaggttgttttctgggtcaaattagaattgtttgagatgattttgatgatgttttgctggccttgtggtgagttgagcaagttggagttcttagaactcaaagcttgctcaacaatgtcatctattagttctgaggctagatgttatattttctggctggaatatgttctatatgttgtaggtgttctggaggttttgggttcaatttggggtagaatgaacttggaattagattttttgtgtttttctttgtagaaaaacggtcggtgaaccatttccttaggcaaaaccctaaaaaatggtccaccatttggggagtctgattcaccagatggggtgcttttaggaaccccgattttcatgttttcttgatatttagggtattttcaagctatttattgataggaaaatttctagttttgagtttaagtccccgaaagtatgtagagtaacacttaccaattttacataaaagtgacatagggtcttcgttcaacaagtgatatttccactcaggtttgaatccaataatgaggtaacattagtataaagatatacatatatgcatctagtatacatgttagattatatggattacaaactatcaacattagtacagttgaggtatggggtgtatgtggtattgtatgttgttaaggggtatggcatagcgttagcaacactggtacttgaagagtacagagtgtacgtggtataacaattaattgtactcatagtgtgaacaaaccctaccaacactagtattagaaagatacttagtgcatgtgatataaaggatgtaatatcatcaagaacattcaagactcattatatgcattgtacgcgggtcaaacttgtaactaggtgtatagacgcctgggttatgagacaaattatatgactataagttttatgcttttcaaattgagtatgtcagctcatagatatgatttcatgtgtaggtaaagacaaagcaaatactgagcaacaacgagtctggagctcattagtgattgtacatatcgagatggttaggcttagagggtttagttctttgggacaacataggcttatattttgtagtcgctaggcgaca

SEQ ID NO: 219053 - DNA, 3277 bp, Cannabis indica
ccaaccaaacgccaccttagtctttattgactttgacttattttcttttttaatttttgagccacactctagtatttcaatctcttcatttgacctagtaacattgatatctcaatgatgtattttggttagtatgccttagcaagaactatgtttaatatttttttttccagagaactgacactgtgccttttgcttagatatatggtcaattaaatactttaccaaaatgaaaagtttcacatgatggcattttcggatattttatactcatttctgcaaataagtttttcttccaagtgtttcacatttttgttattgatgatatcaactccatggttctgtactttgattcatgtctttaaattccaagaacattttactagttatgtgaaagtgaaaacgacagtgcccgtgtgtgggataatatttgttagagtgaatccaaaggagtacttgcatgaaatcttagtttgatttagctcatcatctgttttggtccattttttttttaattttgcctacattatcaggagatgttgcacgggttaatgggcagctggcagtttctcgagcattcggagacaagaatcttaagtcacacttgcgctctgatcccgacataaaatctgaagatattaactcagacgccgactttctcatccttgcaagtgatggtttatggaaggtaattaatcatccttttcctcctcaacttttctttcacaaacaattaccttaaagttcatgctcgccttctcgcaacaatctttgacatcttcattcgcccgaaactcaggttatgtctaaccaagaagcagttgatgttgcaaaaaagactaaagatccacagagggcagcgaaacaattagcagctgaggcactaaacaaagacagcaaagatgacatatcaatcgtcgtagttcgtttcaaggggtgaaagacgaagaaaatatactatttactaaagcttctgaaatttgtttttctggggtggtttttgcgtcgaacgcaacattacgtgccaacctcagactggaaactctcttaaagaaaatcaaagcataagtttggaatttgtttccaaagaagtaggctatatatataatatatatttgtttgtaatcttttttcttttcttttctttgccttgtaaaatttaacttgttgcttatagtttgtgcggtttatatttacttttatttattggtcgtgtagatacacataccatcatttgtcttctgtaatttgctatgtgacttcagttcagagtacttgcggagtcagtcagccctgcaacttatataatttatgcttgtagtggagacatgttttttttatatataatataccaaaacaattccctttatatgaaggtgactacaattgtatataactggtatatgtttatatatgtatatgaagccacttttggaagaataacagtgttatcttagtaacttccatgaaaacaaccacaaccagggtcatgactcatgaaaacaggtgatcacaaggtcaagtaaaggttggctctcattagttgctccaaacattgatgggttattaggatcatcatttgaggaccccatatcatgcttgggaattgtgtaacccgcacaatgaccttttggtggtaatggtacaaatcatcaacatgaaggtccaaaaaagtcttggtcaaccgagaaaatgggttagataacccataaccttggtggtaggaggatgcttttcgagccacactactaagatgaatgtatgtcatagttgattgcttgtttgtttacaatgacatcctcagctgacttgaatcaattaagttcaagatgatcaaaacattttcctgtcaaatttctcacataagagcatctcgaatagagttatttaatagagtggtcttgctacatatgtaatgttgttcaattttcaagattaattttatgtaaagtggtgtttaatatgaacaatggctacatgccattttttttttaatttttctattaaaaatacttctctttttacttaaaaaaaaaaattattaatttaatgtgatgtgggatcatggtggacaacttttagagttgtcaaccattagagtattttgttaaaaaaagtgacagatcttatgtggctgaaaaaaaaaaaaaaaatataatatcttaagatgatgtgtatattttgacaactataaatattatcttctattaaagatgctctaagtggaagccaattgtgtttgaggtgaccaataggaagctcagttctcttgattgggccaagaaaccatgacatggagttcatggcatccttgagaagataacaaatgactctatgcttggggtcaagagctctgaggagactaatcccaactttggagaggaaagagcatacctaggcctcatagagaagattgaagaggtttttcttgatgtttttgatccttcatgagttgttaagattattctttcaagagtagttaagactcacgtaaaaatcaaatttatagatcacttaaaagaaaactaagacgttttccatggtgcaaactaatatgctaggacaaacttagaaattttgttcagcgggacaaaaaaaaaattagatgggaagtaaatgtaaaaattaagacataatgaaaattaatttacaaaaaaaaaagcgtaatgtagcaaaaagagaatacaaagaaatagaatataaatataaaaatacctaaaaaaagactaaattgtaaataaaaattaaaggaaagatggagaagagaaaagatggagaggaaattgaaaattctttatgttgcttggtatgttaggaagaggaaagatgaatgggttagttaaaaaagatggagaagaggaaagagggagaggaaattgaaaattctttatgttgcttggtatgttaggaaggagagaagataactccacattctttttgtttggtattggagtgataatagaaaggatggagagagttttaattctaatattactatattgccacttttttaatatttttatatttatatttaatttttaatttattatgttattgtattaatatatattatttaaattccataatcattataaaatagtaatagtattaattaataatgatttttttataaatattatttcatatcaagattatttatgataaaatatataatttaaatttaatatgtttttttttattattattaaataattgtaatgatcttttaaaacaattccaataagaaatgattctcaaaatttaaaaaatatatatt

SEQ ID NO: 219054 - DNA, 7970 bp, Cannabis indica
actaaaaaagtctcttgaatacctaaacatgtaagagtatatcaatacaccactttaaaaaaaatactttgtaattttataaatacaattaataatatcaatatatacattaattaaatataaaaaaaaaaatagtgtatgctacagtacacgacatatataccgtggactgtagcatccactccaaattcaacaaatatatgcagcgtccttgcataacaaatcatcaccaaacaaaggatttgccgtttccttggtgatgctctaagtactaaaacataagataaatgctttaaaaaaatattgccatattgggtatagtagtggtacttaatgagtactatttttttttaagttagatgagattaaatatttaattatattaatattaatattacacacaaaaaaataataatacgtttaacaattttctcaaaataaacatccaaaatttgtgtcgaaacatatgagaaggtgatttagtacatcaatgctataacatttcgatagaaactcataaatattataacaaaacacgtgtgtggctaggatgaaacctttgccattttactcatttttctgtgtgtgtatatatattgaaagtgaaatcagtctcacttatctaacagtgttgtgtaagaactagtgtttaaactttgctcaaaaacacaactttggaaacaagtcaagtatttttccttcttctttttcttcttttggtcccaaaagtacaaactttttcttgtcatccaaacaaaaatggagagcataacagaagaacagctgattcaaatggtgagagatttcatagaatcagaatcatcatcagcaccacagatttcagctatttcatcctcagaacctcaaccctcttatgatgacactttagaggtctgtttttttaatcataaatatcctatgaattacatatgtttgtttttcatgtgtgatttttttttctttcctaaaattttataggagatgatatggagagagacaacagatattgaggttgaaatccttgagaaaattctcatgtacatgagaaacatagaaagcttaataatagagccccaaaatctaaagaaatgggtagttttgtggctcaaaatggatggttatgaagcctcactctgtaaaactacttgggtttttttcaatggaggagccaaaggtcaaaactctttccctaatcaaatcatgggtcaatcttagttttgtcatattttagttttttctttaaatatattcatttttatttttttgaataattttcaggtcactatgaatttcttgatgttattacaaatggtacaagagtaataatagacttggaatttaggtctcaatttgaattggctaggccaacaccaagatacaaaaagttgattgaagctcttccttcattttttattggaactgaagagaaacttgggaatgttgtcactcttttatgctcagctgcaaaggagtcactcaaagagagtgggctccatattccaccatggaggaaagatacttacatgcattccaaatggttctcggaaaattgcaagaaaatttccttctcaccaaacactactactactactactattaccaccatggaataagaaatttttgagagaatatattggaaaaatttgatcttgatggagaattatcatgtgggcaactctgattttcccggaaaagtagagcaatactacaatgtttttttttttttgaaaatgggtatatttagtctatatacatatatataggaaaaaacactagaactatattatcaaaggaaggtttgtgtttttggaactttggatcaattttgtagagacagatctcaaagttttgatctttgttgtttgtaactcgtttctgaatgtaacttaattatctcttaaaaatatattaattatataaaaattgagctactaattataatttactatttatttaattttttaaataaggtgaagaggcaagtaaaagtaattttgagaaatgacagctgtattggtggttgttgactttaatattatggatttattattaggatttgttacaacatgtattaaaattaataataattaaattaatggtttagctattttaatatgtatattttatgtaaaatagacttgggttgcaagtatatgtgtagttaattattgttacaattaaaaaaaaatagaatataaaatttaatttagctggcctggctagctagagttttgttgttgtacagtactgagttattaatatttggtgttaattgagtctaatgttgtccgttcatatgtgtatttaatatctatttatgtgcctacaacaaaataaataatatatatttatagcattgatattaaagtaattattatttgtaaagtgaaacttaaaaatagctagctagcgatattttataataattattaatttaaattataaaaaatttaatatttaattataccaatactaatattataattagtattttcttaagtatttatttggtacactatattaattaaattatattttattatatattattttattaaattgtgtcatatattatatttttatataacattatattcaagccttgagtttacaggctatatttatgcttagggttcacttagtttatagttcttaacttttttattctcctttcaaaattatatattgtttttaaatactatattttttttctctataaatgtcaaaaaattatttttttacgatacactaaatttaagggttgatcccaattaatattaaattttgacttaatttgaaatttgtatatttatctctacatacaaatcaatactaaatatttatttcactatctaaaaatacaatatattatacatcaattcaatataatgttatgcgtaagatagcttcttggtaagttttttgctctctcccatcagtgaacattacatactcatgaggattgtatcttgaagttagtttatgctctcttatagatctccttactggagtctcaactggtggtagtaaaagtacctcttaatcatgttcaattagctcaccatcatcatcaactataggaacatcatcatcaatattctcaccacgatcttcttgttcatatgtgttatctgtgtttttggaaggacacatgtaattcaccttatacaaagtctatatgtagacccaatcaagataatggactgaaaccattatctaagtcaagacatccggatgatgaacagacacctcctccggacgacataaagacccatcaaagctggctttcggatagcacaaagtagtgttgccagaatggtaattaacgagcccctaaatgtcaagcttgggatcttgctcacttattatcaaatctcacaatatcatgactttatttttgaaatcatatccgagaatcaagtattctgaataaggaaataaggtaattaccaaatcaagtatttatttgtctttattatccactaagataggacacgttttaacaactatcaacatgatgtggcatctacatcagtaaaaaattaatgcctcatgggtcgaatttcaccagatagactcgaagtcaatatgttatttgtatttaccccatcagtgggcaacgcttacagataaaatcataagcatataaattacatataacgatgatccttcatgtaaagggtttaggatttatttcttacaagctaaggcaagaaatagggttcgtaaacttggcaagcacttgtgtaatactcaaaggtttttctagacatagtaatattgactcgtggactagtggtcgttaatactcaaactacgtaaaaatctcttattttattctttattttaatctatttctatagctttaatatgattataatcagtttctaaaactctcggtaaatattttggtgctttcattgagagttgaagaaagagttgatacacaagttgtatactgctataatggtggctactagaaccattgttagcaaatctggtcttcgtgatggggacactcgcatgaatgatgtaaatccaccaactgcacacgcaaaagcaagtgttgttggggatgcatcagaggtaactagacgtccatccaagaaaactcaacataatgagaagtatgttggtggaaaccccaatgatgaagaaggtgacccagaagatcaagacaaagatcctgaaggtgatgacaaaataatgaagagtattattatgatctagatcttgaagttattcgaatggccaaagaacttgctaaaaccaaaaagaaatcggcggaacaacaagaattctcccgtaaaatataagaaactttagcaagattagagactacgactgaactaggaaatgcacctcttagagaaaacattcttgatgagcctactcctcaagaaaataatactgcaaagaaaacaaatcctatagatcctggaacttttgatcccgtgagggacaaaggaaaagatgtcatgtgagaacttacaaaaaagactgctccaacgacaacaaggacataaccagccaaccactgtagaaaaagaagattgtcaatgctccaaagcaagtccgcccgattgatccacgaggtagggttgcgcaaaatgataggcttggtgctcaggtacaaaggcctatcgttctgagatggaaaaactaccctagtgattctgtttaaccagagtgatggggtagatgaaattcatttgaaatatcaataatcgaattcggttatagatatttatttaaataataaaatatgatttaattaatttagaattaactactataaatagaagcatgatttgagaatttagaagaagattttacactattatttttgaactaccagggagaaaagaaaaactgtttttctctctcaaatagttattgcccatgtgttgagcattgaccaagaacaaattatacactttatcctaatagctcacactatttcttgtgtgtggtggattgatttgaaagactacggtgtgagtttctaatcaaccaaaatgattcaacttacgagaagttttaccttgatagtcatctagagatatatattccttttctataatttatattttgatttaatatttatacatctggagatccgttgggactatcgtacaatgatgatcagatatatgaattctttcgctgcatacttgatttaataccataaaaccaacactaagaagtagtcgtactaaaagaaccccggatacttcatcaagatgaacaggtctactctaacacatcgggaaggcagaagaagatagtttgggctttcaactatttcatctaccatatcgtaataatgaatcgtagggtatatatggttgtctagttccaaaaagtatgaatcaaagcctccttaatcaacatgacctaagtcttccaaacatgtagtgcagaaaatagggaagggagagttacctcttccagatgtgctggcatctagttacctccatccagaatgactgctttgatacggacttctatatccatatcttcatttgtaggctccaaatgtagccaagcccaatttccagctatcacttatctttcttgatggatttctttgcctcatatgcgactatctctgcaatgacttctctgacttcgggagggtcgatatgggtatcacagacgtggcaggcttcaatgctctagtgaggagaaatcaggccagcttgcctaagttggctatagtgactaagttctccattattaagtcttcttaaggaaatcctttgtaagaagcatctctctcaagcaagaagggagtagttattggacaagcaatcttgtcttaaaacggaaagaagaaatcctaatcagatatttaactaaaagattgaacaaactatggaaaggaaaaatgtggcgttacttactcgcaatgctgaaatccaatgacagggttgaaacacttttcaacaggaagccagtggtaaagaactagtagtcccggaagttatgcatgtattttacagtgctagttggacaaattaatgtcctgcatcgtttcttgagctagtaaaaaagcaattttgctcttattcttccgcacgagatttgactttacttggtaaaagtaaataatttctttcggggacagaacttccaccttcttggctctgcaaagaatgaaccaacccgccaaaaatttacaaacttgggggattagttggaaaggggcaatgcctacgtgctcacagaaatgtgcaaagtaacttctaagtggaagatgagctcccatttttgtatgggcctagctccaagcaccgaaggcattcgcacatctacatggaaattcatccaagactaaaagcttgttttagaataggtcaggaatattcttgaggcctcaatcttcctcgtatgctcaaagtgcctcgtaatttttgaatttgtttgtgtgttgatccatctcccatggagataaattattcactacttatagagcttcaacttcctcttgctcaataatctccacctcttcagtttgagcaccttcaaccatgaaagaaactagaaaataacaagaagaaaagccaagaacttaaataaccacactaaagaagatagcaagggtactagagacttctcccctaacactagttagagagatccccaccgaaccctacatcttgaagcaagatcctcaaggaacattgctccaggaagatcagatcaggaatacaaataattaattgaaaattcataagatatgtcatcttgaaccataaggatctcgaatagaggaattaaatttagccatacttgaatgtattttgctgaagtttgctactcaaccagaaagatactaatggagacagaatttcagagaacctaacagtgactataggtattatatatagataaaattccatgtttctaagaaatgttcaaaattgcaccaaagacttaaatcctactcgttactttttatggcagacaagcaagcataaaaaagaaaatcataatcggctaaataaactatcatgcaaagaaaatttatccgacccaaaatctaaacacatgtcaagattccagaaacgtaaaaaaaaaaaaaacttacgtgttgaaggtgaagaatgtggggaaggaattcgggcgacgtgcattggtcgtaaagagatttccaccgtaggaggttgatcgagatgcacaaccctagttcaaagggagtgagtttgattgatgagtgcttcaatatcctcctaaatccagtggttctgatggcttcaaggaattaatcgtgagaactgggggtggtacgcttagttttaaccatgaatgaattcgaagaagaaggtgtagaaactcgtcgaaataatgatattcaccagaagaaattttgtcttttctctctcaaaaaattcaaacgtggaatgaaaaatgggcaaaagtggtaaacaaatgattttcactttatttatagagtaaaaatggtgattcacatgttcttggatcgatggcttagattacattcaagaaaacacaaactgcatctaacaatccagaaagtggaagggttagaatttaatgactcatatggaatcaaggtaatttgaaagatgatattctcctcacgacactcactaacatgatcagccactattttgcaaatccacgttgcacgcgctctttcaatgaatgtaatcttcacaaaccaaagagataattccatgattttcacttcaaaaaacaagaagctgtcaaccacaacttgtttacttaaaatttaaaaaggtcttcacttttttagcatccacatgtcctaatgccatctgaaagaaagattgcaagcctccaaaaccccagagttcagaatgcttgggggtaaatgtaacgccctgtccaacagggataccacatgtgtgcaatttaataaaattcttatatagatactatataattataccaaaagtgtggttaattaaattttgataatt

SEQ ID NO: 219055 - DNA, 5858 bp, Cannabis indica
taaatctatttctgttgaagttatgctcaataacacaatggatgctgaatatttatgagctttgtgttaggtcatttcagtttcatcatgttttcaataatgagaatcaagctgaagatatgccaacactgatagatcgcaaggtatgcctactagttgtaattgaaagtctatgttggcattggttctttctctacacataacatcactatcataataatgctttggcatgtcatgttttattcagtcttgatgtgctaaaattttatcttcaggacaatgtcttcgttatatctaatcgaaagtcaaagtttcctgtgctacaacttgatgcaaggtagggctttttttttccctttcagtaaacttgtttatactttaattattcatgtaaccaccagcagcttggctgatctagcttgataaaataaatattttctaggcttatatcagaccttgtagtcgtcattgtctctgcaacttgtggtggcattgctttcgcctgcgctggacaaccggtccgatcactattattttctttgtaaatattgttgttttcatacatgtttaaacttgtctctaaatgtctgtttcctgaccttttgacaatctgcaggttattactggatatctgcttgcaggttctgtcattggcccaggaggcttgagttttgtcagtgaaatggtgcaggtatgtctttttaattatcacacctgatatgccactttttttattttttgatagtgattttcttgttagagatccttttgatatcattttatatattacttatattttctcatccttcaacacgaagtctcttgaatttatttgcttgttgctatgttaaagttgaagatttttttggttcttatcacgtgtttatttactttcattgtctttaattattcatgaaggttgagacagttgctcagtttggtgtcatttttcttctttttgcactgggcctggagttttctgctgcaaaggttagcttgttcaataaattgtttattatttagctattatcaaataatttggctgtgataactgtataactgataaaaatgtcttaactttacattttcagcttcgtgtagttcgggctgtggctgtactaggaggtctactccagattttcctgtttatgtgcctatgtggaataacagcctctgtatgttaacattttgtggattaatttatcttcttgtccctattaaatacttatctctgggtagattagtttgctgctaaattaggttccacgttggttctgggcagtgtggtaccattctaccttgctttatggtggtaggtttgtaacaagctttagacactaattgaaaagcttgatttataagttgacacttccatgaacctcttggctgttgtaggatcaatgttgagaggatttgagttgagactatctatgattgtttttaccttttcttttttcccatcatttcatgtgatgatcgactctaacatgaaaagtcatttgccatttccagttatgtggtggtaaatcttctgagggagtatttgttggagcatttctttctatgtcttcaactgcagtggtatactctttgtacttgtatctttgatttctcattatctccttcatgtttatatgaagaaagaataaatttaaatcttttttgtatttcactcttgctatgttttttgggaagtagtttgtgtaaacattgattcttattattatttataagtgattataatttctttacttctgttggtaaggtgattcaggagaaaaattatgggtcagtgatttgttctctgatcttgtgtaggattggagtgtttatagtacttgcttcatttaatattttctatgtggtttactcttccactgttttacttgtattgtattatctttaatcaattagtcttgtttctgatgaatttttatttaatttttagttttttaatgggtaagaatgtcatcttttgaaacacgtctccattttaagtaatatttaaatgtgtaatagtcttgttctttctatttcctttttgtcatgattttccagatatgtaactgtcgaaagtcctctgcttcgggttcttatgatgtcttgtatgatgctccttaggttttgaaattcttgatggagaaaaatagtatcaatgcccttcatggtcaggtcacagttggcattcttattttacaggtatgtgctttttgatctgttctgtacctctaattgtagatctgtatgttaattttttgctcctcacatccgaactttcctcagtgtcaaattagtatagctacttttggtgttgtgatctattttaaagagtactgttgtgtgctaccaggattgtgctgtcggtttgctgtttgccttgcttccagttcttggtggtacttctggtgttcttcaaggagtgatgtccatgaccaaatcgtaattatgacaaattacctttctttacacagtccactaattatgaagaatgtatttttttctactttgtgcatgttgtattttgaataaaacataagctgggttcatatcgtaattagtaattatgtatgtgtcgtttatggcatgtttttgtatagcaattttcctcatgtgaagtcctctgtcattgctgaattgatcacatgatatagatgcagtaagagaaacaaagtatactttttaaaatatagatgctgaattcccaacaataccttcgatatagatgaatgtttagtagcctttgaaacttcaattaagactgccttttttcccctttacctcttgatgtgcatatcatatgtctatttgctataaaaaatttagggtcttatttaacctgataatcggaaagttggcagcttcagttgcaccttagcatataacattgatacaaacaatttataattattttcaatcaagcaacactcctccaatcagcattgcagttaattgacctctgcctaggtgaattatgcactattgcttttctcacaactactcttgatctcaggttggtggttctgatatcatttttggctatcttgtcaatagtatctcgtacttgtgtgccatggttccttaagctcatgataagcctatcatctcaggtactagtaatggctctttcagtttgttatatttcatgttctcaattaagtttagctgatgattatgttttcatttttttcagactaatgaactctatcaactggcatcagtggcattttgcttgcttgttgcttgggtttgtccagttcccttttgtttcctgtttgagtacagaactaatttatcaattattttatagtatggaaataagattcacctattatatattatttttattattattctctttccccttctcttttctgctttggtaagacaacttatattgtatcatcaatgagatgcacagtaagtggggaggagttctgttgcttcatgtatcccaacttgcttattgctttatcaaaacatttccatttgtggagcaggatggataattttatttattttgcatgtttaattgcaaatatggatgcataataaagatttatgtcatttcagtgtagtgataagctgggtttaagccttgaacttggctcatttgctgctggagtgatgatttcaactactgatcttggtcaacatacacttgaacaagtaagatatttttttatgtgtatctacttgaagagtgaggagcttaacgagtgagcgttcatttgactttcaacctgctatccacatagggacatataaatacataaatacatgcatgcatgaatatttatataagaatcctttttgtaccttctggggtggagccaaaaaattggttgagggaaaaatctaaggccttgtatggttgggaataatcaaaatagaggaatagaatgagaagggtgatggtaatagagcaaaatagaatttaatgagtaatttttttttcaagtgcaatggaatgacttccctcctatgttggaggaataactattccgctaaaatggtggaaaacctattccaacaggatgactattccatgtgttaaagactaaccaaatttaaaaattgaaactaaacgaaatttttatatttctcttcgcttcctttctattccatccaaccagatgggccgaaaagttcaaaaaattatcttattataattaacaaacttatgagtaaatacaattgccccttctcatcaaggcagctctgtcactgtgtatgtttctcattagttatgtttcttggaggttgacagagctgtggttttagtctcttccccttgtctcttctatatgtttgctggctgatttggtgcgttaattctttttttttttttttgatgaataagatcattgtattgctcaaccaatcaattacaatcagtttgtatccccaatttacaaccaataatgacatagtaaatcccccgtatgaaaaataacccctgtacagactcaatcataagcataatcacttacaaacttctaagaaaatctctatctgagatagaagctttacaaggtaagactcctagatgatttctacaatccatctgaatccttctgactatgcttgatctgccatatcttttgttcccacaggcatcatttctaacccttcaaaaattatataaagtcgctgcaagaacagagattaacatacccttgcaagtattagttaaacctttggctggagagataaatcttaaagctttgcaaggcttttagactttgcattccgattgagccaatctttgacagccaccggacatctcttgctatatgcacgatcaaagagagatgcctcaaagttctcattccccttacccacacatcaagcttttctgatccaaagtcagttatattttgcaacccgatcctttgtatttaatctcaccacatgactaaccacataataaatctatgcttcagagtgatttatctattccatacaaatttactccaaggcactttttcttcttgatcaaccatcattttgagaccagatttgatattgtaattctgtgcattggatagttcttggctggttttagccttaaaactatttttcacaaccactattcgcatccaataccaactacaatcagtgggattttcataatcccaccaattttgattcatcaggtatacactatttatccatttgacaagtaggttatccttttttttagcaatggcccagacatatttacccatagctgccaaattccactctcgtagtcttctaaagcccaggccacctgctgctttagaaaaacaggctttatcacaagcaattaagcaggagcttgagttcccgacttcctttcctcaaaaatgctctacaaattgcttcaacatctgcaaacagtttttttggtataatcatgatctctgttcttggaaattgttgaaattgttgtatatattgttgtatttgtatatattggtaaaatgcataattcttttttgtttttgaaattactgaaattgttgtatatattggtaaagtgcataattcttttttgtttttgaaattactgaaattgttgtatatattggtaaatgcataattcttttttgtttttgaaattactgaaattgttgtatacactggttactgatgtgtatttcactataattaaattagttactcttaagaactgtatcttcctttttatcctttcatattgctcacgaatgggatagaatacaatatctactttgttacgctgcttagttaaatattttaatctttaaatgtgatggtctcatctgtttctgttattaactggagttgtttggcttgcaggttgagcctatccgtaacttttttgctgctctatt

SEQ ID NO: 219056 - DNA, 2234 bp, Cannabis indica
caatacgacttaatacgacgttctaaatgaaccctaagaacattatatattatgatctaagggaagtatatatatgtggttttataaatcaattacacgtggtatttaatatttatttttaattaaaacaagaatgagtgatattatggaagaagaagaaatagaaataatttttttatttttataaaataaaaagacccgttgcgaagagacggtaaatcaatagagagatcgagtaagagatcgaaaaataagattaaattatattaataatattaatattaataatagacattattaattaagcttaacaaagataaatgttatattaattttttttttttgtaatactgataggaacacatacaaaaagccatagtggtaataataagatcttattacaacattaataaaaacactaaatatgagtgattaaacgtacacacacgagtcatgaacacataccataccaaattaaaaactcaataataaagaaagaagtagtgttccaataccaaaacttatatagattatgataataaacaatcataacactttcaaggacttgttgttgaaggaggtccaaagaaattattcccaccagtagagcctcccaatccaccgaaacccgggagtcccccgctgcttccaccgaaactaggtagccctgatcctcctccaattggcatgccgaagctaggtaggccgccactgcctcccggagcaaaaggaccaaaggtttttttggtcagtaagagtaccaccattattattggtaggcaaatctcttgccctagttgttcccatttcaataattgctaataaagcaattaccattaggattacattgcaccactttgccattttgataataatgtatatgttttgatatgatgatgatgatgatgatgatgttgtgtgtggcaattacaatggatgtaagctcctttttataggggattctgaagatgagtatatgggtgtggttgtgtgtgttgaatgagctagctagggttttattaaagaaaaagtatgggtctatagctagctagctcatcatctccataaatgcaattcttatatggaccacaatatttatgattacttgtgtgaagtgggtagaaactatatatgatgagcatggagtacttttttgcttttatatgattaaaaaccaaaccctagcttttcatgtcatgatcaaaatatttgctcaatttagtatttaattagttttaagttatttgttaataggcaaaaaaattaataattgtgtttttatcattagtaactaataacattcacatgtggccatatacatgatgtcgaaaataaatgcaatgtcagatatagttggctcaactctttcttactctcaacctattttgtatattataattttctaaactacctctttaaatttcagctagctacaccatttcagaaactttattccaactaaaagcatttatgtctcttctttatgtacacttttttttgtttgacttttagcgtatccagaacaagaaacaacacttttatggtgcatttttgtgctcgcaaaaatagctgtttgcaacggcaaaagaaaatgtacttttgtcagtgcttttttatgccggcaaaactaatcagtaaatcctcgttgatagaaagttttttactcatgcaaaatcaacaatatcagcaaaaaaatgttttattgacacattgactcgccagtaaaagcgagtgcgccactaaaacaagggacaaaaattaattttaactattggacaattgacttttactagcacaggccggtaaaggtcgtatctttggcaatgctaaagttctcctgtaaaagttgttctaccgattaaactgagaatcgaccgaacatatatgttatacattcattacaagaaatgccattttcatcagcacagttcgctactgtgctgataaaagtaaatttttaccagtgcattttgtaaactgcgctgacaaaaaggtcaaagttttacggggcacatttacagtggctaaaatctaacacttttaccagcacatttatatgctggaaaaagttatttttgccaaagcttttcattttgtgctgacaaaagttctaataccaacgttgatttgccaaccccttttgccaacacattagaagtaaattctattttaccagcgcaataccaaacttttgccagcacaaaaatgtgctagtgacatttcttgtagtgatt

SEQ ID NO: 219057 - DNA, 7106 bp, Cannabis indica
gcttggctaagtgacttgtcacaaggcttggccgaatgaattttacaaggaatggttaggtgacttttcacaaggcttggcgaggtgacttttcacatggcttggccgagttactgtcctaaggcttttgatgagtgacttttcacgaggcttggtcgagttactcttttgatgccttttgttagatgaccagttctaacatgcacacattgtttgtaggtgcttctccttttgtctattcaacattgcaccccatcgatccttctttggcacttgtaaagtaagttttcttatccttgtcaagcttgtacatatgtttacttagttcttgtatgtatgagttttatccttcccgcaccttagtaaatagggttgcatgttgctcgtagagtccttgtatctaccttctttgcctgacaaacttggtagtttttcttctatttcttaggtaagggagtcgagtgacttcatcccgagtcgacattgaatcccaaacaagtccctcctagggatatctttatttatatctcttcttcagacattaaaagttctcgagagagtcctcatgtgagatatgctaggttgctatctaagagggggtttagggggcattattaactacaaggagtgtttggaaagactttggcctcaaattcattcgatcttgaggggggagttaaccaaccctgaagtatatttatataggcttagggtgtcattagttgagactgagaacgagttgttgtatctcgataataccattcctccgtagcctgcccttcccccttgacctgaatctatttttcctgatgattacgcgatgaagatccattcatcccccatttctttctatattatgcaagattaagactccatcttgtcgaataactaaaagaaattgcaagcctgaagctcgtgcttaccatcatttccttgtgtttgcaggtatgcctaagagaaaggtgatcccttgttttcctattccatcggatttgtttgctcatgctggtgctccctgttttcttactgccaacaaacttcatgacattagcgctaactacaccatttggtctaatgcctcctacattttatgatttaatggcgatgtggagtaggccaatcgccctgtgactgccagagctacctttagtgagcagttgcttgcatgcggtgctacccttccgtttttaaccctttccttattacatgtctagcttactttggtattgcttctctccaattggctccaatctgctacataattctgacatgctttgttattgacttcaagggggtgaatggtcactttcctttagcagaggagttccactccgtctacaacattgcccacaacacctgtacaacagggacttattttttctaacaggtgagagtcaaggatgttgaatgcttatttgggatgccctccaaaattgctatcaggacctccagattcttcatagttgaaggcatgcctcctgatgtcatctctgagttttgattttcaagtgaacttttcttgttaactttcactatctttgttttgattttcttactttattgtaggcttacactttaccttttttattgcagtgaccaagaatattccttagcttagcggaggcacttgtaggcccttgtagaagctctataacatttcgtatgagaggaccaccaagcatttgtttactcttgctaatctcaagaattatggttcaacgaccattatccttccatcttcggttctagcttctttcctagatcctcctccccaagggtgtcaggatgctccctatgtccagccttctactcatgatgaggaggaggaagagcaggaggagagggttactccacgcgatgttttggctatgattcgcgagggtatgactgcaatgccctaatctatagagacaccacgtgtgtgattttataagctagtttagtactaatagattaattagttattaaaatctgtgatattattaaaaaacttcactataataaaaccctagtaacggaaaatataatgatactaacactttgttttagggatcattgctataaatattttacaaaaggactatatagaatattaagtctaaatacacagtagatacaacccaaaagaactcctggcaactcagcttacagttcggtagtgttaacatgtacatttctagagaagaccatcacctcatggttgctcttttcattgcccttacctgcaccacagagtacctgtgagtcacaacgactcagcaagaaaagtaataaaggaaaatacatatactaattaatcatccattctactgtcgtaaaataattaaataataacattctaaagagtatataatataattcaccatatgcatggaaagaacaagtaaccatacattgcattgcctaatcaggcaagcccatgtcataacctgacaccatacatcataacatggcatcacctaatttcgtgagcccatgccgatatttggcaccatacgtaatatcaccgtatcacctaatcaggtgagcttgtgccacaacctggcaccaatgtaacacatcgcctaattaggtgagcgtgtgccctaatctagcaccaatatatcgcatcacctaattaggtgagcccatgccacaaccgcgcatcaatgtatcgcactgcctaattaggtaaacccgtatatcacaatcacattgccattgcctaacataaaattgaaaattaagaaacctatcatgccatgaggtacattatactttacttacctcaagtttcggttcaggtattttggccgaccagcttagagaacgatcgatgattttgagccctatatcataacaacaaatcaatcgttaactaagccatctaaccttattccaagttaaaaagttcattcttaagggtcccctataggtaactagggtatccctactttaaattccaggaaaatacaaaaaacgagcttcaaaaacaacatactattttgggaaatagctagtcgttttctctagatttcttggcacgaagtaactagatgttttctcccaaacaacagaatgttttccacaagaatgtatgttttgagttttacactcttggaaacaccaccaaaacctacccaatcattccaaacttcacaggacacatatatatcatatagacaatagtctcaatgtaacaaaaaaaacagcccttaaatgtaaaatgcctttaaagctcgagctttgagctttaaaaagctcaaactctatttctaactcaaaaccacctcaaattcaagaagtaaagatcgaaacaagtcccatagcagcccagaaacagtttcatgaagtcacaattcccataactaatctaaatcacaaagtaaacatataaagaaaaactttttcaacataaataaaaccaatccttatcttgagctttccctctttgatggtttactatccatttactactgggtcttaaatcataaggtttcaagtggaaaatcaaagaaaatagattgagggagatgagggtttcatttcacagagagcaggggagggttttgtttctatactatttttgatttaattttaatgtatatactaataagttaaaacttgtattaattataataataatcatataataataataataataataataataaaactgtattaataaaagttattttacaatttcttatccattaagaaatctctacatctagggcactaaatcaaatcccaaatacttttaattaccccagtacttatactatcaacttatcataatattcttatcaaagtcactaaataaacctgtaatgatatttttttggtccccgattgagtctccaaagtcgccaaacctaaaaatattattaaatcacaaacaactcatattatattggcacatgctatataaatcggtataattattaaataacgcttgtttaactacttataataaaacaaaaatttattctgaaataaattagtaggatcataatcccactcattacctgattaaccaataatatatatacaccctaactttttaccattatactgatgaagatgttacaacaatcccctccttattggaatttcgtcctcaaaatttacctgaataatttgggatacagctcccgcatctgcgactctaattctaaagtcgcttgctcaactttactttatttccacagtactttaactagagagattgttttattttggagtactttctccttttagtctagaacttggacagactgttcctcataagttaagtttgtttggagcaaaacatcatcgtaactcaaaatatgtgtcagatctgacacgtacttcctcaacatagagatatgaaagatattatgcacttcgaacaatgcaggtggtagagctaaccaatagcttacctagcctaatcgctttagtatctcaaaaggacatataaaaatttagcgctcaattttttttttctacccaaatctatgcacctctttcatgagtgatactcggagaaatacagagtctatcactcaaaattcaatatccctacgctttagatcggtgtagcttttctgtctactttgtaaaatgagcatacgagatagaatcttctaaatggcttcactggccatttggacaagttcaggttcaagataacgtctctcaccaggttcatcctagtagataggcgatagacatttcctaccatatagcatctcgtaaggtgccatgccgatggtaatctgatagttgttattatatttaaactcaatcaatggcaggaatttactctaggatccctgaaagtctatcacacatgcttgcaaaatgtctttcagtatctgaaaatttttcttagactgacaatctgtgtaaggataaaaggttgtactaagtctcaatttaattcctatagctttctacaaattttccaaaaacttggaagtgaatttagtgtcacggtcagaaacaattgacttcatagcaccatggagtcttaatatctccttaatgtacaaatcgacatactggtctgccctatgggtcacctacacaagtaaaaaagtgcgttgacttggtgaatctatctaccatcacccatatggaatcatgtaacccagtagtcctaggtaactctactacaagtccatggttatgtcttcccccttccactaaggtattctcaaaggctgaagtaaacctattagctggtgttaagctttcacttgctgacaggctaaacacttcaagatgtattcaataatatcactcttcattcctggcaaccaatacagtgtcttggcatcaagatacatcttcgttgttcccaagtgtagggaatatggagttgtatataactcatcaaggatttccatcctgatttcatcatctatcgagacacaaactctattcttatacctcaatagtccactcagagttatagtgaaatcccttatataacagtattaactttctttctaagttcatcaatttgggatcactctgttagcaaatcattatcctttctagtaaatcagattgtagcgtaatatttgccaatttctagaccacaaaatcaatctcggccctagtcacatcttcagcaaatcttggagagatttgcttcaattcatagatctgccctggacctttcatactaagcgcatctgccgccatgtttaccttaccaagatggcagaggatttgatagtcatagtccttgactaactctaacctttgttgttgcctcattgtcagatccttttgagtgaaaatgtattttaaacttttatgatcagtataaatctcacacttttcaccatataagtagtgacaccaaactttcagggtaaaaacaagtactgctagttatagatcatgagtgggatagcgttgttcaaaatctttccatttcctaaaggcataggcaacaacccttcctgattgcattaacacgcaacctaagccttgccttgaggcatcatagtatatcataaacttctcgtcattgattggcaggctaagaactgatgcagtaatctatctcttcttgaactcctggaagctgtttcacatttatctatccacacaaacttacaattttttcgggttatctcagtcaaaggagtagcaatcttggcaaaaccttccacaaatctcatatagtacctagccaatcctaagaaatttctaacttcagttgctctcaagaataagattaagcaaaaaatggacacgaatgggtttgtgatgcagaagtataagatctagcaggggtaccaaatgttattctctgaatatgagaaatttctttggtgtaatctggtctgggatagacttattattcctaaacataggtttatagtttggcaagtgctttaaaggctgaacacaaaagaaagaatcaacaagtacaatcataatatggattcaacatgtttattgtgtggaaaagaagatcctgaatccattgagaacttgttcttcaagtgcgagtatagcaggaagtgtctacaagagataaataattttatgcaatggaacacaccagcaacaagaattaaacagatgctacaagcgtgccaaagagcgaagcggttctctgcaacaaggaaaagtatggtgaaaacagtgcttgcaagtgttgtgtatcacatatggaagtctagaaatgaagtgctatggaatcaaaaagtgtggctatcaatactaccatgcaaaaaacttagcaaatgagcaagctaagaatcaaggggctactgcctaagaaggccaaggaagaagacaagaaatggattttgatggtttgatgttgtaaaaatatttgtttgtaagtgtagatatgttagcaaaatgtaaagatcagagatgtaaaaggttgtttagggcaataaaaattcttattcataaaaaaaaacttcagttattgtcttaggtcgtggccaatcccgaaagacttcggtctttttcggatatactagaatcccatccttacttacaacatgtgctaagaaacttacttgggataaccaaaatgcacacttcttaaactttgtgtaaaacttgtgttctcggtgacgatgtaataccatatggaggtgttg

SEQ ID NO: 219058 - DNA, 5592 bp, Cannabis indica
gaaatcacatcctaagtatgagagaggttttaaagagatttgggatagacctattgctagcatgaaaatgtttcaagtcatatctaagatgaagcaattcaaactcaagcttaaagagattaataaggagggttttcatgatttacaggctgctgtttctagaaataaattcgacttagatgctctacaacactagattcaccaaaacccattagattttcagctgcattctcaagaaaaagaagctagagagaagttgataaagtctcaaagtgattatgcatccttccttcatcagaaagcaaaagctgcttggttacaaagtggggattgtaatacagccctatttcatgactgtataaagcaaagacagcggcaaaataggatcttatccattgagaagcttgatgggagtagagttaatgaaccttctaagataacagaagttttcctggaattctataacaacttactcagcaccagaatggaaaacaaaaggaaaatagagaagagaatattggctaggggctccactctcactcctgatcatgtcagggtgcttactcacaaattcacaagtgatgatgtgaagaaacctattttcagtatccctgggaacaagtcacctggtcctgatggatactcaagtagcttgtttcaagataattgggagtatattggaggggatatcagtgcagctgtgctttcatttttggactcaggtaacattcttaaagaaattaattcaactataattaccttggttccaaaatgtaaatgccctaattctgttaaggattttagaccaatttcttgttgcaatgttatctataagattgcaactaagctcttgagttctagaatcagtaacatccttcctgatataatatctcattcctaaggaggttttataaaaggaaggttcatagggcataatattatgatttggcaagatctggtaagacgttatggaaggaaagcgaataaacctatattgaaaagttcattgtttttccctctcctttgctctgttcagcttctgagttgtagccatggctaaaacaagatccaaagttcagggaaaacaaaccactatgatcaagaagaagaagaaaggtctgacttcaagttcggatgtgaggaaaactaaatctctggatgctattcttggtgtagagccagcgatcttttcggatgaagatgaaggggagatttcagaggcgactgaagcagaacgggaacttcaaaatccacaatgccaggatctttttcaagaacctttgtcgcctaggtcatcactccgatcaatcaggcatcaagaaaatatcaggaaagacattgttgtattgctggatactgctcagggttctcgaagtgcttctacgcaggtgaaaggtaatcctaatcccattcctctgcgatctggttgcgttcaaaaaaatttggagaaatcttttgctaagaatgatattggaagtagagttaagatcacgaaggagtatatccatgaggaaattgaattctggttgcctccaattgtttattatgtgcttggggctaatcctccattgcaagtattggaagggtttgctaggagaatgtggaaagagaaggtagaatgagtgggcatggtctcatatgggatttttctgattagattccattcaatggaagatagggatgaaatactcaagggaggttatatcttcttcaataagagaccgctagtaacgaaggcatgggatccagaggtgaatttcaaaagggaggatatttgaatggcaccaatttgggtgcatttggatgatctagaattgaagtattggggggaaaagtcgttattcaagattattgggcaaatagggaaacctataatggtggatgatgctactaaaatgagagacaaactaagtttccctagggtgcttattgaagtttcattgcagcaagattatccggatttgattgagtttgaacatgggaaaggctttactacttctgtggcaattacttatgaatggaagccgttggtgtgtagtcactgctcgggaatgggacatattgctgcagattgtagaaagaaattggaaaggaagcaggaatggatagtcaaggatgtgcaaaagcaggataaggctgaggtgaaacctgatgctgatgggtttcggccggttactaaaggctggaagattaagaaccaaggagagggattagtggctacaggtactagtaactctttccaggtattacaatagattgataaaggaagggagaatgatcaaatgggtgcagagcaggagattgttgacaagggaggggggagatccctctcttggagatggataaaataatggcttggaatgtccggggaataaacaaccagcaaaagcaaatgtcagtcaagcaattgattgagcaacaaaagatagggctggtttgactcctcgagacaagagttaaggctcggaattcgggagccttatatgttcgtatgtttgaagggtggtgttttacatcgaatagtgcttgacacaagggaggtagaataatagtgtgttggaagccggatagctttgtggtcaatatccttaaatgtactagccaaatgattcatctctttgtggaatccatagatagaaaggcaagattttttgttacctttatttatgggctcaactctgatgaagggagaagtatcctttggcaagacctaaaggagtttgctattaaggaggcttggttggttcatggggatttcaatgagatgcttcacaaggaagagagaattggttttcgagcaaggtataaagaagcgagggagtttcatgagtgtgtggaagtttgcaaattggaagatgttaagtatacatggaacttttttacttggagtaacaagcaacatggtgaagatagaatgtactccaagatcgatagagttctagcgaatcaactttggatggatttgtttccttctgctgaggtttattttaaaaatgaaggtatttttgaccattctcaagctatactaactatctactatatgccaagtgggcacaaaaggcatttttgttattttaggatgtggtccaagcacatacttataaggatttgatctctgatagttgggcaaagcaggtaaaaggttcgaaaatgtatcaagttgtgattaaactgagaagcttaaagcagggactatatgctttgaacaggaggcactataatgatgtacctgccactgctgtcacagcaaaggaagaccttgataactgccaagagagactgaggaatgaccctttaaatggtgaattggttgaaagtgggagacataaattctggattttttcatgcttaccttcgggccagaagaactcagaatagggtgccttctattacaaacctggaaggacacagggtggaaaaacctgatcaggtgatcgatgcatttatgtcttttaaccaaaaacttttaggcagcagaatgagcagtaggaaaccagttcagaattgtgtaataaggtaggggccgattgtatccagggaacaagcagatatgcttctagctgagtacaggtttgatgaagtgaagaaggctatttttgatatcccagggaacaaagctcaggccccgatgggtatgggagtttcttttttcaggacaactggaagataataggcaaagatacagctgatgctattatttcattccttcattcctagcaactcttaaaggaattgaactctactgtacttacccttgtgcctaaaagtaagtgtccgaacacgatgggggattataggcctattgcttgctgcaatgtgctttataaggctattaccaaacttatatgcactcggcttaaaaggattctaccagaattagtggcaaagaatcaaggaggatttgttcatggaagatttattggacacaacatcatgatttgtcaagatctcatcagaaactatggtaggaggacaaaaaaagcaaactatatgatcaagttggatctacagaagacctatgataccattgagtgggatttcatggaagagatgctctatggatttcaattcccaccaaaattcatcaacttggttatgacttgtgttaggactcctcgtttctctttgatgataaatggatcattacatggtttttttgaggctaagcgaggtttgaggtagggagatccaatgtccccacttttatttgtcatgagaatggaatacctgccccgaatcatgaggaaggttgggaagaagcaaggtttatttttatgagagatgtgggggtcttgagctgaatcatttaagctttgctgatgatgttttattgttttgcaatggagacttcaagagcatatattacatgttgcagggactgaaactcttctctcacacatcaggcttgtttcctaacccatctaaatctgttgtttattgtagcaacatgactgaggcagatgtacatagaatcctagatgcattaggctttcaaaagcaagactttccattcaggtatttgggtgtgcctatttttccaaagagaatctcctcagcagattgtaaactcttggtggaaaagatgatggctcggatcaaaacttggagctcgagaaatctttcctttgctggacgtgtggtactcatgaactcagttctcatggccattcacttttattggtaccaagtgatgatgctgccaaaaaaaattgtaagtgaaattgagtctatttgccatagttttttatggaatggccaatacacattaacaggtgttcttgcggttgcttgggcctcggtttgtcaatctaaaagctcaggtggattaggattccggtgcatctcggattggaacaaagcggccatattcaaatatgtttgggatatttccaagaaggaagataacatatgggttaaatgggttcataatgtctacattaaggatgaggattggtgtacctataaacctacaactcaagcaagttggtattggagaaaattggtgatggttaaagaaaaaatgaagagtttgggctccttaaacatggcacaagaaaaatacttggtggctgttggttaaagagaattacatgtccagtcggctagagtggattgggacaagtttgtttggaaccggttcaatattccaaggcatagtttcattgcatggttggcgatgcttaggaagttgaagacaaaggaaagattgaagagaattggagtaattgagagagatgattgcctactatgtaactgtggcagcgagaccatcgaacatctctttttttgctgttagttttcaaaggattttttgatacaaatcaaacggtggctgcaatggaaagcctcggcagcaaccctgaagaatatcagcaagtggttaacaaaggctagatgcaacagcttcaaaaagaaagtgtatgctgctaccatagcagccttgatctatttgatttggagcaaccgaaaaaatgttttttggaatggggagatagaaaattatgatagaattgtttgcaaagttaaagctgtcattaagaatagaatagtttgtatatggcctaaagatgtaactagtagtgaagagagttg

SEQ ID NO: 219059 - DNA, 8072 bp, Cannabis indica
aagcatagtatcgatgctatatcgattgctggaaaataaaatctttatataacttgaataaataagaaaaagtctttatgaaccacagtaatttctttcgccaacaaaataccaaattacgattcagcacttaaatactttattttattgtaataacatatcatcaatatttttttttggtaaggatatcatcaataaatttacaacttgttattttaaaatttcaaaaacaaatttaagactagactgtaaaaaaataataataaaaacatattttttattaatatatattttttgaactggataaaataaacttagtgtttgaattgtaaaagtataaatcttagttttaattggtcatgtaatatatgtaattcatttgaacgtccattacattaatttaatattttttttgacaaatactttaattttcctttacctacttactattactaagtttgaatttggggtgtaaatacattttatttatttatttatggaactttttaggggttttaatttattttattagtagagtttcatatttttatagtagataattttattctctaaggaatatattaggagacaccttaatgtgctaattactataaaaggtgacaaaaaattattagtgcaattcaatatatattaggtctaatattttttcatttaacaaataatataaaaaactgctaaccactcacaacgcaccgttacaacatctctaatagtgacactctttaagattgttaaaaattttcacatcacctaaaaatataatattttattttatttttattttaaattatttttgacacttttttgttataaaatgttctaatgataagcatatttaaaattattaaaataatactgttattcaatatatattaaatgattgattttttattttatgataaaataataataaaaaaaaggaaagaaagataattaatgatgtcatatttaggcattattactagtattcttttttactctaatagtaagcatttattaaaaaaatactaaaaatatattcatgtcatcaaatattttttaaaatattatcattggaattgctctaaggtgtctaataccaatgcttttattctcctcatctcttacgagattattttttataaaaatttagatctttcttatctgttttttggagtgtatgtcttgtaagttgtatttcaattcatcatatgtacactatagataaagaatgaggttatttgattgacaattttcatccttgtattatggtataagatgaccaattttatttttatgtctatagtacacctttttaaatgattatttcggtagattttttatatatttcaacatatcataaatttttaatcaattttttttttttacaatatcatacattatatttgtttaggactatctgttaatttttaaaaagttcgagtaatctacaatatcaagaataatatttcaatattattttatatatttaattatttaagcctaatttttttttgataacagaaacttcattgaaaaaccagcaaaacaaaacagttaagtagcaacaaagggtgctacttccctttccagcagtggacgacaaacattatgggacgcagcccatgccgccaccttgtgagccaccaagttagccgaacgaggcagccaaaacacacacccatgggccgcaaaagaaaggctattaaacaaatgcagaaaaaaatgagaaagatgccaaacagggatggtattcttgtttaaagcagtaactaactggaggcaatccgagaagaagtttgcctccacacaaccccacgaagagcacagcgaaaaggcatgacataaggcaaggcattcagcttcaagagccgaattaacagccgccttagccgagagagcatccacaaaacccccagtcctatcaaacacaaccacagcaagatacgcctcgttcccacggacagcagcgtccacatagaaattgaagtctctaggctcgtgcgggatcgctctacactctccaaagtcttccagcaccgattccgagttaattaccaaggcctgacgaaactcctctacaagtttcacaattttagccaaaacatccatcggccggggcaaagagccatcatgaaaagcacggtttctcgtttcccacagcgagtaacaaagcaaggccgcaaactgagtgaaccgcaccgcatccaaacggatgggcacaacacctgacgggggatgaagaatccatgaaacaatatcagcagaggaatttaggagtacctgatcactatggagacaatagtggctgctgaaccaacacgcacgcgcgaacgggcagtgaaagaagagatgaagcaaagaatcttcagcatcattacacagaacacagcgcctggtggttccaaaaatagcctgaatgcgagtcccacaagggaggatgttcattccgaccttccacaggaagaactttacccgttcctggagcggggccttccaaatcttactccagaggggattaaccaatcccaacctaggcttaatcaaggaaagatatgcctgtttcaccgagaaagaaccatcagtcgcatcacgccaaattaaacggtcttggtcagcatgatgaaggatctttacacggccaagatgttgtccaagatggggaataaaccactcagcaagctcatcccgaaacctcccagtttcttcacaaaaaagtcgtgcaaccaacacacttttggccaatgaattcttggattgaaggcagctatgtactcgttccaattaagccacgggatccaaggagaagaccacaaatcaatacttttcccattcgccacgagccaacaagattcatttcgaataagctccctcgacattaagataccccgagctgctttggacgccacacaaggatagtccatattccaaaaagtgtcacctcgcttacaatatttggcccgaaagattctacaccagagtctctcatcaccattggcaataatccaacccagcttcgaaatcaaggcaaggtttaaatcagcaaatcttttgattccgaggccaccatgctcctttggtttgcaaatcgagtcccaattagtcagcgccaagaaacggttcttttcagagcaaccaacccaccagaatttccgaacaattttatcaagctcatcagtaaccatcccggggaggagaaaagtagacatagtgtacagaggaatactagcagccaccgatttaataagggtcgttcttcctgcctgagacagaagattactcctccatccttccaatctagccatcaccttgtccaccacaaattgaaagtcacggctggaattcttagagaaagaaatcgagttaccaaggaacttatccgccggagtgagggaacgaaaccccagaagagattggatagaatctctcacttcaaaactggtgttgcccgagaaaatagatgcagacttagcaatattcagaacttgccccgaccaagaacaatatttttggagacaatcttggatcaccataacctcttccacccgagctttgcagaacaggaaagtatcgtccgcatacattaaatgagagaccggggggctctgtgggcatactttgaacccgtggatcatgcctgccccttcagcccgaaagaggagacgggataaaacctcactaccgatgatgaacagataaggagatagcggatcaccttgtcggaggcctcgagacgggcagaattgttttagcggaccaccattcagcagcacagagaaagaaactgaggaaatacatttcatcaccaaacctcaaaattttccacaaaacccgaaagcctcgagaaccacctcaaggaacttccattccatacgatcgtaggctttagacatatccagtttaagacccgcaaaccccatctttccctttttcttcttgaatgagtcgagaatctcatgagcaataatcccgttctcagcgatccacctccctgggatgaaagccgattggaacggcgagataatgaaggggagaaccactcgaagcctattggcaattagtttagagatcactttgtatgcaaaattacacagcgaaatagggcggtaatcatcaaatttggaagccccacatttcttcgggataagaacaatgaacgtgcggttcaaagttttaacgaactcccctgtccgaaagaactcaataaccgaatcaaccacatcttgaccaaccgttttccaatttgccctatagaaacggccaggcataccgtccggtccaggcgccttgagaggagccatagaccacaccaccctcctaatctcctcccccgaggggattctagttagctcatcattcatctctgaagtaatacgaggagaaatcaactcataaatatcagggtcaatcactgggcaagccgaagtaaaaacttgtttaaaattcgcattaaagtactctccgatctctggccgactttcaagccaatgcactccatcatcagaaatagctccgataaaatttctctttcgtctaatcaccgtagacgcatggaaaaatctggaattacgatctccatccctcagccaagtctcacgggatttctggcgccaaatatcacattgacgagcagagacttcgtcaatttcaagcaaaatatcaacctccaattgagaattctcaagagaggggactcgattttgtacatctagcaacaacttttccaaagccgagagcttttccttacagaacccaaagtactcccgattccacttagcaagcatcttccgagtattagcaattcttgagactaattggaagcttttaacccccctcactgccaaattccaagcgtttctaaccacatcaaaacacgaaggatcgcgagtccaagcgtccaagaatcggaacggtctatggacattctcttgattaaaaagcaaatcaagaaccaaaggagcatgatccgaggccctaatagaaagggccttaaccccagccttagggaagttaatgacccactcaggcgccccaataacgcgatccaatctttccttgatcagataaggcagcgagcgtttgttagaccacgtaaagaagttcccaatacacccaatgtcaacacctcccgagagcattagaaaatcggataaagaatggctttcccccgaagaaaccaaactaccaccaaatttctcactttgattcagcagcgaattcaaatcccccaataagacccacggctcactcatggacgagacctgaagggatagggactcccaaaaatccacccgatcccccctcactggaggaccatagacaaagatcccattccaagccggcttgttcaaaatattggcaaagcgaacagtaatagcagatttatcagcacctagattaaccacatcaataccaaatttccaacacagacagagaccacccgaagacccttcagcctcaaccacaatagcattaaagaaacccaaacgacgccaaatattactcattctaacggacttaaccttagtttccatcaaaaaaagaacatcaggattctcattcaaaaccaaaccccgcagagcttcaactgcccgagcttgccccaagccccgacagttccaagaaaggagtttcatggggatttggggggcatgatacggcccgcctcctcggccaacagaaaatccttctccacaatctcattgtcaccactttcaggtttcactcaaaggcattctagcatccgaaatacaagacaacccaactttagagataccatcaattcttgcaggtgcggattccaccaccaagtcccccgaagcgccaccgataccctccgactgggttgagcactgtaagatctcagtggctaaattatcctcagcccgacacagtttcttattggaaaaagtggattctccatcacccgattcagcatcaccaggtaggatagcacttccagccccaaaaacatctttaacccgatgattttccaccaccgcaatacaatcatttccagtactctcaccagtaaagtcatcccgacaagtcttcttacgtttaccccctgatttcgattccaagtcacgattagagaaacggaacacaggtgtctttggaattccattaggtccaaccatcttagactttttgagttgataggtggatttgttgcgcttcaacgttatgtcgtcatccttcaaagacgccccaaagcgaaccgggcctaagttttcttgaaaaattttggccatctgggccacatgttgagatggaaatggtaattccacatagtcgttataggccaccgtaaaggccgtatcagacctctgtctagggaccccttccattcccccacttagcaaatcatttctaactagaccaggggcatcacctccaatcttcttcgagctagactcggggtccccttccacaacacctctcacaccggtagcctccaaatgagggccagagaccggagcagagtcttgagccacatcatgtttctccaaaacaatacggtcctgaatctcttcaacctcaagtaaggcgaatccattctctagtcgagagccatcacgaagccacagtccgaataacgggacactcctgccatcatcaacaagaacaactctctttctaccagaacaaacatcctccatatgacctattacactacatttaaagcagaacacaggcagttgttcaaatttaaaaaaggcccaatgttttttcttaccattaccttcaagtgacacccctggaaccagaggtagggagatgttgatccgagtccggaagcggagaaaagagttcaccagtatgccatttcgccttactctatctgccgcaacaaactttcccactcggttagccatttggactgcagcttcgtccgtaagtagttccagagggaccccatgagccttgacccataactcaacggagctcaaatcagcagaagaccataaaccatcctccggcatagcagcaaccaacataaaaccatcacacggggaccggggaccatgagaaagaatgtgttttacttctccgacagagtttagacggaaaacaaaagttttcgacttgcgatcaacgagctggaagcgccaacccctctgcaacctccacattccagagagcacttttctcattgtagccgttgagtactccctctttgaaaagaaacgcccaacaatagaggtctcaagagtgttcttcgcagcagccgtatcgggtgtaatctgaatagaaaaatcatccaaggagaaattctcaacagcttcgacagaatcatcaatcgtcatcttccctgcaataaccatgactgtagcagcccagaaaaccccaccaggtgacagaggaatacagagaaaatggaaagaaaatgaaggaggcggctgaaaaaaaggaatgaggtaatattgcttcatagcaaaagggatattgaaccctaggaccactgaatcagggtcagggggcagcaggccactacccctgtccgccgtaccggacatacgaaaacgtacactcacaccacgcccagtacactcacagagagagagaaaaaatttctctaaagcttattctatgtcttcccataacgactatgtggaataaatatcataaatatttacaacatacccgataataacaaaaaaaaaaaaaattaaaataaatagttttagatgccgaaagagacatgatgtctaccaaattacccgttgtagtacagaaatttccgatatatattttttttgaattttaatgtataaataattttggtaatttaattaaaaaaaggggggtttaattttgtaaaagaggcagaaaaaaaggaagaaaattcgaggcaaagtaagaaggagggcgaaataagtaaataagagttgtttgagtttggaaaatggaactttgaataataaaaaggagaggcgggatcgccaggtagagagtatataataagcagggtgtgggtggaggccaattcctcaccacccacgaaatcgctggccctaatttctatttccaattctctccctttctctctctctctctctctctctctc

SEQ ID NO: 219060 - DNA, 2708 bp, Cannabis indica
taagctaaaaatgtaaaatttaaatctaaaatacttattatagaaaaaatcccttaaatgaaacgtacgtctactatgtatatatttaattatataaatttaaaattattgttgctgtttcagtataggtttgtatttaattatgaaaaatatacaattcacaatttgaaactagtaataattaatacttaaatttttgaaatataagtaacatcataattgaaaatttgaaagtatatgaggattatccttttaaaaatatattatactaattattataaaattctcgtgttaacataactattaaaacttttccgtacacatctatttttatatataaataaacataatagaacgagctaataaaaatactttttaatataggaggaatatgtgcatggtaagatattcgcaatcagattgttttatgttttatgcctatagggctgaacaagttggataattaagtactttattaattaacaatcaaacttctttataactgaaaaataaaaataataaagacttaaaacttataggtacttgtcgtttgggactaaagtacttgtattgatcagtcacacatgacacatgttctcttcaaaccaatttttcgtatcattgtatttgtctaattaatgacaaagttaacattaaagctggtcttatattagttagtgtgtgcttatatatatacatgtgatactgtatcatatgaatcatatgtatgtacgtatacttaatctctgtataagttcttttgctggaatagaaaagaagttgcaaaaaatagcatattaatatatatatatatatattctaaaataaacttgtacatatacatatatactgatctatagatgaagtttattcatgacaatgactaagagaatatatatatatatatctgcgtcaaaatttttgatcaaaaaagcaattattaatgcagagaaaaaggaattagatctctcatgatatctttatattaatttatattccctttgattcaaactgtatatatttacgatggcataattcaataatattgagagaccttcttggaaaagttgtgcacgatggcgctgaccatttattattattattattatatttattatcaaaaagaagagaaagagaaagagaaagttttgtgatcactatatctagtagtaattaatctaattaatgattttatttaacaaaaataaatctatagttaatgattaatttctagctatatagatataagaacaaagtaaatcactacatcttaattattattttattagtatcgtgcttaaatcctcaaactacattttaactgccaaatcccagatttatcaaacaataatttatatctagttagtggaagtatagctgttctactttctataatttatatatatataaaaatattatagttgtttttttgtcagtattttaaaatcttcatagttctctagctaactagtatatgccataaaagtagaagctagagtacgtatatagattaaatggagtcattactttataatttaagaatttttaccgtacgtactagaaaattttgttaatagcaatttggtttatcaaactatataacctatatatatatagtttatgatcatgaatatacagagagttggtaaaagttaattaataaagaattactatatattatgtatataataatatgtatataataatatattaaaaaagcttatatactgcatgtcattaatgtcggttggaacccattaattatagtaaagtgatatatatgtataattaaaaagaaatctagctagctttacatcgcaaaagaaagagtaccatagatcgacgtgtcgaccattgaagcctatttcatgcagcagcctataccaatgtcaaagatacaaacatctcttttagggtttctattgaatgacagggatttgagacaagattcttctcttctctattgaacaccataaaataaattcattaattcgattacatattttcaaatatatatatattattaattcaaaaattaataagaaaaggaaaggggaacgcaaagtactactgtttggttataaaaaccctgaatgagctttaataataataagagaagagaagtgttgtcaggaaataattatacaaaggtgtatatggctggaggccaaggaatatggaaaagttccaagttattataaaaataaaaaatagaaaataataatgggcatatatatatatatatatatatataaagcatgggaacatgggcagctcattgggtgttgaaggagattgaatatattttgtgagtgcgcgcacccacatgagtactaattaagactacgccaacttgcatataatatacatagaatttcctgtgtttaaattcaaactggtcccatctatatatatatatatatatatgttatgtacaccttttgatctgatatatattatatatgcgagagggtgagtcgtcgatcgtgactcgtcaaacctacgtgaatatctcctttctgcttgtaacaatttataagagtggctaacactttaatttgtatataatcttaaattaaaagtatatatatatatatacattctttttttgttataacacaatacttaactgaaaggcaaactaattaacaaaattcagctgaaaaataacacttagagctagcttagtttttttctttttcttttct

SEQ ID NO: 219061 - DNA, 3270 bp, Cannabis indica
ctcatcttgattaatcttcgtttattttctctttaatttctaagttatttactttcaaattgcaaacttattattttaccgaatagaatcataagtatagttcagtagtacttaatccaattccctgtggttcgacctcacttgcgtgagatactacttgattgcgtacacttgcgtaataaacataattttcgtaacactgagccaaatattcctctgcctaatcccattcctatggctccctctctaaagtgaagtaatcaacctacacttgtgttatctgactctgttacatccttaaagccatctcctactcctcaacctaatccaattcaacagtctgtgtcccagtccaatggtcccataagaaacaggcattcaatgaaaataagagccaaattagggatctttaaacccaaagtgtatgtagcttttcaagaacctactagtgtgaaaatggctctgcaacatgaaaaatggaggaatgctatgtcagacaaaatgggagccctgagaaaaaatgtcacctggacttatgttcccttaccagatgggagaacacctattggatgcaagtgggtgtataaaattaaactaaatgcagatggtactatcaacaaattcaaggccagattggttgctaaatgctttcatcagcaactagggtttgacttcactaagacatttagtctagtggttaaaccagtgacaataaggattgttttgtcattagcattggccaaaggatggtgcatacaacagttggacataaataatgctttcttgaatggtgatcttaaggaagaagtctatatgactcaggcccctagtttcgagttaccagatgcacctcacttagtatgcaagctaaataaggctatctatggtcttaagcaagcccccaaggcttggtttgacaagcttcatcaatgtctcttgtcctttggttttgtctcttccaagtcagatcacaacctcttcattcaacatacttctcattctatgattctgttgctggtttatgttgatgagatcatcatgactggtagtgatgctgcacaagttgctgctttaattcaagcattagacaacaagttctcactcaagaatcttgggaaattacattactttcttggaattaaagttgaacacatagaaacaaggctccatttgtctcaaggaaagtatataaaggacttactatgtagagctcaaatgtaggatgccaagcctgctcctacacctatgactagtggtttaaaattgtctgccttttaaggagaccctgttgagaatcctcagcaatacaaatacatagttggagctctacaatacttgactatcaccaaacttgaaatctcatacagtgtgaacaaagtatgtcaattcatgtcaaatcctcttcatacacattggaatgctgctaagaggatcttgagatatctcagtggaaccatttctcatggcctgactttacaaagatctgctgagcttgatgtcactgcctttggtgatgcagattgggctagtgatcctgatgataaaaggtcaacatttggattttctattttctttggctctaatcttgttgcttggcaatgcaagaagcaacatactgtctctagatcaagcacagaagctgaatataggagtttagctcaagttgtttctgagatcacttggatgcactcattgtttacgaagattcatgttcaacttcctcaatctcttgttatttggtgtgacaatttgagcacaattctccttactacaaaccctgttctacatgctaagactaagcatattgaactggatctgtatttcgttcgttaaaagctttcttagaaactggtgcgaatccaacatgttcctgcaacagaccaaattgtagatggattcactaaagccacttcaacatctcgatttgatttgttcaaagctaaatttggcattggtccctgcaccaatttcaagtttgagggggagtataaagacggctagagagtaaggtagttgttagtggttgttgtctaattctgttacaattctgttatggtctgttacaattctgttaggagtgtaaatactattcatcttttaaatatattttaataatattttaactatattttatttcatttttattaatatgtattatatatattaaaatataatatttaaataatatcataaagatagagagaaaaaaatgatatatggtgttacatgatgtaaaataaagaaagtaatattttaataatgtattttaaagaatagaataaaaaaaattgttgagagtgtagtccatccttagtgtaattgatagttattagagcatctccaaagagacattatttttggtattacactatcactaaatttggtgtcaaaaaatattttcactccaaccacaatactaaaatttataccaaaaaatatattttattattaaacaatatataaacaaaaattagctattaaatattattattattaataataataataataataataaagatgcagttactacagtgctactgcatatatgcagtgcactgtagcaaagagtgcataaattacctcaaaatggtgctaccttggagaagattaaccactgcatcctcaaatttgggggttctttggagttgctcttagcagatagagagggatacaggaacacgtgggtttcatctgaactttttcaaaaaaaaaaaatattacattccaaaacaaaaatgtaggaattcactaaaaaaaccttgtaaagattaaaaatacaatttcctagtggaaataacaaaagtaaataattaaaagtagagtatatttggtaaaaaaggaaaaatagttgatgaactgcttacagagacttattattagtatacagatgagacatacatttgatcctctttaagggttgaccaatttaaataataaagatatagtgagaattttatattttgcctaattttcaataaaaagagaaatagtaaattagtacttcataaaaagagaaaaagaaaaagaaatcaacataaccttttttttttcgcatattcgtaaaattatataccatcgtcttaccaaaccaaaatttaactatatatttttatataaaaaatttatgtacatctggggaacgaaataacaaattaactaaaaaaatataaaagtgtaaacttaaactgaattatgcgtagttttcagaaaaaaaaaaataaaataaaacagaacaaactgaatgatgctttaaacaaaaaaaaaaaa

SEQ ID NO: 219062 - DNA, 1946 bp, Cannabis indica
attctatacttgtatataatataaatgccaatatttagagtttctgttaatgcattaattaattattttttttttaattcatacaaggatattttttccatgtacaaagataaaaaaaaaattaacagaatacaatgaaaaattacattttaattataatattgaataatatacaattttaagttgagatatattacaaagctcaggaggaatatatgctaataataaaaatgaaattcatggctaaactaccactaaatattataaactaaaataaaaataaaattaccaaaaatctatacactaatctaacaaagccttgcaagatcaaagaaaaaataataaaaaattaaaaataaataaatattataagctcagttaggatagcaccgttacgatttatttcaaataatcactaatcttgtctccaaaattacgataacaagtccaaatcgaaagctctaaagaagaagaggaagttaaggttaagctgatggtagtgttattattttgaaaaggttgaaaggagatgattgttgtactaagaagagacaacattgagaaagttttgatgaaatgagatgacatgaagaatagagaaatgtatatatggtaaaattatgaagaggagagttttgatggaagtgatgtaaattggagaattgaagagatagatagatagaaatgagattgagaatgtagtgaattatgtgagtgttaagagtttagatacttatatagaatggaaattggaaagagaagagaagagaatatataaataaataaataaaaaagtaatataggtaggtaataataatggtgatgagttaactagtcactgatattatctgatatgagcagtgttagtgtagtgggtagtactagtagtagtagtagtagtagtactctgctctcatttctcatctgtcataatcttttaacttctcattcacgtaaatataccaaagaataagaagcacaggcaggggctcactatttttactcctacgatattaagagagtgttattcgacagtagtcgtgtccaacactttctataaacgacattttacggttggttatcgatattttttaaaaattattttcttaaaatatatatgaaacataatatttaattatatcaaataacagtataattctaagaaaaatattaagtaataagatgttactttttagtaattctcttattaaaacttctctctaatttagattttaatgttaattattgcttatacaaatttgaagaaatgaaccttgatacaatttatcataatcatcattcatggcaaccaaatacccaaaaataagtggggaaagtagaaatgttgagagaaaaagcaaaagtaaatgtatggatgtgatgtaaattgaagttgatgatatgaatgaattagacttggggatttgaaattatttcccaaaaaataaaaaaggggattaaaagtaatatgaaaattgtgttgaaacaaatagtcaaatatacaagtcataaagtcaacaaacatttcaccctatattggcgtggtggacaatagagtttcactcacgagtcttagtttgaccaatattccactttgttcagatgtttgtgattagtgtaaatattagacttatttgtttccaattgctttaaatattagccttaattaaataaaagctatatatatgtggtattattaaatttagggaaatttgtgtctaaagttatcaaaaaattcagtttgatacatataagtctttaacctcgaaaaatagcgacaatagtctccaacgtcacatttttcgtaaatccgttcatccccaatctgttaaggtaactaacgttacacgtgtacgcctctgatttaatctcatattttttttaataattcttttcttttaagaaatagtaagagaatactaacattttaatattgagttctatat

SEQ ID NO: 219063 - DNA, 1851 bp, Cannabis indica
ttaaataactacaacttataggacctgcacaaattatataaatgtaagtagaaaaaggagaaaataacacaatatgtttcaaatcatcaattttcccagccaaaaaaaaaaaaagaaaatgcttcaaatcatcagacttgtccatttatatataacatctagtttagtggtgagggatagatgagaaaagagtgaaattatagtttgaactcaagacttttaaactagacactattaattgattgtaaaatactattgcagtacactaaaaaaaataaaaataaaaaccttctaaaacaaggtcagttcagtctccagtctaaaaatacagtacatcagtgagctagtagccaaaaagagtcccaacccaatggacacgtacgcccaatttctaaagcaagtcatgaagaccagtccaaaatatattccaacatcaaaccaacgactgactcctacaattgcactctcaaaatatccaactttaacgttattagctctctttgtgctgacttgttcaaataacaataattaaaacactgccatctattaagctttacttgaaacatatttcttttggcctaaagatcgatgaccaagttgttattatttatagttaattaattactctgctcattataaaccgagaactcatcaacatggtatttcattaattggcgttactttaaataaaataatgttatctttaatttttatatacatatatgtcataatcgattaaagctagcttagagactggttggtttggtttacccatttctcacgacaaagttttctggtctaaagcagacaaactcaataacatatgacatatacattaaaagaattaatcacaatgaacgttttaatcctcagttgacttttacttattagtactacttgtcttgtattatacaatcagtaaatatcattatattacacaactttcacagatcacccacataagttgaaagtttatctctataaagtctctaagtagttggccagctttacactttgtttatctcagcaaaagctctcaaaataaggtctttctgttacaaccccatatccacttctcaatacatactgataatagagagactagtttcttgttatctatattctgtatagaaaaagaagaaatgggtttatgctattcttgcagatcattatcattatcaacaacctcaaacaatcgacctgaattcaaatatgtaagagtggttcacttgaacggttacgtagaatgcttcgaacaaccaattccagtgagccaagtcttagaaaagccttcaaaaaacttcgtctgtaccccaattgagcttctctcgagtggtttcagaccccttaaaccagaaaccttgctccaaccaggtcgaatctactttttgctaccttacacaacattacaagctgaggtttctccaattgacttggctactctagtaaaacggctcaacgcagccgccaccaaaactagccgctccggctcaattaaatcatcatccagcggcttattggctagccctttgtccagccaacttattggctcccctagctcgatttggagctcgccctcttggagcccgaaccggtttgcagaacccgattgtatgagtgatttggcccaacggtcggttagagctcggtcctggaagccaattttggacactattagagagaagtcctttcatcgaaggagtgagtcagagttgcaatttgagtcctccaaaagatttgaggtttgattaggtctacaaatatatatatttatttatgaaatttgaaaaaaaaaaaattgtgtaatatagtgtagtaatggggtgttgattaagttcaaaaaaaaaaaaa

SEQ ID NO: 219064 - DNA, 1977 bp, Cannabis indica
aaaaaaaaaaatcattttaaacatgtatttttttaagctactttgaaattttatatgtatacaaatttatatgcataaaataggtataattttcatctcaaattacatgtgaaagatgataaatttataaaaataacatattaaaaaaaaaactttaaatgtgtttttgcctattacaaagagaactataaggaggagatattacaaatttgctctatttttgtcaatatgaagagaaacattagaagagatatatgaagagatataaaagtaattatctttgtaggtaccataatatttacattcttaacaaaaatctttacattacaaaaatataataaagagaaataactaatctaaagtaagaccaacaaacatgataattcttcttggcttcacaaaattatttaaatgtgactaagtagttgtttaacaatatgtgcttgtgattgtttcctacagaactcatacttaggagtcttgatgtaaataatatgcttctttttagtagatgtatggatgagattttcaacactcaagattatattcttagatcaaatatagatatatagtgggaatataagtataatctaaacctacaataatattatatatacttatttagtatataagaaaaaaaaaagttttgacaagtaaacaaacttatttctcttttttatagttataatgaaactcttaataaaataagaggaaacgagtaattattaatacctcagtggtttcctcttcaactattttgcactgatcatgaatctaaaagtaaaaaccaaagacaaaaaatcaattccaagagaaactttataggaaaattttaaatgtagctattgtatgctctttctaacccaagtcatgaaagtatgttaatgctttcatgatatgctaacatttctaccaacttttattttgtgtcatcacactcaattctaagctaaaagaattgttataagaaaaaatatttatcataacactgaaaaagtgtaattaaatgtattttataacattttagcaagtgttaacatagtccatgtaattaaaagtcttaccatttcattacatttttcacatgttattaaatacaatattataacattattttggtactagagaataaatctgcgtgttgcgtggtaaagaagaattggtttgaaaaaattaatgattttctcttcaataaaagtgtaccctttttttttattgaaaaaagaaagatagttttcttagtttatttgaaaactttataatctaaatatttatacttaggcaccttatcacttttgtaatttttgttttaacaacacttttatacttattgaatattttaatttttcaatatagctagttattgtacattttgaataatttaattactcacattgtttgtcgttataatccacaatattaaaacacaatttttatccgtataattatttataattatttattctatcatcttcctaataatactttttattacataacatctatataaatgtcttgactttataataaaattactacactgtattatcttattttataaatatagtttttaagaatgtgaaaaagaagaaatttaaaaagaaaaaaaactaatataaattaaaaatatttttatatataaaataataaattgaatgtttttataaaattttagtacaaataaaactcctactaagtaattgtattaaaagtaaaatataactatattttaatattatatgtattatctaaccataatataatttaaaagcacaataaaatgatgataattgagaatgaaactaatgcacaaaaaacatagatacccaaaaaaaatatgaagagtaaaaatgaaaaatctattcatatgtatatataatacatgaagaaccaaaataaatacaaaagaaaagaaagaaaaataaaatgttaggatttataaaacacttcagaaatatataaattacagatctaaac

SEQ ID NO: 219065 - DNA, 6780 bp, Cannabis indica
gataactaatcagattgtaaagagttttatttagggcataaaacccaacaacttgttgaattgggatagccaggactttcaggtttgggttgaccatggtttccaccgcgtttactggagatggcgtctccctaatcatcttcttggaactggagggtctctccctctacctcttggtccctgtatccgcatctttcctcacggtccaagtctgggcagccaaattgctcttgaattcttctaaggcatccattgcccaagtgtacagaagaattgcacaaagagaggaagacaagtcaacaaggtaaagacaataattgtaaaaaaaataatccaacaataaaaaagacaagtgtcgtaggttcgggttcaacccttggagtttgagccagagccctctaagtttttcaatgttaacgtaaaatgcctctgtaatctaagaaggcaaagcttcaatggtaacaacagaagacgaaggtggaggggatgatgtggttgcgagaaccgtggctatggaagtcatcagaagagaggaagcttcagcagtggctatggtagagtttttggttcgtggtgccatggagaagaagaagttagagtcaagggttgtggtgggatgagttagggttaaaggagtgatatcactgatgccatattagaagaatagcctcttctgacaatttttttatgatttaagcgttcatatattacaacaatggataatttgggattccagtcgaagacttccaacacagccactttagctgttagttgaaatgccaattacaacatatgaaaatatgccttatatactaaggcccaataagcaatagctgaaaagcccaataataaaaatgctttatttacaaattctaaatttttttacttttcatgaattttaaggtatacgctaccaaaaacatgacttattattaaaaaattattttgtaggaaaacttataaaaaaagttaaaaagtacgagaaaaccgtaactgattactcctctagttacttaaagaatttaatatgcggtttagacttgataagaatgaaaatgtcaaactaaattaaattttaatgaccaagaggtttgtattgccaagtgaatactaccttttaaattaaaatggtggtaatattaatccattccaacacttgggtttcatattcccttcaagtctacttttcaactcaaactcacataacaaacaccttattaagtggcgttatgttagaaggaataaaaatatagctaaaataaaaatgatattctaatattttaaaatgaaaccaaacaaagaaataaaataaaaattgcttcattttcatttcatttcatcacctccaactaaatgctacttaaggttacctagtttctagtaaccctaaggtatccttatatggttttcccataaattttttcacatacaataacttttattataaaaacatcatattttaacatagaaagtataaaattttataaaatatgcaatttactcctttaagtataaatgggagatttcaataaatgtaatgaataattatcataagaaatgatgtttttgatgctctgtttaatctttgggatgattactcaaatcactattttttataattttttttttttaagtttaaagatcttattttacatttttataatattttataaaaataatacgacaaataacaaaaaaaactgcacaaaaataataaaaaaataacatccaaacaacaaaaataataaactatcaacaacagattaataataatacaacataaaaatacatcaaaagactatattttttgtaattaaaatcataaaaattgtaaaaatatttaaattccataaaaccgtaagtattcatatctcaatttgaaattcctacaggtagctactttatgttttactaagagacatctcataattttttataattttgttgttatttttatgtatttgtgatataatttctatcttttttgtttgtataattagcattgagctaaaatggcaaggctcatgacatgcttgtctcaagccaattgggagtcttgggcatttttatatagaagtttttacgttttttttttttaatggtaaaattaaaatatagtattttgaaaatatatttaaaaaattttctcaataaaatatcaaatatagtatcttaagagatagataaggtattttttttagtaaaataattatgtgtattataaataaataataatataaataaataaataataatataaatacaaaaaatagtatttaaaaaaaacaaatttgagaactttatgttgaagggtattttaggcttgggtggggctttagacatagcccttgctgccccacccttgaaccggccctagccctaactcataacaagggatgcacacgggatggagaatcggcagtaagtgctccttccgtccccatccccgttaagaattttaatctcaatcttcgtgtattttccatcagggattgggcgaaaataaaatttacaataaaaatttaaatatataaaaaacattaaactacataaaaattaaaatattacacattaattattattcaataaactaattattatccaaaatataatttaaaattcataaaaagaatattaatatactaaaaaaaatgcaaatatacattataaattaccaaatattattaaaaatataaaataaaatactaaacgagtctctgtcaagacgtggagtgtgatatttgtccccgccccattggacaaaaaataatctctatccccgccctgtttcctatttagacggaaaatctctgccccataaggggcgggtctccgcagagccctattcccacgaaaaaaatttccccacgaaaaaaaaatatacatccctacttgtaacattaacaacccttgatatatagtgccatacgtttaaaattcccaactcactcgtcgtttagaattgaagactttggcaatcggcaaggaaagcttgtatgaatgtggttcaacttttataaagtaactattattttcgttggataatattgttttttcttgaatatgatacctatgttataaactgttttatctataattttgagcacagtagtgggacaaagaatatagcaaaaccacaatgaaaaattgttgagaaacaaaagtgaaaaagagaccttaatattttcattcacaggaaaaagcagagaataacaaagtgtgcagcttcctggtaatagagataaacctactaaaccttagcaaactcggcgagttgccggaaaccttttcataacatctacgaaaaatacattagatgcaagtttcgcggacacatattttcccccttgaaataccactttattaatttttgaaagcatatcaattaacatttaacaagcatatccatccacctttttacaaacatggaagtgttcatgcaaccaagtataagctgctgcgttcgacgataacaggctactactagtataaagtagcaagtacctctaacaaagaagcagcaaatcgcatctgggtctcctcgttgatagtggagaagagcgggacatgcacaaacagcgatttcgttttgttctgctcagaaaaccgaagcgaatgatagtaaacgtagttgcatacaaaacgcccagcgtcatctgaagtcatcacctcgtaacccttagatacaagggcactagttaactcctcaactggaacagaagtctgtaaaaattgaaccgaaaagcgtttcaagagacgcaataagaaaatctgcaccatcttaactatgaatacaatctagatttcgacaattacctctcttttgtttgaaattgcaccatcctctggaattatcggtactttctgcgaaacaactaaatataagtgagaagagtataaaagctaaatccagaaagggaaaaaatacaatcacttaggatctatatctaacctgaggtttccatcccatctcgtccggacaacggaaagtagcttcattgacagcttgatgctcaatagcaaaccttgttgcaccactgttaactccaaaatgcacctaaagaaatataacttgaatttagaatgttgtttaagacacatgacaagtaacttcccagaaactaagatgacattattaataatttactctcataccagaacaagactagtctataatgccattaaaatcttctaaccatcactttctcaattctcccattctaacatttttttttctaatatgtgcaacaatgcttcttcattcaaatgaagaaaaaaaaaacacaaggaaatcaaagctaactcaagagtgtaagttgtttaaaaacaatccatataaaggggtttcccaaaggaacaaccaaacatactaattccaataagcaaaaactaacccaaacaactctccccggattcgaagtttctgaatccttagcagtgattgaagattgcaaggtcttgtttagggaatcaagtgcaccttctcctgcagtgtcaagaatgctgcagctcccaaggattaggccttttggaaagccattcttcttcaagtagtctttgatcccggtcacaatggtctcagtcgggttctctggaactccatggaatttcttaaacccggtcacatgaatagtgactgcaggaggcccttcagaccccattttctatacagtggaatgtaaaatagaaatgcttttatagcattaagaatcaatccaacacctttgaatctatatcaaacacaaggaaactagttaaacaaacagaaacccactaataacgattaacaaatgaaatctaacatcactttagactgtataaacacccccaattttatttgttatttctttctttttttggcttggtttcttcatctagatatggtctttaaaatctattgttaaatcaaacaattagatccataaacactacaaaaagtaatcaaaaaaagcaatcattttacatcaaaatttaatccatcatctaattcattctttcagataagagtatttaagtctgtgaagaaaataaaaggacaaacttttaatttgacagagcaatagaaaaagtcaaacttggttgccgtgtcagatgattgggttgagagaattacagatacgaacccagaatctaaaaacaaacgaagatcctaaaaaaacacaataatctggtcccaaatcgaaaaaaacaaaagacgacccaacaacaaattagatcctccaaaaccaaataaaaatacaaaattagaaataacccaattgatatctgatgcataaaatcaaaattattaagccaaattacctgaacccagaaaaatgaagattaattaaactaaaaaatggatcagcaagggaaaataaaataaaccaatgtgagattattggaattatattaaacaaaattgattagcttcgattcgattattacctgtaatataatctcaccaaaggaaaacaaaaaaaagaaaaatagactcaaccaccaatcttatctgaagaaagaaggatgagattacaactggtgaagattccaattagattatatataaagtaagagagagagagagaattacataaatacacacataaatattatataatgaagtaaggaacgtggtagtggagggtcattttcaaagagcaacaagagttttatatgaatgaatctcaagtattgaaatgtattaatattaatatttgtgtagaattattgggttttggtcataaaatatatgatggagtttgtgataagcatgcaataaacattttggcattacatgacattcttttattgaaactttctttcctactgtcttccatttctctttatccaattatttgtcgtttattgttttattattaccaaaactaaaattattaaagagcatgatcaactgggttctttattagagtagtcttgttacatagtgatctaatttttaaaattatttttacatgaagtattattcaatatagataataaaaaatcattaatttattttaaagttgttagttattgaaattgctaattttttgtggatgaaagaattaatgaaaaaaaaatattttaagttttttttgaatggaatattttttaaattaatatgtgtattttaataattatagatattacctccattaaattgcgctaggtagttgaaagaatcaataatctattgttttcttttattgaaaggtatatgattcatttcagtaaatatatataaaaaatgtgtgattatacaatttatctcctacaatgacgtggactcaatttttttttgtagctgttttgatatttaagaaaaaaaattagcttaattttttaataattgagtaatttataattatttaagatatattataaatttattagaaatttaaaataacttacaatataaaaaatattatttaataatttatttcacacacggataaaaacatctctaataatagtatttttaagagtgtcaaaaacttttacatcacttaaaaatattttattttattttatctctcttttatatcatttttgatattttttgttgaaaaataatctaataataaacatctctaaaaattattaaaatattattagattattatttaatatatattaagtaaataatttttctcactatgataaaataataataaaaaataaaaaagagaagatgtaaaagatataagcatcaattaaaacatgctaaaaatatatctatgttatcaagtatccttcagagcatctttaaagtgaaagagttactcgtgcaataaacta

SEQ ID NO: 219066 - DNA, 2300 bp, Cannabis indica
gtgatattagtaatattctaatacaaattttattattaatgtacagattatatacgtgatattatataccatatgcctaatacaaattttattatttattagtaatattctaatattgattatggtttgacagcttactcattaaatgttgtacaatttagccataaaaataattataaaaaggataaaaatataattatggtaatcattctcattaaatacattcaatataattaaattaagtaatttatttttcgttttagtacttatttttagtaattatttaaaaaaatgtatattatttatagtaaatcatacctttaaaattaacataaaataatgtgaattttttttcaaaaaaaatattaaaagtaatttttaaaaattatttatatttatttacttttggcctgtgttttttatttgaaggaaaaaaaactcttttattatcaactcattctccattttagatcttcactactgctatgttttttttaaaaagagaaactatttgattattatcatttcattctccatttcagatctattactagcttgctctgttttttcatttttttttccgtaaaagaaatcgatttaattatcaattattcattgctctcgtcatacttattcattaattcattacattccaacattgacaattaatttacatattaatggaaatagaattgcactaatattacacaaagaaactaatgtggaaaatagatttaattaaaaaaggtcaaccttcagtaaacaaaatacaccagtaaactaatgtggaaatagaattgcactaatacactacacccatatactaaataagaaacactctaaacatgtcagtaaacaaaaaatttccactcacatgtttgactataatacaatatatcaccataaaaaatccaaatcaatagtaaaacacaataataaaacgagtctattataactactccaaaaaattttgaagtgcacctaatacaacttcaagagttaaaaacattgtcaagatgtaaactatcattcattaattatcacatcctctttgaatttcatgccacttatttcagctaaaaattcatacaattaaataacatgaatgctacatttgacaaataaaagagaaacaacattaccgaataaaatttctagatatagatttgcaaattaagttgatctcattaagacgtttgcaacactattctattcatgaatgtggaagcagttaaaaaattctgtcgtccccagcataaaacaactcgatcatacaagtttgaaagcagaatacagaaaaaatgcagaaaaaaaaaatgaaaactcaactcaatgaattcattggttgtaggcttgtatttatattaacaaatgtactgtacaaataaaatgatttagatcttttacacaataacagaacaatcattacaataaagaattttctaacaataattggttagaattgggaccacacaaatattgttatgacagccagtggcggacctaggatttaaatgaggagggcgtaattttttttagtaaataagaggggcaaaaaagtaaatttaaaaagaaaaaatgcatttaatgggattagaaaccttgtcatctaatctatatgctaagtagcttaaccactacaccaaagttaatattatgtgtataaatatcatcttttattataaatatatgttgtaactaattaaattgcatatatatttatttttcgattttttttttcaggggggcgactgccccacctcggttatatgtgggtctgcctctaatgacagcacacgacttctagaaacagtgaggtaattttcatttcttcccaacccatttcaaacttgagggtatttcaacaactccaagtttatccaccatgaaatgaaatttgtgttgtgtcaaaatctttgttaaacagctagttgttcgataacttgaggaaacatatctaatttcgagtgtcttcaggggcggagccaacatgaaaagttagggaggtcaaactatattataaattgaagtgtcaaaaatctcaatatttttattaaattcataattaaattaaaatacagaacgtctttcttcactatatttatagctgaaaaagattgttctgtggtagctgtagaaactggaagtgtaagaataagagttatcactttatacacaattggaaaaatctctgcttttctaatttttaccaacaactgacataaataaaaaatggttgctaaaacattaaaatcaggaagttctcgtacatgaacaaaatgttcaaattgcgtccttag

SEQ ID NO: 219067 - DNA, 3332 bp, Cannabis indica
attttatttttacctttttttttctgataataataattaatctatcatcgtcaccattttcagagtgagtcacaggcagagacagagagacaaacacctctctcttgttttggttttggacagttcctttgggtttcgtgttcttcattcttttcctcttattgctctgttcttcacttctgaaatctctctctgctcatgtgtaccaaacttgtatcctttccttttctttattattattattattatttcttttttttattatctttacaaccctttttctcaagtattgtgttccttttctaactctgtttttttatcaaagaaaaggtctcaaactttgtaataaaatactggttttgctttagggttttccttttccttcttgatgctgatgggttttcttgaaaagtaacatttcttcttcaggaatttgaaaattttcccggaaagcttttctctttgtgagtataaataagtgttcttcagtatctactatcgtttggttgattttcttttagggttttgattgctacttaccctgaccttaatttctgttgtgtaacacatgggtttcgcttccaaatttagctccagtgttgaatttcaggaatacccatctcaccttttttagccaattatgctttgtgtctcctaggcatttgctcaaacactttggctgcacttaaattgctcctgttaaagaaacgttcatcactttcttcgtcttactccttgaacctgaacatgggttgtatccatggcaagtgttgcagtcgctacccttcatcttctaacgacgatcctagagacttcacggaagctgatccttacagtgttcagagaaaacatatgcttgcagagagatcattggagactgttcttgttccttctcgtaacttccatttagagtactctgctctcactcaacgaggctattacccagactcactcgataaagaaaatcaagactgttactccattaaaacgcagcttcaaggtgacccaaatgtccatttccttggtgtatttgatgggcacggtcaatttggtgctcagtgctccaatttcgttaaggacaaggtagtcgaattactatcagacgacccagcattgcttgatgatcctgaaaaagctttcaatttggcttttgaaacgaccaactacgagttacacaacaacagcgatatagacgattcaatgagtggtaccacggcgatcaccgtgctcgtcgtaggtgacacccttttcgtcgccaatgtgggtgattcgagagctgttattgctgttaaagacgggaatcaaattgttgccgaggacctgtctcgtgaccagactccatttaggagagacgagtatgaaagagtgaagctctgtggagcgagggttctgagtgttgaccaagtggaagggcttaaggatcctgatattcagagttggggcaatgaagagagcgaaggtggtgatcctcctaggctttgggttcagaatggaatgtatcccgggactgcatttacaaggagtgtgggagatagtacggcagagagaattggtgttgtagctgatccagaggtgtcaaaggttcagctaacaccaaatcatctcttctttattgttgcaagtgatggagtattcgagttcctttcaagtcaagctgttgtaaacatggtacatgccgaattccctactttgttttaatccattataatctgtgatcacccaattggttttctgttcaattaaagatcacccttcttagacacccacatagcattgctatagtttcctctggtccccaaatattgcagggtcaggcagagagcttgtttcaaaaccaagatctaaagaatagatgtaactgcactaggaagcttcttatcagtcgtactttaatttataatttccatttgaatgtggggttatactgcatatcatatataggttttgatttatgtatgggtaaggtcttgagatgaaatgtactcgttgagtcattttatgttgggagtttagctatattagtctgcagggataatttgactcaatgatatccatagctgaagtttcttgcttgagctttgaactctgttgtgtgcctttctgttctgtgggtatagtcgcatttactcttgttcaactatcgatatctacttgtttctctcttttaagttttagttttactcacgcattctttgtttaggcggcgagatatacggatcctcgggatgcttgtgctgccattgctggagagtcttacaagctatggttggagcatgaaagccggacagatgacatcacaatcatcattgttcacatcaaaggcttgaatgtatgacctttgtaaatttcatttggtcgcatattttaacgccttctgtttttatttgcccagggttgagttcactttgatttgtttgtatatttcattataatgctttctggtacatgttgcctacaaattcagggcttcactgtggggtctaatgctatgaattgggtcttgtttaaataatttctttttgagaggcattttttgacctcatatatatgtatgtagtttcatttaaatctgatttagttgccttcttcccccaagatggaaagtggcacagtctacagatgaattgaacagtgattttctttatctaaatttatatatctacatatttagcacgaacagaactaaaaattgtgtagtgatcactctaattatccattagttacttgtctaccccttgagtgaattaacaaatttattattttaaaaaaacaaataaccagttgtgagagcattgttattctgtctctttccatttgctggattgaatagctaattcttgttctgtttgctttagtcagcaactggttctgcagatggatcaagtggggtcaatggtagatctgcattaagaaaagggaaaggaactttggagatatctgctaccacaggatcagaagtctaccattcggtaagaaatgatttctcagatctacattcctgtcagtatcatgtttcaacgaatcgaagtccagccattgtgttccatcaccaacatgtcgaaggcccctggaagtggtgggtctcttgaactttgtttaggcttttctgtttctatatgttttctatgacatgatggtgggcctcttaaaaaactgtattatacaatgtatctgactgagcttttgtctttatcaccatatttacaacagtgactcgctttagaggtgtgttcatgaagctgcttcacatctccttggaaaaattattaagaggtaccctccctgctccattaagtttcctaaatatctaatgctgctaccatgaactgaag

SEQ ID NO: 219068 - DNA, 5109 bp, Cannabis indica
gggcataaaacccaacagactattcaagcagagaacaagttttgttttccgagctatgtgcctagacttgactacttcggaatggtatcgtggagtccaatcacgaagggaatccttacaatcatgtgattaaattagagggatacagtatcgtggagtctaatttcatgtattttatttatgtaatgaatgttccttccaattatagatattgtaatcaaaagggaaattttccctcatgcattaagcctctataaatagtgatctaacttcattgctttagagagagatctaagagaaatactcagagatttcattgtaagagcgttgagagggaaaatactgtgttctttgttctcaagttaatacaatctaaggggagtaggctattaccgtactaaaggggtcgaacctcttcaaaacctggtgttctttattacttattggtttttgctctattttcattacatttctaatctcttactaattgattcattgtcgttgactaaaaatgaggtcaacagaaatccataattcatagctaaatataagagaaatgttattaaaagacactaatagcgtttaacatcagataaagtattatataactattagtataattaagtatcgaatttttataatttaaattaataattattataacatatcggtaactatttataatgcgccacttatacccaataacaatgctcgtttaatatttagatactcaattttttatttagtttaaaccctcaatctcacattacaaagggttttaaaactaaataaatatatgattttactagtcactatatcatcatttcataacttatacaaaaataggtcacataaaatgccattatagaaaaggcattatttaaccaaaagaagatttttaataaacaataaataacaccataatagagagggcaacaaagtagaattgtaaaatgtatgacatggagaaagatctcaatccccttattataataccactattaattgttgaaaaagttaatcatgaaatatatttatagttcgaacaccttcataattcataatgataaatgagttaatcacttaaacaatttgaaagcaaaagtgaccagattttgcttattctatgacaagtagtactagtggccaaagaaaaattaattgatgtgttatacttatgagaataaatatcattatcttcttggaattatactttgtaaataccatggtaatcttctctcctttttagggaccaaaatactaatgatcttctctcttttggaattatattttgtaaacaagtcattgacaggagatttgaatgaaatagctactactttgtagttgtaacttaattaaaaaaaatcatttccaacgccaaaatagaaacacttatcatcatatattggaaaataaaattaaaatttaaaacactaggaaaaactattccttaattttggtgaaaattgcattgagacctcccactcatataactacctatttattacgttttgtaatcgaagtaaaactattcaatgattattaaaattgcaattatttcctgttagttttgttagttttgttagagtagcttcaatagtagtgatttatgggttgctcaactaacaagtgggttcaattttaacttttcaacataagtttctcatagaaattgtccaaaaggagttacggagttgagttacttttttaattattttttatttgtttcaattatgattggatatttctaattaaatataatattttaaatttttacagtaattttaaaggtggccaccattagagatgtccttaggtaataactaaagctaagatgacccaattaagtagtaacatgtgtcatgttctagtcaccacttacaattttaataagtttaagtagttttgctgctaaaaatatcattaagtcctttgtctaagttaaaaacataaaatttttgttaagtatagttatgctccaaataatattcttaatatattattattattattattattattattattattattattagagtggtgctaatgtaaatatttattaattcgagggtctcaatgtaactttaacataaaccaacagacgttgttatataattagtagctagtactacaaaaaaaaaattacaataatttattctctttgaatctcaacttgattctctactactattaagcaaaattacaataactatcagcattatatagcctcaagcaacctttgcttattaatccttgccaaaaactcttcaactcttttatttagttcctcggttagtaattcttcacattcttcttcaccatttttttccttcttatcatcattatttggagcttcctctacttcttttattacttcttctatttcaaacttttgatcatgtttttcttccttatgctcaactaattcaagtgttacttttttgttaaaaactattttgttaccttctctgttctcatccatctgcatctcggtttctcttacttcttttttctcctcatgaaaacgacagctaattattcgttgtctttttcgtccacaagaattttgactcctctcaacatactctgagtagatatcaatggcaggatatgatattttgagtattgactcactaacaagaaagacaattatgataataaaaaatataaacaagcacttcgggttgagaaaagatgaccaaatgtttgggaaggagattaaagcaaagtaattattgattgaaaaattagttagtgatagaaaactataagaataagagcacataaaactacatataagtattgcaaccatagaagagtggatgagattgtataaaaattgactgtgtttgtaacacttcaatatggattgaagattttcagattttattagctccatgctccacttagggttagggtttgggaatgattttaaagaataatttggagctaaagatgaaaagacccctaatgatcacttagaggattcaatgagcattaagaagtgaaaaccaatgacttatatagtgaaggaaaagttaagatgtattggaaggcacacaataatttttaaaattattgtaataaaggttactttattatgaaaaagtcattatgttaggtctcttttaatttccacttacttctttgttggttttgatttctcacattcgagaaaatactttctaatatataaattgcattaacaataataatataagtgtttcaaagcaagttttgtttcccgaaacaatagttgttcaaagaaaatgtaagtctataattaagagagattagattagttgttcaaagttttgtttatggttattttatatacactataaaatagttatctttagtgatgattttttagtcacaatataaattttattgtaatcaaatgtgatttttagttacaacaaaaaattacttatgattaaaacatagtatttagatacaagttgtcactaatttaattttagtcataacaagtattgtaactgaaaacacatttagaataaattgtgatttttttgactaatacttttagtcacaaaccttttaatcacggtataagaatgatgatttataattagtcacaatttttttatttttataataataattaattgtcttttttctaaatgatccaaaaaaaaaattataaacataatgacatcaagcaaaacctttttttaatattatttttaatgttgttttcatatttataaattttgatttgctcttttgaaacttttatcaactttaaaaaaaaaaaaggtgaatctagaaattatttacacatgcacgagggttcgtgtgagaaatatctttgtcatatcaaaatcttacttttgagatacgaaactctatttcattttagagtatgcttttctctttaaatcaagcataaagaacacatgttatatatattaagcaaaataatttaatatttggaatattcattatgtattttatatacttcaccacaaagatttatacatttgtagtttttgaaccgttaattagaaggctatttatatgaatatggaaaaagaaaagctaatttatacaaatatgataaagaaatttaataagataaaatataacatttaaaataaaaatttaatatgtatgggatatgctatttgtattattataaaaaatattaaaattattttttccatatttttttttaaataaattagaaacaaatgaaagaacgatgatcatcagagtttccatcggcgcttagaaagtcaccggagttctcaggcattgaaaaagttgaaaataaatgtcagtatcgaaaaagtcgttggagcatgttggtactggaagtcaccagaattgacattgtcgccagaaaaattatcaaaaaagtcttcagagttatcctagtcactggagtttgacgccggagtcgtcaccagagttagacgttagaatctgaccacagaaactagttacatttatcagctagtataaaaatttgacatagtaaaactagtttcttaaaataaaaaaaaaataaaaaaacttaaacctcaattacattaaacacaacaaactaacaattaaacacgaaaacccgttatttaatacaacaaactaagaaattgaacaagcataagacacttacaaaagaaactaatttcaaaaattacaaataaacatataaaattatgagaagataaattaaaaaaataataacatatttcaaagatgaatccttagaacttggaccagatttattttttttcttcttcttgataaccttcttacgaattttaattttaactggatgaagtttcttctcagagtcagcacttaaaatctttaacaacatctttcattgtatttttattagaggaatcagattccatctgcacaaaaaaaaaatcaaaatcagtttatcatacaacaacaatgaacattatgaaatcaaacaaaaaaccaattttgtcatacaacaacaatgaaaattatgaaaacaaaacataaataatatataatgaagataacttaaacaagtttcattaatcaactaaatggaaaaaaaaaagcatacacaaaaaatacgcacaaatataatcaaaacaatac

SEQ ID NO: 219069 - DNA, 10967 bp, Cannabis indica
acgagagagagagagagagagagagagagagaaagtagagagagaaacgtgaaaggttgaccagttgaacaggaaacgaagaagaaagtgaggaagaagcagtgtgggaattttcatgtcaaagccgaactacgacaccattgcttaaattctcaccaccaagcctcatcagacatcttaactccgtcaaatacacgtttctctctccctctctctcttatgtcagtcatgtacagatacggagaaacgacagtaaactcaatctctaattctcttcactatatctgaattattcaaaccgagttatatacatatacctatacatacacacatctactttggctcctcgtataaatattatagatttattatttcaaagacccatattttctcttcttttattcttttatattgttttttactgacaatcacaaacccaagctcccatatccagccgccgttcaacaactgctcaatctcttcggtttctctcttctagctcaaagggactcttcctttttgaattttctcagcttctgaggtgattttctcatctgggtctccttcttttcttattttttaggagactggttctgggttttgataacgtatgtttggggttattttgtgtatttttttttatttttttaagcatattggtataatcgaatttcaattaatgatacggtcatatgctgtggatgtttaaaccaaaattctcttttttattgtgttatctaaaattagattggtacttggtggagatgttgttatctgggttttgtttagtgatgtggtcacatgctgtggcctttctaattgatccctgctaaaagaactatctttcatattctcaaagaagaagatggattacttaatttgtagtttccttgttattacaatcttgtatttctcttgtatgtgcccatttggttcttgtattgtgtagtgtttcttctttaactgttctgtgatagggtcaagttgaattaaaacttgcatacttttcatcttacttctaatcaagaagtgacattgaaaattcgagttcacattgatgcttcaacacatacagccttattatgtttgcactatttttctttttctccatatgaatgctacttttgaatctgtttctttgttctctaggaataatttggagaactgatgagattatgtttgagcctaattagtttatttaatcttaccatcgtttagtttttagtttagattggtatgtaaattttgtatttcacatcagactttggtagcaataatatttgcttcacttacttatttttgggccctccccccaacccttaaatggtgttgcactgctgctttttccttctatttctctgcttattttgttttcctctaattctcttctcttgtcttggataaattatatggttagaaatatattattattctaaaagtgggatcgtttcatggtggtcttgtttcaaattatggagagttttctagataaatgcacaaattcaaatgtgtcttgtatcattttctgtgaactaagatgtacatttacaatggttttgtttctagcaggtattcactgtgaccattgagttaggaatagcgtggactgtcattcagcaattatgacttgcatgtctttcttattcagtaggaaggggaacaatgcaagaaaccatggttttgatgttgaagatggtaagctgtattttttaatgaatacaaactatagcaactaatttttttctgttgttactttatttatcttaacaaggtctaatgcatggaaaaaacgaaggtgctgtgcatagaatatcacaagactcgtcaacactaaagtattctaacagtttctttatacccatcaacagatgtttctggaattcatgatgtgaaactttacacctatagagaattaaaaactgcaactgaggattttagtcaacataataaaatcggagagggtggttttggttctgtgcataaggtaaagtgactactgatttactatttcacatggtgctctgaatgaatctcccatctttttaaatgaggcgttcttggtatattaccattgatattcagggacggcttaaagatgggaagcttgctgctataaaagttctttcagctgaatcaaggcaaggagtaaaagaatttttgacagagattgaggttatctcaaagatagagcatgaaaatttagttaagctttatggctgctgtgttgaagggaatcacagaattttggtgtacaactacctcgagaataatagtctggcccaaactctccttggtaattttataagtttattctcttgcgcaatatattattgtgttcattacatgcatatatatatatatatatttatatataactcttatgagagttcataacttgtctgtattaccagttggatattgtttttcattttaggaatgtactttgtattattttctcggtcaagagatgtgcatttcccataatgtatataaccaaatggaaactgaatgctccaaggccatttcatttcaggtggagggcacgcttatagtagtattcagtttagttggcaaacacggtataaaatttgcgtaggggttgcacgtggccttgcattccttcacgaggaagtgcaaccttatattgttcacagagacatcaaagccagcaatattctgttggaccgagatctgacaccaaaaatttctgattttggtctagcaaagcttatcccatcaaatatgactcatgttagcacacgtgtggcaggaacgatgtaagtttagatatagatgtttttcttttcaactttctgttattgatttttcaccttttctttcgtttcagataacataactaaaacaaaattgattcttgaaagagattgtcatgaacattaacaacacaaagtaaattagtctttctgttgtcacaaaactaaggtctttatgtagtacaatgcttaaaatcaactatacattctttttgctatcatattactgacgagagttcatgacttgtctgtattattagcatctctgttatccaagaaactgtcccctcattttgtaatgttcactaccttgtatttacatttgcttttttgtattatagaggctatttggcaccagaatatgcgataagagggcaactaacaagaaaagcagatatttatagttttggggtgctcctggtggagatagtaagtggaagatgtaacacaaatactcgactaccagctggagaacaatatctgcttgaaagggtgagtgttttgtgtgtttgaatcagacttttatgttgtatttgaatccgtgcttagcggtagacttgctttctccttacttgagattttgttttcaacttcatctgctaaacttgtttcaaaatgtgaagaactgtaattcttcaatttcaaaatgttgatatatagagtcagtacaatatagattttgaatagaaaatagttgttggttttgaaacgacaagttctttttaagcagaattttctgtgaaacttattagaagaccatgtaatgttctttaaggtgatgttgacgctcaagcatagactgtggactgtgtggttcgatttgtggctggctccacagtctgacatttgattcctagagccacctgtcgggcagatacttgtaaatttattgattccaaaagatttcaaggtgtgatgaacactttgatttcaaactcgggtttgcttagctctaggaatatgtatcatttaaaagtgactttgtttttcgtagccatctcttactgtcaacatatcacaagcaatatatgaactctaacaaccattttctcggataactatttataatgttgcatacttcctcactcatgttctgtaatatctgggattcttcgttgttttattgaaagacttaattgtgcctgtttagaaaacttgtatagctagaagattttatttattttttttatttattttaatgaaatatttgacaaaaaaaatattctttatcgacagagagcacttttgtttatttatttatttttgtagacatggcacttctacgaacgcaaagagttgattgggctggtagattcatcaatgaacggggattttgatgccgaggaggcttgtagatttcttaaaataggtcttctttgtacgcaagatgcaccaaagctgaggccaacaatgtcaaccgtggttaagatgctgaccggagagatagaagtttatgacagtaggatcacaaagcctggtttgataacagatttcatggacctcaaagtgagaggccctcagaaaacttccaagctccactccagtgacagtgataatacaacgtcgtcatcgtataatctaccctctacctcagagaaactagacggttcaactatgttttcggactcagctgctgctaccatgtcaaccttcacctcaccttatgatcagagcattgttacaaaagagttttctgtatgattcattgcattgcattgcattgcatttttgttcgtgggtattcgtcctcgtgtgtatattgaacgactgttttttttttttcaatcatttgttagaatttgccaaaaggtattcctgtaaatggactagtcttgataagtcttagaacgtagccaaaatttgcggtcaaaaatttgaaaataagatatgtttgtagatgtaaatgacccaagtctttggtaagtttgagaaactagaaagctttttttgcgacacgtgcttggagatacgtattgtaatttaagagttgtaacatagttgtgttgttaatgattttcttttttcttttttttttaaaaaaaaaaaataatataaaaacaaaaagcagaagataaatggccatgtagagattgtcattgccatgagtaccaactaaaggccattgctgaaaacctctcttacaaatggagttccggtacgccattattttaaattagtacctatactaaaggtaaataaaacaaaataaaactagcaaaaatgcacttgtacatgtgtaaggctaataatttcacaaaccaagctcacaacatccataggggtttcaaaaaaaggagaaatacttttgaagttaatcgagatcttttcggttccagtttcagtgttcttttagggcaaggcaaatatggagaaggtgtgttacaattccaaccctcagacaagcagctttaggcatttatagagccatttgtttattctgcatcagcaatcacatcataattttcatactcatagtcttcatcgagaccctccatagtttttccaaaaacaaattgttttgtccccattgttgtgaaaggcattagaccaaaggctctggctgttttgatctccctagcaaccttcctctgggccttggcactgatgccagtctgcaaaaaaaaaatgatgaaggagcaaagaatgaggaatatttacatcatacacaagaagttcatcaaatttaattgattgaagaataattctatttcacctggctccttttgatgataattccagcatccgttaagaaatttgcaagaaatcgtatattctgtccaagcaaatacattcacggtcaaaacaacccaatataatatgatttctctaaattagtgccaacaacaactataatacataaaagtagccagaagttagcactatcaatttaagtccaacgggaataatcactcagcaacatttgaaaagaaccatattgattagaaaggctaaaacaacatttagaccatgcctaccaatacacgatgataacatctattgagttaagataaccatagagaaattagtgccaacaacatttagctcatgtgaatgtgaatgtgaatgttgttgcccttttctaaccttgggaaattaggatgttaattgatttttcaaatgcccagtaccatcttcttaactcaaaatctcaaggaatagtaagaaaaatgaatcacttacaatactaaatctaatatataaagaaaattctgcattgtttacttctctatcatgaacaatgatttactggaaatccaacagagcaggaatcaaatgcattctttgatactcttataatctttagaaaaaatagcaatcaagtacacagacttctgatgatgcaccactccgcccaacacaaattatcatcaatggtaaagaaaatatgatctctggcattgtcttgggcaggatgagctacctcttattctaaaaatggtttgaattttctatccacgtaacttttaaatattgaagcaaggaaaggcagcaccagaacgaatttgagaacagaagaagaaaggaatttacaaaaaagaagcatttagatctctcacctttaaattagaccataacctcactaatagaaaggcattcactgaaggcttttctcatgacatgtagtatttgtgtaggtttcacaataacaaagagtgacaagtaaaactaaatcaagatatacttaccctaaaatcagcttttttcagaacttctgccgtcgttactttaaactcagccctcgggggaggtttacgaactcctggcttagttaaatcaagatcctgcattaaacgcaatactgtttagagaagacatcagactcaggataattgagatcctaagtgtatgtattgtgtaatacaaaataattgacaggaaaagatgtcaatttcaatatttagtgatttaaaacaatgtattgactagtttcctacattatgtttaccttaacgtcataagtcatcccccttctgaaattcacgtctggcctgaaagaatactcgtcttgcaatatttcttcaggatcaaactcaaaatatgtggctgcgttctgtagcttcccatccattccatcctgtatagtgttgaaatgttcgtctaatccatccaatacaccgtaattactctcagcattcttatttgagacaaagctatcgcgacccttcccaatgctatcgagcttttcgaataaagaatttgttgttgaacttttcccataatttccacctaaaatcctctgctggaaatcggaagaagattccattgagttactactttcattatcacccattctcccacctgtgaaagtcacaacaagactaggcagttgtgaggtttgttcataattttcaccaagatcaaattataattgataattaccctttgatctatgtacagatcttagtgagactataaactctagcatatttcaagttaggtccgcaagcggcaaccaaacattaaacctctttagaactatagtgcaaaggaaccacccagcggcaaaccattgaagttatagcaaattcaagttaaatgctataaatacacatcacacagtacattacataataacgaaaacataccgaagattgaatttgaagagagagttctcacgaaaaatcgaggcggcgagacatcattcaaggtccgaacagctaatcgaactatgtttctcattttctgttcaaaccaaaattgttaaatatacattatcttagacttcttaagtaagtataacaagaaaaagaaatgaatcaccgcaccggaaaactagttcggagcgtcaacgagtggcgagtcgaacgttttgactgcgtacgagtcccttggccggcgtagggaggtgcggctggattccaggactggttatggagaatgagaataaacgcggagaggagagagcccttcgcccttaaattttatattttatttttaagcccctggaaataacccaaatctcattttggttgtttcattttcaaaatatctcatttcagtgagtcttttggcaaaataagaaaacttttattagtaaaatgaatttttaaatatttttattagtcacatgatcttatatggttagatcataaattatactgtggcctgtgggattataaatttatattgtgagattattattgtcgtagagtaaaattaaataaaattattttataaattttagtatttcacattattagtttagtcttcaaatttaatatattggtctcattattcaatttaatttgtttggctgagcacatactaaaatcaaccatttgagctaacaagtgaccatatagggtattaagtggtgtgtgtatcagagtcttaaaattgaatcaccagctcaaaaaatgtaatataaaaaatgcttctaaaaaaatcagatatatatatacacgatcaacaaaaataaaaagctaggaattttacaagaaatgttttttcaaagttttattggttaagttttggaacagagtttcagagtaacaagatttttaggataataaaaatacttaatttcttttttaggaaaaagttcttaacctccaaacacccaaattaatagaagctctacaatggtggtggcaaaaatttattcaagaacaacacccacttttaataagttttgaatacaaataggattccctagctactaaatcatgcttttaacattagataaaacaagtttggccaaagatgagcaattcaattacaagatctattatagtgcataaaattaatcacatggagcctattgtcaatgtcaccattatcatctaaaacaagagtcaaagaggtgataatagaagtattgttttttagtttaagcacaaaattaaagcaattagattcaactatgatattttcatacttaatagagatgcattggactaacgccttgcaaataaccaaagcttcaacaacatcaagaggaaagcaaccatccacataccagctcgcaaacgctacagttgttcccaggtgattacaaatcaccatacctaagccactatatttgcctaaagaactgatagcgacatattgactttgagataaccaaactgggaggttccatttcagaaccatctgaagaaggcatggtcgaggttccatcccgccagtagggacgttagtcgtctccctacaaggtgacgccttcatcaatccttgttttttttttttcaatttttatactagtatagtgaatagttttggtaaaatttttaatattttcatttcattagttattaatttttaaaatttaaattttagcagcaaaattccctaaaactcgtattctgttaatagtttaccttttctattcatttttagatattaagcgacatattggattgtcgatgtgataaaaatgtacacattaaataaattaattgccaatacaaataaaataaaatttgaaataatatatataaaatttgtagaaagctaatattttcattaataaatagaataattaaattaaaaataaaaataataaccctaattataataaaaaaaatatattgaactcatacaatcttttctttttcatatattgaacgcagaaatcagaatgttcttgaaaaacaaaataaaagtaaaatataaaataactaatttaagattaaaaaatttaaaattcgcatttgtactgattgaatgatgattgacatgtaaaagtaactaatgtaattcaatccacacatatttatgtttatctattacaacttctgagtcaatctccatgtttaaaatcacatcacatatcgaaataattttttttaaatattttttcatagtttatagcaccaaaaacgaagtccctagttttctagtctaccatgcatgtttaaaaaactgcaaacttatttttaataatgtaaattatttaaaatttttacaaaaataatattgtaactataacgaataccactgtaaaatgaaaaagagatactctaacatgtattttcaagcataaaaattgactaaaaaattgtagtaagaggttgaccataacactagtatttatttttttacgctaattaagatttttttctactaaactttgacacgtaacaaatcatgcttactgaatttttttgatcgttcaaaattctcgtaaattattaagattgttagatttaagaatttttgtctaaattatttcaattttactaatttagtaattatttatgtactaaattatgcttctcaaactttaacatatactaaaagtatgctcatcgaactataaaaaataatgtaaattatttaaaatttttgaaaattttacaaaaataatattgtaactataacgaataccacaatgaaataaaaaagagatactctaacatgtattttcaaacacaaaaattgactaaaaaattatagtaagagactgaccataacactatatttttttttttttaagctaattaagattttattctactaaactttgacacgtaacaaattatgcctactgaattttttttatccttaaaaattccagtgaactattaagattgataaatttaaagatttttgtctaaatttatttaattttattaatttaataattatttatatactaaattatgcttctttctcatactttaatatatactaaatcatgatcattcaactttaacttcaagtgtaaaatggctggcatatccaaaatattgaataatatataaagaagtatataatggaatgcggaggtggggaaagggcaatatagtcgcgcctgctctactcccgccactgctcagctctcccctttttctattttaagcttagaaaggagtagtaatggagtcagtacttcctcctccaaactttctacctcatcttagaattgtttcttcaacttcatcttcactcagattcttcccttattcttcttcttcttctccacgcccgaccttcacttctgccgttaaaccaatcaggagagttcgttgcgagttcgatgctaaagttaatggcgctctctccggcgagttcgacccccgtttcgtcgaccgcgtaagatttcttcttgttcagtttagctttatgttaactcttgtgttgtgttgtttctttccttttccacctgtctgttttgtatctttactgaataatgattgtgtgtgaatttatctttgttatatggagctctttgtttattttttttttttt

SEQ ID NO: 219070 - DNA, 1653 bp, Cannabis indica
aatactttgtatatatatgtttattttgttttctatttattaaacatactactttaataaacaaaataataatattcacatatgtttattatatcactctacgtgtcatgtttatttttagtaattttaagtattgatttatatttatatacattaatgtttataattttgatattgtattttattaaaaaaaatcttattaaattataataattcatactaaaatagataataaacatttatcttttaataaaaaaatatttaacttgtttatttttataaaaccgtttaattaattttacgaaattgtttattttgaggtttaataaacatattaaaaatgtatggtttcatgtaataagttttcaaaatgtataaatttttaaaataatttttttttgcacattttttgtaattattttatttttgttgtacatttatgaaaaaagcccaaaaattaatcggacacttttattttctattgataatacgaacaaagtggaaacaatcaaagaaaattgtgatagaattgtaccccaatcgaggacacaacaacttatgtaaaactcaaattaataataataatctcatgcattttataattggttaataattaatatcattttcccaaatttagtatttattatatataaaatgatcaaataataatttcattttccaaatgaaataaaataatttcatctataaattattgggttttaaaatactatcagcttgcatatttctatcaaaaaattcagacttcttctctaataaaatatatacttatatctataccctacttattatatttttctgctaaaataaacgaatcaatcatacatatatatagatatatttatatatatatgtgtgtgaacagataagataaagtatatattttaatatatctgtagttgaaataataaattaatggaatgaatacactcgtggagataataaattaaaaaaaatttgtattaattaatatgagagataatttgaaatgattaattttgtattatatatgttctagtccttggtactgtatctctgtggctgctgagaattagtaaaatataaattaattttgttctctcacaaatattatatatataaatatgggttggatatactatagtccaaaaaataaattagaaaaataaaaaatgaaaattttaaaaaatcacaagttggaagttgtaacgaactgtataatgtgtatgtgtaatatgagactttaattaggagagagagagaaaaagtagatcctggttggtttattctataacaaccaataaaaaaaaaagtacttactcaaatttcaattgaaatttgtttttatttttgaaattcattaagaagacataacaatcggccaaaatcaaacgatccaccgagctagggaagaaaggataaaactcatttgagaaaaactcaacctgcacaaaataagtgatgtaatttgggaagttaaaaataaacacacgtgtattatatataaggttaattagtaattttttctccgaactttgacctgtattaaattgtaccctctgaatttttttgccgttaaaaatttgtcctaaattattgagattgttaaatttaatgacttttgtctaattttagtaaaaaaattctaacatggat

SEQ ID NO: 219071 - DNA, 4216 bp, Cannabis indica
aaaaaaaaaaaaaacaataagaacctgattcagcatcttcatattctgatgcctgagcactgtttaaacttgttgtatctgtagtttgtgaaatcatttggtagctatttggatggatgctagatgaagcagggctatcaatcgcagaactgggtgccgtatcagcttcttcagtcccttttattcggttataatgtgtcctattgccctgtaaagttgaaaaggcaattatacaactgtttaaagatttcaaggtaaaataaaattccacttaaagtaggcactatcaatatcaattatttacataaaaccagatatctatctagtacagaaaaataaaaagtacaaccatcccaaagagaaatggagagatagtgacaacactaattttattaaacttcaagcaatgcactgattactcatcttcgtttcagcaccttaaaaatttcaatcaaatttccattgctagctagcaacacattcatctctgagtctcaaagaatgtattactccaatgaaagtgtacaattatcattacacctaaaccaatatattccagaaaagacatcagggatatgaactcaagccaatattcacaacttccaattgttcttcttcagaaaagttggaaggcaatcattcttttccttctggtatttttaagctgaaaaatgcatatgttgttcacttaatttttcaaatagcttttgtatctttgtattaaggcctcttcgtcttcttccatttgtttccacaaatgcaatatatgtagcttttatgaaaacaatcaaattcacgggcatatgaaaacacaatcagaacattcatcattgaccatataaaagctgtaatgaaagggatatacagttttgtaatgcagcatgtaattgtgtttctcatctcatgtactgacataatataggaaatgagaaaacaacaaataagggaaaaagataactacttatatttcacattttcacttttaagctatatctgattttgagctagaaatcataaggatagttgacaaaccagaaaacaaataataatcaataacagaatgaatcagtaccttcacttgccgatagtgaacaagaactatgtgtgaaagatccctgcaaggcaattgattacgttccacagaaaccttagttaacaggtgtgtggaagagatagaaaaggagagacacttcaaactttaacaagttcacatgactgagaaacactgacagatgagcacatatacaaactcactcttcaagcatccaataactgcgccgttggaaattttcattttcttctccatgagcataatagcagtgcagcacatcaatgcttccagcctgacaaagtttaaatttaataatcaagtggaaattaatttagcaacaactcacaactcgtgtgagaaactgggaaattttgttcatccacgcacaaaaggaaaatagacaaagaaaggcaaaaataaaaaaccaagtggtttagtcaccttgaaatccaagcatcgtgctaaaaggactactgccacagctactaatgacatgttttcatgttcttattacatataaataattagtttacaaaactgcttcacttaattctaggactaagagctatgtggccagcatgtatgcacacacaaaaacatatctacatgaatagaataattattcacttacaaataaaatctaaagaaacatgcatatattacttccaaaaacaaaagctaaacattgttgatgtttaccttgagcctttcgtgagcctccttcactgtctttccatcctttttcttcctccaattatgtccatcttttctgaaatacctcagtactttccggtcaaaaagaaaaagtgagccatctgaaattaatagcacgtgtcaaaccaagataccctttgatataggctcaatgagggaaaatattccagattttgacaaatgtaactggattaacagacttactaaaagcataaaaaattacatgcaacaagaggatatattgaaaacatcggcagtttattttcttgaaatttgaatggtttcagtgaaacattactacatcacagtgactaagaaatctgaaagaccgacaatatttatcaggaataaaaaaaatagcaactaatgtaccatggcttaaattgtaaaaaaacttctgttgccacctagcttagaaggtaaaacctggtaattggtatcgaagagctcatttaaaacctgccttacctaaacaaacagttttaaaaagtttttacacatatcttaaaaaataaacatatggaagagaaacaacgataagttaaaagaccaataaaatccataacaagatgataaaagttttatctgaaaaatacataaacatatatatagcagaaacacacatatataaatgcatgcataaaatacaaatagaaatgcaagacattttaagaatcatactaggtggcatatttgcaggctctggggcaatgcggaactttttataattccgaagaatttcgcatatttcagctgggcgcagccatcgatgttgtgcttcaatgagaatttgctcaatatctgcaacatattatacaataacaaaattgatatttctgcaaaatggagcaataaaatggctgaataattactaaggcctagatgttccaaataatacaggcatggatatgcattaccacgacaaatgaacacaacttggcctaagcatggcaatataggcaagagaaagatctatgatccatttatgttgggattttggaaaaatttctctcacgtaaggtatattagaaaagatagtacggcagtccattacaaatatgatatcttttatttgctaccacggttaaaaatctacaatataatctacatttatttgtcataatctatggagctgcaaagaagagagccctttcataatggcttgatagggtgtacttcaaaaggaatagtaaccgaattactttgcacaatgattattgtatagtcggaagtctaatccatttgaacttcagtcacaaaacaaccccataagaatttgcaatagtgcctagactagctccacatatattattcagtttaggagcatcttaattatataacaagacaaaaacaacctttaacaacttcatgtacgacttatagttcacaaaacctcatcattcaacatcagtagcatgatgtttaagtttaatggaattcaaagacgcatacatgcttatatttcttaaaaaaaaattaagctcttaaggattacagggattcactgaccagcataaaccagtaataagatacaaaatccccaaacatcccttgccaaactcaaggccaattcaccaacatagctaggaaaatagagctaagtagttacaaattgaacaacaaaagttcattacctactacacagtctgtacccaaagaagtccagcaacaacaacaacaagcattacatataaaaatgttgcatggcatcaagataatcagttgctacgagctttaaaatattaaataatacccaaaggaaagaaaacccaggttaaagaaacaaaacccagaaaagaaaaggggataactaataagttgttcaaagatgagaaagcaaataataaaaaagaaaaagcatgaaatagataaatagaggtggagaagataaaaacagaccgagttggttaggaagacctaggcgcctggtgtccgccatgaagtcgctattgggtggtaattttagggaaatgataggcaaacataagcgaatcaagaatgaaaaaggatttgatggaagctgaagaggtgaaaagaggagaattgagagttgaggaagagtgatttgaaaaagtgaagattatgatttgcgaggtgaaagaagaagaagaagaagaagaagaagaaagtcggagtgttgttctgtaatgggaaatggcaatcacttcaaacttgagtctcgttgacgtaaatatcggctttactctttctttgtctctacaaagacacactcacgttttatatcggcttttttttttacttttttttgtagtgaaagtaccattttagcactgccttttgactacatatccttctagatgcataaatttttccattttttttttggcatttaacccttttttttttgctgagaattgctttaaatttttagatttccttttttgtatgatagatttataaataatttgcggcataaatatttaagtttaa

SEQ ID NO: 219072 - DNA, 5163 bp, Cannabis indica
agagagagagagaatgaattttgtcatgtgagaatatgtactctataatttccatagccattaattcaagattgagttcatataacagttggaaactaaagtatatcgtgctgactattccactttaatcaaagtacattagacaatatatatcaaatcatacctagaatatattattagatattaagttagttaagttggtatagataatcatacacttgaatcatttcttatttcaagttgttgtgattatgttgttcagtttgtagtaacaaaatctcagctgaatttccttgatctcttgtagtctatataaaatgtattttgctcatttcattctccatttaatgagaatcatcaataataaaccacaattctctcatctctttttttctaaactaatattttttttgtgattgtgttgttgttgtttctaatgatgtattagcttctttatgcttcttggacattttttttaatggagttgaagcaataaacaattttatttagaaaaataataaattaaagcacaatagatttaactccaaaattttctataaaagaaaaaaattctcatgaactaaattaaatgaaattcattaaaattctttctttatcaaaaatccaaacttcaaagatatgctaaaattctatacaaatcaaaaaaaaaaaaaaacctaacaaggcctaatgttatgttgggtgagtcttccaacataccaaacaaacgtatgttatatgattagatgtggttgtgtattaataaataatttatagaatagataatcatacaaatttcttcatttcttcatgtgccacgaactagattcgaactggtgacacgatgattttcagctagaatcaacaatgttgtaagtgctcttcacaagatttttacctttggtatcctacgattcgcctttgtagtaaaccaagtcgcaaccgcagactatggtgtgcagagataaagaacggaaaactcttactcatgggtccctgctggaaacacaagtgcagttagtaatcgttattagcatcgtcagactctgttcgaaatataatatcacaatgatgattttgttattatcatatcatcatattttgatttcatcgtcattctctttgaaaccaccattgtcgctatcactatcattgtcgtcctcatccttatcgtcctcatcttcatcgctatcctcctcctcctcctcctcctcatcatcatcatcatcatcctcatcatgatcgtcctcgtattcatcatagtaataatcactactatcatcatcgtcattgctcaaggaccaatgcacgcgattaggcataacctttttccaaacaacagcagagaattagttcctctgctgttacctcttatatgaggtaccaggaacataattaataataccaattaagttagaaaactttggtaacttgggatagtttctcaagttaccactaagatttgaaagcaaaaatctgtaaatttataactttagatagcttgctcaaggtaaatgaaatgaaacatacctcatcaacctttgtaggcaattcagctctctctaaagcctttggcgtccacatctttatgtcgtgctcaattccactgcttgcaagggtcattgtatgaggatgagattcgatacaatttacgatatactgatctgcttccataacacgaataagctccccaccctttttgctccacatgaatattcttccacagtcagacccgctcaccacataatcacaattaggcccaaagaaattcacacccttcactgtctcacaattcctatgccctttgtaagcctggggcgataccttctcatcaatgtccgcagccgaaggagatgacaatggagacaaaggaattgggttatttcccaaacccatttctcgtgtaaaaagatagatgttctcatcactatacgagacaagtagctcgctttgttcagagaaggccaagcctgtaattccaacattctcattatcaatcaattctggaggacaaaagtagtttgcaggttgaccaaagtcagatgatccatcccacttatagtttcgaatatcataaagtcgagtaaactcatcggaacctccaactgcaaagagatttggatttcttggatcagttgcaattgcattcaaatatattacttgcatgtacttcctactatcaattggccggcatgtgaaaagttcagtggcttctctagttcttagatcaaactgttataatgaagattgtcagatggatgtacacaatatacacacatatataaatatatacataaaaaaacaaataaaaacttctgtgtaaagaaggcacacggaaaatgacttatagtgtgacagaataaaatcacaactcacatgttgcactagtccatcttcaccacaggaataaaatatattaggactcccagaatcgatagctaacttatgagctcgcccctgatgtttggcaagcaaagaagtatccacttgcccactttctgaaatctgaacatgtctcacctaaaattatgcaaatgctcattaaaacattaacttgtttcattcaaatgtagaatctacctttacatacacgtaacatgaattaaagcaatctagcaaattatcaataacatgattaacatcctcaagcttgtaaaagcacatcgtgtaaactatatatggtcggtgaacattttagaatttaaatataaactatcatggtttgtagcaggctaatgaaaatgaaacattacaaaatatcagttgcagagaaactcaagtacctccccatcagcagcacaggtgacaatgcttcgaccacatgcataaggcataaagtttgcttggaaaacattgttggtgtggcctgattgaaaggaatgctttatttccccaatttcccaattccatagaatgacctgcctatcatcagagcctgacactaagatgtcaccagcttcattaaagcttactgtgttcacacatcctccatgcttttcaagcttcttatacacatcaagtctaagaacaagatcctgatacatcactatatgcatcaagataatattgatttcaaaagctaaagaacattaatctaacaaccacacatatgcattactaaaaaattcaataacaacagaatctttcaccattttctataaagaaaccccattaaaagaattcaccaacttaagatgcttactataatttcaatccacaaaagaagaaaggagcccacatttttcattttttcacataactcaacaaaccattctttattacaaattggaagcaaacactggtagatttccaacttaaaagtaattatttcatacccaaggctattgtgtttcaataatacaagaaaatttctattgcacaaaatgtaaattacagatagttcctacaaagcaaaggatcatacaaatgacgtatacaatacttgaattctcgataacgttaacagctttatcaaaaacaaaatcgaacatgatatttgacataatcttgaggcaaaaaaaagaaaacaaatgtgtagagcctaattagtttgaaacaggacaaatttccaacacaacaaatcagcacacatcaatgttcagaaatgaaaatcaatagtgtataaaaatgcaaaatttaaaacagactcttattaccacaatattacaactcaacacaattcaagtcaaagttctcaaattgaagtcgatagtagaaaaaccactacagtaacaaattagacaaagattaggttccaatttaaaaccaacagtaattattttaggctattgtgtattcatattagtgtataacgtaaactatttctaatactaattaagtttctgtacattgatcaacaatggcaattgtttcagtacaaaatatatatagatatagatattaacataaccagaatcgaattccataccgatgatcactaatctaagctgattattaattaatattaaaataaaaaccttggaggcgccaagacggtgggcgaaagaccgggtagagagctcgccgagcctccctctgaccaaacccctaacagggcctggtcgacgcaagaccgagctttctttctcatcgccatagccattggaaggtgcttcatcgctgcgaattggctttggctgacacactaaatttaggttttttttttttttggttgggtttttcacttttcaatcttcttcttttgatgcttaattaatttaattgttatttgatagttttttaaaatgatacctttattatttttttaaaaaaaaatatctaaagttttaaatttataaacacaataagtttaatatttatttttatcggcataaataattaatatttgtaaaattgtaatttttttaattgtaaaatgtgatggatacaaatcacgactagtgctttatatgaaggacatctatagtatctaacatctttgtaaaaatttctaaagaacatcatcttatagtagcgctaaatcccgataacaatgctctttaatttaatgagaaatgctaaagggcactagtggtgcctagcatccttctgtgtcagtatagttattgtttcaactaagtatcgggtcccacataatttaatataatagcttttaaggaatatcgctagtcttctgtacaaaataatttccaaagttctcactaaccgcatgaagtatctcatgagctccatcatctcagaaaaccagagcgcgtttatccctgggcgtttaattactgacaacgtcatgatttcttttgaaattctacactacctcaaaagaaaacaacaagggaaagaaggggttatggctctcaaattggatcttagcaaagcatttgacagaattgaatggccatatctcaatgcaatgcttcttaaaatgggtttcaactctcggtgggtagctcttattcatcactgcctttcttctgtcaagtacaaagtcatttgcggcaataatgaaactgatcatttctatccttctagaggtataaggcaaggagaccccctctctccttatctatttctcatctgtgctgaaggtctttcaactctcattagaaaatttgaaggtagaggatggttacatggctgtcgtgtttcaagaggagctcctgttgtttctcacatgctctttgcagacgatagctacctctattg

SEQ ID NO: 219073 - DNA, 2131 bp, Cannabis indica
gtgatgagtgaagagaagaaaaatttttttggtggttgtggaagctttcgggtggggattttgtttgttgaattgatgagaaaaaggttggagtgggtagatgtaggtggggagggtattatgggaaaaatacaaaaagtgtcatatataattaattatgtatagtattagtttaggggaataatttatgggttatttaagcatggaaattcaaatttcccttacaaaatgggtctttagcttcccttttttcaatccattttataaaaaggaagccaaagggtgtaaaaatatccgcttattgaaaattgacttttagaggcgatttttttataaaaaccgtaagtatagaattacattataccatttagaatcggttgagaattaaaagacattgggttatattgaaaattctcttatgttttctacatgtgttcgatttcagacgaggcccctcttggtaacgatagagaggtgcctcttagtaacgaaagagtgctgcttgtttatagccgcagacgatgcccaccaccagttcaaaccttaaacctaacccaagcccacactcaatcgcaggcccatcaacccaattctcaaacccaagcccaccctcaatcgcaggcccatcatccccattctcaatcgcaggcccatcaacctcattctcaaacccagctttttgcacacccccacatgaccaagcccctagctctcctaattccttggtccaagacttacaaccgcaacaacaacagcggcgtaggaatcgactatcgaatccatacgctggacaagttcaaggaaaaaggggattaaaagtgcctaaatgctatgatgactttaagggaataactgaaatcaacaaaagaaatgagagaactggaagacccataataagtgtcaaggagtatcaactgtccaatgagttagttaagtctgttagcgataattcagttagtgtttacttacatatacttttttaagccttttgtttctattagtactttaaagatgagatagttcttattagtgttttcaattgttagatgagtttttgtacttgatacatgtgtgaactcttaaagaccattcacttcacattttttctcttgcatactctatcaatgactacatattctgatatctttttctcttttcttcttgtattagtaggatttcgtttacttcttcaaatgcttaccaaacagctgatgtttcaagaggcgatttagctgtttatgttggagattgaaggaaaatgaaagagatttttgatacttaaaccatacttcgtttcaaagagtttttttgtcaagccgaagaagaatttggatttggtaatcctatgggaggcctcacacaattcatgtaaagaggatgcttcatcaatctagtttctttcttgaatatctctttttgttgctccaaattttaattgcaaacaatgttgccagcagtgtatattgttcttggtgtcttaaaaggattataacaatagtctaatatagatgaaaaagtacttgaacaaaaccatgtgtgcttggtcattagtagtaacttaattcatcatcatttgagttttaaattacattcgcaccttaaataatttatcctttttttattattaaaatgttattatcttatgtttcaaacaatttattatattttagctctcataaagaaagaaagaaaaaaaaaaacaattccttaagcccatgccttgaggttggacaccaatttaagtctctaatcctagattagtgactcgtgtgataagagtaatcatatctgcacatataattatattcttatataacaactaattctattttttaaaagtgacttgctagtgtgtgtcaaatttttacatcatctatgtattcacatatggcaaggttggttctaaaaataattgggtcttgagtagtgataaaatgattaagttttttttaaaagaaaatgtagtatttttgaaaattattaaaaaaaatatgtatttttaaaagtactttttttagtttttgccgcttagcttaccttagttcaggcgcggctaggctcggctttggaaataagtgggctaggactgtgcctagggccacaaattcttttttcccttttaaaattacac

SEQ ID NO: 219074 - DNA, 5368 bp, Cannabis indica
aaataaaataattattcattaaagaaatatatttattatttagtaaatatgaaattttattgtattttttcttaattaaaatgaactttttttatatattttgtcactatgttatttatttttgttcgctatgtcatttatgtacaccatccacataaaatttgtgtataacgtatatatattattgctaataacataaaaataactcagttaaaaataaaaatctcacagactaaatatatatcgtaatatattttttgtaataatcaaaatattgatggtatttaaattaatttattaatttaaaaataatattcaaattaataatggaaggaaataatgcaatcccacttttttaaaaaaaaaaaattatcaacattattaagggaataacattgtaaggttaaaccctcaaaacaaacaggtaatattttaccatgctattctcttactagtgttaattcattccaagtagctcttagtgttatgctgttttattatttcatattagtatttttattattgttattttgtattttctaatatgttgagtatttcaaattaattattatttttgtgataaatttttatcccaacactagaatgtaagattatttttaaaaataaagactagaatgaaaaagaaaaatcttatactaagtgtaaactcaaaatctaatatatttaatggtgtaaaatttgaaacacaccaatttcatatgctattggagtaaaatggtatgaatgttccacggtgcacattgatgaagtcttggtctttgttctattgtgtgtgtggtggtcctcactcttaggaaaaatctatgaagtaataaaagtgtatggtttgttaattttacacgtgagtcatgaatggactcacctatctctatcaaatgcatcccactttttctctttcctcttagaaaacacatgaaaatagcctcattcataatacaaccatgaaaaagaaaaatgaacccaaagatgatatattatataaatgacaaccatattcaatatttgagaatacgccaacatgaaaacaaaataataatctacttgattgaacatattaagagacagaggaaaatacaaggaatgtactcttatggaatgcacaataataaaccattgaaaaaagaacacagataatttgaaaactctgatcactaagaaatcttcaaactttttaaagctaaaatcactcaagcttaattaagggaaaatcttattttttaatgttgttcttcttttctttgtttactgaggattaggcgggcggctgttggctgcagagacccgggagccccattcgagtagttctttgctagtatcatccttgtgaagaatcacctcaatgaagcacaatgagtccttttggggaccatttgctgtctcaattgcttgaattagttcctcttcacagaatacctgaaatgagatatggtattagttaatagattgttctcaaatcagcagcattgcattgcttctttcaagagattttcaagcaatgtttaccttggcagtccagcatttgccttctccgttatggatggcatcgaccaaggcagtgtagttccagttcttgatcacattgtaaggcccgtcgtggatctcaacttcgattgtgtatcctccgttgtttatcaggaaaatgattgtcctctgcccacatcggatcatggttgaaatatcttgagcagtcacctgtaaggcatacaacaacaacataaatatttggagaacagaacagaggttaaaagatttcacatggctaagtagttgagtaactagatttatacctggaaacttccatcaccaatgcaagcaatcactctcttttcaggtacagcctgagcataaccaagagtagctccaactgaccaaccaatggatccatactgcatttggaattcatacctgcaaaaccatcttcagattattacctttaaatcataaattttaatataatggaatcgaaaaaagcaaatctaaatcattttttcagatttatttacccgcagccccttggcagcttcagcttctggcaattaaaccaagaatccccagtctcagcaatgacagcagtttcacttgaaagcatcttctgaatatgttgaaacataacattaactctcaaaggttctttaggctgacacttgagaggcaacccatcagggacaaagatcctactgtagttttcataagcagtaggattatgcttgaccctctttgcgagtgctctgaggaaatccgtcatcagaatacatccaaaagcagggccattagctattgtcacccgatcaggctgcacaattatcgccttctccttcttcagaagaagggaatacccaacagaactgtagtcattgaaaataggccctacaaagatataagcatcagcagactcaacaatttcagcacagaaggcagtgctgactgccccccaataagtccctatgaaatgtggatggtgttcggggacaagccctttggccgagggcatcacagcaagggcgtaaccacatgcatcagcgagctcaacaaaggcgtctgaagcatgggcaactcggagtttaggcccaccaaccatgactggcttcacagccttgtttaagaactctgctgcagcctcaactgcagcatctaatcccattttattactcaatctacattaagattaaatcatatcagaactaacattacattaattaaagatgatcaacatgaacataaagattatcaatcttattataccttggagaaagggaaaatggaacaggttccctactaaaagtaggatgaggaataccaggcaaattacagcttatactaatgtaaacaggtttgctttccttcaaagatgttgaaatggccgtatcaatcaattcatgtgcatcttccaaattattcaccacagcctaaaaaacaatcattgaataaatctaaatcaacacagatattaatacaaaaaaacccattaaaaaaaacacacatttaataataattaatattcaaatcaaagacccattattatagaaatggaaacgaacctgaaaacaagtaacagtctgaaaacacctaagctcctgagaaaaatcaggtaagccaatagtatgatgaaggattcgattagttccataatcgttagagttaggacctccaacgatacagatcagaggcaaattctcactataagcaccggcaatggcgttaagaacgctgagtcctccaacagtgaaagtgacaacacaagcgccaacgccacggcacctggcgtagccatcagcagcgtatccggcattgagctcgttacagcagccaacgttgttaagccccggctcagctatgagatgatcgagaagagtgaggttaaagtcaccggggacggtgaagacatcggtgaccccaatttgaacgagtcgacgagccaggtgacgaccgagagtggcatcgacggagttgaagacggtggtggaaggaagatggttttggagagaagaaacggtgccgtttggaggacaacccacgtcgccagtgggtggtttacaggtgtcgagagctccaattttggtgtccattggaagaagttggtggtggaaaatgattgggtttggagaaatggttatggtggtgagaagggttttataggtggaaaaagagtaagcttttgtttctgtgattattctatgggcggtttcttgagagaggggctttcacaacaagccttgggcgtctatggattctctatttttttttatttttattttttataaaatctcatactaattattattactgtagttttttttttttttttgagaaattaattattagtgataatggttaatttttgaacatcgttattggatatcaaattatcaatggtactcggtgttttttagagatgacacttacaattagttagccatatattaattttgaggtttttatttttagttttttttttttttatttttacgaaaatttacacaacaattaataaaacaatttaaattgtaattgtaacaacctacattgaaactactagataaaagaaccaaaactataaattaaaaaaaaataaaaataaaaaatgacatataaaataatatttcccttaatttttttgggatggatttgtttttggaataatattcaagaagagaataaaaaaaaatccaacttttctttgttcgtttttttttccctaaatctcaaaataattattagtgattgttatggttattatttcgagatttgtttttggaattattattattattaagaacagaaaaattaataatccaacctaaatctcatagtactaattgtaagtaactttttcattttattttttagaattatttttttaataataattttagttgtttttttacaattatttaggccatgtttaaaatcgaaatttaattattatggtattatattctatttaaaacaaaagtatggttggatatcaagccatacaaattcttattttttgacaaataaattagtaactacataaaaaaaataacaatataataataatttttttttgaaagcaacaatatataataaataattgtttaaaaataatatattttgtaattataaaatataaatatacctaattatttatgagattataagtattgaaaaatacaattgatgcctattaattatttttaattgcattactactatgtaattacattgttaaataaagacatcaaatttaataattattctcaataatatttaatttcaattactatataactaagaatttttatttttttttaacgaacacttatattcactcgaatttttatgattacataatttaagtttcacaaacatatttattgaaaaaaaacctcaaacatataatatattaaaatagattttcatcatattaaattaaagaccaccgttttctttcataaacatgtcacgtgcgcaaatgagacaataattttatgaaatgtcagtgtctcactcattatgtctatagattttataaggttaatcaattataattattttacgaaaaatatatatatatttaaagtcattaatttaaaaatgatttgtcttgcgaattatataaaaagggaaaaaaataaaaaattgaaaatggcgtgaagagttaatggcggaggaccacacggatcaaaatacaaagcctataaaataactattcaaaggactaaaatagaatgttcaaagttcgtgttcaattttgcatacgttggataatattaggacaatttccttaacttataaaacggcctaagggattatattagggaaatttacaaaaaaaaatactgaaatttggattaacttttataaa

SEQ ID NO: 219075 - DNA, 3346 bp, Cannabis indica
tattaacaaacctcaaaatattcaacaagtttatgcgaatggcgaccgagttctccagcataaataacttgtcctcctcttttcatcaagaaaagctgcaaaataaagcaatgtcaaatttgactcatcacaatcataacgaaatatgagagattgaagcaattataattcgagttatacctcatcgaaagcttcaaagatgtctatgctcggttggtgaattgtgcatacaacagttcttcctgtgtccacagtgttcctcacagtacgcataacaatggcagctgctctagcatcaagacccgaagtgggctcgtccatgaagataatggagggattggcaactaactctacagcaatagtgagcctctttctctgctcggttgagagtccatctactcctggaagtcctactaaggcattcctcaatggttggatttcaaccaaatccattacttcttcaacaaacatctgtatgaaacaaaaaacttgagtcactttcatgatccacatcatcagtttttttaatgttaacaatggttgaagataaaatgacatgcctttcgtttttctgtgttgatatcagaagacagacgaagccaggctgagtacaagagagactcatagacagtaacatatggtgagtggatgtcattttgttcacagtaaccgctaactcgagcaaatgtagcttggttcttcgcgtaaccagaaatgtttatgcttccttcgatatatccaccagtttttcttccagccaagacatccatcaaggtagtcttaccagcaccactaacaccaaccaatgctgtcaaaacaccaggccgaaaagctccactaacatctcttagcaattgcagacgagtttcttcaactccttgtgtcttcatttcctgatgaaagacaaaaatgtttctttacattaagaaagatgcatcaagtgtttatgatcaattttctcaggaaaattggcttactgcaggcatgtccacggaatagttcacatggttgaaagcaagcgataatggttggaaaggtaaaaccattcctcgactgacttgactgtttctagcattttcagtgccatgattattcctttcttgcatatccacacctataatttttcattaaaagtcagataccaagaataatttgatagcagaagagcttttcaatacaaaatcatttgggaatttagtttgcttaccttcagaactggatgccaattgtgtctttgttttgtttttggagtcatcatcggtaatcagagttttagtatcaccaaaagctgaatgtttttcaaaagaaatatgtgaaaagaggaatcatttgagataagtatttggaaatcatgaaaaactgattatctacttacggctcaaataggtcaatgctgcaataaagagtccattgaaaagaaaagaaaacgcgaatagtgccccgatgcaaatccaataccaatattcatccttaaacagacctctttgatctagaagaactttcccaactgtggagtttccaataggctgtgaaagagaagaaaaaccagttatgttaaatggtgaagtagtttgtatggaggaaaaatcataggtaatttgttcaatgtgaacttactgcactccatcttttgtcaagaaattcattaatggcaattgcattttgtccatacatcataggagaaacatagtacccccaaatcatccaaggcttaatgtcatctgcattaccaagaaaaaaatggttcttgttagagagtagcaaaaacaaaaatctctaacgactattctagccaaaaaataataataatagagccaaaatgagagcttccagaaaccgatccaaaaagtagaaccaaaagaatcacttgtgatcagggatagtgagcaaaaaaaaactatttgggatcgagctatccaagatggtgagcaaaaaatagctaccatcttgagaggagatgttaaagagtcctacattgctaacatatggaaagaaaataggatatataagatccatgagttactcctctcatttccaattggttttgagatgaaagtctatgcactttaccaaattctaacatttccataacaagatgtctttaatagctaagaaccaatggtatttcaatgatgaaattttcataatggtaagaaaattctaacctttggcaacaatgtaaccaccaaggacaaacaccaatagcaaggtaaaagatccaattgtgttggcaacaacatcagttcttccgagggctgcaatgaaacgaaacaaggaaagtgccatctgatggacaccgaagaaggccaagaattgtttaaagaacctgtaaatattgaaaaacaaaagtcatcaaaatgaagagaattgtgagctaaataagaattatgttgagatttttcacacttaccttgcagcagaaggtgcaaaaccaatggtgtagtatgtaagaatgatccaaatgcctgattccaaaaatgaaatgggaatcctcagtacccaaattggcaagcaaatgcccaagcagggtaaaacaatgaatccctttgtttatagaacacaggaagccgaaaaactgtcatggcaagctcagccatcccattaaacatgacattaataagactgaaaaagagtgctccccaaaactttgctccatcttctacactgccagttttcatttctgttcttaagaacacagtcaaagcaattatagccatgatagtaatctgagtagtcttgaaaatatagataaaagagtttcgcttcatcaacatccattcccttgcaaaccctgccttgaagagttccttattggagataccatatttttctttcacaagtgcagcaggatgagctttgtttttatcatatggaattctttgatcttcagaaagactttgaccaacatgaaaagaggtgaagccactcacgaaatcggtcacagaaatgtatctgtaaggttggtttcttctaaaccagtactgttcttggtcttttttggaagtaacttcttgaagaaagtcagcaactccttttctatcagggcatttgaaccccatatgctcaaagaattcgagaacattattgcgagggccttggtagacaatctgaccctcagaaagaaggataatgtcatcaaacaagtcatatgtctcaggtgcaggttgcagaagagagatgaccattgtcacatccatgatatgaaccatttgcctcatgaacttgacaatctgaaatgttgtggaactgtccaaccctgttgatatttcatccataaaatatgctttcgctggtccaaccaacatttcacctgcattatatcaatcaaaggtaattccaatcagaa

SEQ ID NO: 219076 - DNA, 3406 bp, Cannabis indica
gttcaatgaacgcagaatacataataaagaatacataataattgtatttttattatatatatatatataaaataaaggattgattagtgattaactaatagtcatagctatagcctagtggtagtacctcacttcttctcacaaagaggaggtcccaatttgaatcccccaccccgatgtcaaaaaaaaaaaggattagtgattaactatccttaccagttaccatacttagtgtaatttaatagttttaaatagtttttgagctgttaactgggcagcattgacattgaagaaattttgaaacctttgcatgatccatcttaatgatgtttgatcatagttgtgcatttaggatctgtttcatttttcttaccatatttcccatgcaggtaactttggagaagttgtcaatgttgagcttgcgatggatcgtactgtaagttcagactaaatttggtactttggtctgcttaacttttctcctgggaaaattttgtgaacattatttcatatgcaggttaatcttccgaaaggatatggatacgttgagttcaagtcaagagcagatgcagaaaaagctcaaatacacatggatggtgtaagttttattcaaatgttgggagtgtatgatgtttaatatgatgatatcatgttaggaataatgttttcgtatacccttattacaggctcaaattgatgggaacgtagttcgagcaaggttcacattacctcagcggcagaaagtttcacctcctcctaagcctctccctggtcctccaaagcgagatgcacctaaagctgataatgtcgttgctgataaggatgtgcctaagcgaccaagagaacgtatgcttttttttatggaatttatgattatagcatcctaatgctgtcttcttttttttcaattataccaatgctttcatttgtaatcttaatttcagcttctcctcgccggaaacctccactctcaccacgaaggagatcccctgtgggccgcagaggtgggtcaccgagacgacttcctgactcgcctccaccacgccgtcgtggtgactcccctcctcctcgccgtcggatggactctcctcctcaccgtcgtggtgatacacctccacgtaggaggattgcatctcctggaagaggtcgttccccatcccctccactaaggcgcagatcccctcctcctaggtatgcagacagtagtattacatatatttggtttttcaagtttgagtatatatgtataaataagcttcttcatcttcttcttcttcttttagaccatctcctcctcctagaaggatgcgtggcagtcctcttcgtaggcgatctccccttcctccaagacggcggtaattctttctaaatattttatttcaacttctcttaaaatctacaagttagttgaatttggtactctgttttttttcctgcatcttactaataacttttgtttcttacttagttcacctccaagacgccgtagtcctcctaggagatctccactaggtcgcagacgcagccgttctcctattcgtaggcctcttaggtcacgctcaagatcattatcgccaagaaggttggatttgccttaatacttttgcgataacctaaaccttgtttatatgctgtttcttattatttcatattctaacctgcttggaatcacaggggccggggaccagctggaagacgcgggaggtcatcatcatcgtctggatcacctagtcctcgaaaggtattacattctttattttactcttactgagtaaacttggcttgtggggtacactgtataacatcgtttcaattgattaaacagattccccggaaagtattatctcgcagtccaagaaggtaaatctctgttccctattactttcactcggaaacttcaatgtttcattccttctatatgtttcatattttgcaaccatttcttaagctgttgtgtattacattatatgttcaggccattgagaggaagaagcagtagcaacagctcgagcagtagctcacctccacctcctcgaaagccataggaaaaagctaacccccacaatgtttttgtctggtatgatggagccatgaactatgtaatgtccaaaaattactagagaggctgagttgatattctcattttactagttttgtgtatgaagaagaagaagaagccatattgtatttcaaagatagttgttttggttgaatgatatgattagtcacttttcttccattcatttcgtttaatgttgtttttgttcaaacccaacaacatatatgccaaagcgggattcgagtcaagtgctttaggatttgaattattgctaaaagatatattagaagaactaagaaagtgattatggtaaaaaaaaaaaggattttctttgatgttgtacaaggattgttgctgcacactatatagtcctaaataattaattagtaaaatatttttagtccattttgaaaatagaaactccacaactaatctcttgtgtcatttatagaggttgagtaaggttataccttatgttaatttaggcatacttaaatttggtttattttacattttataatttttataaaactaaatgtaatattgttccttttgaatgaatcagttcttttcttgcttatatacacgtaaaaaacaaattaaattaaattttggatggaaatgtgttacaattgcttgttattttattaccataaaataaattataaaataaagtttcatcgcatgatacaaataataattttacaacagtaatttaatgggtggtttaccgtagaagtgaaaaaaaaaaaaaagccaactaagagattggaaggggtgcaccattccaactagtgagacattcaagcattggatcgataatttttccttgacacattgcagtgaataccttgtcaaactcctctcctggtgatctaacattctctccagtaagcaaactagtctccaactcctccctcacaaacttgtacaatggataagacctgcactttttgatcttgtttgatatgtcagcatttccactttcgatagcattccttgcactttcaacctctttaggcaaaagggttttcaattcttcctcaaaagcaccaatcttttggaagattgaagtgtttggattcttctcaccttcactattaaccaaagcttgttctattagtacttgccttagtttctgcattaaaggataggtagcactgcagggatcatcaatgtatgtgaagacgtattccctatccacaactttaagcaactctttctcgcaaaatcttgatgggtggagctcgccacttgcgccagttgtcaaaactctcttagccacttgactcacaactttttaactgtgtgccttaagttctcctccaaatgtctcaagtcaatggc

SEQ ID NO: 219077 - DNA, 3222 bp, Cannabis indica
aaaaaaaaagtatatatattttgtgttcttttattcaaagttttcgtgggtttttttttttaggagaaatgctaaaaaataattatgttatttagtactctttaatatattattttattattgctataaaatccagtctaaaataatttaatataataatatttataaaatatcgttaatcaatcgcaacatgatacgcttaaatagtactaaacatcactaatacattatagtaatgcttttttcaagcagtcttgttttagattctctttcaatgttttagacagcatacaatattgtgtataattttttttttaaaaaaaatgtcatatatcttcatttttgtttttgagcaagtcatatatcttaattaatttaagtaatttacaaaagatagtacttttttttattattctttctagtacttttgttcttttttttttttttttcccctttgcttcttgtcttattttcaacttcatcttttatttcaatcttgtcttaagcttctcttcttcatcatcatctttgatttattttatccatttcttctttttgtaatctttcataagtttcctttattcttatttgtcttcttcttcgaacttcatcattattaagtaataagttaccatattaaagttaccaaagatattggtactcccttgaaatttgatcattcatttcttatgcttattttgatgatagtaacaagttacttatcacttcatgttagaatttaaaataaagttaacatagtttcatctcaaaaccaattaacagtgggaggagttgaccattcatcttagatattctattatctttctacacattaacaatatgaactttctaacactccattaaaaaacaaacagttaatttgaaagtggtacttagttaccactacattagactatagtcaccatcacattaactatcattttcttattttcttatttcacataataatttagaccatctctaatgaaatgtaatggagatggtgtaagttgagttacactatatttggcacaaaagataattttgtagtatttttacatcaatttttagtattgtagtccaatacataattatatatattgatgcaaaatttaatatgtcatttaatgcttatttaaaaatttattgaaaatataaaataataataatacaaaaataaataaaaaatttaataataaaataataataatacatgtcatttattgtaaaggagaatgctaactaaaatttaataataaaatattaaaaatgacaattttaataataatataaaaatataacatttattgtgatgtaaattttgtattatgctatattgtgatccaaataggagtgttcataaaacagtcaatccaatccaatctgcacgatagaaggtcaaccagtggcctctgcatctattttggctcaaacttgattgcttagcaatctaagaaataataggttgtgtcaaggtctttcactgaggcaaaatttcgaagtctcgcaagcattacaacagagatgtcttagattaaatctctacttagtgaacttcaagtatcactacaatgcacaccaacagtttggtgtgacaaacttagcactgtattgctaactacaaatctaatactttatgctcgaaccaagcatatagaattggatttctattttgtaagagagaaggtctcgaacaaggatctagaagtcagacacgtggaagcctatgaccaaattgctagctgtctaaccaaggcaatatcaagctctaaattttccatccttagaaacaaatttaatgttgaaagcacttttaacttgggtttgaggggggatgttgagaacagttaattagtaattgtattttctgttagaagtagttagtttttctgttgtttagtttggttcagctgaacttaggctcattgtatatatactctatatttgccttgttaataaataacagaaatcatttctttcatttcgttcaaattatttcaacaagatccacatgggctaaacacttagatgaatttctaagtgtcattctcgcatcttgaacacgggatagacaaagacgaaagtcaaatagacacacaacaaaggatatgaccgttaaatcatgcacatttctgaagaaagagtggaagtacgaaacgtacaaggggtggagacatagtttgtctcattcggggtacaaactgacccaataatttttaatactggcaaaactaattaaaattagttatattgtaattctgtcacttatttgaaccgttaacttttattagatagtaacttctattattatgaggtggctcaattaggtaatgacacatttcattgtagttacaacctaaagaatgaaaactaactgaattacaattttagtaattttggataattttggcgctaaaagaattaataagtagtttctatatataacgtaaaattttaagtatttatgtgataaatatcttccttaaagtataggtacttgggatttttttttggaaaggagttacttgagcttgagcttcttagtatagttcttttacaaaattatattgagtagcataaaactaatattttcctacatgaatattataaatataataaaaataatatttgacaatatagaataataatatcaatcattctttgaccagtaagaaagattttgttttaagaaaaatgtttgagagaaacatttttttaacaaacaaaatatgatattgtgatagaccaaatgatactttattttatactttatattttatgtcttaaaaaatatattgattttatcatattaaatataccaaactatgtcttaaacaaattgtgatggatcactttctataaaagatttgacttcatttcatatcatacataataatattaataccacatccattttttaatttttatttctttatatataattttttcttcctttaaaaatataccaaataacaagtaccaaagtaccaatatcagattttattgcaaatctttattttaaaatgtaatattaatccaataagaatctgccacctgtgaaaaaaactgtgggcaacaaaaattccatcttgaaagatggaagtttaattataatttatttatttattttaattaaaaaataattaaaataaaataaaccctaattaaaaatttgttctttgagctccgctttttgatttctatttagaaacagatttgtat

SEQ ID NO: 219078 - DNA, 2762 bp, Cannabis indica
gctgtgccaagaaggacctttatgcgggcttcccaagtgagatatccatgctgacgcatggctccatgaagccactgctctaaatttccattgttgacatactcataaacaagcatcctgaattattttaaacaaaaatgaaactagaaactgtcaactaagatattcttaatcattgagcaacaacaacttgaacttaagctaaagatgttgttcttcttctactaatagaaaatcaagatatgaacatcaaaatgcgagcggtacctatgaatgccttcaacgcagtatccaagaagacgaaccagattcttatggcggacatgaccaatagcttcaacttcaactctgaattctttctcagcttggcccctgcaatggtaacaaggagtttaagccactagacaatgtagcaataaatatgaaatcaaacacaaaaaactaaaagccatcaaactcacacattatttaggatctttttaactgctactggagttccattgatcagataaccccggtaaacaactccatatccaccttcaccaaggatattttcctttgaaaatcggttagtagcaagctctagatctcttaatgtaaaccaatggccccaacccaagtgggaaaattcaggcaagccactcaatggagatggtgcagttatgggatatgaagaagatggcttattatagccagtaaagttaccagaaccaccttcttctcctgattgtgaacctccacaatctttatcaaaacgattaaatgagccagattgactgctaatctctccattctttgacttccccattcctcctacatgaagcagaaccttatctgattctctttcacttgacttgtcatgaatggtgagaagtattccatctcgtggaacaaactcacttgcagcaacttgctcaactcgaacttctttaatttcttttgaaacagttgggatttggctatgaggattcctgtccctagctctttgggaccttttccgggaagtgaggcatagagacaacacagagagaataattacaataaatagtgcaacagcaataccaattacttcccaaaccttaagaccaaagatagcagttttcttggataattcagcattgaggtcagaacccatttttcttttctttcagatttctgggtgcctgtaaagtttaatcaagaatctcatattaagctctaaacagttcaaccattatacaagaaccaagttataacttttatgtattgaaaggatactgacataaagctcttcatcattttcagatacagaactgaaaacaacaatagtaaacatatgactaaaggcacaacaatatgaagtcaaaataccattatgcattagaacatcaaaatgttggttactagaaaagcaagccatgattttgctcacctctctgggatgaaatttcacaagggcagacttttcaaagcccagatctttgaaacaccttcaacattttttcttgtcaaacaaacaaaaaaaacccagatctcaaaccaaacaaaaactcaaccaagaaaccaaataatcccagttcagataaaattcaattatatacccaagtatataatgtggataaccttttaggaaaaaaaaaaatctttgtgggggggcaactgtgagactgaatctaagctgagaaggagctttctggcaccagctttgagccttctcaaaaacccaaatccaaaaatgactgtagggggtcctcttttgcctcttgcaaatggtacaaggacagaaaaataaaaattcagataattctaagtggtggtggggatcataagaaagaaggggtggagttatcagtggtaggtgataagaagtttatatgccatccaatacatattactatgcatacataataagaataacagtgaaagagaagcatgaaaggaattctgtaaggtgttcttgggattttcttgatctgttatgaagatgactcattatcagtaagtaatttaatctcttatatttattttttgtttaattattaaaaattgaaaattggtataaattatatatttgtgtgttgtgtttgactgctgtatttgtatgtatgtgtgctgtaatgattatacaacataaagtgttacatttatgggtcattttgttttttttaataaaaacataattatagttccccatgtttttctcttattttcttacttattttcttactttaatattttttattattattattattatttataaagctgtatcattctaattcttagtaagacatctgggttgaaagatgattaaatgaccaagtcagaagaagtaaaaattgaaaacaactcccaccacaaaaactactacccaccaccatcatagtgtctttgtgtttaagtgtgaatttatatcatttttaatatttgttttacaatattatttattttatttcatatttataataatgtatattaagttgtaattttactttagaaaaatcatatatattttttttaatatgtaaaatatattctattttaatagataatgataaaagaaatagtgtaaattagatatgttgtgcaaaataaaaatttaaaaaaaaaaaagaaaacttttagaatttaattttttttatgtattatttataattttacaacctaatatctttatttactaaaataatatttgtaaagttttaaaattacaaaaaaaaaacactttttcataaaaaataaataaaaagtaaaaaataacgataaatcaatatcataataac

SEQ ID NO: 219079 - DNA, 3328 bp, Cannabis indica
ttaaagtttaagttatttaagaaaattttaattagccatgtttttttaataaaccctttgattatcaaaggtgtgcacaacaattaagaaatcgcggtaacacacctaatctaataaggtgttacaatttggtatcagagccaccaggtcattctttgaagatcgtcaaaatatgtacaatcatcatcaaagataagcttgactcatgattcggtaagcttctacatgttttagtagttttaattgatatacatgatcaaaaaaggtatgatatggagcatgttagcagattaatagctaaataggtgtatattaagttcccatgtaagcagtaagtagattacaatttcgatcgctgcctgatcaagccaactcatgaatttgcaagcttgtcctatagatggatgcctagaaaaacatgaggagttgggatgatttagtcgacactaatggcggatggagagaatgggaccccctagttcccaaggtcgagtttcagttcaagaaaggacttatgaaggtcgttatgaaaatccaccgcagtctccgctagaattagagaaaagatttacagagatggaagctaagattcaacaattaggaaagaagattaagagattaaggcaacatggatctcctattgtgccttcacctcaagtaacagttactttagttcaagagttgccagcaaaacagttatgggttgtacccatatgggaccattgtatgggaaatattggatgcaagaaccttcattcattttgggatatcaagatatgatgaatacccctcaagtcgcgagcgctatagagctggctcaagattcccgatactactcctcttacttccaatcttgtcaaaggtggtgctagttccttggacaattagaagaggaaagctccatctacaccagtgagcttgagccaaaagaagaggtttcgtagaaaaccaagttagggtggccttagaggtcactatacttatccagaatgccctcgatataataagcatcatctaggagagtgtaatcgtaagacatgtttccaatgctgtttggtagggcactataagagagactgccaatagttgtacaggacggaaccaaaataagagggaaaacccactccatgattagatgtttgtcactacccaaaataatactgaagatagtccttcagtggtgttaggtcagtttctagtcaactactttatttactctgtgttaattgattttggagctacacattaatatgtggtagtgtggatcatttataaattaggtaggatatgaaatagggtttggaaccttattaactgacagagaattagttaaggatagaagttgaacactgatctcgtagctttgagaatagcagagtttgagatattactcaaaatttatttcttgtatgagtacgctgctaatattgattgtaagcaaaagatggtaactttttaacttgaaggtgaaggatcattcgtattatggtatcggtttggggtactcgaactccaattatcatgatgataaaagctagaaatttatagctgggtggatgcataagaattcttagcagtggtattagataccacctagccgaggcagctcaacctgtggatattggagtggtacaagagttcttagatatatttctagaagaactttcagaattaccactacaacaaagatagactttgttgttattttggtatgtggagcagaggtgggttctagggcaccatacataatacctccaaaagaatttaaggaattaaagttaaaatttcagggaatgcttaatttatggttttcctggccctgtgtatcactctagaaaattctggtgttgttagttaggaagaaatatggctcgcttcatgtatgcatttgttatcaagaactaaacaagttgataataaagaataagtaccctctacttaggatcgatggttggattggttggttttaaagaaagatagtcttgtccaagattgatctttgcttaggctatcattagttgcgaatcagagtgaaggacatcttaaggactacccatcatactaggtatgatccttatgaatttatggttacgcctttggggagtaatcaatgctccggtaactcttatagatttggtattcagggtactcaaggatttcctcaatagatatgatacagtaaacatcgatgatattatggtgtactttcaattagacgcagattatgaacaacatctacatatggttttgtagcgactatggcatcatagactgtatatataaaattaagaagtatgaattttggttattctgagtgtctttcttagggcacgttattagtaaagatggaattacgattcatccgggaaagaattaattcgatagggtttggccaaggccgaagatagtccccaaggttagaagctttttggatttaattagttgctaccattgccttgtgcaagggttttcaaaatctctatgtccttataaggtttaattaagaagaaatagagtttaatatggccaaataggtgtgaaatttgattcagagctaaagcaatgattgattacgatttcaatgttagctttggcatcaaatcaagaaaattcatggtctatttgttgggaatattttaccaggatctagatttactaataagtatgttgattaatgttgacctcacttttagccaacgacaatgagtcaaatagtaagcgatagaaaatataattaaagtaaagtatgaactaataagcaataaagaacacatgattttaaagaggttcgaccccgtcagtgcagtaatagcctactccccttgacttgtattaactcaagaacaaagaatacagtgtttcctctcttaaagctctcacaatgaaatctatgagtatgctctcttagatttctctaaagtaattctttcgacccctttatcagtgagaatggatcactatttatagggctaaatgcttgagggaaggtttcccttttgctcacaatgtctatagttagtaagaacatatattacatatttagaatacatagattgtgggatttggacagcttgccatatctgtgatatgaatcctagacttataaggattgcttttgtgctttacgatacaagtcttgaaattgctaagtgttgatacgctgctcgaattgtctactgctcggttgggaagacattatctgtgtagttgtatgctgagctttgtttggaacatctcttcagccagatgtagggaataaggtccacggtgtcaccagcatgtgctgccatgtcatagtgcaaaaaatgggataacatttgccccccaa

SEQ ID NO: 219080 - DNA, 7109 bp, Cannabis indica
agtgcaagtgggagttttttgggtttttgtgccctaaataaaactctatttctatgtaatcttgaatattaatttatcaataaagaaatagatatatttcattacttgtttaatgtgttatttggttcacatgtttatttgatgatcatttagttgatttataaattcatccaaatccttatcacattgatgttcttgtttattttcttatccacacactgtaaaataatcaagattatgtgttaaattaattcgtataatttatcagtacacagggtttaattgatatgataatctacaatgtagtttacttgtaccttggataagtgctatgtcattctagggcattggttaaaataagcttggattggatgtatatagtatgcatcggaagggactgatattgaacttcaataacatataataaacttaccgtaatatctatctaattcaatatcacctagttgatcttagatcaaatggtctcaatcctgagatggttaggttctagtttagttgtattttgtatgttctctactttattcgttaaagtcagctaatagatcttctcatgacatacagattaaggacatggtagttcaattaagtgggagcgcaaatcatagatacataacttataccttctatctacacgtgaagcgaaatgatgattttcttcaagtttggcttaatagagataaatggttgagtactcaagtcaataattatattagtttactaaaatatcatttataggtagctaagtgttttaaggataaaatacattgaagggtataacggtaaatttgtccctactcgatgcagatcatctatagaggatcattaattattaggattataacaatggataattcatagcgtatctatatcgtagagcatatagagcattctatataattatgaattaaattccaaatctatagtggtacaaggagtaatttataagttagaaaatttacttggtcaattctagagctacttattagaagcttgattatataggctcatggtcccccacactagttgagacaatactacttgtaagactaagttaattgattttaattaatcaattataattctaaagttagactatatcttatttatgatttttcactaagcaatgacttaattgtaaagaaaagaggttttagggtttatttgttaattaagagactttataaattctaattaataaataagataaatgacaattttatttgataactaattataattattaaataaaaaatttttgcatttataggattaaaattagaaaatatggcatttgtgaaataaaagatgaatgattgaaaaaatggcaaaattataactagggggcccatctatatggccaaccactattgcttatttttttctattattttatcattttttagtccatgtaatttaaatcctaaccctaggtgaaatagtataaaaataataggattttctcattatccaactactcatttaacctagtttacattctgtcaaacacctagagtttttttagagcctccattccttcttcttcttctattttgaatccctctctattgttcttcataaattttgagcctatagtgaatgagtgcatgcccacccatagcaagtctagtacttaatcatagtgtgtaagaatgtgaagaatccaacacctgaaagagaactgggctcagatcttgataatactctacgatagaaaggaacaatagttagagatattagtgggtggagacttattatttcactgcaatcaatgtaaggtttcttaactttatatgtgtttaaattctattattttagagaattcatatttaggatgttaatcaacatacttgttaataaatttagatcctgttaaaatatattccaacaacaacatcataggtttttcctctaagtagttgcatgcaaagaaacttagaacaaagctcgaaaacatgatttttatccttacaaaaatccaaaaacattgacaagttctaaaatacttacttgtgatgtgacttaaaagaggacaataaatgttgatggtgattcaaaattcttgaacccagttgatgatgctatcgaagcccgcttttgcgatgaacccttcgtctggctgagggagagttgtgctgaggtcgagctgcaaagaagttgggaattactacgttctaatttttagcaggtagtttatgagagtagcaaaaatatcttgcattcattggtaaaggtttggaaaaattttgaagtcactcggtctaactttttagaaaggaaaaggctctggtttgaaagtttaaagaatgagggaattctgaaagtttgaactagtaaaaagaagacaatggcttactctgagcctatttatagctgaggctaaccatgtacttcaaaattaatggcctagattgtcccctcaaaaagcacaggtcaatctattggctagggagttgaaaatatatcatttaattccattcatctaaataagaatttatttttcatcattacctgcctccgacccaatgtgcattaaagagttttcacctgaataaccccccatggaaaatttgccattgataggcgcgtgttacctacagactcattaaagacatgacacacatgcatcgccagttgtacccagtaaaggatattagacccttcacttgttgaaggccaaacaagaagaatgctgctgtgttctcaaaattccctaacatgtcacgaatatgcctcaatgatttggaagaagattgcaagctttctccactcaagagttccagaagcttgggggtacatgttatctgtgtttctgaataaaggacacatggcataattaggagtacatgattaaacaataacaaattaagttccctcaattgtctagggtcgtggagaagccatacaagtctaggaaaactaagctcaagatctacagagacttgtcccacagcatacctccatccaagtcccaaaggcattatcatctctctgaaacccaaagaagaccaagcacaacatatgtctaggagacacctggaggacactcaaagagctgaacatgaacaccaatcgcctagaggaagctagacgtctaccatgaagaaagacctgaatccttctagcaatggttagaccttttttagcataggatcagatcttgtcccttgtgttagaccatcatacggtgcgcatcccacctctgcatatacctttttttcctaacggtttgtttaggcaccttctttttatggtgaaaccttttggcgatacgtgtcttgtaccaacaatggtccttattatctagttgtctctccacgctctcaaaagccctcttgagggcccaacagtcagttatttacatgtattttaccgtaatagtgggctttttacaataaccctaggcggtctatatcaacaattcagcctataaatacccctagtttctcatacaaaatggggattagaaaattaatagccgaaactctactgaaaaatctctctgaactttcttcttctctagacgaaccagcattagaatttattgtaagaactacttgtaatacattatacaggcgtaaaaggctaatatattgactgatggactaggaatcattattactcgaaccacataaaaaacacttgtctatattacttattacatttattatttctcgagctctatttcaattagttttaaaaaatctcgataaattcgttgtaacctacatattgtaacatggagtggagttacaattttgtgtcacttgtaactcacttgtaactcttttgttgataaaatataattagtgtaataaaagggttgttacacaatttgatttaagaaattaaaaaatatgatgatatagttgttacaaaatggactaatactcatttatgtaagaaaaataagttagaaaacgtttgagattgatttggtttgagtgggagttcttaaactcgaaaaacagaacctggaattacactaggtaacctgttgcctagtgtcgctaggtacagttttgagaaactttctaaacactagtgttttgattctagctcttatgtaacatccaaatcttcactattaacccattttacacctatttatgtgcttataacaggcaagaggtgtggtgtgtttaaatttgaagtgtgataacctaattactataaaagatgtctttggtgctcagttagtaacctaattttctattgacaaaaacctattagaaaacacaagttttgataatccccaatgtcatttcttagagatttcccttagtgcttagatataggggtataagcttttggaaaaaagtatttataccttgttcaagtcatggtgatccctactaatttacccacaagattatgagtgagggatattctcttcttcatatattatattataaatgttatatattgtaatgtgttatctcttctcttacctttcttatacatatacaatatatatatatagtatatatatatgtattttaatatttattaaatgtttttgttggtctttgtatttcatattacaatagagttacaatacatctttattttcttccattgatgtgaaatatctctaacaataaaaaatttatttcttttcaatataggaggagagaaattaagattttgagaatacaagagtaagagattttatgtgaaaattatccatgatgagtatggtagttattgattttgtattttcctattttaaataatagtaatctatgtattaacatatttcctttgttgagataggaaacttttacaagagaaaaatatatatatgtgtatgtgacatatatatgtgtatatatcatattaatatatagtgatatataatatcatatttgaatttatagcatgctagtatatgtatatatgtgagatatatccaatatatcacatgcgtatatgagtaatatatattatatatgtgtaaagcatgtgatataatatattcgtgagattaaatatgtagaaataaatattttctatgtgtttatatgagacatacatataatatatattatatataatacatgtatatatatgttatatatgtatgaggtatgtaatatataattgtgtaaataattaatatattatatgtatgttatatgtgagatgatagtaacatacataatatactaattaacataaaatttgagagttacaattaatgcatgagacttatatatattatagttgcatagtaatatatatgtaacttatcatgtttagtgtttgataacaataatggtgatgaacaaaaatgtacttattattgtcatcttttggatgataaacaaaattttaaaatttatttttcttatagtgttgaacatctcataatatgagattagaaaaaagatgactttgagagttacatcttttagttttaaaattttgggaattaaagagataaacatctcaatttggatgagataaacaaagattaacttatgagagttcaatttttaaaatttgtgagatggatcaaaagtgaatccaaacttgtgaaatgagccataaaattagaaaagtacttttaaactcaaataaaagtgaatcatggtagatttaaacatgtgaaaagataaaaaaaaatggagaaacaattttcagtttttaaaagtcaaagtgatgaacaaaattgatgagaattttgctaactttggtataatttttggctaatctcaataaggagataatcttacaaggtatgaaataatggcagaagctcataaaataggaatgactttgactctcgactaaaatgaaacaacgtcaaattctcttttcgatcgaatataaggttgctagaatagtttccatattagatgagttgactactccattcaatggatgttatctttgactctcgactataacaaagcattgtatcagtttgttgaaaatcttggaaaataattgaatatgttttatcttcgtatttttgcaaacatgtttacttactagttattttctgaacatgtgtatgaatttaattgaaccaaatgatttatttttgcttattgatatttgtagtatcaaaatgaataatccaaactcaacccacatctttgacatgcctttataaatgaactctattgttgaaaatgtctcctggtaagagcattaattcttacttaatcatgatgaatctgaggttctagaaagcaaatctactgaaaattgatttatcaaaagagtaatgggttcaatttatcctcaacagcattccacctaagtataatggatttgttgtatcatacatgatcaataattttaactcatatgacatagacaaggtggacgcagaattgcgtgcttatgaacagactttgcctgcaaggaggcctccctccagttatgcagacatgcgcgaaaggaaagttgtagtaattgagaatgatgcttctgacaatgttgcttcttcaagttcaattttgagggctagaatcgaaattaaaccaagaactgaaacaattagaaaaccaatgagcagacgtattcttctatgttcatattgtgtaaagaatggacattcggaagaaagatgtcccaaacttctggaccattggaacgaaggtaacacttttctttttgaatcatgtgttttagagaatgacaaatccatttggattgttgattctggatcaactaaacatgtttgttcttcattccagctgcttgaaacatgggattatttaaatctagcggagttgaagctcaaagttaggaatggaaaattagtattaggccaagctaagggaaaagctcgcctcaagttacagaagaaattcttagttttagacaatgttttgtttattctgaatttttgtagaaacgattagtgtttcatgtttacaaacacaattttatcaattgaattttttgagttctatttacactatttctcataatggatttcaattatgtgttgctcacatggaacaagggctttctgttttaagaccggatatatcaattgcacttaataacatagctaaacttagaaaccataaaaggaaaaagattgataataatgacgaaacatatctatggca

SEQ ID NO: 219081 - DNA, 3138 bp, Cannabis indica
agatcaacctgaaaaacacaggtacagttaagaatcaatcaagtggtttacattatgccagttaaattagattaaaaagaaacacaaaatcattagacaaatagattttgggagggacagacctcataatctgtctgagatacagtttctcggctgcgttgatatttttcaacccaaggcaaaacctgaggatctgtggctaacaaagcttcggttgccgtttgatcaggacccaagaatgcagacattacagctagctggccaaagatttaaaagaattgaaaataagcaaataatgtttgattttaaagtcagcatgtatgagcaaggaaattaaccattctgagcaagcaaataacgtttggacttagtatttgagacacacaataaaacacacacttgttgaattgctcccttaagggccaaggttcctatatatatactcttcataatcggtgcactagccgactttaattgtgctagagaattctagtaattgtatttggagtttagtttaaagtccaagtcctagaatgcatttcattcatctaaacactacttaattgcaatagaactttctaagtcggtggtgttcttaaaagtgactcaaacttcagacacttagtgaaaacaaaccacatggctcattgtttgaacttattaaagagagcaaagaatggtgaagtaacaacctgtcggggacctaagccaatggaaacgaacttgtccttcatttcttggacggtggctttctcccacaggggaacccttccttctggatctggctcctgggcatctgttctcccaaaggttctatcaaacaaaccccacttttggaacaagaagacaaaatgattgtttcaattatcatgtattcaaatatttcaatgcaagctaaaccatttagttactctcaacaatataagaatctacccattttacctctatgcaacacctttttcttttcttcaagaatgataagttagttaaaagaagaacagaagataaaaaacaaacctgcccatttgaaccatatgcagagtataataagcttcctttctcttcattcccaccacattttcgaatagcagaagctaagaaggtagatttggttgcactttgtgctgcacaaaataaggagcttgagtttttctttttttttttttgtcatcttcatgagcattctaggtagtaagtatctcaatagttcattacctgcaaattggatgagatcagcataggcaataggcccacccttggagtaagaatctatctccttcttaacttcctccaacaaattcaaagcaccagcaaaccctttgttttcaggtctgcttatctctgagcttcaagcaagaaaattggagaaaagaaagtagatgagatttctacacttagcttaaaagaataccatcatcaactccaacaaaagaaactgaaaattctctgcacctaaattatacctgaaccttattgaaccatttgggcctcctgttttggtagcctacactcaaactctagcaaatgagcacgttcctcttttgtgcatttggttaatttccttacaaattatataatcaacatctaaccttgtcatatgttattgcatcgttaagtgccaaagttagtatggacgggataagatctggatttgcctgtaaaatccaaacaacatatcaaactagagagatcaaacttgaatcattattaggcatagttacataaattgtgcaaattacctttaatgcagtataaagagtgctcttgatacttgctggaaaaaacagtataaagagtgaatcttaatcagtaaattgagctaaaaaaaagagttgttgagagcttacaaagaaattcagaacgctgtcttcgttgtatcaaatcagcagcagtggcagttctcacaaatgctcccgaattcgctattaattcctaacataacaactggcggaaactcataatcacatcacttttgattccagcatttggttacatatttttatagaagtggtaaattaaatttaataaacaaatctgttaaggggaaatttgcagaagaaggattatccacaccatgccaacggaagcaccaatgcatttaagaatgtccctacgtcggaacccatcctcatcagtaactgcagcttctattttgttacaacgaattgagagctgaaattccaaattaaaaagagagaagatcaaaaactgtataaggggtgtgcatcaaacaagcaaaaacagaaactatgtagtcattacagtttaaggaacggagcagaggagtgagtgacttactggttgagtagaatatggggaagtgggagtgttggcattgacattgagagaagagactagagaaggaagagtggagaggaaggagacccccatgatcataataagggtattgatggagaggagattgtgaagaggataatggtaatgaatttgaataacaacaacatacaatatgaataatatgttgttgaatagagatgggtttgtgtggagctgtgaaagatagtttaatgatatatgttatccttttcctatcttttatgtgtctcactaggattccctccggatatcataacccacatcaatcttctctttcaattccgattacactcaagacaattaaatattactttattttgtttaaaatttttctcatttttttttcatttttttactatggggaaatttattttttttaaaaatactgtgtactgtattaagttttcactgttgttctacagttatttttagttgttctattgttgttttaattattttgttttattgttttactgttgttttataaaaagatagtatttttgtaaaaatttccgtgtgatagtaaaattgtaaatttttgcccaaaatttaatttaattttcttttttgtaaaaatccctatatcaaattagttagaattatttgtactactggatgtccctaaattatataagttttggcaagttgattatcaaattttattttttgacaaattggtctccaaactatataagttttggcaagttagacccaaaaaattaatttttttggtaaattagtttccaaacttttatttctttagcaacataaagtcgtcactactagatattaatattttta

SEQ ID NO: 219082 - DNA, 3769 bp, Cannabis indica
gtatgtaaaaatccatcttgttaattttactttttactaattctaatgagctttcaccttaaaaaaacaaaattatagaagtatacttataaatttgagaaatgtagaaatatatattatatataactaaattttttaacgtaaggtacttttttttttttaaggaatttttaactaaggactttcatattataatgttagaaactcaatgattttgttgttaaattaataaactttagatactataactataaattaataaatatataaatagagaaaaattgatagttagtgtactcacctttttcttttaattcttatttgatctcaattcaatttcaaccctttacacgtatacatatttagatactgataaacataaaatttctgatcaccaattatgagaaggctttggcatgattacataatttcaactcttcaataattcatggttggcaaatatctcttttcccttcatcacatcattattcttctttttttatatatattatatttactttgaataagaataaattaataatttatttttaaattaaaataataataaaaaatttgtttaattcagatattaaacaaaacttcagttttcctaacaaaaaatctattgaagcatgaagcattaaacatatatatgtaactattaaaactaattattataacaataataataaaaaaagaatctattgaagcatgaaacatgaagaatcaaacacatatattaattgtatctaataacccaatgaatttagacccattaattaattttgccaagagaaatgaataaataaataaaaagaaagaatgttaatattattattatcattattacctgagtggtgataatgagaagccaactagcaaaaaaagagatattccttccataaaaagctttaataatagtaacaatcccaactgcataagtagaaccagacccaaaagcactcccagcattagcaaatatggaaatgagcacgtgctctttcatgttaaacgggcccgggttgagggagaaccgtctctcccccaaccccaacacccgaaaacgagtgttgggaagtgccttggcaagaaatttgccaatgggaagagcagccacttgaactgttatttgggttatgataagtggctctgtacggtaagcaaagaattggttgagaaatgataagagagagcatgagagtagacccaaaaaccacatccgaaaggtccatacgggtagggtcgggtcgtccgtgtttttaaccgtgagccggacctcctcgatgggcgactcctcctcgggcgggccgacttcgggtttgggtttgggttgtggagaatccatgctcacaatgagagagagagagagaaagagtttggtttatgagtaatgtatagtagtagagagtagagtgtgttatatataggaataggagggttgaagattccacatttttaatgaagtgatgtgttagtgttcacattgcaaacatagaaaaataattggaaatttttatcttaatagtttaatatataaaagtgtggctttaattcttcatttgaagtagagttttgttttatttggcaacagtagtactcaacattttttataagtgacaacttatgattagttagcgatattatgtaaaaattatttttaaaacttatacaagattcgatacttaattatgctaatagtggtatgacatcgaagaagataatagatacaagtgatatcttttaacaattcgtaagatttttttttgataaaacactatataggaaactttctaaaattatacgtaggtaattttaaatctaattttagatgaaaattatacattatttattcttaagtatgtaattaaaataatttagccagtgtgtaaaaattgaaagtttttttttattgaaaaaaatgagagaattgagagtgtctatctttgatattttatttttttaattttaattagtttataaaataaataaataaataaatgctagcttcacttaaaattatgaaaatgttaaatataactaacaatgatttaatgttaaatgttgtgagatttattttgatagaatgataatgaaggggaaatgtgtttgttaataaaataaataggagtgattgtggtataagtatttaaagttttgaattagtaagcgaagtaaatttaataattttttttagcggcataagtgttcaaaattagtacagtaatttttctgtctagttttgtcaatacataatttgttttgaatttattaaaaaaatatctaaaagtaactcatactacatgtttctgtctagattcaataatttagaatctcactcttacatgtgtcctatttaagacactaaaggaatctgtacagatgaaattggactaaaattataattttactaatattgtgtatttatatcgctaataaaaaaaatattaaatttatactacttacaaacttataattttgggtattggtaacaattgttactagtcatagttactgtaatattaatggttacagataacaaacaaaagtaacaaattgtgattgattatttttcttttattttttgtggcaatgaataactgttgatgattaatttggtaactcttaaaaatcatatttaccaaattattaataactattctaataactcgaccaaatcattattgataatgataaattgatttggaacatattggtacctcaaaataaataaaaaatgtttcatactgattaggattggtaattcctggtaacaaaatcagtaagtatctaataatactcacagttatcaaattggaattcattagtggtaataaccaaattattgctttcagtaactaaattattactaacagcaatcaaatggcaatgcatagttacaaaacaaaagtattatattttatgacacttttagagggtaaataccattttggaccctgtattttacaaaagttatcaattggaacttctgttttgttaaatgacaaaatgaaccttatatttttcaaaatgttaaaaataagaccttaagctcaattttcaacaattttattttttactataaaaaattttaaagacaatttctaacacgaacagatacagaaaatgtaaccagttttgtcataacatctctatatcagattattattatattttattttgacaaaaaatcagttcagggtcctatttgtataattttaaaaaatatagggtctattttgtcatttaacaaaatagagagtctaattagtaacttttgcaaaacacaatattattatttaagtactagtggtgtccagtatttttttttataagtaatactttataattagttagcaatattacttaaaagttaattttgtaagttaatataaaatttaatacttaattaaactaataacacaggataagccaaaaaatattagggaccaataatacttgcaattatctaatgaaaactacattataaataaatgtctatatggatgtctatgtcaagaaatttccatatatatattaatgcattacatattgcagtatgaagtgatgtaatggtcaatacatcacttaacaattttcataaaaaaatataattgacataacaataattaaagaataaaatatatattttttttatagagagaataaagtaactttaatgcctttatatatttaatttactaaattaataaagagatatttttgtctgcatattttattacatttttacaaaaatatttaaaataatttt

SEQ ID NO: 219083 - DNA, 1713 bp, Cannabis indica
atagagacatcaggcatacaccactaaagaatgccatcaactgaaagatgatattaaaaatctcatctcgcgaggttactttagacaatatgtgaggccacaaagaaacaagcaaaatcttcccaataacctaaataatcaaggattacaacctcctcatattgagggtaaggatatcttggtcatttttagagggccacacctcgcacaaaacaacaataatgcataaaaaaaggtatataattgaagtaaaaaatgagaaatcaaccttcgctctagaacccctaaaaagagccaaatttgatgaacctctcatcgtctttactaataaatatttatcgcatgtaaggttccctcacacagatcctatattaataacggtgcagctcgctcataagaggataaagaggcttctcatagataacaagagttctgtcaatattctttacaaagaaactttaaagaacatgggcttagaggaagcaaggttaaaattatgtatggttaacttatgtgggttcacaagcgatagtgttggcagcataggcacaatcgagctcccacgcaccatgggagaaccaccattatccacaacttaaatgcaagaattttaaatgtcgacatcccttctatttacaacatgttaatgggtcacctgaccttaatagaaatggtggcaataaatcagacatttatctcgagtaggtattgttaaaggcgattagttattagctcgacagtgctataatgtagaattgaaaaacaaaagagcaaatcatcaattgatggtgattctaagggaggaaaacaaaaaagaaatggaagatctagatcttaagatctatgatgaaaataaccaactcaagcctattgaagaattggaagaggtgaatttagatccaaacaatcacactaaatgtgtaaatattgggaaaggtttggaggaaaaactaaaatagcaactaagcactttcctaaaggcaaactaagatcaattcgcttgaagccattcagacatggttgaaattaacccgaatatgatatgtcatcacctcaaatctactaacatatattattattactattattattaataataataattattattattattattattattattattattattattattgttgttgttacgttgttatgcacaatagtcaatatagtccatgtataacaacactttctatttttattcttctttgtattcatcatgctgatcaccataaccactgaagataaatttttagacatttgacttgtctggtaatggtagatcaatttagtaaatattattcattttatttttgtattatattttttgattattgaagtcaatggcaatggcagaagtgaaaaaaaatatatatctcaatagaactaacattatatatatatactaggcggcaactacgtgcaagtcacgttttatgttttttttgttttggtttttttagttatttttctatttaaaatatttagtaataaaattaatggtatagtgtattgtagtaattacttttgaatgatttcatatatatttgttttatgattggtttttcatcgatcatgtaagatactttttgggcttcatcattaacaaatcgactccgcatgattaaacaaattggcttgaaactaaaatttggaaatatttgattagttaagataacataattaattaaggatctttaattt

SEQ ID NO: 219084 - DNA, 2043 bp, Cannabis indica
tgggctcaaaaatgccagagcaatatatcgacatattgaataaaatgtataaagatattttaaggaaaaatatagaagtctacgtggataacatactagttaagtcaaagacatccaaagagtatagtaataatttagtaaagactttttctattatttggaagtacagaatgaagttgaatcccaaaaaatgtatctttggggttttttcaggaaaattcctaagattcattgtcaactctagatgaattgaagatgatccggataagatccaagcccttctggttatacctttcctcgaaaacacaaagacgttcaaagcttaattggaaggattgcagcgcttagcagatttgtttcaaaatcaattgacagatgtattatgttctttaatgttctacatggaagcaactagtttgagtggatagccaagtgcgaagttgccttccaaaaattaaaagaactttagaaaaggctccgattctgtccaaaccggttaagggagaaccattatacatgtatttggccgtgtacaatcattccatcaatgccacattagtgcgagaagaaacaaatgtacaacttctaatgtattacgtaagcaagagattactgggcgcggagtctagataccccatgatagagaaactttcatattgcttactaatcgcctcacataagctaagactatactttcaggcccatgcaatcaaggtactcacaaagcaccctctccgccaagtgttacacaagctggagtcctctaaaagattattaaaatgagttatggagcttagctaatttgacattcattatcagtctagagtctcaatcaagggcaaagctctaacaaatttcattgtggaatgtactggaattaataataatccagaggaacccattccagaactagaggtgtggaaggtttttattgacagagcatcaaatgagaaagattttagagccgaaatcatcttaatttctctgcaagggcatcaactccaaagttcccttcgatttgaatatactacatccaacaatgaagcggaacatgaagcaatgattgcaggattataattggccaaataagttgaagcccattgaaacccagaacattgaactctacaatgattaccatttagtggtaaatggttaattataacatgtatatgtattctgcagcttattggaagatttggggtggttttaggtcaatttgggggcttgttatttttctgcagtgaaaaacaacaggctgtttctgtagaaacgacctaccgtttttctttgtacaggacccagaaaaacggcctgtcatttttcttaaatggtctgccgttttcaggcaggttccccattttgtagtttttctcatgtttcctcgatacttaggactttgtcttgatagatatcaatagggaaacctttagttttaagtttaaagtccgtgaaaagtgatttagcgtatcacttatcatctttacaaaatattgtgatttaggggcccgtaaaccatcgagccgcagttccactcaggttgattggcacacctgaattcgaaaacgtagtaaaattagtataatgatatgcacatgtgtttatatttttagcatatatgtttgttaagcatgttagattacattgatagaggtatcaatatacgtagatttgtattagataccgatagatgtatgttttgctcagatactatcgacactacaacattggtatgactagagtatcgagtataggctaatattagggtcgatagtattgtcatatgaacgttaaagactcagtaccgcctagggtgcaggatatggttacagttgggtgtataggggcctaattgtgatccggattatatttatgattatgattatgcttttcttactgagtttgtcaactcacagatattgtttatgtgtgtaggtaagggtaaagttaaggctgaaaaacaatgagttcgaggggatgaagattgtacatattggggcggttagacctagagttttcggtcttcgggacaataggctgcatttt

SEQ ID NO: 219085 - DNA, 3980 bp, Cannabis indica
aaaatcccttcacatgtctagctaggtagcataatatataataatgtcatgaccctccactacatctctttcctttttctaaagtcacttttttcttctcttattactataaaaaagagcctaaaaattagcactagagatagatctctcatcacactctcatttttgtttcacaattttcttcctttctttctttctctcatctaaaaaaacatgggttcatcaagttcaaataataacacattgaatttggtactaattttagtactaatattaatgttgaataacaataataatattgggtttgtgttatcatcatcatcatcatcatcttcatcaagtagtactagtctagatggggatagagctgagtgtgcagacaagttggttgggcttgccacgtgtcttccttacgttggcggcgaggcgaagaatccgactttggagtgttgtagtgggctgaagacggtggtggagaagagcaagaagtgtctttgtgttcttcttaaagatagaaatgatcctaatcttggcatcaacctaaactcaactcttgctttgcaactccccaatgcttgtcatgtccctactaatatttctaagtgtgttggtaagtgtatatgcccctttttttacttatttaaccctacaaaatatctaatctagctaattgatttttatttgggaagggcaaaatagtctttttagtatttagttcattttagactatattatttgatagtttgtttgtgaaatatctagtgtttgccaaaagcatttctaagggcaaatagtcattttatggtgttagcatatgtactgtttcctttgccaaataattaatgtgttagcatagtgtatgagattaatttatttagggttattcaaggggaaaatatattgtattttagttttagttttgataattttttatagtacaaatatattaattatgataattaattaattaatgtaattattgttgtatgtagaacttttgcatttggcacccaattcttctgatgcaaagatgtttgatgggtatgctaatagccatggtactggctctttggctccaatttcaagtggtaacatattttgctcttaattaattaataataattaattaagtcacataatatttcaagtgaaaatcccaatttatatattataataattttttaaaaaattaatatgaggatcataaattaaaattagaaagtgacattatttttgaaaaaattagttatatgatatatctcttatatttcttttatttgtatacatttgtattgataatgttatattgtttgtttgtttacttagaaaattctacaagtcatggaagcacaattgcaaatgacaaaaatgatagtggaaaaggaaaaggatggaaaggaatggacataattttgggaactttcctatttttctgtccacatttagttatttacatttgataaataaatatatattatttatatctcatttacaattttattttatttttgggtattttgtatttctatttaattgttttgttcttcctcttgtttggtgatcattttgtaaaagatatatttttgtagcatttacttgaataaacctaacctatttgggcaaaataatgtgttaaagtaattaatcaaaagtatatttgtactataattatattcttatcattattattaatcattcttgtgatgaaagaaattaaaaaaaaaaaatcaaaatatatctctatatccttatttgttcacgtgattactatatgctaatgctatatatgtccgtgagtctaattattatatcatttacataacataatataaaaggagtaatgatatatatacacacttacacacaattattacatataatgacatgtattaaataataaatttcaactctttatagatttaagtagggatcacaatacttttaattgtgcagttaatattaagaaaaaattacataatagactaaaaatttataaaaaaaatttataaaaatatattaacacgattttttttttaattttatttgttaaacttttttattaaaaaaagtaaataccattttggatcatgtgttttgcaaaagttactaattggactctctgttttgttaaatgacaaaatggacactatattttctaaaatagtacaaataagaccctgaactaattttttgtcaaaataaaatttaataataatccgatctaaaagtgttatgaaaattttttttacattttcagtatatgttcatgttaggaattgttttcggagagtctgcccacgttttgtgctctgaggcagttttatgtcccctttggggttaaccgttttattcaagctttttttccagatttgtgcaatttctttcctcttttcttgcagttaatttcctcttcttctttcttttacgaactggtttatccaccattatatttggctagcagtatcttcctctttctgggttatatttttcttatggatcctctaatacacaaaatgaaagcaaagattaatctcactgaggatgaggagtctgtatttgaattccatgacacagaagctttttcaccacaggctagtgttgatactgtcttgtatgcacgaattcttactaagaagaaggtctggctttccactctgcagaatcaaatggctgaacattgggatgggagatttcctgttaaaatttcagaagcttcagacatgttcatgctcactttcggttgtgaaggggacaaagcacgagtcctggatcgtgaaccttatcattttcagaaccatcatattgttctttacacaccagagattgggaaaaactttcagtcggatgatcttaaatttactcccttttgggtgcaagtttatcgtctaccatttctaagcaagaccaagtctttagcaattgctcttggcaacattattggacaatatgaagatgtttttgaggattctttaaacgaaggctggggtccttttctgcgtattcgggttctcatggatgtttctaagccgctaaagagagggagaatgatctctttaagccatgtgaaagacaagttttgggtcgacttccgctatgagaggcttcctgaatattgtatggaatgtgggattattggacatccttacaacaaatgctctgtttttcttgagaaacttgataatggtgaagagcctgcccttgaataccagcccttcataaagggatctgctttgcctacctcttcctatgatcggtatagaaccgattttgccaagggtgatgtttggccgttgttaactagacttgctaagaaaagtttatcctcagcaattcctcaattgcatctccgtggttcaccgcagcctaaaagattatttgctggcgagtcttctcaaatcaatcacttagacaatactactaatgttccacataacactatgccaaattcttcagtgtccaagtcagttttatcacagccaccttcggttgtttttctaccttctactcatggttctactgtgtctcaatctcctcaagggggaaatatcaaaatgaaagggcctgctgcttcactttcacatgagtctcctactaactacactgatctcacatccatttatatgcccatttcatcctctccattggtttcaaacttttacgccacatatcctcccccacctccagccattacttcccattctaatcaaactttggctactcctgtcaccaatcattttaattctattatcgcaccagccattgttaccactggaaaagaaaactccaacccaaatgtgcaattcaaaaggcagagtgaaggcctttcactaaggcaaactcttaagagatgcagaggaaatattcctaatgatcacagctcaaccttgtcagttgacgaaaatgattgccactttgtttccaatgattacatggattcggctggtgactttgacaatacagcggagactgttttgcagtcc

SEQ ID NO: 219086 - DNA, 5560 bp, Cannabis indica
attattcaatatttattgtagtattatattcatataaataaatagtaaaggactaggtctgttagataacaaagtcattattggttcatgaatttggaaaacaaagaagatatatatatatatatatatataataaagagcatctcggagtctttattaggtactaaaaatcaagaattataaaagttgatgctggctgcggaaacattctccttgaaattagttgtttttcaaaccctaagctagctttgcataatattatatttatataaatgaaacaacatgtaaatgaaaaagaaaaaaaaaggttcgtagtaagtgggaaggaactaatttaataaccaataatgccagccaattactactttattaaacaaaaaaacatgtattgtattatacaagtaaatgtttggttatacattgatcgatacaattaatattatatatgcaaacggccagggttcaataattagatttcaaatttgtaaataaggatgaagtaggtttcttaattggcaccccttgagagtatatacaatttttgtcacaaataataaataaataattatttaaagcatttaattaattaagtaatggaaaagtagctagattgatgggtttgaataatattattaattcatctccaacctcttgcagaccattcaatcccaaaaaagaactactcagaaagggcatgaattgaagacccctccatgtgcaagagcatttaagtcaggtggtgtagtacagaggagtttttcttctttctctatatatttatttgagaaacattcataaattttatttctctaatattaatttagtaatttttatattaatatataatatcttattaatactacttgttctgtgaaccacattccctctaggccctcttgattattattatttaattccatcattctgattctctatctaattgaataatattacaaaataatatgaagatacatattcctattttgtatgttgttcttttaattattattagttgaaaattaacggcgaaccaaattttcttgatgtaatagtcacaacggccacagatattaattattactcgtacgtatactttcataatatatatatatatataaatatatatatatatatattgacggaggccgttatattactctaaaagaaaaaacacacggaggccgttattgagttaggggctatagccctccaacaaagaattatctatttttgtatatattaaatatatgtaaaaattaaattacataataattagcaacacaaaattttttcttcacaattaggacttccactttgaaaactcttcctcggccactgtgtatacataaatatatatacattaagaacaaaaaataaagtatatattaatgcaattattttatttattttcgatagaagctatttataattttgtttacttttcattttttgtttttcggattatgtacaagaaaatgtgttattatactactaaatatcattatttaatgttgaatcaaagtatataatgcctgaaaggtgtttgaactactcccaaacttggcctttataaaatataaaatatagaagaaagaagaacactttaccctaataaaaaggttctgtcactagaaacttatcagctagcaagtttttcttttatatcatttttttcctatataagtttttttgcagcattaatggtgcagtaaatgtcgacagggcgaaaaataatatttactaatatttaataaaaaaaaacttagaataaatgttatataataatgtctgcaaaatttaatcagtattatatatacatacatagaaccaaaaaataaataaattaataaataacacctttataatttttttttagaacttgccggccactcgttactcgacatattatttattatttccaaaaaaatataattattaatttttacctccattgagatatataagtataaataatataatatatataattatatatatatatatatataaatgtttattccatgaaacatccctgaactcattgtcatgttatagaaaaaaattatccaatagttctgaatataaattacatgctttgtatgtaaaaccttgaagtcttaatcatacatatctagctagctaggaagagattaatttgtactattggggacattttgattaattcatcaaatcaatatggaagtacttgaatctttcatagttagattagacatatggataatataaggaaatcgtttaaatattttactttttaattgtataattaatttggataaaaacacaggcgccatgcatgataatgataaccatttgggacattatccaattgacaagacaaaaccatttagctttaaatcgattaacaactaatgttaggtggtcaatcacatacttaacgacctaatgatttgatttaaaactttgggagtattatatatgtattaatttagagtatttaattaaaggccaaactcaattcaattaataagtactagtagctatttcttgttataatagaagtataagtcggcaaagtggattaattaatatttaattataaatatagtagaaggggaactcttgtttgctctttcaaaataaaaattgcaaaaatatataatttttttaaggatatattatatagtaagtttttatttatttttacttcctattaattatagatattaaacttaaagataatctcattgtaaagtgacgtaactactctagactccatcatttgattggaaaaggaaaaaagtgacttattctaagctgtagtttgattagatttttgaactcttaatatcattaactcatgttattatagctttctatgacttaacttcttaattttctagctattagtggggccagtaaacgaagatatatattagattaacgatttgcgggtgcaatttttataccccgactgatttttttttagatttattaggtatttgttatctgtcttttcagttgtatatgccttttgcatgtaattcaaaatggtaaaaccgcaatatatgagttgcatatgcagtacagatggaaaacgaggtttcttggttagaagaaattcctcattgtttaataaccagtttattgtttgtctctcaaaattattttggactatatgttttgcaaaagttattaattggatcatttgttttgttaaatgacaaaattgattctatatctttcaaaatggtaaaaatataaaatcttgagctcaattttcaatattttattttttaatataactaactttaagataatttttaatgcgaacaaataaataataaaacgtaacaagttttgtcataatatctctagatcaattattaagttttattttgacaaaaaatcaattcagggtcctatttgtactattttagaaaatatatagtccataattttgtcatttaacaaaacagaaagtccaattagtaattttagtaaaacacaaaatccaaaacggtatttaaccattgtttgtattaagcaaaatttaatttattaggataaagtggcagttgaatatgagagagggcaattccaaagattcaatccttttatacatttgttatatttttatgttatttttaccagccttaatttgtaaaaatctcatattatttttatttagagttgttttgacagattcattagctaagacaattgcgttaagcaattatatataacataaagtgtttcaatccttatacccaaagattcaaaaatcatcctatacatttgttatatattttaacagctttgtaaaattaaaatctcattctgatctctagaggtgtttcacagattatattaagcaacaaatattcgtaaaattgtttgaaccgatatgtaataataaacataaaaaacaccaaatatatttatttttatttattttattttgtatgaaaatatatttatttattaagaacatgtactttttttttgtagaatctattaagaacatgtacttgactaagttattatcaatgtataataaaaaataagaaataaatattcggacaaacaaatataacaaattttatgtgtggaatttgttttctttcgaacgtaatctatatatatatatataacctaacaaagtttatcgatcatggcatgacttgtcatttttgaaaattctgcagtcctttctagcttagtcgttacttatataatgaatggtcctttttcaaagtagtatactttgacgaaaggattattttgtattaaatactttctgtccaacaaaatttatgcacttgtaggaatcgtcaatcgatgctgtagtttctctttttttattaacattaacaccatcgggagaatgcaaaaattaatttatatttagtactaataatagttttgtaatattttttcaccatttttttttttatcatgcttcaatacattgtaaatcttgatttaaaatgtaatatgtgatttaatacttatttaataatttattaaaaatataaataataataatcatacaatggtaaatataaaatttaataataaaataatataaattataaaagtcatttaatacaaataagcatattgctaattagatttttataataaaatattaaaaatggtataatagtaattataaaatcatatcatttattgtgatataaattttagctatattgtgatcaaatttaaatcactttttattatgtgagatatttgcatcacaaattgacatattatttattagagtaaacttttaacaaaatatataaattatattttatatttttatatcatgtacatttctattaaagctttaaatacattaaccataagatagagtaaaactctaccaaggcaatattaattattattaacatccaataatgaatcaatgataggtgcacattcacatttcacatatttaaattgcacaatgacgtggtatgtatgtattttattaaagagtattgttttttttttttttggttacaaagtattgttattaagtatattagtggtactcattattttttataggtggcgcccacaattagttagtaatattatttgagttattttcttaagttatataaaactcgatactcatttagaagaataataatatatctataacaccgatgaatgtgctaagcatgagcagacccacataaaagcaagaagagtagtcatcccactaaaaaaataaaaatatatatgtattttaattaattatattatataattataattaaaagtgataaatataaaaataatagttttgccataaagggtttaaatattcctaataaaaatttctttacattaaatatttagtttacttttgactcccctcacaaaaaaatagaaaaaaaacagtacatataattctttcttaatttttagtctcaggtccgccactactaagcactaattaacaatatccttttagtaattctttttattaaactactcaaaaaaaaaaaaaaatgaaagatagatatataagagcgtttaagtcttatattattattattattat

SEQ ID NO: 219087 - DNA, 4232 bp, Cannabis indica
aaattttattccattcctattcctattcacattctcattcccattcctatattttcattcctcccaaccaaacgccttaaggtcaatatataatatatggagttggtgtttcttaggagatacagtacaagggctggtaactttttttcttttaagctataaaatacttagttgggaaaaaaaaaacttgatactttttttcttttgagtaaaacttcatagaacttagaaaatctttagggtaagtctaaagaatacctcaggtgtttcaataaactaccgttttggcactcatgaaaatttttttgttcagttttttttcatgatcgtatatgtatagttatttacgattgtctttaaattttttagaaaattttgagtaatttataatgtcaaaaataagatttacatatgttgttgcaagggtaactgttttttcttattaccatggtaaggactgaacattttgagcgggttcgacctgaacccaagtaacccgcccgaactcgaaccggtgaacttgcaattttttttttaaaaaaaatgtttggacaaggtcgggttcaatatgctatccttcgggcaggtttgcgagttgagtttttgggagtactgggtttcgggttgaacctgaacacgcccgccaacccgcatatttaatatattatatatattttttattacattatatattaattaaaaataaaaaattctaaaattgttatattatatatatgtttaatttaataaataaaaaaaagaattatctgaataaaaaattatttttttaaagtagttgaccgagttgatcaggtcaacccggtcaacccggccaaccgaaacccgccaacccgtgccttatccgggttcgggttcagtttcattttttgaacccaaaacccgtgacccgaaacccgcaaactcgaaattcggtaaacctgtccgatgttcagcccttgtaactgtttaaatcttatttttggcgcattgtaaactatttaaatttttttaaaaatttacatatgattttaaataactacaaaaattttcaaatctttatcccctaaatcccgcctccactttctgctagacaaagtgtgtagcttatgcgacacgaaggaggaaacagcctttcacctgttctggaagtgcagcttttccaaagctgtctggtttggttgcagattggctttgaagctagatgatattccagcagacaatatgatcaacatgatggtatccttaattgacacacttgatggttcagagaggaaggatctgttaacatattttggttgtatcatggatgaaatatggcatcagagaaactctttttgtatccagtatcaagcggttaatgtccagactgctttgttaaaaatcgatcaaaaggtgttggaactcaagtcatcttttcctaacacacaatgttgcattgttggagttaatgaggttcgggaagggcagagaattgatgagagatcggctattggtatccagaattatgtcctcacttatgcatcgttggttcaaggggctgcgggcattgctgcgattagtgttgatatgacagagggctgctggtttgtgagctcccaaaagatacaggctcaatcggtgttggaggcgaaatttttggcaattcttcttgcacttaacaggactgctaatgttgggtggagtgaagttcatatcctgtcggattcgaaagtggcagttcgtgctttaacaacaagagtaattcctgattggagggtagcaaaagtgttctatttaagtttgaacttatctaatttgtttcataggtgttgctttttttttattagtcgtagttgtaatggtatgggtgatggtgtagctaaatacgcgagacttcatagtgatttggcagttttgtatcaaggggagggtgtttcctcggtagaaccccatcaattttattaatgaatgaacaaaagtttctttcaaaaaaaaggttaaggaatgttttctaaccggccaagttgtacatccattccaaaagcatgcaagactagctacattcatccaacgactaatatggataacaatatgtccatcaacaaacaccctcttatcaacaaacaccctctttcaaaatatattattaaaattataataaaattaagtgctaacaatcatatgtgctattgtgctaaacacagtttggttgagaaagaaacaaaataaaagttcaataataattttctggttgtgttatattaatcatgtcatagaggacctgatgactaatagcaatactttattataaatttataattatactgatctttttaataattatgttgacacatgaattaggagtcttaaataactgtggtgagactaatattgtgttacatgcatactaagaaaatcatgttgtgcgtttaaattttcaacaaattaataaccatattgtgttcgtgtgtttactttaatcataaaatatctgcacaaacaagatatgatacgattaagtaaactactgttgagactagggcttttaattttctttatcaatataatgttatgttaaaactatgtatcatgacacattaatcatgtcaatagggtttgtactacatgacacatttattaattgtgttagcatgttgtatgacttgcgcgtgtgtttctgttttgagtttttgatacatttgcgtttggaaattcatattataattggaattgagtgtgatttttggagtaatttttagattcaatgtgtttgtttaatcaagtaattacgcattaattttatcatcagttatactcttcaattatcataacccttattataagaatttggcataattatgaaatattactatttttaataattaattaatagacaatattttttttatgtaattactaattctttcattaaaaaaataaatatttatatataattactacttgaaatctaaacacatcttgtatttttaataaagtgtggttattatattgtataattactaccttaataattacaatctaataaatgctacgcgacttccaaaaaaaactgcatagttgcgtcgcatgttttttcacaaaacgtcactacgtgggactcgattcataattgtcattttgaatgtccatgtgcccatcaaaattgacgtgtcttatgcatcttttgtattccttttaataggaatttgttcgaagacactttgtttattcgaagtatcaaccccaccacccaatataacaacctattaactttaaattgaagaaaaaaatttaaaaattaatttttgatgtttctaaaataacacgataaatgaaaaaaaaaatatatgaatatgacgtcaatttaaaatatgtttgtattaaaattcttgatacaattaaaataagtattaatataacgcgtaagaaccttaatacgatctaaaaaaaaaccttaatacgaatataatacgtttagttagtagtttactcaacatgacaattttttcacatttaattataatatgatatgatattgataggtttaatatgagatttaattattaactatgtaataaatatacaaacaagaaattgacataatttttttgtagggtctttttgtactcgggataaatatgatgtgggtgacacttttggtcatctgccgaataaaaagtgtttctcctctcatctttttgttaatcgttttctctcttctctaataacctaacatttttagttttcaattacatcatctatgtataaattgattattattgattccttcttctaagcttagtgttaacaatgcgataattaaatttaggaggtgaactttattttcttaaaaaaattcttattttttttttgttgattagttgtgtttttttttagtttatcttagtattatgataggccttaatgattgaagaaatgtcatctcttgttgcttattgaatttgacttgatagtactgtgtgcttaatttaattattttttgtgcttaactttagctctttttgagaaaaagttgaatatcatttgtaaacatgactagttgaattttgttatacatgtttgattggttagatgattaataaattggattggacagaacttgcattactaagcttttgaggtaaaatctttgatgatgtgtgcttcgaaaaaatgattttagacaattttttttaacgtttgtacctcttaagtcatcctttttgtagtttttattctagtttaccctttta

SEQ ID NO: 219088 - DNA, 2837 bp, Cannabis indica
tccctctcgttctcttggatcctctcaaatatcagtttgcacttccagctgaatatcttcctggtgcttgtctctttcgtgagggtccaaacaaacttggggttggctatcaatttatccctgaaggcaaaatgccactttttattgggtaattttctcaggctcttcttaccaataaagagagaactgactacttgttttaatgtaaaggatgtcgaaaaaagagagtgaacaactaagtagggctttttttttagttttggatagaaaggtagtgcttacacatagctgatagggacggacaggtagatagctgttatgggggccaattttttttttttttttcaatttttcttagttataattttgtaattctttttattcttctttacaaatttatatattggccccttaatttttatttttacattttgcctcccatatttcctcctgcctcggtccctggatcagatcttatggacaatatatcacccaagtttgtcaataccagacaaagttggtgataaagttggaacttgaatctaatcaaatatgggattaatagagtgatgccttttaaaaaaggctgataaaaaaacagtagattttaggcatataaatattttctttccatttttctactttccattgagggaaaaaaatgtgcatcctataaatttcagttgtcatgctctagtgccaaaaattctatataaaaaagcaaatgacaagacttttttttttaaaaaaaaaaatcaataaatggactccaatctcgtgtacagacattttagaattcatcttttcactcttccaccaagaaaatattagttagaaaaaaataatggattgagaacttttatatatcagccaacatcatcgtgtctacatgtcttagacattgcttcctataataagcatttaatttacttaaagcacgaaggcaataaatgtggtttagaaagagaaatttgacaatccatgcttaaatatgttgcatggtcttatcatatgctatcctattaaactttaaataaaatgtgctacctctttttttagtactaaacttacccctctaataataaaactaaactccatcctctcgtctctctctctctctctacaagttaatgatagagatttggtgactggagatggggaccagcaaaatagatttagggaggggatgagcataaggtgcatcgatttagtgtattcgggctttttgcttaattggttatttgaaatttcaataggataaggaaaaaagtggagataaagggatagaacaggtcggcaacaagcctccaccattgaaaaaggtagattgggaatcatagaagtttattattttctttatatataatgatttttaattttaataaaagaaaatagaaaaaaaagttatcaaaatttttaattttttttattattttaatgactttttaaatgatttgtaaataatttttatgatatagaccaataaagttttaacacatgataattttaagaattacaaacagagctgttaaattgggtacttacagactaaggagaatctcgagctttgggactattaccacaatttttttagattggggagtaatctgcatcaaaataagctttttagggacttatggcacaattaatatcaatgcgtgaatttttttagagcaacttacgaatatgttaaaatgaggatcaatagacttacaagaatcttgagcttggggactattactgcattttttttaattatggacttatctgcatcaaagtaaactttttggggacttatgctgtaatttcctcttttattaatttcataactttagttttaaaataaagtttgaagtatttttgttttataatttttagataataatattaggtgtacaaatataaatgtgtcatgtgcataaaagtatacaccttaccgacaaaatttagtacctttatagatattgcaagtcgaaccatggacctctcacatacctagagattatatttctattgtgctatattaggagaattcaatttgttaatgttatgagagttagttagtgttagttggtgagcccttactttctgttgttgatcagttagtgctatatcaactaagtgaatcaaattgaaatagatattgcggtaagtttataatatcttttttaatgtcaatatcgatccagtctaatataaaccatatacatccgatcctaatctactttactaatgtcctagaaaagacaatcaactttccttagtataggtaaacgacatcaccgatcattacattagtgtaaatctaatgcactaataaatcttatgactaaataagtttaaaatatataatcacaattattttttattgtgatgatattactataattatgaataattatatatttaaaatttaataaaacttatatatattatacatataatcatgtaaaataaacttgtaaacaaagcttatgacaaggtcaaaagataatttctgaactttatttataataaataagattatatcgaaataggattttatttagagcaataaacccaacactattatttatgggatttctctcctcaaaacctaatcatagtatctttatcaggcatactcccagctcagtcacatttatccttgtctatgatgatgacattattatcataggcaataactttactactgttaatgccgtaatcaaagctctaaatgatcagtttgcacttaaagaccttggctccttaagctacttcttaggcattgaggtggtagacatttatatgtataaaatgaaatatatgtacgtgtatataacatgcggaattaa

SEQ ID NO: 219089 - DNA, 4821 bp, Cannabis indica
tatatttctctctttgtttattctttttgtacacacacactctctctctcttataattatccatcggttcatattctaaatatatagttttctgtaatgagagtaaaactcattccaagatgtttaaggcttaaagttaaatgtttctaaatatatgcagtagtagtggtgtagaaccgttgtaactcactttgctcttcatatgttcatctcagaggggctccaaaagcaaagtagtttgcctctcaaacaagaagatgtatggaagtttcaaaagcatacgttcacaggtggaaaaccaggtcaagccctggtaccagcaaggagaccagattctggtggtgtagaagggtcagttatatcccttttggcaaaccactttctagtccaatttgattcctgtcaaaggattttccactacaatgttgaaatatctccttatccctccaaggaaatagccagaatgatcaaaaagaaactggtagaggacaactctgctgttctatgtggtgctattcctgcctatgatggccggaagaatctttacagcccagttgaattccaaaaagataaacttgaactctttataagccttccaatacccacaaacaaaccaagccttccatatggagaactcaatggatttcaagagaatcatcaacagcttaaactgtttcggttaaacatcaaacttgtgtccaagcttgatgggaaagagctgagtaattacttgaacaaggaaggaggtgattggattccacttcctcaggactatctccaagccttggatgttgtattgagggagggttccattgagaagtgcatacctgtggggagatcactctattccagctcaatgggagggagtcaagaaattggaggaggagctgttgggttgagagggttctttcagagccttagaccaactcaacaaggactagctcttaatgtggatttctcagtgactgctttccatgaaagcattggagtaatctcgtacttgcagaagcgcctcgagtttcttcgagaccttcctcaaaggaagacaaggggtttgattggtcccgaaaggaaggaagtggagagagcattgaagaacatcagaatctttgtttgccacagggaaactgttcagaggtaccgtgtctatggcttaactgaggaagccactgagaatctgtggtttgcagatagggatgggaataatctaaggctgatcagttatttcaaggatcactataactatgacatacaatacaggaatttgccatgcttgcagattagtaggagcaaaccatgttatcttccaatggagctatgcatggtatgtgaaggccagaaatttcttggaaagctctcagatgatcagaccgcacgaatacttaagatgggttgccaacggcctaaagagagaaaagctattattgatggtgtcatgcaaggccctgttgggccaacaaggtaacctcaatctggaagaaaagaatagattgtgttgaattgccaacaatatttctttgttaaattttcatttcttgtgttttggcagtggcgtccagggaagagaattcaaactccacatctccagagaaatgacaagattaaatggaagacttcttcaacctccaaaactaaaatttggtgacggagggcacattagagacctggttccctctcgccgtgatcgacaatggaaccttctggacaaccatgtatttgaagggactcaaattgaaaggtgggcgttgataagttttggcggcaacgctgaacagaaatcaagcattccaacgttcataaaccaactgactcagaggtgtgaacagttgggcatatttcttaacaaaaacacaatcattagcccccagtttgaaccaacacaagtcctgaacaatgtttcccttttggaatctaaactcaaaagaattcaaagagttgcatcaaacaatctccaactgctagtctttgttatggaaagaaaacacaaagggtatgcagatttgaagcgaatagcagagactagtgttgggtttgtaagtcagtgttgcttgtaccagaatctctctaagccaaattcacagttcttggcaaatttggctcttaaaatcaatgccaaaataggtggttgcacgactgctctatacaattcattgtcatctcagatcccacgactgcttcaatccgatgagcctgtgatcttcatgggtgcagatgttactcatcctcatccactcgatgatgtcagcccatctgttgctgctgttgttggcagcatgaattggccagcagcaaacaagtatgtttcaagaatgaggtcccaaaagcacaggcaagaaatcattgaggatcttggtgccatggtaggagaattgctggatgatttccaccaggcagttggcaaactccccaagagaatcattttcttcagagacggagtaagtgaaacccaattctacaaagttcttcaagaggaactgcatgccattaaagcagcttgttcttctagatatcctgattcaaaacctcccataacttttgcagtagtccagaaaaggcaccacactagattgtttcctttcaaactagacccttcaattgtacagaaccaattttttgatgaaaatattgccccagggactgtggtggacacagtgatcactcatccaagagaatttgatttctatctttgcagccattggggtatgaaaggaacaagccgaccaacacattatcatattctgtgggatgaaagccaattcacttccgatgaactacagaaactggtgtacaatctttgttatacatatgtaaggtgcactaaaccagtttctttggttcccccagtttattatgctcacttggctgcatacagaggcaggctttacctggagcgatcggactccaaaagtactatttcctcactttctcgagctgcttctccaaagactatgccactacccaaacttagtgagaatatcaagaagctcatgttttattgctgaagtaattaggtgctgctgctaatcccaatccccttttgcttatcaaagaacaaagttcactccagtataacaaagttaacccaactatgcctcctaagttagaactcaactgatgatcacttgtgagttgtgattgattaactagcaacctaattaacgatatcatgaaactgttgtaatcttctaatatttattgaataggagaactcaattgttaaacatcttctatcttaattggcctttcagttaaaaacatttttttcctttaatgagaacaaaccttcgaacttgaacaagcatacctttggataagcaaagtatattctcactcactgtaatactgtatgacctttttttgataaccccaagtacttaattttaattgtatctctacgttccatttcccaccttttccagctttgattgcatcattttgggctgaaatgtgtgtgtgtgtgtgagagagagagaaatagatacttctttgatatgtgtgctttgcacagggatagggtcagggttagggccagttttgggacagggagcataagaaaatcttattgaagtaacgtagctacctcttgtcagtgttttattcatatcattgttactattcacaaaccaaaccacttaccatgcatgcaacaacatggtgaaaagttcaattcaattataaaaatgaaaaagaaccaaagtaaatccaaaatactacttattaattaaatgaacaaacatatatgaggaaaagaaaagggttccaccaaaccacgaggaatggggacacctattactctgaagacactgaaacactgcagtccataatggaaccaaaagaaagagagagaaagaaagaaagaaagaaagcaaggaataaagggaagagccaagaaaagatgggaagtaaaggatactgaagtatgagtttgtgacttccccttttgtctcttcattttatgaataatttcatttgcttttttctcttttgtatatattattgtatttgtttttttttattattttaccagcacagcagtgttgaattattgtttagtattagctcactcgccatagccttctactctatgtgtcagagacgcctttgagtactgcacggcccaccatgactcgacagaaagactggaaaccaaacgtgcgttttggcagaagggtagtggaggctaactagtgtttagtaggactaccagtaccacttttcgctaacctctcttcctcatccaacctaactatactgtttcatcatttttacttcctataacagtagtgtttacttatgcagaagattaattaagtcattttctaaaccacactcacactactatatgaacggggtggtgtgcatggtttacatatatcatcgtataatttaataattataaattaaacatcactataattttttttcttaaaataaattcttccttactaatattaatcaaacatctcaataacttaatgttcataaccaaagtttcaacaaaataacaataaactattaaatttttaacaaactttaaaaatttgtagtacatccactaaaagggtgtttatgtagatttcattatctgttttgatgttataagagttttgatatttttttttaatttttttaattaatgtatatgttgtagttatttaagattatttaaattttttaatttttttctaaaaaaaaaaattagataatttacaatctatatctaaatataaaggaatgcacaaagcattctaggtggcatcttatatgaaagtttctttctaaattctttgctatctccatttatcacttttattagttttt

SEQ ID NO: 219090 - DNA, 4772 bp, Cannabis indica
agccttgaagacaaggtgtcaggtgaacatgctatgatatctatgcttctttctccaccggctcttgtaaataagctctcaagtttcctactttctgcactgtctttactttggtcaagcaagtcaaatgctgtttgacctttactgtttcgagtattaatctccacctttgttttgctcatcaagaactcagcaatctgaaacacaagctcaaaaaattcagtaaaaaaatatacatgttctaatacataattttgattttgtaattctttacctgatgccgccctcgcgaaatagctagatgcaagacagtgttaccataccgatcctggcagtgaagaaggtttgtaccattgaagacatataccaagaacaccaaagcttctaattttccatgtctaactaccaagtgaaagactgattcctcctctttagtgaggtagtgaagagctgcaggtgcttttcgcgtaaattcttcaaggactgaaacttcaccatgtattgcagccaagtgcagaggtgtgtaaccgttgttgttgtattgtagagctagatttggatcacgcctcagcagcatccaagttatctccctatgcccttcactacaagcgtagtgcaaagctgagtttgctttctcatcaatcttttgagccaaataaggactcgtatttagtatctccctaacaacatctgttaaaataagcataatcaactacttatatatgttgcaaatgaagaaaagaaaaaagggtgatcaaggttagtagatgattatacctgtgtgtcctttagttgcagccacaaggatgcaagtttgatcaaggccaacttcttctgactcaagaataccaggctgtttgagtaggagattcacagcgtcaagatgaccaagactacaagccacatagaaagcactttgtttatcagagttgagcttaaaagccgctctgggattagcttccaaaagtagtttcaaaacatctaaattcccctggcgacaagctatgtggacaggtgtctccaagtctttgttctcagcagcaatcatttcaggacagagcttaactatttcagatacgatttctacatgtccaaacattgtagcaaagtgtatgactgtgttcaaaccgtctgttctttgctcaagaataccttcattttctctaaccaagctaaggaatgtggatacatcgttgctgctaattgcctccaaaagccttggatccatcattactgtgttgttataggtataccaaggctgtgaactgagagagggttagtagaggtattgtattcaagtacctatatttataagtaggaaatctagtaaattcttggaaaatatggtggaacttgtcattaagaatccaaataagttgaacaaagatttgggtacgtagtactctacttttttattcatttgtttagtctgttgttacagtatattctttaccacaacactaaataaaaaatatatatttatagtctgtgaagaatgagactcagtcaagttcaaggagtatgaatcttgaccaacgttctctcattgtacttgtactgaaaacgaaaaggatctctagaagttattggaattggaacccttcaatgggtttgtggaactgtttttaaaaccttattgggtgtggcccaacattattatctgccaagaggcccatgacatcagtccttaggaagaaattgaaaagaaagttgcaagaaatacactttattatttatttatcaattctagggaagcttctctcaagttttccattaatctgcactaaacaaatattaatggacttctgtatctaagtcctctgaaaagtataaacttatctaacgtgataatttggtaatgtatactaatactatattatttacgtagttttacacagtgttcaccaagttattagttatatatggttgtcgtactttatgttttctccaattaaaataggccaaacatagtctcctatacaagtaatgtacggatgtaaagatagatgatataatattgagacaatatgattgattactgtggagccaagtaaaagttcagatcagaatagaatttctaaaaagaaataagagacagaactcagttcccaatataactataacaaacacttatggacaagtagtgtacaaattttttaccatgaaaggaaatgaatacaacaacttacaaaggtcaccttaccatgaaagagaaaacagaaaggagagcatgtgtacaacagctagtatatcctatataatactcctacagaaactttaaaacaacgacctataaatttgacttttctgtctaacaaaaacaaaagaaaaataaaaatcaataggagtgatatcccttctggaaagagctctcaacatcagagttttcacttcccatttcaagatcatcattatccccaattgcatcccttctcattgatctccaccgattcttggtcaaccaatggtcaacgagcttcttcccaagtgcaataaaaaccgttcccatggttcctccgctgaccaccagagccaccacagacaccaactctgccttcttgcctgtcggcgagatcacccacatggccgcaacatagctaatagccatgaaagccacggctgcccacatcaccttgtgagcaacagacaacaatctcatctgggcctttctccgatacggtatgatactcactaaaaccacaacgatggccaatgatgtgaacagagccaagtcgttgcttactgcaaacaccttgaaagctgtcgatttccccaccgttgactttcctttcatctcaccgtcctggtgcacgccgccaggaggacttattccggcggtataagtgaccgtggcgatcagaatagccactaagatgatggtgttcctagcgttctgtaacgcctctgcgtagactttacgacgttgctgcttgtttcgacgcttggccattattccagagagaatttcttcgtgccttttgcagagaatttggccatcatgtcctaatggtgataatccctccggacccttttcggcaggaagtctcggggaggattttctggactggggtgaagacacacaagaagatctcgagagaggagacgacatagaacttgatggggttttgcttgatgagggcgaacatgtatcaaagacttgcatttcgtgttccttaaggattctttgtggtatgatatcgagtggaacaggcctagagctggtttttggtaattttggtagaaaacataacaattctgtgcttcttttggctctttctttaaggaacaaggcttcgagacgttgattttcgacgctatctttagcctggtcaaggatgtcgagtgctgtaagtcccatactgttcacacaatttatgtctacttttgctctttttattatgtactctgccatctgatacaaaaaccaatattataattaaacaaagaacggactatattaatttatcatgagtgttgataattgatacatatagcattattaatgtaaattcattttcaccttatgatgtcctcctaagaccgcaagatgtaaaatgttgttgccaaacctatcttggcagttaaacaaactcatcccatggcagacactgattaagtacattaaagcgtcaattcggccatgtttcacagctaaatgaaacacagtatctccctctgttgtcagacactgaaaagaaacagccgccttgttaacatatccttggaggactaagactttatagttgattgttgccaagtgaaggggagtgaaaccgtccttgttgtacttcagagctagctttggatcaagcttcagaagcataccggtgatttccttgtgccctttttctgatgcccaatgcagtatcatatttcccctctcatccatcgtttgagcaaactcactgttcttgcttatcagctccattacaacatctattacaataacaaataatcaggaaccatataaacagaagtgttgaaatttagtttttatctttataatatattacctgtgtatccagctgaggctgccgcatgaatacattttagatcatatccgtcttcccctagacaaattaacccgggttgagccaatagcagactcactgattcaacatgacctgaactgcaagccaagaacagagctgtctcgttatgagaattgagctttcgggcagcctcagggttggccacctctagtagcaacttcaagattttttgattccctttgcgggaagcttcatggaatgaagtctccatgtccttattctgggcagccaccatgtcaggcctcaaattgatgatgtaggccgtcatttcctcatgtcctaacttagaagcgaggtgtaggacagtgttcttggactttgcttccagttgatcaagaattgctttgttttctgaaccaagtttttgaatgcttgtgtgtcattccgactgactgcctccataagatttgtattcattgtcataaaaagctttgagattcactactctctttttgttatctttcttcttttggtgctatgtctctagttatgactttcttatatagattgacaaatgaagtagtgttacgttgataccggtgtgaacaaatgctgacactcattttcaaccccacgtgtggaatcactcaatattatcattatttttaattctaaaattatgtaattttcaagctcatgcaaattaaaattccaagaatcctcaaagaaggttcagaaatagacaatatatttaaggttttcttatctttaatggatgag

SEQ ID NO: 219091 - DNA, 7154 bp, Cannabis indica
aattgtcagagatgatggcgcgattccgagaaagaaaatcggagagaaaatagtagagaggatcagggaaatttggtttatttatttggaaaatatgaatttttttaagttaagcctatttatatactttttagtttctcatatttttgccatttttatttattttttcatattttgttgaattatttatttttttctacaaaaagtgaatgacattaaaaattgagaaaattacaaatatactgaaatttgagttaatttttacaaaaatactgtcacattttttttttccaaaaatactgtatttttataaaataatagtggaacacaaacataacaactaaaaacaacaataaacaactaaaaacaaccgtaaaataacagtaaaagcttaacacagtacagagtacaaaatttatacaatatttttgaaaaaaatttcgccatacgatataaaataaaaaattaaatttttttatgtgatgtaaatatcccatatttatttaggaaaattcctctaagatttaggcggcttggtctgaattggaagtggttgtggtcgaatccaaaataagcatgtcttagtcggtatcaaggtcctatctcggcatggtctcagcctatcttagaatggtttgagtcagagtcctgtccaagttaaacttttgattggattcgtgtcctatatttttgtcttatttgtctctttccatccgactttcttgggctttgtctgtggtgcaatgtggctctttctatcaatgggctttcattttatttctttattgggcattttctcttcctttaatagacttcagaaaaataccgttttttctcccccaaacaaacaggaactatatatttaattaactttattacatcaacaattatggctgctaaatgctatgattgacctactgctacatacctaaacaaatataaggtgatatggagactattcagtaagatcaattgtttttcactaatattttcttaaattgttttcttaagagttatacttgatattagaattacattttcttaaaactaatcagtgatgataaccatgaatctaattctctaattacatatttgttattagaattttattaggtttcaaattacccattataactaaatagtatttgataaaacagtgtagcataagcattgtacaaatatcatgttcatgcctcatgtggtgtggaatgtggatattcataaacgcttcggaacaaacttccaaaaagattttatttaagtcttaatcttaggcttaaacttaaataagcatatcagctataagcagtgtctttctttacggtataaattgttattacacctcatcatgagatttatttatctttgaaaatatactagctagagagctgaggatcaagctcagcatatcagaattaatcaccacaattgacatatgtgtagcccacttggagagaaccttgttgaactcctcttccattagtatctaatggtttgaatatagtgttaaagtccaaatctaagcccccattactgcactgatccacaatccttgctgttatggttgctccagttgccacattccgaagctgcaaaaatattcacacacacacatttacaccatattcaaacaaaagttaccgaaaatcaaagaaccatgcaaaaggatcatagatcatgtgagtgcatatatataaagtcataccctcaaacactttccacaagagtcacggcctctaggtccggatggtccacaaaaggcagtccatccatatttgctgcgccatgagtaaggcttgttagcatcccaagtggagcaataagcactagcagccatcaagtcccaatttttctgttgtgggtcgtagtaatggtatgtggctcttacaactgtttctcctcctgctggcgctggtgtaacttgacaattgctctggcagccagtgatacaatactcgctggtggtgccacaccacccgtattggctgcagcactgcctgttcgggcatatagcgccacccgcttgtcgtccgcattgctcagccgttgctccaccaatggcaaccaccaccatcaaaaccaacctcactacgcaaagcttgctcattgtttttttcttagacttttgtgtgtttaagaaatgatgggttgaagtagcttagcatatacatatataaatatatatatgcattatgcatatttaacttgacttttgtgaatggaagttgggttttgatgatgttagcccatgtgttgggattattttaaggagagggatagggcagtgctatatagtggtacgtaggttgtgaggaccatatagagcattattgttattagatagtggcggtgttcaacactattttgagtgagatcgatcttccaaataattagttatattttataataattataaaattaaatggtgtgagacttaatattttatcaatatcgatttgactgcttagttagtgttgcactgttggtgcttattggcatttcacgaagattaagtgattgtttgttttgcgattagttagtgatacttaaaaattattaagttaaattatatggacccgatatttagttgtatcaataacgatattatattttaaagagtagtgctaggcactagtagcactttgtgattgtttagcaatactcaataaaaattattgcattaaattacatcttaaataatgcttggacgaccactagtgactattaatatttctcattgtggaactatatatgtggtggacaatgggtccaagttggatggctcttggaagtttgatcgtttgaatggatccaacgtgagatatgggaagattgatcgatgaggttgaggaccagttatagctggtggcttattcattattggagtgtgaagtttttttcgcaaggttattggagtgtaaagttgaaacaaaatatatggattatttctgaggcggctgtggtgttaattaaatgcataagaatattaaaaacagtatattaatgctcagcattatttcatatttttgaaacaattagagtgtcagggccaataataatttatcttatatccttatttaatactttaatttgagcatactttttttttattattgatatttttattttagtggcgtttagttagaagaaataagaatgtaagaataagaataaagataaaagtgagaatatagatagaaatggaataggtaataagattcaaatttaaaatgcaaaaatagaaaaaattgataagaaactaattaaattttacattagaatgattttttttacatttaaaaatagaaatggaatagtaatcggtctcgttgttcctttaatattgcttaagtaattaataatctactatgtatgcgagcagttgtcatctgctatgctttctatttgcgagcagtttatcaattctacttcgcataaagagtcatattctgctttaagtaaacttaaacataatttgaataattcatcttgtgaattactttgtacatctttgattgtctatatgaatagttaggcattctattcatattttaggttaagcattttctcaaagcattttggtacctcgtttaatacttttctataaaatgtgaatcgttagaaatttagcttcgcatgtagcttaatgttgtttttataagttaaatctcatttacaattgctactttttgtttccttttgactttatattgttcatagacaactttaataattttggaaaaattttaaagtggagcgggtttgcaatatatcatgtatttctagatgggttctagttaatcatacacatatatgcccctcaagtaattttaaagaataaaactttataattacttgaataatacttcaactttattattaataattgaattttgaaaaatacatcaaaaagagattacaacattcttatacgtatactggtagtaagatcgcaaatgttcaacatttcagtagttttttattagcgagccgttaggctgagccaatttataaactccagttccaactattgcctcgattatataaggaccttcccagcttgggttaaatactcctacagatgcatctctcgtgtttgtaaatactcgtcttagcaccaaatcaccgacattaaagagccttgtcttcactttcttattgaaaatatctcataattcggtgttgatatgctgcattagtaatttgcaactcagtatgtttttcttcaagtagatccaaagataacttcaagagttcttggtgtttttcttgattatagaaatctcgtctgtgggtcgcgatattgactactactggcgacattgcctccgagccaaatgccagcgagaatggtgtatgcattgctgctgttttctcagtcattctgtgagccgaaagtacttttggtagttcatctacacatctaccttttgcaaagtctaacttctttttgattgtatccttcaaggttttattaacagcttctacttacccatttgcttgaggccttgagactgacgagaagctcttaataattttgttcctttcgcagaactcagtgaacaactcaccatcaaactgagttccattatcagatactatcttaatgggtattctaaatctacaaataatgttcttgacgacaatgtcgagaactttcttgcaggttatggaaactagaggttcagcctccatctactttgtgaagaagtcgactgccactactgcgtactatggtcctccttgccctatgggcaatgccccaatcaaattaatctcccatgtcgcaaatgggtatgacgaggtcatcactcttagttttgttggtggtatgcgaggtatatgtgaaaatctctgacacttattgcacctcttcacaaattcatctgtgtctttatttattgtcagccaatagtatccttgacagattatcttctttgacaagctttgccaacctacatggtctccacaaaagccctcgtggatttctttgattatctcgcttgcttctgtggggagaacacaccgtaggggaggcattgaataacccctcttatacaagtttccctctaccatcgtgtagtgaggcactgaatataagagctttcgtgcctcgttttgtctgttggaagttgtccattgagtagatagttaactatgggcgtcatccatgtaggtgaggcgtcaatcatctcaacttctttcttttcacatatactcggttcgtttaacacttctactggtaccaaattcaagttatcaagttcgttttgcgaggcaagttttgtcaaggcgtcgacattagagttttgttttcttggaatttgttcgattttaaaataatcaaactttttccaagttcttccaaaccttctccatgtattttgccatttttaaactctttgcctggtatttcacctagaacttgatttacaattttttttggatgaatcaactttagtttcattactccaataatccaatttacaacctaagagcatcctcaaattgggacctcggatatatctctctatattttacatttcaccttttgtcaaaaggaaaatttacaattacaaagctctaaaccattctgtatcacttaacccaacctttcacggccaaatactatatactctttgtttaaccatttcttttactgtacaaattactctatctatgtcttcattttttgcattccatattttgtcattcatagccttccaaatgtggtagactaagctcgacaaagcagccgaaaggacttgttttttaaacttgttggatttgcttctttcaatccaccgcattagccttgttaccaatggagtggatgcattccacctcaacaaatctttaatcctctatagactctgttgagagaatggacacaagaagaagagatgatcacaagtttcttcctgtgtattacaaaacagacatcctggatcattaatgatcccaaatctatacaatctttctcctgtccttagtcttccctatgtagcagtccacataataaagctgtatttgggaatattaaacttcccccaaacttccttactccaatgcattttaggttgtggagggactaatagtttgtatccaagagaggggtgatacctggactgggtgaattgctacacatccaccatatttttaatcttattcttggcctctaccagttctttccagtaccaactcccctagatgagggaatttcagccccaccaatcttcttcccgaatatatatgttgtgtatccattgaacccacatgttgtcttccttattagctatcccccacacatatttaaacattgctgctttattccattcaactacttttttaaaaccaatacctccttctgatttagcctagcatacaaattcccaagctattagacccgagccagtaagagtatgttggcctttcaacaaaaaaaagctctacaaatagcttcaatctcgttcactatcttcttaggcaaaatcattatctggctccaatatgagtgaatagtcatcagtattgagttcacaagaactgcccttcgtgcaaaagagaggttcctggtactccaggtcttaattcgagaagtcattttctcaggtagttcttaacaatcctgacctgaaattcttttggcacaaattgacagtcccaaatatctaaatgggacatcatgcctacaaaatccaaacatgtcttaattaactgtgagtcaccgtaacacaccagattcttgacttttaacacttcagctattttcaaaccagctatcaaggcttcatactcagcctcgttgtttgtagtgtcaaattagaatcttagggcatagtgaaacttaaagttttttggcgggatcagtatcagcgctgcacccaagccattttcattaaatgctccacccacgtacaacttccaagtgtctgtgtctcgctggataagtggatttttatctagaattatcctttctattaggaaatctgccaaagcttggctcttgatggatgttcttgggtgatatgttatgtcgaactgccccagttcaataggccattttatcaatcttccagaagtgtccggttttgacaaaacttgccttacgagttggtcagttaacaccattattggatgtgcttggaagtaag

SEQ ID NO: 219092 - DNA, 2240 bp, Cannabis indica
atttaatatataaatatttttgtaaggaccaataatctataattatttatttacaaattgagaaagagagagagattcatgggattctaggactctattatgtgtattttgctaaattgattttttaggaacatggattttgctttcaaaacagtctgttcaacggccaaattaaatggaccccactagcttttttggcttttttcctaacctccatcataacctaattattggtttattttatttaataattatcttaacattttcactaacatctttgttaatcatcttctaaatttgactttaccgacaacttaattgtcagattaattgaatatagtaatatatgcataatattggttggggtattacttcttttccaacagtatatatatatatattttcttatatgatcatgtatagtataatattttgtatttttagaaaattttaaataatattactcttaaaatcatatattcgataccatagaaaagaaagcacttactggcaagagtgatatgcccttaattaaattttccaatatatatagctgtagagcccccagaatcctattataatcacaaatgcctacttatataattatattattatttttttaaattaaaaataaatatttatatgaaagtgaacagtgaatttctgacattatataatatctttgaatttaatgagcagctatattagatagacagacaggaaaaaatcaacggtgttggaagagtacaacgtcattgtcttgagagttgctaattttcatttattaattaattttaagtacagcaattagcaacggtaataaaaaaaaaatttcaattcaattaaataaataagacagagtaacgttgttattctgtcacggattattatcacttagaactctgtaattaaacatgcttaaacttaaaataaccaaataataataaagaaacatgttattgcatgtgataatgttaaagctaatactgtaattagtacattaatctaaggtcattaacgactaatctacttcttcatagtataacactgtaagagctgactgaactgagttactgttatgttttgttatgttatgttctctctttctctttctttctgaaactttgctttgcataataaagatttttcttcttggggaagaagaagaagaagaagagaagaaccgacaccattaatgtgaagactcttatttattctttcacaccgtaaaagcagtacttcttaaatattattttgccttaattagtaattactactctcatctcatgtgtacggcttttcttctccaactaccaccattataataactctctctctcactattaatattcctatactctaatattactctacgtttactaaaatagaagaagaaagtagacttggactaattccatttcttaagcaacttttcccaaggttcattatcttctctgcattttcttcttcttcttataagcttggaattttctcttttgcaaattacaataagaaacattcttctgaagcctactgtgttatttggctctgtcccctttgtttttattatataggaacttgttcaaactaatctctctttgttgtcttaattactaatcatttacattattttcaggagcaactgggttgtactttgttttggagtacatgaactatggattctaagctataatctttaactgggtcactttagttttgagagtagtcttgttcatcattgtcaaaaactgatctttttttacaatgggattttttttatggtttattctgttacttctatctgaggttatattccttccttgttcataccaacaacaaacttctcaaacccgagtcttgcttcaactaaggaggcaattggagaatcccaactcattacaagcttgggaaaattactatggtaacttgtgtaacattcctacctctgttcatgtcagtatcttatgccagaacacttcagtcacagagctgaaaataatgggagataaggtttctaatggtgatgagtttaatggctttgcaatccccaatcaaactctttcagaagctttttctattgaatctttcgttactacacttacaaagttaagcagcttgagagttcttagattagtatctttgggaatttggggaccacttcctgataagattcataggctatcttcacttgaactcttggatttgagctcaaatttcatgtatggttctgttcctccaaa

SEQ ID NO: 219093 - DNA, 4953 bp, Cannabis indica
caactagaaatttagacaagggatagaaataaatgttgaagggaaaagggtatttagattgagttagcataaaaagaataagataatctctatattattataaaaagtacatgagaaagttacagactgaggtgtcgaccacattcaaattaatattaaaataggggatacgatattctgtcaatttaatgttcgagccataaaaagagaaaaacgaggcaacattccacaatcctttcaaaacaaacattgggtaaatggtattaacatataagtatagaacaatcaccactttgacattcatcaattcagacacaaatacaaagagaaaccatcagttgttgttgctgctgctgctaacctctgttcaacttacaaaatggaacaacactggttcgtcttcttcgcttgcttatagaacatctgacataaaagcaactaatcgtcagaatcacgattgcacaaaaagatgttagggtcaacagtttaagaatctattagcatgtcatggcacttcttcgtagaggaacttttatcacttactaaataatttcatttaaacacgagagtattaaaatcccaatctgcagggtacttaaagtttctctttctacttctatgagcttccagcaagcacaataccataatttcttgagttctcagccattggaaccaccttttgtttcataactttttgatttatttgtcaatcgtcttaaaattctacaaataagtaattgaaaggtctatactctgtagtttacagcatcaagcctcatttaaaaatgcccgagataaatatttcactacacgaattgcatataacttctgtaattcaggtttaatatattataataatggtaatgaatatgaaagtaatgaacctgtgatgctgcgctaagatctgaactcttttcaactaagctgtccaatttctcgcctcgtgcaaggacactgtcaatagtcttatgctgtaacaaagaaagaggggagagagagagagagatgagccgggataaaatctacatcataatgtaaacaaatatatacccaaaagataaaataatcatttaaaaaaatgaaaaaccttgcaagagaacaaatacataaagctaaaatagaacagcttgagagaataaaaccacattcattataaaatcaactacactgatgcagaattgcagtactcacaaggataatttttgtttcatctaactccctctgaattttcatcaacttatcagcttcagcaggatcctgaaaattaaatgggagagaaagaaacacaatgattttagtcagtcttattcgacttcataagagaaagaaaccttaattgaaaatagcttaagatgttactgaaaaaagaaaacaaacctatggactttaaactccagatgcagagtaacaaaagagaggtacctggaattttgctagagcttcattcaagtacggccatggctgagagccatctgcttgtgcactcctccacgattcaccaaaagttttctgatactcgtctagcacctgccaataatatacatttatcagttacccctaatccgtaaaattataataattattagccaataattattaaactgctagataagtgcccgcaagaaattaaaccccgcatcttaggcctgatcacttgtctgaacccttattattatgtataataaaataaacacccaacctaagatcaggaaagagagcacactcatgcaccactctaaactaagtacaatatcaagtttttcagccttctaggtaattttaatgtttgaaaggaaaacaacaactctaatcttattaaaaagaagattcaaagtatctgaattaacatcttttgtaaacctagtgtgatactgataccattgtcgtcacaccaactctaatcttaattttatacttctaattgatgtgccagtaatttgtaactctgtaattaatgcgaagtatcatacaataaatgacactttctaaaataaaccactttgttacaatccactgaatcatgaaaacccaactcttaagaaaatagaattgtattatagggcaagtatattgatttgtaatgagacgatagtaaatgactgtagagatgaataagaaaaaacaaaaagctgaactttccttcccttcctaatctacttaatcgtgtgaatgatttaccaaaacttctatcctaaatatagctatttgggcaccctcctctcttaggctagcttttggaggtgagctttaccaagtggttgtatcaccctcaagtggggctgaccggaagggttacctatggaaggggcgacctgtagattaaacccagagtaggccaccgaaaagtagacgaccgtggagtggatcgtcgtggacgtcgactccaaaggggaggatattgttagggtcccacattgaccaagtatgagattggttagtagtataactacatggcaccctcctctcttaggctagtgagctcaaacaagtagttgtataatgtaaaatattgataacaagaacttgcacaatagacaagtaagcaaggccataaatggtgaaaagggaaacacaatgtgacacgattaaagcatgaatagaaaatgtataatttaaccaaagacaatttacaaaacacaatctaaacaaggaattgcacaatgaacataaaaagaactcctaatcaactaccctacatcttaaaaatgtagtgaaatacatagttcacaagtttatttacaccacaataagaaatggcaaattccaaatgcatgtgatcatttgaacattataaatttaattattatgaagcctaccacaaaatcatgaatcaagttctcatgatatgaagagtggtgaaaaataaatttgattcccaaaaagttactctaacttactatttacttttgacaaacctcaaataaaaattttgagaatcagtattgtgttagaaattagtttctttaactaacatttaactcttccagttgattctcttcctggcctatatatatccttgtacgactcagttgagattatagcagaaataaacattttcttctgtttactctgttcttgaatatctcacataatatcagacgaaataaattccaccatcgatccaatggcaagacccaatactcattctcgagacaaatctgccccatctaaccctatcaatccaagtggagaccccataattggtgatacttctgctccaatcatttcaccaccaccaatgctccacgacgatctcaaaccccaaacctcaaaatcaatctcacaatggatctggttcctctgatcctatcaatcctcatgatgatcccactcctagtgataattctgatccaattctcccaccacctgcagctccacaacaatcccaacctcaaacaaatgatcgacctgcccatgaagatgtatcaagcccattcttcctgaggtccaaagatcaccttggcctgattctctttccttcgttctcactggtcctaactaccgatcttggaagcatgtcatatccatggcattaggtacaaaaacagcttcgtcgctgctcactgaattgtcgacctcctggcaatcctcctggaatgatcttgctgaaagattcaatgaggtaaatggccctagaatctttcaattacaagctcaactcagccatttgcaacaaggagatcaatttttcacctcctattttacaaagcttaaatcattatgggatgaactcaaagagttccaacctactactacgtgcacctgtggtcactatatcgtgtaaatattcatagaccgaaaataattaagatcctgcaaattctaattcattatagtatcactaaatgcaaggagtttttaattcgaatctctttactttatttgccaattcttcatcaacctctttgcaattgcattcacgtataaattagtatatgagccaacatgttaaagaaattgatcgaatgaacactaagttaccttattaagcacagaaaatgagctccgaacggggtaatggtcgtccataaagcccaacgcacatagaccatttctgttgtaagcatgtaccttatactctacacatcaacaaaaccaaaaaccgtattagccataacaaacattcaatcacatgatttcaagcaaagcaaaacaaaaaattttgcatattcatatcttccgaatcaaaaaggagaattaacacagccaaacacagtccaattcaattatcaaaatttacccaattacttggattaacaaacaattataattcaaatctacataaaaaaatagccaatttcgtacaaaattcatctagaccaataatcaattttttagtttttgaaataaccaaaaatcaaacttcaaatcaaataaatgcctaagaaattgagaaaggggaaaaaccttcatgctgaacggactggcgttggccaggaggggtgcgtttagctacggtacggccaacgaagacgatgaactctttgacgctggacctctggaagtaaccaaaatggcttacatcggaagcgtttgctagaatgatggggtcggatccttcgggttggcacttaaggaccagtaaagctgtgatcttcatctttatccctctttgatctttatttctttctctctctgaaaaaacacaagagattgaatttgacgcaaacacagaaaatagaatagagagagagagagagagaatcggggggtatttggttggagaagacggtgatgaacgaaaagaaaagaaagaagaattcggatcggtccgtaaagggagctcgaatcaggtgcgatgcctttattatatttgctttgcattcaccttatgtggatccaattgattgggccgacatttcaacgttctcttttcgaattattttgagataagataacctcacgcacaaattactcactaaattttgttatttgtgaattcccctaaccata

SEQ ID NO: 219094 - DNA, 10041 bp, Cannabis indica
cactggaaaatgggatttggttaaacctactgatcacatgcttaactattattgggactttctctgtagcattactcacactctcaagtagtaagtttagtaagctttattgggtattctcttgtatccactaggaatgtttatagaacaactttgtaaagatttagactgttgaataaggatatgatatattattagttccctttcaaaaaaaatatatccgaggtattttaagcgaactccatataacatttcagatgtttttgtacaaaataacaaaactcaaaatcaagctgcaaaactggtaaaccacactctcactcaataataataaaaaaaacacaatcaaccctctttcaccttattcaaagcattaatcaaacaattgtgaatcacccatatatgtacgaaaataataaatatttttgggaacccaaactgagctttctaactgctgctgggttgtgttttggtggtggtggtggtggaatgggaagacttgccagtaatgactttcttgaccttggagatagagtgtttcacctttgacccaacccctgaaaatattccttgagatttcttgcgtgcagctttggcatcaatgtcttttgaggcctgtactaggattggtgcatctgggtggtcttcatcttcatgttcttcctcctcttcttcatcatcttcttcatggatttgactgtgttctacctctttgctgttttttggctccttttctttggataagtgttcgaccacttgggtattttcttctgttgagctttgtatgagttcagatagcgaaaccactgcttctttttcttttccacattgctcatctttgatttctctatcaccagcccacgtttcgtttctggtttttatgtcttttgattccgctctctgtgaagtttcttcaactaactctggaagaattggtggagaatccttatcgctggttgtgatttttgctgctctgatctctgcgttgtctgcttcctttgaagtttggtctttgcatgtttcatgtgtgctttgggcttcttcaacgatgaggctctctttcttgtgtgaaagttctatacttgttagtgcctgcatatgagattaatcgttaaactattttaactaacaacgtgtttgagcaagaaaaaaataaagaaaagaaaaggagtttctgtcactaacctctttgtctaaaatcacctttgatagtgtctcacgttgatactcttcattggtcaaatcggttgttgctaacttgagatgattttcaaagatttcaacattttcaatagtggtgagcgattcatggctctgtgttccttcagagatgaagtcggaagctatctcacgttcaccaatatcgagagtgggagcttccatggctgcccttattggttctgcatttcccttctcttcttcagtttctcgtggctctgttttcggcacttccttgtgggtctcgctttctttcttagtctcttcatttaaacttccctgtatgtcgtcaccagcatgaatccaagactcagattcagagacttgaatcttcttaggctgttccttgtcaaagcatatctcttcaacagtcttttcaactccataatctttcaacacctcttcatcttcttcaatattggtgactattgccacagcctcatgcttgtgttcgttgggaatcaaagtagaagaagatgatttctgaagctgctccgttgatataccagcagggccagcctggtcagtgatgagttcatctttgtcaactgggagaggttggtcgttggatatctctctgttaataacttccctgtttggagaatcttctttcgactctctctcaatagattctgtgatttcttccactgttgaaacagagactaaaagctctctggtctccttttgggaacacttctcttcatcttcctttgtgatcacttccaccactgttgtgctttcttcttgtacaagctccacttccgctatttcttcagagcatttgattattttttcctccggttgagcttcagttctcttcaaattagtttcatgcactatttgagatgcacctttgtttttatcttcagtttcattagaacccatcacatccacgattttgatctccctggggttctcctgcaagcatgtcacttcccctgtttctagagcacgagagtcttttatatcctcactgtctagaatattcaatgcttttttgtcctcttcatctgcatccttgaatgtggttgtagtatcattctcttgctcctcagacaatggtatttgaagttgatcatttgatatcacatcagagatggcctggttggtaatgctttcatctccatttaacactgtacttggaatttctacaatttcttcttcaactttgaaatccttaagctctttcttcaagtatgtctcttctcctccatcttttgccaatgaatcgtttacctcattgtcaagaattcccagctccctcgtgctatcctgttctgtcttcttgactgcttcagtagctataggttcaggctcttttgtaagtaatgcagatgacaacacttcttcaacttgttctgttgaaattgggcatgtgacttcatcttctccaactgctcgagtgctttcttgattattatactcgggcaatgtttcaggagctgctttgatatcttctttactttcatctgttcttagcctttcctcagccacctcatggggttctggcacactgtgttctccttttgttaagggagtttcttcctcaatggagtcgctactttgcatgtcagattctgtaattacatcttcattcgtcttgatggtggtttctatttctgtttcatgtttttggtgctcaggaagtaatgtagaagatggtgcttgcagttgctcttctggcattccttcttcaagactctgaccattttttatttcatcttctctaattttatccgtgtccagattttccccttctaggattggcttaattgtatctacatctccaatggcagcgtatagtttggcttcttcaacatcatttacattcaaattctcctccacaatatcctctatctccatgtctttttgttttgaatgctgagactccaagtcgtaggacctttcttcaagtttcatggtttccactttgtctggtatagagcactcagatttgggaaactctagattcctttcttctggttcattatcaaatgcgtttgccggcccatcaacctgttgagcttcctccatacttgtcatttccattggctttttgacagttaaaatgtcactcttgtccaaaccattaccaacttcctctttgatttcctcttcaatcttttcttcaggtaatgcaatgcaggtttgtctgtttatgctttcttcgtcaggtgggtttgtgacaagtgtttcatctttcttggtagtgttttcttctgtgtgcgaatccacacttgatgtattctttttggagtctgtagctttgagaaattcagtgattattgggtcagagcatgtctcctgtttagtaagattctggttaatatagttaactttcaagaagtagctaagttaagcaaagcacaaaaataagtacgtttttcatgatgatagtagctgaccttaaagactctttcatcttcattggactctagatgaaattctcgcaggtcgctctttccatcaatgatttgttcctttgtcttttcacttttgatatctttatcaattccctcatgcacctttttatcaagtataaagtgttaaaacaaagggacacttcaggagacacttaaacttttcttaaggtaaatacatacctcagttgtgatgatcttatctgtgctttgtgtttcaccgacataattgccaaccatcaatgtgggctctacttccctgcttatcacctttgtgtgttcagaatgttctcccaatgtttcactcttctttgtcaaagtaagtgtttcttcaatttgatctttgtgaactgattcagatgaatataaaagcatctcatccagatcacctggttcaagattctgaatccatgctgataaattagcaagtgaacagacaaatactggctatatcttttacaggagatgaaattacataaatagcatataaccacattaacttctttgtaatagaagttagaaaacattgaattaataaaatggtcatataaattaatatttaataacaaaaatgtagttaaacatagcacaaaacgtttttcatgtttattttagctgaccttaaagactttttcatcatcattgggttctggataaaattcttccaggttgctctttccatcaatgatttcttcctttgtaattgtcagttttattagctttataaattccctcatgcacctttttatcaaatgtagaatgttaaaacaaatggaaacttcaggaggtgcttaaacttataataagacaaaaatttaccttagttgtgatgatctcttctgtgctttgtgtttcattgacattatcatcaaccatcaatgtgggctctaatttcctgcttatctcctttgtgtcttcagtgttttctcccaatacttcactcttctttgtcaaaggaagtgtttcttcagcttgatctttgtgaactgattcaaatgtatatgagagcatctcattcaggtcacctggttcaagattctggatccatgctgataaattagtaagagagtagagaacaatattggctatagcttttacaggagatgaaattacaataaatagcatatgactactctagttttttttgtaatatgagttggaaacaatgaatcagaaaaatgatcattttaattaaaatgtttattacaagaatgtaatattgttgcgactaacctggtttctaggaagttcatcagtctttgtgttatttgcttccaagtccaataatgtatgtaccccttctgtattcaagctgctttcagaggaatcaccagtctctttcacattgaaaatctttactgattgctctttttcttgtagagattctaggtccttaatgacttccctttttgcgattactacatcttctgatgtagtattgattttgtcactggtaatctccgaggtaatatccagctctcggtccatttgcatttgactgtcttcatttgcaacttcctgctcagtatcacaaggctccaatgtacggtcaacttccttttgcaagaacccatcttctcgggctggtgcagtaattgacagctttgcaatttcacattcggttttatctgtagttgtttcctctggtgtctcatttgcttcagttatcatgggctcagtttcttttgacaggactgtagaagaatcttgaaggttatccttcggcaagccatcaagaagtttctcaaaaggagtgatttctttcacttctttttctatattttgtacacattcacttgttattgttgggatcttctctttgatgtcttctaaatccgaattttccttattctgtacatcgccaccaacattgcttgccacacccttctcttcaggagcaacatcaaaattgtttacctgccccttgtcattttgatcaactgcgtcatcttgatcaacttccttcaatctcgtttcttcagttcccaaaccttcgtttacaccaaaagttttgatgttttcttcgttccttgctttgttttcatcgaagaaattttttccactctcatttccacctgagacaacatcaacatctacattgcttattgaaccctcattttcaggaataatatcagtagttttgactagttctttatcccctagttcatattctttcacacttgtttctacattcacaatttcagttgaaacaaaatcatgttgtaagtcgatgtctacactttctgtcaaatctttttcttcactagcaatagtagaacttttgacatgcttttcatgatcttgtttgacttccttcgagcaagctaccacactttcaactccagccgagacaaagttagattgcacttcaatatcttccctgttttccaaatttgaggtttctttaaggtcttcaatcaccccttccacctccgtacaggcaacacttgtgacatcttcatttgctggttgtgtctcactttcttcatgcataacatgtagcaaattatcaagcttttctcctgcttcatctttctgtgctgcttctttatcttcttcacttgttaatgctactttcatatctctttccatggctgtaacattgttttcaacttcgacttccactaagttggtagagcaattatcatcaactttattctcctcctttaaagcatccactggatctagtttcttatcaattgccttttgatcttctatattcactaatgaggcaccgacaaatccttcaacatcctcttttatgttgcatggaacactttcacttgctctagctgtttttaactcttcagcaatctaccaaaagtgagtttcaaattagataatcaatcttgagtttttttagaaagggaactaggcttgatgtgaatttcatgatccttaacattttatttgttttatttttcgacacaacaaatgttatatccaaagattggagaaaattaggaaagaaattaatgcaactatccttacatattttgagtatccgtttttcttttaattatttatattttcatttgtagtatgtatgaaaatatttgcataaaatgtaacaaaaaaaaaaacttatgttgtagatggtcacaaacaatatttacttttgaaaaaatgcagatgcataattcataataagtttcatttgcttcccataaaaagttaaaactgatatattacacttatattataagcatacctcgtttttttctggatcagttgtgctattcagattctttgcctcttcttctttcttttctgcctttgaggtttcttcaaggttctgaacaacttcaacttccaaacatgcaacactatttgcaatgtcagatatcgcaccaatttctatgttgtccaatcccttctctgtagggacatcattataagttctgtcctcctccttgttatcaagttcttctttcaattttttttcttcattcaagatttctggtgagggagaatctgattgtacttcaatattgcatgccaagctcttcccttcaagagtaataccatgttcttctttatttggttcaactccattgccaggtggactattctcttcaagagcagtgttggagcaattgacatgatctccatgttcttgtatggctttcttcaaatgagaatcttcactctctatttcagctgagccaaggacagagtgaacttcactagtaagagtagttaccaagcacttctcttcaggagaaatatcaaagtctttgacatctttttccatgatgggtttgtcttccttcaagcttgttccttctttcacaatttcagttgcaacaaagtcatcttgtacatctaaatcgacattggtggttggactgttctcttcaagagcattcttagaatcattgagttgctcttccttttcttgtatggtttccttcaagaaagaaccactatctgtatcaattgagacaaagaaagtttgtacttcactagcaacatcagttaccaaacacttctcttcagaagcaatatcaaagcttttgacatcctcttccatattgggttcgtcttccttcaaacttgtttcttgactcccaattttatttgaaatagagtcatcctgtacacatagataaacattgatgggtggactattctcttcaagaatagcagtggaacctttgacctgctcttcatgctcttgtgtggattccttcaagtaaggatcttcactctctatttcatccgagacagagacatattgcacttcactagtatcaacgatcaccggagacttctcttcaggagcaatgttaaagcttttgacatcctcttccatattgacttcgtcttctttcaagcttgttctttcatccacaattttagttgaaacaaagccttcttgtacacctagatcgacatttctgggtagaatattctcttgaagagcaacgctagaaccattgacatgcccttcttgctcttgtgtgacttccttcaagcatgaatctttactctctatatcagatatagattgtacttcactagtaacagtagttatcaatccgttgtcttcaggagcaatatcaaagctttcaacatcctcttccatattgggctcaccttcattcatacttgcttcttcattcataattttatttgaaatacagtcatcttgcacatttacatcaacattgttgggtagattattctcatctggagccgtttcacaaccttttacttgctcactattatcaagcctaacttcctgcaggcttgtttcttctctcgcagttgtagttgagtgagcaatataataacttttggcttcttcttcatcatcatccagaccttccttcaagcttgtttctccactcactgttccaaaagatacagaatcagattgcacattggtttctatattgttttcctcttcaggaacatcattgtaaccaatgacgtgcttctcgatatctggttttgcttcttcatgcaaaatttctggcaatatagaaactgcttgtgattcaacatctacattgttttccaacctctcctcttcaatgacattgtcatgatttatgacctccttgtcttcgttatctgattttacttccctcaagcttgttttgtcgttgagaatttcagttgagatagagtcaaatccatgtacaacaggttttgtctcctgggagttttctcctgcaactttttcttccgttggcgttgcactgtcctctaagattttagcttttacatcctctaccaaatctgtcacttcattctgttctttgagtgcaaggcacatgtcttctccctgtattatggaaaattgttagtagacaaaaataataaaaaaaaaattaaatcaagtaatagaaaggactttcaaatgcatcagtaccttgtctatattctttgagctttcctcaagcacttctttttcttctaatagtgatgaagaagagagttctgtagttctctgatcgtataagatttgttcatttctttccatacttggaggtgctgtctccacttcagtagttacctaaaagcaatataggaaacaagatgtttagtacatttagaagatcaaacgtgtagctatgtaccttatgttgggctaaaattcacaaataaagcaaacctgagtttctttggactctttagtggtttttgtatcaataagatttgggtgcaagtcctcgacattatcaagttctcttaatgcctgttcattggtttttggccccatactaggagtctcgagcacctatgtgacaaattagtgtttccaaatataagagctaagataaatatataaaactcaaagaatcaataacaaggagatgatagtttaaatggatcttactttcctttttttagttttcttagcatttgtttttttttttgggcagcacaaattattaaatggtactattattttgtgccataaggaaaaaagattcagaaaaatgaaaaataaatgcaatcatgaatacattagtaccatttcatcgaggtatacataatttatatttatagtagtcatacctcagtgtcaattgcattatccatggtctccttttcttccatgatttctgtttttgaggtttctttaagatcttcaattactccttccacctctgtacaggtaacacttgtgatatcttcctttgctggttgtgtctcacctttttcatgcgtaacatgtagcaaattatcaagcttttctcctcctccatctttctgagctgcttctttatcttcttcacttgttaatgtctacttctatacctctttctgtagttgtaactattgtttttcaacttttgacttccactacttcggcagaagaagtatcatcaactttattctccccttcaaaacatccactagatctaggtctttatcaattgccttatga

SEQ ID NO: 219095 - DNA, 1614 bp, Cannabis indica
aaatagtatttacctaaaattttgactaaaaaattattttggataagaatagagatgtatcagtgcatccctttcaaggaattgcatcatagaattttcattacctaatcaatgacaccttattttaccgaacttagaaaaaaaaaaacaatagaagaaagtcaagaaacaccaaaccaattttcagaaactaaaacagcaggtcagcagcagcatacaaaaattaataaatttctcttgaaaccaaattcgttctttccccatatgtcagccactgagcaaaaatttgaatattgcacccaaattcattattaatgttctttcaacgatttagcaaactgtgagattacttattttgtattatttttttctagtatgttgaatacattattttttgttgaaaattttgaaacagggaagggaaggcaagttatcaatattattgctttgccaccatatatttggtctttattgtcttcttcttttacccaagagaatgcactcacattcaaaatgcctgataaagcccaagaaagaaagaaaagaaaatcagcttctacatttgagattaatgtaatgaaaataatgaaatcccatacttccaataaatgttttacaaatcaatggggaagtttcaagacaaactgtacaaattgtgctactaattattcttaacaatcttgaatttttcaagaatgaatttgccttctttgtacttctgagattgctcataggccttctcatatttccatcccaaaacttctccacaatctttgcagtaaacatcagctactgtgtgaagaccagtcataagctgcctgtcctgtttgggccccagaactatgttcatcgcatgagaaaacagaaaggctctcccatgcgttgcctattattattattattattatgcatacatataagccatttaatttaagtaccattaattaaaacaaaaatcaaataaaaagacatttatgaaagctgaaaggaataatagaacaatcataaagtcaaacacatgatatttctatgctaaatatatcacttaaccagaattcaattttgggttaaaagaaaaaaaaaatagattgacctgaaaatctttagaaactatatcatcatgacgagatactgggttctggcacttgtaacagttgtacagccttggcaacacaaaatcctccattgatgaaggatgaggatgcttagttctgttccactaagaaattaattctcacaaaaatattaaaacttccctaattttagaaccataaaactaaggcagaagtttcctccttaaagcaaataaacaatcattattggattgatcagatggttacttgaaaagtttgttcaaccaaatttcatgatttgagattatccctaaagaaagaagagatttaagtttattcaaatgaataaaatcagtagaacatgtttgattgaagaatacatatagataatatataaaacattgaataactcaaatcaagtgggagtgataaagacaggaatattaattaatactctttgctttgggtacctaagaaaccatatttaagcatgtttggtttaggaaaagacatggaattggaatggaatgaaaattactat

SEQ ID NO: 219096 - DNA, 3671 bp, Cannabis indica
ggtcatcttgggatagctcagatagtttgaatggctatggggctaactatgattaagttcaatgatgaggctactagggatcaggtcttgaagataggggttttgtaatttgataggaaaccaatgattgtaagacatcggtctactgatttgaatgaactgaaacttattcgattagttccattgtggattcgtcttcgagatccagggctacaataatgggggaacaaaagcttgaatgctttagttagtatggttggaaaatctattatggtggactaacatactaaagatcgcattatagttcaatttgcttgggttttagttgagatggacaaaactgatttgccttcgagatcgattctttgtctcaatgaatatgttcaattgatggagtagagtatagactatgagcagctatctgtgaagtgtaaaattgctagggatttggtcatattatgatcggttgtcgcaaagttgaaattaaaaagaaagagcaaaaaactgatggggagaagactgtcattgaatcttaatctcagaatgaggactctgatttagttgaagaggcaattaatttagaggaggtgacccaagcttctaagagcagtgaaaaaaatcaaatctattcaacataaagattggcaaactcctaaaaagacagttaacaaagcgtatggggatcgcttgaaggctatagctgctgatattgaaatagggcaattaacatgtcactattttagtgctttacaagattctgagcaatgtttagataagatgatactaccaattgaaataggggtatcaagttttattactaattgataatggacaattgcaatattgctagttggaatattaggggtttaaataataagaagaaacaagattctgttgtggatttttgtagtatgaataaaattggtgttggaggtttgttagaaactaagctgaatgggaataaaattagagaaatgatggagaataagcttgctaattggggctattttactagtccaactattgaaggccgtttattaactgttttgaggaggagttttgtgatagttattattattgttgaaactcaacaacttgttcactgttatgtcaaaatgtcaggacatgaatctgcttcttgtattaccttcatctacgggttcaatactattaaagtaaagttctttggcataatcttttaaacttgagacttccagttcagtcttggttattacttggagacttaaatgtggtgtttaactaggaggatagatctagagggaatgctataagcctcaatgatatggctcattctactagttggttagctcaagcccaggttaaaactatgaagaagactggttcgatttttacctggacaaataatctgaatggggcaagtaaaatctattctaaaattgatcatgtatttgtgagaggaataacatgaaaaattatctaattctaatgctcactttggttaggaaactactttagatcattgcttttgtgttgtttctacaaaggcagtggtgaagatagatactagaccttttcgttattacaacttttgggataatcaccttgagtttaaagatttggttcggtctatttatgagaaacttgcaactgttattggtttgggagggttctatactaagcttttgagagttaagcattccttaaagaagttacaccataacactataggggatttgggaaaggcttatgaagctgctaaagccaattttcttgattctaaatggaaggctcagtcttattcgagggatttatcttatcaggagcaggaaaaagaagccgatactaatttcaagtgtcaagaaaatatgtatcataatttcttgaagcaacaaagtaaggttacttggctgaataaaggggacgcaatacttcttattttcatgcttgtgtgaagaagggaaagattgagaacatgatagcttcctacactaatgatcaaggtactgttattgataattttcttgaagtggttgatcatttctaactcatatttgcaattttatgggcactagaaatagtactactagcagcatcaatcttgattgttttaaataggattctgagcttgatttagatcaacagctgactttgttgaagcctttctcgaacaaggaaattagaaaagttttattcaacattcctatcactaaatccctaggttcggatggctttggttcatgtttttttaaggttgtttgggcagatataggggctaaattttgcaaggcagtctcggggttcttctcttcaggtatcatgcctcttgagttacattcaactttaatatctcttgttcctaaacatgataatcctagtagacctgtggattacaagccaattgcttgttgttcaataatttacaaatgtatctcgaaacttctttgtacaagactttcaaaagttatccctattttgattaatcaaaatcaaagggcttttatttagggtagttccattgctcataatatgatgattttgcaagatctcttgaatcaaaggaaaaatgtttctcctcgttgtgctataaaaataaatattagcaaagcttatgatatggtgaattgggagtttcttgaagctttgctggcagcttttaattttcctcaaaagtttgttaattgggtgatgatcttagatctacatccgaatctatcattttgaaagggagggtccaaggaagttttaaaggtcagaaggggctgaggcaatgtgatctgctttcacctttgctttttgttatggtgatagaatatttgactaaaaagcttcaactggctgctactaattctaaattaagatttcacccgatgtgcaaaagtttgaagctaataaatctctactttacagatgatttgattttgttcaacaaggggaacaagcaattagttctagctcttaagagagttcttgatgactttagtaagaccttggggctgtttattaatattgagaaatctcaaatctttataggaggggttgcttcttcaaagaagcctgttattctcaatatcgttcaactgactaaaggttcatttcctctcaaatatttgggagttcttgtaataccctactagtttaggcgtgtcatcgtgattttatattaactgcagctcgttgctaatgaaccaatttagtgaaaatcatgagtaactaaacctttgttaaaatacttataaatacccaaataaataacatatatatagccgggatcccgtgtctaaaatatttacaattgtttcaagtacttgatacaaaagttttcgcatagagattatacaaaatataacaagctgtcctaaagatcgaatgctcgaagtctaaccacccgacttgtacaatcttcatccgctcgctctcacgactgctcaacattagccttgcccttacctacacatgcaaacaaaaattgtgagtcgacagactcagtaagaaaagcataatcataaacataaatataacccaagttacaattaggcgcccattcacccaactataaccctatccccgtgttcaacacggtactaagtctagaacgttcatacgacagtaatatcgaccataatatctgtaatgacctctttagtaatttggattagtaaagacaattagcactaatttctgttaatttt

SEQ ID NO: 219097 - DNA, 4279 bp, Cannabis indica
atattagtaaaaaaaaaaaaaaaaagcaaaaccaactcatgagcatatattgaagtgtgtgtgtttatgataataaagtcatatgtgaacataatttacctagtcattgtaataagaaattacgaaccaaaatattaaaattagtggagctgatttcttcctttattattatttttttctttttctatttatttattttatttttaatagagtttttttatttatataatgtaaaatataattttaatatatagtgtaactcgtaaagatggtaactcaattcaaattgtaatcaactcatacaataatttaaattgtaacgaatagagcaacttaaatcgtaaaaataaaaataaaataaaaaagtgagtgatttcttttcaaataatgtgtgagttatataaatatgtatatatatatatatttatagaatatgatgatcaggtgattgtgaaaaagagctctcattttcaaagtttgttcacctatcaattttacacaaaacaacaatataagcttcttatattaatgcatttatcacctttttaagttatgactcatattaaaccatgtatatatatatatatataatatttgtttggacaaaagagatgcattttgggaataagaaagtccataagtgcttcataaattctgattatatgactcaggaataatattaatgttagtaccttccttggagctgagatttctgaaatgaattttgtaaaagttaataaatgaatatgaatacttgttaatttcttcttaaaaaaacaataagggaaattaaattatacattgttgagaaaatgcatgcatgcaatgcaatccctggttttgattaattattgttacactaaatctaattattaattaatttgcagtaaattttcaacaaaggaaagctaaaaagaaaaaagaaacagaaataataatagctccccaagttgtgattgcatcacaaataataataataataataataataataataataataataataataataataataataataattcacttactatatgattttaatattatttaaaaggtttgtatgttagttgcctaatttgacaatttctcttcatatgtctttctagagacaaatattgaaacctttaaatattatatatttatattataaataattgaaaggaaccttccactgaattccttgcttggggacaacatgtcccaaagatgaaaggaaataggtcccaaacaagggtacaatagatatatatgtccaaaaactataatatcatatcatatcacatatcatcatgatacacattaattcatggaaaatagaataaataaataagcactacttctactctgcatctttttatgaagagcatccattttcttttaattattttagctgtttatactttatagtatcatttttagggtaagtttatatcacacattctttaaaagattcgataaattttctatctgttttgacatataaaagagttttatggtttaatttttttttaataatcgtgtacattatagtaatttaaggccatttgtaaatttttaataaatttcaaatagtttacaatatcataataggcgcaactatttgttttaatatacgcaataagtaacataatatatccatcctcctgatactaaatggatgcggtggagcatctagtccacactttgtgcttatattttcttggcgacctttcaatattatcttgaacaaaaatctatatgcatatttacattggatttttggagggataagaactatgcttaactaaatttacaatctaattaatttgagaggaaaattaatgtttgttttatgtgagtacttcaagatcatcatcaatgtgattatagacacaacacacaatctagtataagttgatgaagttatattaaagagattcataataaatcatatataagttgatgaagttatattaaagatttaaaagaatataatggaagaaattaagaaagtgcaactctaaaaccaagtcaagtattattttttaccctttggtcttgtatttatatatttaataaaaaaaattaaatttaaatcttattaattaattggatttcatttcaactattaagatcatcaatcacatacacaatatatattatataaaaattttaattattataaattgtcattttaaaaataatttccattattaatagttattgattctttctcatccaccaaaaataaaacaatagtcattctcacaaatgcaacttctattgtcttcttttacttttttaatagtattaaagtttcatatattacttatgctatttgaatttttttttaataaacttatatttctatattttcttagggggcatagtttccttttcataggattgaatctttttttttttttttttgatgaaccataggattgaatcttatgtactaagaaaagaaaacaagaactatacaaacatatattcttcctaagtggcaagtggtcaaagtttatcttcctcaaaaaaataaaaataaaaataagagagtatgaagctcttctttttttctcctaagctcttttttgtacttattgtgtaattacataactaccctctcacttctaaatggagaatccacacaaccaaatagagaattaggggtaaattggtaatttcagagaaaggcaaaccaagcttttgctttttataaaccaaattattttattaaaagcaaaacacaaataaaagcaaacgtgggatcaattttttaaagcttttatcaataagaacaaataagctaaccattataaaagtgaaaaaaatgtaaaataataataataattgtgcattgggttttgataaagctgtcaaaaaagatagggttttaatggaatttgcaaagttttgaaagaattttttttctttttaatttaatgttaggacaaaatatggcccacaaaaggagtttagtttagagaaagtgggggtaggtcaaactaactaaagctcgtatgaacattaaattggtttttgtacaagtaatttgaataattagtaatggaatttatatctttattgtgagtataattatgtgtatctaaatgtacccttatagtgtttttttgattctaaacctaattaattaaccattcaattatttaggaatgccttcaaaactccaactaacttctttttaacacataatccaatccattacaacctaatttataattctagtacatgaatcattaaagtcatattgaaaagtgcaatgtttcatttattttcattattattaaaaaactatgtatttcattattagtattattgcttcataattaatcactaggtttttttgctttgaacatgattatgtgtattataattcatttaacattttttttgactttagaggcatatttaagcattaaaaaatcattgacagatatattgaattttgacacctgtagatttagctataaatatatgagaaatattaaaatgcacgagtaatatttaatacttttgtttccatctattggtataattaagtatcgtgtctccaataatttaataaaataattcttagataatattgctaatcaatcacaaggtgtcacctttaaaaagtgttagacaccactaatatatatatatgagaaattaatgttaaaatgtatcactgacgcctagcaggctagcattccttaaagtgtcatattaatatcaatataattaaatattaaatctcatataatttaatttaattttgattatataatattacagtagaaattttatctaagaatacacttaggatgaaacaaattatattttaattgagaagttataactaataatttagcttgtatttagcttgtatttttatatcataataatttgtttgtattttttgggtggtataatttaacactgcatacttataatagccataaattaagtctcatctcatttttcataattaacttgcatataaattgagattttaaaaaatacattgtttttaatcaattttttatgattcttaaaaatgcaatttttaagatcatttatttgaatgatacaatttttaagattatttaattgaaatgcacaatttttaagattatctgcttgaaagatacaatttttatatatgacatgaaataataaatatataataaacacacatcacatattattaaaaaaaacatttcttttattgaaaaaacaatattttttgtagcaaaaaaaaaacaatcttgatagatacagttct

SEQ ID NO: 219098 - DNA, 5068 bp, Cannabis indica
acactacgccaccaccaccattgtggtcttccctctccgacaattactactgggcttactctctctgaggaaccgcctactattgtctcattcaataacatacaaatcataatccatttacgaactcttaaatgtaattctagttgtgaacccacaaattgtaatctcaatcgtgaactcccaaatcgtaatcccaatcgtgaactcccaaatcgtaatcccaatcgtgaaccccctaaggatctttgatcccacgcttcagacccaccaaacctcggcagtggtggatccatgctcaaattcatataacgactctattttgttgaatataaatatggattttattgtgtttttttgagttttacgcatcaagcactatcaaatttttacaagcaaaaaatgcaaaaaaaaaaaaaaaaaatcgaaaaaaacacagtaaaatctaactccaaaacttttacaaacaagtcaacaaaataatctaccacaactgctgaggtccagtgggtctgagttgtgggatcacaagtcgttaggaggttcacgcttgaaattacgattcgagggttcttgacttggggtttcctacttggacaatagtgggtggcttgtaaaaaagggtaggggttgtagtgactgatgttgggagaggaagggaagactaaaagagattgaaaagggatgaaagagaatttaagttagaaggaaagagagacttttcaatcggcaagggtattttgggaacacactaaaacataacattaattttgtcatggattcaatagtatgtcatttttgaatttgggtccaacatagatgagtatgatatttgaatttatatgtatacatttggtgcatatcaaatttttaaacataagcttaccaaaatttaaaaaatagatacactttatatttaaatcactaataccattttcctttctcttctcttctaactttactatccatactccccattcccattcatactgatggtggtcagatgggagtccgatggtgatccgggtagcccgatgctactctttttttaatttttttttatatttttgtacataagaaatagtagcatcagactaccatcagaccatattctacatttatagatgttaaactccattcattaagctcgtcagggagacatcgggctaccatcggaccatatcatcgagctatcataggaccaccatcggacctttatcttcaatctttactcatttaacaataggaaggcatcgggctaccatcagaccaccatctagcctggccaaaaaaaccagttttctgtccgaaactcagatccgaccgttttttatcctaaatctaacatctactcactaataacaaatattaatcatacaatttattcttttgacaacattgtcaatagagaacctgtggttgatggagaagtcgttagttttgtggtcgtaatggtcgtggagagaaatgatcaaggttgtgggtggtgggttgtgagtcgtgcccttggggtgagttcagagatcgagagagagagaagggaggaaaagagagagctaggtatttaaaatgggaggggtagaattgagttttataaaatgttagcctattctaccaatatgggttagtttaggtttaggaaaagaattttaatataataaatgtataaaaagtcaaaatttcctatgataatctcatgcatctcaatttcgtttacataatacacagttagtgcttacggtttgtgcattgtgagtcaacacaagcctggaacaaatgagcccaaaacgtacaagtatgacccgacataataaaatataaatttagacacaatacaacataaagttacaaattggcacaacacaaataaaaatatataaatttaaacacaacttgacatcacaacatttcaaatatggtgcataaatacaaatagattatagattagatgacatgttaaaaaatttgataataataatagtaataatagtaacaataacaataaaggtaatttgcggccaaattttctaaaattttaagtttaacacgatcaaactccctagattagaaaaattatggctaaagttcccaacctccacaattattttggtcaacacttcttgattccactttggaccaaagtggactgtcacgttgtacagaagttacacatggcatgttttgattagtctacatttttttttctactttcttcttcctagactcatctctttctctctcccttgatttccctcaccaccatgcccaccacacaccacccaccactcaacactaccacaaacagattcaaaataaaccctaaagtttttattcaaagtagaaaaaaaactccaaaaatttgtaatttatttgtctagaaaccctactcaatccaaactcaagagaacctctctgccttcagagaacccctggagccactgtactgtcgtcttcaaagaatctggactcactgacatctgggtttctttgcgcagaggtgacgtatgggctgagagaggtggaagagagaaaggaagaaattcaacttcaatttctattttgagttttttttgttcttactttagtatttgacaggaaagagagaaagagacgagtttaggaagaagaaaaaagaaaataaaaaactatcatttttgttatttttcttaaaaaaaaaaatctgatttttaaatattttaattatataagtgaactaataaaaatttactatgtgtaacttttgtacactgtggcaatctattttaacatgtaacagaccaaagttaccaaagtggacagaaaaaatgactaaccaaaacaattttggaggttgaagattctaataatttttatatatataaatatatatatatatatatattgtgtgtaagtacaaatattgttgaaaaattatagaaaaataatagaaacggtaaaatacatacataattgagtagttagttcattaattgtaacaaaaatgtgagaacatggaacaccaatacgaactcgtataaatgtataagctaaaaaaaggtaattcaattaaaatacgatacaaaaatactagacttacaaattgagtcgggcatactctaaaattattgacacgatacgactcataattttttatgactcggcacaacacaacttatacttttgcttgtttttcaaaatatatttcgcattggtaggtacaatgcacatatttacaactctacacactgctcacatgttataattttagtggacatataagagcactcacattagatgagctataatactcttttcttcaaaatagagaagataaatgtgaaaaaataacaataaacttgctccatcaaatgagctattttaccttaatttttaaagaaggttaaagtgtttctcgtagagaagcactattcatttttaaataacattttaataatatttacttaatattttattcatacttcattattgtttattttttatatttaaaaaagtaatatttaaatgaatatcgaaaaaaaaataaaaaaattatgtatgatctaatataaaaatttgaggtaaagttaaaaagataaaaatttagtgctatttaaaggatagatgagtgcttcagttccaataaaaatgcctatatgtgtgcttaagaataagggttgtcaaataaggtcctaatataaaatattttaatagagaggagaatgcccactattagcatcattgccaaaccatttttgtctatatattttttttcttggggaaaagttaaaaaatacttttttttatacatcaactaaatttacttttaaataaaatttaattcaaatatatcttttttcataaatattgtacccaaattgaccttacaccttcacataactaagagataattttaaacataataaatttatattcttagaagatggatgtgtaagtttgtaaaaaaattgaggcaaagttttaataaaagaaaaatagagagtatagtgaagtgataagggtaaaattgataaaatgattgaaaaaagaggtaaatataataaattttgaaagaaaaggtaaaaattaaaaatatcaatttaaaagaggtatgtagtgtaatttcctcaaaataaggtacctccgttgccctgaaagcccatgattgagactcttttccaaaatcctaccaaatatagactatatataaataaataaataaattataatttatcttaagtgcagctaatttaacataaagaaaaaaaaattagctgcttggatttttctctttcttccaaccagaccagccaagggtattggaaagtcctaattgatttcattcatatttaataacacatcacacctatagctatggtattggaaagtcaacctagaaaatgagaagaacgtgattgtaacaaaaataaagagatgtaaccaaaattagatatatttcaaactatggttcaaatatcaattacctttcaaacaatatctctgaggagagaaaaagattatgtcactcaaaatttccataaaagttaatctagaagatccatgtcatgtgcctccctaatatcttagaagaactatccttgagccatgtaattggtctctgtaaatatttgaggtttacttgctattgtacaggaagatgaagctaaagatgaagaacccaaccatctgcaattaaaaagcattcagatgttgattaattgagaaatgaatcacaaaagagatccaggtgggttagagtttagagagagcgtactgtggtaaatgaagctccatagtagggaaaggcggtggttataaatcgttcatattcattgtgattgaaaggccgtacaggaatctgcaaattttgattcataagtgttggagtagttaacatcagggtcgccagtagaatacgtcatttaacatatgtttaaagaaccaaggctttcaggattaataacgaacattaaatagtcaaagctttgctagactgactgacctgtttcgaaagggatagggttgtgtatccaagcctctgatattcaaccttaaattgaaacaccccatagatatcaggtaccttaaatgatgt

SEQ ID NO: 219099 - DNA, 5948 bp, Cannabis indica
tgtctgttagagttctctaagaggactaagcacctttctcactggccttgtgtcagcatcagtattaccacaaagtaacctttactgataaaatccgcaatcacattaacgtgcctgcaagaaggaacaaagaaatgaatgctgaaatgagaattcatgaacacagagaggaacaaaagaacacaacaatgatgatgatgattgatgatcaaaaacacaaaacccgaaatgaagagtagacaatacctttgatcctcaatttcgcccttttgaatgctgaaatgaacctgacaaagaaatctaaaaaagtgtaccatccaaatacattaagcagctttccatgaagatatggcaaagatgattcgtcctttccatccctgcaatagccaaccattgtcttcatcaattataaagtctctgtggtaagttgtctttactttctcagctgctctcttcatgacatagcggcttaaaggttgttgcacaaacccggacctcatgatcctgatttgccattgtttgtatgtttctggcctttccactctttcacatccctcacaagctatgacatttaaagcctccctaccaaagatctctttctcaattagcatccgctccggttcccagcggggtacaatcaattcaagcatatcaaacaatgcagaaaagtgaaacaatgcctctcgaaaccgagtaacaaaaaaaggtgcattgtatgctccatttgtaatcccatggatgaagagatcaggtttaattctctttatcaaatcaagaactctatttcttgcactctctgcagtcacgctttcatcgggcaagttcttgccccgatacagacagttaactacgaggaagtcattcttgtcaatctttagttcctcaagtgtaatggtctcccatttctttgcaattgcatgataatcaaaagtaacattgaaagtttcagcataggcttttaatcgtcgtcctgtttcgtcaactctctcagctggtcgaaagccaggttgtggaaactctatcccagtgatccgaagctttggcggtccaccttctctcattgacaggcgctgaataagggtgggccattgaaaaccataaaggataccaaagtcaatgacatgaacacttgttgccttggctgatgtatccagtattgtcctgtttgatgtaaagttagatatcttcctaaatgggcaggcagcaaggtaaagccggtaagctttcaatatatcagcagcagatgttcttttattaacaagacctttgtagatctggctacctgtaccagccaagcgtgcctcgagaccatcagcaaaacaactagctaatctctgagaaccatccccaaaaggagaggagtgttgtctaacttgctttagcagttcatttgcactcctatgatcatcagctgcaactgcttgagcacactgaatcaataaagatctcaaatccaccacctccttcttctttacttgtctcttaccacgactctttcctccacttaatccttttatctggccagtttgttgcatacttttcgtgagatcactctgcaagtctgcacggaaagatgtcaaatgctcgtgaccatccccaagactacaaagaagcacaagatcaaacatcttcgatcgcaaagtggattcaatgtaaatggcagcttgcttgctactcctctcatcttccaaatcttcaacatcactgtaaggatgttttcttcccctagagcttccaggagaacactcatcatttgacttaacagaaacatcacttgtcccaaactttgaaggaaccaaagccaacaactcgtttgcctctacagagccaaccaagtcattttgagtgggaagaaacctgctagcctcctcaacccccttcctaaactgccacattgaccgattctcactacacagatcaggagcttgaattatagtactgttgggagagtccaacaatccatctaaactgctaattgcactatttgaagagctgtaggatgattgagaaactccaaattcaggaatacagtgtaattgagaggtataattatctagattttgatacaagggattatcaaccaaatactcattgctatagcaactactatgtacataattgttggagcttgtagtaaaattttcttctagactttcaccattttgaaaaacatgattttgttcaggggaaggtggatactttttaccaagaacttcatagaacgatttttcagcagctcgaagatccgaagactcttcaactatactagtcttgtcctcatgatcctcttcttccatgagcatctggcttatgtactgcaatactgtatctgaaaagtcacagtcttctggagaattaacatcatgggacaaagttgaaatagtgttttcatagctggggttagatcaggttgagggtaatgaaaccccatgtggctgtgatccgagaaggcattgtgattatgattattgaatctagtttcagccataatattattgtgactagaaataactgacaaaggtttgccttttccaaaatgaattactccatttccagagccagtatatccccttagactctgatccattctcattcaaccaaaaccaaaacccttttcctagttcaatacacagccaagttccttctccaaacaaaaatagctcagtctgtacttataaaatcacatcactacagtctaccgtggagtgctaaatttcatcctaccctttaagaaataaaacaaactttcaacaaaatcatagaagaaaaaaaaagtaaaagcaattatttttacaccaaaaaaagaaacatgtagcatcgttcatttttattttcattaaaaagaacaaaaaaaaatccaaaagaaaagtcaacatcaaacgaaaatgaaaacccagaagaggaaacagtacaatacatatcgtatatattttcaaattaaatacaattagatccaagtgcttacctcattgaagaagctgaagtgccaagcttcaaggcatagagagaaaaggaagaaagaaaatgtgttagagagaaaaggttcttttagtaattaaacacggtctatactttttgacaaaagaaaaacatggtctagcacttgtagtcttctagaccgaatcagagccgtctgattttaatcaacactcatctagatccacccgcctacaacaataaataaataaagtgtttcttttttttttcttttaacaatataaaataaggccagggtgttatataaactttgttttatataaaacttttttttcttttgttttaataatatataatgtttttttaatacgatgttatagacaaaaaagaaaaataatacattagatattgacactaaaaccacttcaattatatgatttgttacttaatcccataaattaatttttttacgataaattatttaaatctcacatctgttatgttatttattcttttatgtaaaactttagttaagtatcatggtagatatatcacagtgtatattaatatacatacagtaaattttgaatggtccacataatattaattattataatattatgagaaattataaaatcacaaaatcacttaaagaataaataaaattaaaatataaaatataaaaatcaaaaatccaaaataaataaataatttgtttgtcttcatcttcattttctttctccttggctattctccacatataccatcacactatccactattattatcaccaccaccataacgaccacaccaccaccaccaaaaaacaaagacctcagttttgggaaactaaaattatttaccgaaattttcgaaaactaaatatttaggagctaaagaaacaataatttatagaaataaagagatgaaggttttttacgtggttcgggtattaataaaccttactccacgagtcagtctagtagcctcttaaggcgattttaatgtgtttacagtatttttgtaggaaaccctaactctttactctaagtttctcttgaagaagaagaagacgagtaatattggcagatttttagctacgtaagttctgatgcccccttcctatgagaattgaagggtatttaaaggctaagtggcgggtatagataggccatgacccgcctaaggttatcgctgaaattctactattggggtaaattagatgcaatatgagagctaactgaatgatcccgtgcgaaacactatgcccttgcgtgcagcagctagataatgggaaccattttggaccatatgggcatgtggcatgcaaaggttcaacctttaacagtagaggccatgtgtcgcccaaagcttgctcctttaggagtagaagtctataatactcgtctggcaaaaaggtggtagaggtacgcgcactaccatgcttagatgtaggagacaagttctgatctttgtcaaaaaaaagtataaccgtcacttggtgatccggcgtgcataaaaggtcaatatttgcaacactctagaatggtcgatatccattttaggcattttgaagacctgtctaggtatcgtctgcaagcttcccttcttatacccctccgggtgcgagagaagaaatttgccttccgcgtttgggaagttaaggtaggcttaagtaggattccgtgtgttcttccatctcgagttgttcctggttccaggaggcttccccgtgtcagggttgtatcaaaaggatttgattagagaagtattagactaatcctcctcattaagtgccatgtgtcatactttgtagaaacacagataacatttatcccccaagcttttaggatacactgcggtccgagagcttgtagtactcttccactccttaaagataagtttttgacacgtggtgctggttgggatcacggatgcatcccatgagttgttatcgagtaaagggtcattaactacaggtaccattggtgtggcacgcatgcggaacctgtaatgcaattttcggtgacacacgcggggggcatgtttcttaggaggagttgtaatgatggcaggacgattgaggtgacccctcctttaatgcgtacaggacacgagacatgaaatgatgattattaaacgtctaggttgagcattaaatgcaatcttttcaactccccatatgtcaaatcaaaatatgctctctggaagaagtgatttgggccatcgatttcaaattgcaaggatcctaacggaagtataaataggtttcaagaacccattttcctttttttcatcatcttcaaccttcagaaaccccttgcaacttttcaaccagaacccttattttccaaacaacttttgcttcgccatcacccttaattagtgaatgcaagaggccttcaattgtcttattcaatacttcctaaacctctgttcactccgttttccaaatgccaaacctataaatcctgactttctccacgcccagctagttgagaactttgacgtttaggccagctacgaccacatgatcgactaggttcaacgctcttgggtagattttcacgataaccttccattctccgtccaaacatcaagtaagtatctcgacgctttgttaattttatgttatttcttatctaggatagaaatgctaaattcaagctaggtctaggatattctgtgtgtttgaatggtagaatgttgcccgtagaagcatatttctagggcaactctgtgtctgaatttcttgtgccataagagcgttaatatcgcgtagatagttagggtgtagccatcagttttccataggctttgcatgctttgtggatcttggaattagggttgaatagtagattaagggttcttgaatgaacaccaaaaaaaagtttgctcttttatgcctacagggagttgttaggactccaaaatggctcttcgttttttggaattttttgcattagtgttgttttggtagcttcccctaggtttctgttggaaattatttt

SEQ ID NO: 219100 - DNA, 2011 bp, Cannabis indica
ttgtaatatctcgaaaaatataatgatatttaattggacatattttattaaatgtatgattatgtgggcatcaaagtagggttataattttacttaagataattacgagtcaattagcgaaatatgagtaaataaataaataaagcgtagtttattaattacggagactttatcagattatggggatattttagataccattttcaaaataaaagattttcgagttcgacggccgtgaaaactcgacggagtggtcaaaaatatcatagcgataagagctgtgttatgttggagttataccgaactagtttagaaagtcgggttgttagtctattcgggaaaattaaaaattaccaaaatatcataggtttgattttaggctttaatgttttaaagagggataggatagtcattttatgagtttaagattttgtcctttagtgttcttctaggttgaatatttgggcttaattaatcaagttttttttttatttctttattatgttataatataagataagtaagagtaaaaacaaaataaaaaggaaaaaacctctcttcctctttcccttttctcgataatcctagaaaaccaacacacccagagattttagctccattttaagcaggatttgactgaagaagtgaggcctcgaagttgttctagcttggaggtaagatttacatcccttttctttgatttcaaggttttaggttaggttttggttgagtttctatatgaattcgggttgtgggttatgtttgagttcaaagtatatttataagttgaatttaaggttgtctaagtgtgtttgtgatgttcttgtgagctgttaggtttgaatttggaagattgagtttaagaactcaattttcactattttatggtggttttgatattttgaggtattgttcagttttaaatgtttcgtcatattattttaatgttattgaactgttctagagagttcgaacatgtttgatggagttttggttgggttttagtttgaaaaaccagagttcccgttttgccagtagagaaaccggttaattgattttacaggtgctataaaatcggtcaaccggttttgccagcaggggaaaccctacttttggcttcgaaactgattttatttggggtgtatttcagagcttggtgtagggtgttttaatgatgttttaagttattttgagactagtggggagttagagttgtccggttatggaattttattttggagtttggataaattgttaatcaagtttcgttatcgtgacataggacctgagatcatcgagttatgtcccacttaggtcggcgtgtacacctgattactggactgaggtaagaaaagctatttgcactgctaagtatgttaagtgaggaacgattattatcgtttaagactagattatgattgaggtaataattattatcatttgtgactcgattatgatcgaggtaagattattatcgtttgtgactcgattatgattgagggaaagatacggttattatcgttattgagaatggaaagatacgatcattactattaatgagaatgagtaattacccgcgtgaaaccacagataggtttcttacttatcggttgctttatcgggcaatgatagtgacatatatagcccgtggactatgagtggtaaggatgctttatgaagcatcaaattgtcttataagacaattaattgattgtgtaatgcgtgattatgtattgggtgaatgtctatttattatgatgataaagttgttggctatgagttgctatgattttcttgtaatgcgtaatgtatgtgtttgttaatacttacttttcttgttgagtctttgtgattcactggtgtttcattgtgcaggtaaaagggggggggggaaaagaaactgtggatcggccatgagtcagaggtctcccagagatgtacataccaaccctggtgtctcaatttctaggggacaggatcaatctttttagttgttgagaatattttacca

SEQ ID NO: 219101 - DNA, 5329 bp, Cannabis indica
agttaatattattcccccattattttgtcaatatcctatcaaaaaatctcttacacaaaaacaaatattagaaaaaaaaaaaaagaaataaataacttataatatttcttacaagtatgatcactctagttttttttttttaccatgaacataattattatacatatatgttattcatcattatttaattattatttcaaactaataataataataatagaatgaattaatatatattaaatacctggaatatcccaaggctcagacttgttaagatcaacttcgatcattagggttgaatcggattgagttattttattgatgagataatcacaaacaagttcttcatctcttggatggaaccgaaacccaggtggcagctttgattccaccatgcttatgcaactgctgcttctattactactactgctactcatcatcatcatcatcttcttcttcttcttcttcttctttctttttgatataattatatatagattttcttaggaaaataattaagcaaaacagagaaaataggtttatataagaagaagtgtggtaatattatatattattataatatggggaatagtatattttggagagagatgtatatgtctcttgttctcttataataaaaaagcaaagatagaaggggttgtgtgtgcttatataaataaataagaaagagaaagagggttagaaaaaaaatgtttataattaattagaataattattattttataggccggagacaaattaagtcaactagtaattccgtgcaaggatggtgggttttgctatatattttgtgcacatatttaattttaaactcttctttttttttttttttcatttatatatatattatttattagaaaaatgatcaaattacactttacaccatcttagattaaaatttgcaaagatggtgctcccttcacttgtacctacctcttcagtataattttagtcccccgaggggtatgattaaaattgtatagtagtttacacaagtcctatgtgtaagtcattatattaatttaaaattttcccccactaaagtgtggatatgtaattatatatatattttttttttaattttgtgtattaaattatgtttcaaattttttagactactaaaaatttctttcaaattattgagattattaaatttaattatgtttgtccaattaatttaattttattgacgtgaaatgtccatgtattaattaatcttaccctcaaattttaatatatactaaatcatctccaaaactttgatatttacgaaattatgcccccgaactttagcatatatcacatcatgccttgtaaattttcatccacattaagctttcattagtaaaattggacaaaattccttgaatcaaatgatctaaatagttgaagtgaatttttaacaacttcaaaaaatttagaaaatataatttcgtacaagtcaaatgtaagaaattacttaaaacctacaccaacaaaataattcaatcaatatttaaatcaactgacagttgctaaagggttcacacaaaaggaagagatagattatactgaaattttctctccagtaataaagtacaaaactatcataataagactataaatgaaggatttgggaaagatcctaggcattactattaaaagggacaaaagtaatagaaaattggttctaacacaggaagattacattcataaaataattgagaaattctcaatgggaggttctaagacagcaactcaacctatcacaagtcaatcaccattatctaagactcaatgtcctaagacacaagttgagaaagaagcaatgagtaaagtatcttactcaaatgcagtaagatcaatgatgtatcctatgctataagtatccttagtaagtatatggaaaattctagtaaaatatattggctggctatgaagtggttgtttaggtacctaataggtactagtgagaaaggtttagtgtacaaacaacacaagcattgcactaagatagagggctacattgatgctgactatgcagggaatcgagacagtagaaaatctacatatgcatatatgctaacctaattgagagaaactgtgtaagctggaaggttcaattacaacctgctgttgcattatcaacaacaaaatatgagtatattgctactacataagctatcaaagaaagaatctagttgaaaggcttgctagaagaattaaaattcctaaaggaaactctaactatataccctgatagccagagttatgtgcacatatgcaagaatcttatattccataacagaattaaacacataaaaattaaataccacttcatcaaagacaatttcaagctcacattatcattgacaaaatacctacaatgcctatatatatctgacttctccaagctcttggtttaaactacagattactcaaaggaagcttcgagatatagaaagagaaacagatagagagttaaagagaagaacactgtaataaaaaaaaatagagaaaattataaggattaccttgtcgatctgaatgtggcttggaatccttgccaacaccttgtaatcaagtcagaaatagtggagattgagccaaccatttgagaaacagctcaatggggacgtaactcatttttgggtgaacctcggaaaaagtttcttgtgcttttttcttttctttatgcttttgtgatcctgggtttggatctagatctaaattactttgtgtgtttgtgtggaaaccctaagggttcgagctaggttggctctgttagggttttgagaggaagaagaagattagagatctgattgatctcgagaatcttcaaaaggtattgttgtgggaaatcaaaacgatgtagtgttgatttgttacccttggttttgatcaaagtcaacttgggtttgggaaaggtcttaaatgaccttggtttaaatacttattgaattattttgtttgtgtatgtttcatggtttaagttattttctaaaatggtatcagagcttggtttaacaagaaagtcaaccaaattcaactcaagaaggaaaaagatacaacaagatcaagaagttaaagaaaacacaagaatacttaaaaataatctagtggaacctgatgaacatattgggaagaacttgtggatattccactaattgatgaaccagaaaaacctaactccaaaactactaaaactattacttaattaatatttaaattatttatataggacttcaaaaattaattttgtcttaggccacataaccttatggtattaatttctactatttaattgtaggcaaatgaaattacttgagcctcaagtggttataaaaaagtgcatgtgtgttggaggttttgggtttgagttttgcattgtaatatataaacgcttaattaaaaaaaaaatggtaagcaaatgagcaagaagattgtgagttagactactgcctgatatggataatttttcattgacaaagaaaatgagatggttttcaactgaatgaggagacgaactagttcaaaattaggaaatctttcctaaacaatatagaaccaattattcagaagctttctagagaaaatgaaagagaaacaacttaaaatcaatgggatttaaatacatgcatttccgctttggatttcattaatcactattaattttttttttacttttttaaaaaaagcaaaaaaaataaaaaaaaaaatattggaaaattctacaatgcaccccttaaaactgaatatattgatgcacccttatctgttatagcatccgaaataatttttaagttcaaatttttttacatagtcgtgtacgttatagttatttaagatagagtaatactattttggattccgtgttttgtaaaagttatcagttagacttttactgttttgttaaaatgacaaaatagatcttgtattttttaaattgtacaaataggatcctgaacttgattttttgtcaaaataaaacttataataatctgatcaagagatgttatgataaaactggttacattttctgtatctgttcatgttagaaattatcttaaagttggttatattaaaaaataaaattttaaaaaattgagttcatggtcttatttttactattttggaaaatataaggtctattttgttatttaacaaaacagaagatccaattgataacttttgcaaaatacagggtcaaaagtagtatttaccctttaagatattctacaaaattttgagaaattcagaataatttacaatatagaattcattattcaaaccatctatttcacacacatataaaataaaaaaagtcacgcgtgcaacagaatttttgaaccctatttttggtgtgttaaatttttttaaatttcttaaaattttacagaatgtcttaaataactataatgtatacgatcataaaaaaattcagactaattttttttttttttctaaataccgaaacactttcaagagatgcattgtaaaaactagaatcttcctatgtaatgtgcgctcctaaaacaataattttaccatcaatatcttttagggtgcttccacaatccatccttagaaggggtctattgaagctttctttatttatttcggcatccgagaaaattttttagtctaattttttttcataattatctacgttataattatgtaagatatcctataaaaatttaaaaaaatttaatatgaagtaaattaataaggttcaaacagcttgttacatgcatgactcttttattttataagcgtgtggaatagacaatttgaaccctattttcagtgagttaattttttctaaatttcttaaaattttataaaatatcttaagtaactacaatgaagtcgactataaaaaaattaaactatttttttttttcaaatgccaaaataaataagaggtgcattggtagactagactcttgagtgcctgagtgcattgtagaatttttcattttaatttttttatatgacaaatgtacattgagctgactttagaccaagagactaagagagactaggccgaccttagagattattaacccaatgactcaattctttgtaaataaaaaactacacaagtattttgatagtttatataaatatatattttactggctaaagcttatgataagttaagttggtattttattgattatgtgcttcacagttttaaggcttcagacaagttttgtgggtgtaaccgtcagtgcatatctacaacatccttcaatatttactttaatggaggaaatattagcagacttaacttgaagtgaagtattaggcaagatgatcccct

SEQ ID NO: 219102 - DNA, 3064 bp, Cannabis indica
atgatcaataaacctccagcttaacttatcataagctttaaccaggtcaatttttatcgcgaaaaaaccctccttgcctctctttctattgaacgagtggataatttcttgaacaataacattattatcatggatattcctaccagggacaaaggctgcttgagttggacaaatgagggaaggaagtaaaggctttatcctgtttgcaatgatcttggagattactttgtacaccacattacatagagagatgggtctaaaatggttggttcaagttgggttttggaccttagggataagaacaacattcgtggcattaatgcctctatgcatattccctgaaataaagaaatcagagaccgcacacagaaatcagctccaacagactcccagtagtgtttatagaatagcacagacattccatcagggcccggggccttatggttaggcattgcaaatagagctcttttaatttcctcagaactagggcagctaacaagggcgtccgaatcttcctgagagattttctgttgaaacaagtgagcacagttgaaatccacaccaagatcagatccagcgaagatacccttgaaatattcagtgaattcatggccaattgcccctcgtccagaaatccagacattatctttattcaggatactctctatggcatttcttttacctttaatcgccgccgagagaaagaagaacttagagcacttatccccgtctttgagccaagacactctggctctttgtttccagtagatcgcttttctttctcgaaattcgttcaaagcacgacgaatgtcacattcttggttccagtcccgggaaccagctgggaggctctgaatacaattgagcttctgctcaagctcttttatgaccacatccaactttccgaactgggagcgatttcagttaattagagccaccctggtagcaccaacctttttgaaaatacgagcaggggcccaaacatgattaaccgatttccaggcatggtctactacgagcttacttcgaacatcacgggtccaaacttcttcaaatttgcatacatgcataaatataatgtattagatggagatttattagtaaattaattatatatgtaggtaagtaataaactcatttttcattctttagttaataatttatatgttcttgtccaaaaaccaaaagaagtaactgatgaaacctctttcatcatttgagctatgaaagctttttacctgattaggtaataataagcttactctatcatattacattacaacttttttaatcaattgtatttattgaaaacatcagcatataatcatcaattaacatccaacaaagaaatcctaattaatgatatcaaaaaatctctacatttatttatacaaatatttgttatattggagttttgtttgatttgatccaaaacaagttaaataataataatggtgatgaggtaagggctttgatcatcttatatgaacatatttctctctcttagaatttattatcttattgctaaaaccattgggctgggaaaatgttgaatttattaaatatcataactttagattttttttataggtagcgttttacgattggttatcgatattttttaaaaactattttcttaagttatatgatacttgatacttaattgcaccaataataatataataccgaaaaaagtgttaactacaagtaataacttttaacatttcttattaggtgttgtgtattagaaagcaataaatgaatgaatgaaactaaactaactagttacaaaccaaaggaataatgaattttatttgttttattttttaatttatttaaggcaactactttttaatctttcttttatgctctttttaccatatctatacttggcttacaaattgcttttctgaaagtgctcttattattgttgcttcaacatgttattgctattgttatgtatatacatacatataataaatacaatcataacaacctcaattcctttggttttatttagctatgtatgtacaaattaagcttcttcaaatcattgacataacataataatgtattattccttttatgtatgtatatatgttccaatcaatatattgctaatataactcaaatatcaatatctgatttgaatcattcttgtaatttttatatgcaaactcatgctcactacaaaagattcaaaacaaaaataaaatctttgtaaaaggtgatcataaataattgggttattagaaaaggagagttaattagagagaagaccaatccgccatacatatatatatatatatatatatatatatatttgtgtatctctaactagacttaatatatataagtagaggtgaagttgtaaaattggacagtaaaaaaaactaaaataaaaaaagacagaatgaaggtgatcacatgggggtaaaacaattttgaatctgatataaatatatatatatatatataattatggcattatgtatatatgttgataaactatagttcaagtctattatgacgttggttttttgattatgtcaagaactgttattttttataaagctattcaagaatatatattatatatatatatcttagtgaaattaattatattgtttaataatcttaataatccaatctgatcatcactaaacaaagataacatgcaatttcattaatcattttgatttaacagaagtaattaaaagatttaacagtaacattcaaaaccctaaaagccctaaaatggaaacctaaaatccgaagaagagagcgatgaagatcagagcagagagaaatgagggtggtgagatggtcgaagcagcagaggcaagaggagcaagagcagcactactatggcgccgtttggctgcttcttctgcaacgcggggcacggtcaccaggttcaggtaaagagccatcattaacattaccacaagataaaccaaaattgactttggtggatactgtgagtcctctgatgactcctcatccattggaataactttggagtctgatgatgatgacttcgccattggagaatatgcttaag

SEQ ID NO: 219103 - DNA, 6293 bp, Cannabis indica
aattaagaaaactaaaattctataattatgaaaaaagatatcaagaaaactaaaattctataattataaaaaaaagatattctaacgtatctttttaaaataagatatttcgaaataaaaatgttaatatcactcttctatagttctatatatattatttatttttttttgaaatgattttatagttctatttaagtatggtccctttcaaaaaataaacataaaatgtattggcataaaataaaaaagaactctttagtcaattttttaaaaacgaaaaaaaaaagctttaataggctgttaacttctcctccaaggagtgtgactctccacactggtttgacgcttttcgctaccgagaccccaatgaacggtgggggtaacgcgccgccgtctcccgcggctaatggcggagagtttctactctctttgcttcaaaagacccctcctgaccatcttcatcataatcagcatcaccaaccccaaacacctcagcaaccgcagcagcaatctctgcccgttgatcctgccgtcgcagcagtcggccccagtcttccttttcccccacagatttggcaatccggtggtcaggatcttctccaccagcatcagtggccggtccactctctcgctcctccttttagccctaatggctttctagggtttccccataactatttctcccctggagtgaaccaatatatgggaaatcaagtacctgcgaatctcggcgatgatttaaggaggttagggttttcgagtgggatgaattcgagcccaaattcgaattcgattcatggtcttcctcagcagaagcaacacttggagcacaagctgaagtttggatctttcaacagtgaaattcaagggagtgttggcttatctaacgtggatgcttcgatggttacttccaattttaacaacgagttggataggaatcaacaattgagtttgaatggatttcgtcatgggaattatgaggcactggagcaagaacggagaatcagtggtggcagcagcggaggaagcttgggaaagcagcatcatggggttactcctccgcctgggtttccaagcaagccgagaggaggaagtagggatcaggggaataggaggtccttaaaccacaatgttgatagggaaaggattggttttggtgaacatacgagcaatagggatgtttcaggtgaggatattagaactcgaggtaatgggtctaatggatttggaattgggattggggcgcagcttgatcatcatggaccaccgtctggcactagtctccgtttagtttcgactccagcggttagagaatccttcatctctatggagagtcaggcaattgaggttggggctggtgatggacagagaaagggacaggctcctgcacatgacagaagtggccatgaaatggacgacattggccaacggcttgttgattcattattgattgaggatgaatctgatgacaagaatgaagcgaaacagcgtcaaaatgctcgcgagaaggtcagttcttttttctttttttcaaaaacagatcttgctccttatttctttcccaaatgattgtttgaaaattgtggcaagatattagcttttacctattaggcattgatgtaagtatataatttatgtggatttggagatgtttgctattggatatttgaatgtatgatgatgtagctatcgaattgttttcttatatgttaacttgtaaaaggaatttcgaaggcataaggttgtagtaatattttcatcaactttgtttcgctaaatttacaatattctttttttttggttaaattaaaactaaataaaacccttcaatttagtttataattacatgtaatcttaacattaaataaagaagaaaaggcaattctttcgtcaatatccaaacttttttaaaaaaaaagtaaatgataataatttataacgcaaggtatttttgtgttatactatacaatcagatataatccatactttgattgagggtattttttttttgtttgcttaaattcggccaacattttgattcaggggcctgtttacttatgatttgaactttgaggggtgggggaaatttgtaattgatataccaagtgaaaattgacttatttagtcaaaatagaaataaatttttgttattatatggacaaaggacatttctttgcttctgttgtgttgtaacttgacattaagttcttaccttttgccattaggaatcaaggtcagatagccgagggcagcggctgcttaaccaaagaatgagaaactacaagcgtcaaatgcgatgtcgtagtgacatagacaggctaaatggccattttcttgccatttttgagtcgcttatacctgctgaggaagaaaaggccaagcagaagcaattgcttgcactattggagaagttgataataaaagagtggcccaaagctcggctttatctttatggatcatgtgccaactcctttggagtttccaaaagtgacgttgatctctgcttagcaattgaggaacctgatatcaacaaggctgaagttatattaaaattggcagatatcttgcaatcggacaatcttcagaatgtgcaggtgaataacaatgcttgaccctttacgccaaaattagtatatgatttctttgccttctagttgaagttttctgttgagcatccttatattggatgtaaaatttgcttaatgaacatctgacagcaatataatgtccagatgcagatctccagtcaatctatcattccttgtatatctgaagagacacagaactatttttattttttgcttcctatttgatgagaattatcattggtttatatctttattggggcaatttgtttgttcatttagattacctttttgtttccttgttaaatggacttataactttaagatgttttcaggcgctgacacgtgccagagttcctatagtaaaacttaaggatccagcaacggggatttcctgtgacatatgcattaacaatgttttggctgttgtcaacacaaggttgcttggtgattatgcacggatagatgtgaggttgcggcaattggcttatattgtgaaacattgggccaagtcaagaggagtcaacgaaacataccacggaaccctgtctagttatgcgtaagttatatttcgtaaacatttgacgtcacaaacttgcctatatattttcaagcaagtgagattgtggatgattttacacattaaagttttttcctgatttcctgataaaaactttagtttgcttcagaaatagccgtgtatctgggtatgagcttacaattgtcattggccttctgtaattttgttatcttttttttttctttttatttcaggtatgttcttatgtgcatccactttttacaacagcgtagaccagccatccttccatgcttacaggtaggccttcaaatctgtgatggttctgttaatgtctttccatgtttttgtcaaaatagcattttgtggcactatactaattactatcagttgatttccttttattgctgccaaaccaaatctttaatgataagcaccatcttggattttccagaacctctcatttgaaagtttctgttgcagatataaaatgtatgttctttacttccgtttataatttcaatgcaaaatattgtctttcagggaatgaaggcaacctactctgttaccgtagacaatattgaatgtgcttactttgaccaaatcgaaaagcttcgagatttcgggtcacataacagggaaacaattggtcaacttgtgtggggctttttcaattattgggcatactgccacgattatacggattctgtcatatctgtgcgttcaggatgcataatcaggtgagaaataaaagctgagacctctgattttatcaaatcgttttctccttcattataaactaaatcttatttactttgttaacatgttcagcaaacgtgaaaaggactggacaaggagagttggtaatgatcgtcacttgatatgcatagaagatccttttgaggtttctcacgatcttggtcgagttgtcgacaagtttagcataagagttctgagggaggagtttgaacgtgcagccgaaattatgcagtatgacccaaatccctgcgtgaagctctttgaaccatatattcctagtagtagattagcttgattggttattaacttaagatgtaattatagtaaattctatccatttttctcttgtgctatatatatctaaagcgctttaggcttgtttctcaagactttttccgtcccgtgtaaattaaatgcgggcaacaaacttttcggtggtattttttttgataccaatatgcaaatcttgtggtgagattgtaacagttttttttgatggaagagaaagtaaaagttagtgtgcattattctctctctctctctttttctttccctttccttttacacgaatgggtgctcatattcataatatatatttatataaaatacaagtcgcaagcttaaaaaaattgtaaaaatacaaaattatataattgtcaaatgaaaatacagtaaaacatagattaatggtggttttgttatccctttaaaattttgagaagagaatttggccatgttctgaatcactttagctttctttttcttccttctttgaaactttaaagaacgagctatattgtgtaactttagtaaataaatataaattagaggttgaaaaaaacatagtttattaaaattgaactgttcttccattttgacattattcggagatcggagtgcaattgtaactttgtaagggaagttgagaatgctccaaagattaaattggcctattagggcaagtttaatggaggtactatgtttggactcacctttaattttttatgtaaaatatttgtaaaaatcagccaataaaaaataagtaagagaaaaataataataaaaaaataatagcaaaacaacaactatatatgttacttgtgtttgagtttaaaacgttaaattttactaatatgagaccactatcctcgcagctaccttagtagcaacaactattgacgatgctcttatgcaagatttaattagtttggaatgaagaatttgaatattatataatgtttattatgagaaaaattaagataatacatttaaaaagggtgtacttttttatttctaattttttacaatattaaagataatttaaagtaaatattaataatttagctataatagttatggttaaagtgtagtaataaatatagtatactagttacatacttctttttacttgaatacaaattcatatttgtaaaaatagattctattaaaaacaaaaaatgcatacatataaggtattctaaagaaaactaataattattactttaaattaaaaatatatatacattttttaattatttttctaggcaaacacctcacatctacgtgggtctgcccgtgcaagaacatggtggtacatcaagggaagtggttcatagtatttgtatttcccatgggaatatatttttgctgtcttgtaaagaactcaaatacaatcatgaataaattatacatacatgacaatgagattagttctggcggttgttattatattgagtttttgacacaattaattaattactccaaaaaaaacttggtgtgtgcattgcatgggttaccttaagtgctaatgttcttccaatagtattggaatatacagtatactttattatcacaattgaaattgtttgtaaccacaagtactccaaaaacaactatacaactacttttaaagaaatcagatcagtcttcaaacacctcatacacactactcacagtatcaatccatctctaacctttccaccattaaatttgagcttaattaaactacaatgtctcaacctcaacccactgaccaccacgacctcttacctctgctcttagtcctcggatctcccacggtttccgttattttcggagatcgtttcgcccaaagatttcgaatcctgaaacactccgattcatctctccctttcgaccagttcctcgcctcgcctccggtgcgatcggcgaccgccatactctgcgccggggggattcagatctccgctgatttactcagccagctgccatcggtaaggctcgtcgtcacggccagcgccggagttaaccacatcgacgttcccgagtgccgacgccggggaattgccgtgaccaatgctggtgattcgttgactgaggatgtggcggatatggcggttgggttgttgattgatgttcttaggaagatgtcg

SEQ ID NO: 219104 - DNA, 1433 bp, Cannabis indica
ttctatgaaataactgtagtgcatttcgttgtgtaataaaagttttgtttcacttttatgtacttttttttttattactggctttgcaaaaagcaccaaacacgaaagcaaaacagagcattgaagtccgaccgaacaagaccggccaagaacaaccgctaggccccaaaggaccaacataacaagaaagcaacaaacaaaagaacacaaactaacaaaagtaaagagaacagaccaaaacataagacacataaataaacgaaagcaaacaaacagccatctgctcaagaaaaaagcagggaactgtcaaaattggacagatcgataatcccaaactggtttgtatcgagtgcccacttggctaccttgtgcgccacaccattgttcctttgagggatccaagaggcctcccagagtccaagaagattggctgagtctagaaacaaacagaccaggtcctggacattgtgatgcaaagagattgaacggtcttgcaatttcgtgcagcaaaccgaattgactgcttccaccgaatcactcaggaagacaacattagtaatgcccatcctcctagctgattccgcaccccagactaatgcagctacttcccctgacgatgaatcggagtaggagaagcatttagtacagacatgaaatattataccttgatcattcctgaaaatagcatccccagcagacatgttgtccccaattgcgatatcagtgttgcaaaaagtccacccaggtgggggctgcaacaaagagtggttcagagagttctctaaggagcagagattgggcatctccataagccttctgttagtatggacgagaacaacagacatcgaagtatcttttgcattgtgaattttattgtttcgttccctccatattttctcaaagatgattgcagcaccttcaagaaaggcattgtaattgagtccccttggacgattagcatccgtcttgaaccatgtcaaccaagcatcccagtgtaggaggcctgggggatcggttctcaaatgccagatacaaccaaaccacacggcccttgcatagtgacagttccagaagagatgaaatgaatcttctacaaccgaagaacacataggacattcggtatcccgaatggagaacatggagctgagcttactttgggtgaggagattgttggatagaatcttccaccataacatcttaagtctactatgaatattgggcccccagataattctccacttagcatcattagtatcattaaccttcacgtttttaactaccctataagcagatttgatagagaatttaccattatgctccggaagccaaatccaggaatctggagatgggatactaggaagcatgatgttaagaattcttttagcgtcatcatgatcaaaccatctccggatcaaggcttcatgccactggtt

SEQ ID NO: 219105 - DNA, 3306 bp, Cannabis indica
taggttgttaatccaacatacttcttagtaaatcttgatcctggtaaaataatttccaacatatttaacgtggtcaaaatttaagaagtatctatcacatcccccatgatccatctaggataggcgatggaggatgggggtatggaacacacggaagggtctgttacttcttctgaaagtgttagctcttgcggtgcgttcatcgggtacgctacagtatacctctcttggatctcatcttcctctatcaaagggtatgggttacggagcttccagaagcttgtcgtctttagtggcctctgtgataatcacgtctaaatcatagcctatcacctctttggcttcctttgaagtctgactttgtccttggtcgctgatgttgtttatactctggaagcaaacaataagttcgtgcttaaggagtagtggtgtggtaaccaaaccatcaacttttaattgggtttcagtgaaggctttatgttgggcgaccttcttggccagttcttcaattttagcactctgaggtactagtagagaagaaccaacactccttgaggtcgggggaacatttggtgtagctggtggggtggtgagcattacaatatctcttgagcttgtaatatcctaatttcttgcagttggttctcattagtttattcttcccaccgtagaagtatagaatctattctagagtaggcaccttgaacatatgaatctttcaaaaaatgtaccatccgactaagagcctataagccataggtattagttaaaatgaggctatcccaattcatgatgaagtttgcatagtgttatccaaatttttgcactctgacgtggcatcgcttcatggtaacaagtggaatcgactccaagtatctgctcgcagaatatagtccgaacaggatgcctcgtatgcatgctccaagcaaagcgatcagaattccgcgcagagcgaccaacacttagcgaattcagcttttgcatcgtgagtcatcaaaaaaatccctataacttgcggatcagattgcagagatatggtaagttgtccaaatcccacgatcagtgtattcagtatttattaagcaatctttctacgtatatccattataacgagaagggaaatacttcctctccaagctcatagccctataaatagtgatgcatgttcattgggaaaagggtcgaaaacattctgatcgagagatcttacttaaagagatattatctaagaattcatattcagagatattgttgtaagagctataagaaaaggaatctttctccttgttcttgagttaatacaaataacgaggattaggctattatagaattgcttggggctgaacctctataaattcctgtgtcttttatattactttatcatatattagtcgtcataaactacttatcgcttactaaatcaaactcactgttgttggctaaaagcgaggtcaacattttggtactttcattgagagcagaatcaacaatcactcttcattctaaatttaaccacaagtacgatggtggtacaaactcgtaggggtatggttgatctgacaaatccacagacggtggatcgtgcattgtagaacccaggaaacactagagttccgccagctattgatcctaaatagccgtcaaacgcgggttatggtgtgatgactcatgtggatgaaatcgctcctagtgtgcaagagacttggaataccagctcagcacccagccagggcattcataacacagtcgttccgcctgccaccaacgtccgaacgatcattggagatgatactgagatccaacacctcggcgctgctcttggactcatgcaaggtcataccaaaccctacatcatgattaggaggaactccgcgctgcggtaaatcttgcattcgaggaagatgcatgtttgctgagtggagagacaaggagatggaagtgttaagggctcatcatgcaaaggttgacaatcatagtcggaaagctactatgctaatacagaaagcctaccaaattgtcgggcagcaacccccgagtgtcatccacctgggtgaaacttacgaagatccagtgatgaatacttcccagactataaatggtcacctgttgaatccccggtcataagttccgcttgtgggcctagtggtaggtgggcagaccttgtctagtaattcatcaggagaagtcatacctgatagttccaaccaggcttatagtgccaatgcacctatcaaccaagtcaatcaatcactgacgcagccaggcatttctgtattcgaaaggttagggatgacccatgatctcagaaatgatttgaacagaaggaggacagtagacgatcaacttggcacgacgatcgtacaacgcggaacctgtgctcaaattcctgctctgaaagatactgacgtgacttaaattggccaaaatgctgagcaggttagtccagttgtgcaagcacaactagatgaactaaagagtatgttccaaggcatggccaggcagagaaacaatgatcttgagttggaccaatcacgtggaacccctttctctcccgtaatcaatctcctggcgttgccccacaagttcaaaatgccaacctggaaactgtacactggaagagaagatcctctttcccacctcaagtatttcgagatgcaaatggatctgtagggagtacaaggtgacgtatgctgcagaatatttcctgctactctctcggaagccacccaacaatgatatttcaagctggcccttagaaagttcaactcatggaaagacttttgctcagaattccatgcacaattctcctcctctcgtcaacttctgttgcatttaagagacctggtccaagtcaagcaaagaccaggtgagcctctccgagcataaattagcagatttatgacggaggcgaccaaggtttcacgggtgaatgaagatggaaagttgtccgcgatactagggggcattgaagtcctcggtgaactttggaaggacataaggaagaacagctcggtagactcaatgactgattttattgaccgtgttgaaggcttcatcagctcgaagaagctattcaacgagcagaagttgagcaaaagcctagcaagtctaaagctccttctactggaacgtccgtccaactcccccattacccaaataattcgagctcaaatgataaacgttctaacaacaacaacaagtcggggaatgggatgaagggaaagttctccagcaaaactgagcaggctccccgagagaatcaagcaaagtacactacatttaccatcttgactgaagatatagaaa

SEQ ID NO: 219106 - DNA, 7505 bp, Cannabis indica
tgaatgttttagttaattacttgacgtactgcaatatcttatcaacttagcaccaacaaccatactttgtgtggttgtatatgcttaaaaggggatggcttatcttgaattgtgaaaataaaaatgtttggaaggatatgaaaacaaattgataaaatttgtattatatgttgggctaaactcacgcaggttgatcgttaaatgcaatatcagttgtatattcattgaagggagaagttttgggaatcagcacagatggaaagcaaagagttcaagcagtggagctgttgagaagggcaagtctgacagcttgtatattgacaagcgtggaaaattcagaagctttaataccaagaagttgtctaggaaacgatgtacattactttttggactcattttataaaaaatttaatatgtattatcttcaagtttttactctttcctttctttgtattaattaggtggttctttaagagggcgaggatggaaatatggatcaggtttcgtggatggaatttttccagtgatgagccccactgcccaaaagattctagacctggtactggaggaagaggtggaacagaaaagaatttggcaagttcttgatactcttccagcctctcatgagatatgggatgacatcataaatgtagctgttcaacttcgtctaaataagcaatggggtcctataatgttggtgagaaccaaatactattctgtttaaactattctttttctctgtgatactggtcaagggtgggtgcaaaatcacttcacaagttttgtgcttgagcactttcatatgaccttagactcaaaatttttaatgttaatactacttattttattaaatgaccaatctttatttattttgtattttaatgctaattagactcttattctgatattctatcaaatggattttacacaagtgtgcatagtaatcatcagcttaaaacagaaaattacaaacaaataggcatatgaaagcattaatcgtgttaacattgtacagatgattgtagtcaaatccctattattatttgtctgatactagattggatgccatactgagtagccaaatttggaaaatagctgtatgaataatttgtggggagagtgatgcagctaaatgagtgcctttatcaatcattaccaaataattattaacactggttttaatatcacctctccagatatctgagtgggtactgtacaaaagctccttcaagccagatgtcatctgctacaatttactcatagacgcttatggacaaaaatcactgtacaaagaggcagaatccacatatttagaacttcttgaagctcgttgcatgcccactgaagatacgtatgcccttcttttgaaggcctactgcaaatttgggttgctagagaaagctgaagctgtatttggcgaaatgagaaaatatggccttcctccaagtatggttctttatcaacttttatctacatgtatgctgaacagaggtgttctagttaatgttcaagaactacacgtatgtatgatagttcatcaactgtaacttttcaatgattatcttacctttgattgagttatcagatggtgtagttgagtcatttgagaacttctcattattttctagacctactgtttctcactatacatggacttatttttctacattcatttatactgccattcttagtttcactgtttcatgcttatttaacttcgtttactgatatctaacagccagcattagagacagatcttatactcttatcttatgtttagaagttcataagtgaaattatatttcacttcaaagactaggacggacaattttccaagtgaatttgtgaatatttcacttattcctttctttagtaaccttcttttgattattgacactatctgttgttttttctgtgtactaattaatacttctttagctagtagcaactagcaaggtgtaaattggcattgttttaatatatattgtcaatttatgattaaacatcatttattcaggcacagtcgtgtacgatgcttatattgatgggcttataaaacaacgaaagcctgaaaaagcaatagagatctttcaaaggatgaagagagaatgctgccagccatctactaacacttatacaatgctgatcaacttatatggaaaggttagctctattaaattttaattttttgtttcgcctcctattttgcacaggtttcagtcatgtttacatggattaccaaattattcaacatcatcatatttttcaattacagactatgcttttttattgcagtacaaatactatgatgttaaaatcagtacaaatactgtgaatttgtgaatatttgaagagagactcacgagtattgctgggtttttttttttaatcctttctttcattactattaaatctttaaaagttggagttatatgcaggaaagtaaatcatatatgtcgttgaagatgtttcatgaaatgagaagtcaaaagtgtaagccaaacatctgcacatatactgcactgatcaatgcatttgccagagaggggctgtgtgaaaaagcagaagaaatatttgaacagctccaagaagcagggcatgagcctgacgtgtatgcttataatgcgctaatggaatcttacaggttagtatctacatagtctaaatgccccaagtgttcaactgtaaattgtatttacagaaagatagttttatgtacaaatttcatttatctagaagaaaaaattggtgatgatttgtgaagcacagctaggaaaattactgccttgttttggccatttcaaaggaaaaacgtttggcttaatgaacaaaaacatatgaagcgtctcaatttgaattggttgatgagtttactttcgatacatgtcatcatagaagttgcatatgcataattgtgctgtgtgacagatattatcactataactcttctaatttgctacttctaaagaggttaatacagcaagccatatgtgcaaataagaaatcttatttgagacaagtataaagtgttattaatgttgactttctggtggaaaactaaagttaattgtctatgcatttttcctttacggtgctttgacatgcataatttttatgactctcttcaatcagtcgggcaggttttccatttggagctgcagaaattttttcactcatgcagcacatgggttgtgaaccagatagagcatcatacaatatcatggtagatgcatatggacgagctggtcttcacgaaggtataataaactaaaacttggaaatatcccattttgtcgacttcaatttctgccccactttttctgacatttaaaatccagcaatttacaaacattcattgatattcttcactgaaccaacttttaagaaagaaaacttgatactagtattaatgatgaataatctaaccaaaaaaggatcctcctagagcatagtgtcgtaaggaaggtcctcttagagcatcaaacactaggaatgatgttagaagtcagcttgcaaaatgttattccattttaactaagcaacaaaggaataatttagatctgtgtacttgtgcaaggattcactcgaaaattgcaatcttttcacaacggcatattccatgtcccaaagattccatggaacaattcatccttttgcaatcccaaacagttttggtgtaatgccctatttatcttaggcttacatatgatttaacaactcatatcactaaaatctatcagccatgtttgtttgaatattgaaataactctaatcctctatcctgaacttttggtattgttgtaacttttctttcccttcatatttagatgctgaagccatgtttgaagagatgaaacgtatagggattaccccaacaatgaaatcccatatgctgcttttatctgcttactctcgaatcggcaatgtagctaaatgtgaagatatagtgaatcagatgcaagagtatggattagatccagacacttttgtcataaacagtatgctgaacctatatggtcgattagggcagtttgaaaaaatggagaaagttcttgctgcaatggaaaaaggacaatataaagaagacataagtacatataacatcctgattaatgtttatggacgggctggattttttgacagaatggaagagctcttccaagcgattccgagtaaaaatttaagacctgatgtcgtaacatggacttctcgtcttggggcctactctagaaagaaactatacacaagatgcttagaaatttttgaagaaatgattgattctggttgctacccagatggaggaaccgcaaaagttcttctttcgtcatgttcaagcgaagaacaagttgaacagataaccacagttattagaacaatgcataaggatagggaggatactttgcctgtctgatgtatacaagcatattcgtcttatcactggttaggtactatttgtacagaggtttcctttacaaaaatatatgtagaaaacagttttggttcaccttatcaccattcgtgtacagctacaaataatggttgtttctgaatttgatgatcttattggaaaattatccttcttccaaatgtatggttgttgtatacagtaacaatgggaacattataggattagtaaaaggaaatggcctaaatattcctgttgattattgaataaaagtataaaactaaacggtgcttcaagagtcatttctacattactattaaacaaggtagcaaagaacttatttagcacacaactttgaaggaaggaaaccactccatgtgttcatatttgtactccattttttcttcttaaaaacaatagtaaacttctcatttcctcataaatgagtagtatgatgtcaccttacgaaatatggatacattctctccagttaatatcagaaaaaagtgaaaaccagcatttaaggctccaattcagatatagaactcaacaggcaaaacttcattcgagctcttaattagatttaggcttcagcctgcaaaaggcaacacattaccaaaacaattgaaaaaaaaaagtgacctttaacagcattatctcaatatgattttgtttattattgaacttgtacaacgaaagagtgagatctttacaaaatggcatcctgctttgaaacagaaataaatgcaataatctatgaaaaaaactacatcaacatcaagcaaccttatgttcgctgatagacctcctacatggttcacatagcctaggcgtcctacgaagcaggaacaagttaagtctgcctagtggtactgactgagtgccaaggtattaagtagtgagtgacaattaagcagttttgcattaggtgacttttggggacattcgacctatgagaatctatgcaaactacaagcaacgtagtagaacagtgacaaataaaaaaagtcaaagggagtatcaattttgtgtcaaaatcagttaaggccagtttcttgaacacctggggctcctttaattctcttttgatttttttagagcaataaaaaagtattatcacatttatttgattgctcatcgtatcaaaagcattcaaggactactttattatcacaggagaatcaagttggccaaatgaaaattcccaccactttcctcgtttgtgagagtacaaacagggaaacggctcatctaagcctgccattctatagaaacatttccatagtcccgttcatttcacaaagtcatctgagcctgccattctatagaaacatttccatagtcccctccatttcacaaagtcatctaagcctgccattctacagaaacatttccatagtcccctctatttcacaaagccatacagagaagtctcaagccttaaacgttgcattttagtatgcaaaataactaatcacaatgccataacgaacttgtttcatttgcaacttcatttcacccaatataagaaaaataacacactcagcgagagataataattgttcactagtcctgtgtgttaacatctttaatgattctactactccataaataccacaccaagcactaataaaccttagttcatcctcaacaatactgaataacatctatctacttacatgccccaaacaaatatcaagggtttttttaggttgatctaacacaaagaaaggacatcctagttctaaagtaggaaatactgatttatatataaatataaatatatatatatatatatatacacacatatttctatacaatatgcagtatataaggtaagaactggactggactgagtccaaacccttcaagaggactcttgacaagtcaataattcattgttactgcataagctttgcttttcgaggttggtttggatacacattaattgcaaacgaaagcaacttgttcataaatatttttccaattattaataatagagcaccttattttgccttctgaattttaagaaaaagagattattgctcagtttttcaaaattaaaagggaaaaatattatcactaattacttatcacttttttgcaacaatgaattactcatccttacacaagaaaaagtacttaatagttaatccagtctcatatacataatgagttacctaaaaaaagggtgaaatttcattttactattcttataattctaataaatattatattgaatttaacccaagttgcggtcaaattttatataagcataaatatttatattgaatttaacccaaacgattaaggaattaaaaaataaataaataaagggggagtgaacgaagagaaagtaccaagtacctcagtattagtaatagaatttgaattctgataaggaacagactccagatttgcaactctttgttcaagagcatcaaacttctgtctcatctgcggagaaatacaggaaactgattattattattattattattataatatatataaaaatgaacaaatttagaagatttgcaaatataagggtgtctagtgtttacctcggaggaaaaagtgtgacgatcgaccagaagatctttccaaacgaattgggaaattgccgcggctgagaccgcgaacccgatggtcgtccatgccaaccgagtcctcaacatctcactcaccctcccctctttcggtctctacccgcaattcactctcggggaattatgaaaactaggtaaaatttgtcaatagagttttgaaaaattgaaattaacaaaataaacttagaaaaaaacaggaatattctaaaaagggaaaaatattacaataatactgtgggccggcccaatgaacatttgtacagcccaaaatgaaaatattacaaaaataccacttgcccttaccttcagccgcacgtcacaaacggagaggatgaatgaagctccatcgatgcagtcggccacgcaaccagaatgaaaccagatcgaacgtaaaacaactgtaaatcccgtcgaatttcaataggaaacgaacaaatctaacgatctaaacagaatttttttttaaaaaaaagagcaggacaaccgtggag

SEQ ID NO: 219107 - DNA, 5456 bp, Cannabis indica
acctgctccaactaaatagatctttttgacatgcctattacaccttgtgcatgagagcacaaatacaaaaattatgacaaatataggttcatggtatattttgagccaaaattaatgaccctgttgactttggaggttattatacagctttgcattagagcataattttaaaatttaggccaaatataatattgagctatttttcaagctaaatttactataaattttacaccttacattggagatgatcttgaaaatagtacttagctaagtttaattaagagaattctaagttttagtgcttagcaatgttcttttattatttttatgatatattttatttacttgtgtgtaaaaataaataaattttatgtaatatataatattttattatttgtgtattataaacatattatttaaataatataaaaaaaatatataaaaaggttaatggatggtataacatgtaaaagttcaaagtaaaataaaaatgagcattgatattggacactaatagtacctaacaccttctataagaggtgccttacgattagttaacaatattttctaaaaattattttcttaagttaaataagacacgataattaattacacaaataacgatataaccgaaaaaaatactagcctactaaaactttcatttcattcatgtttccaaaacccattactatataccagtaccaccaccaaaaggtccaaaacaatccacaaccaaatggtaaaaataacatttttattgattctttagattctcttctataaaaaatcaaacaaaaagttttcttttttctttctttttttccattttttcattttcttttcttgcttacactttctccaacctttactactggcatggaactatatctttccaaggaacaacacagctattgggactgttatttcccttgcttctaagtccaatagacttgggcttgttctcattactgactccatttccattgttgttgttgttggtggtggtgttgttcttaggaaagtgatacagattatatgttgcttgatctatggttccatctctgtacacaaacacactttcatcttcttccattttccgccatttcctgtttcggtccaagcttcgagagagcggcatacccctgaaaccatcacatgacacacacacacacacaaagaatcataacccagaaactgttttgttctttgtttattatatcagagaaagattcttcaataaagttggtggctttgtcagttttataaggtgattttattaaagaaaagagaaatatctttcgacttgagtgacaatgaacttggtgcagtgtgtacagtttaaaaacaatattcaactagacaaattgaactttgaaaccccatttgccagaacaaactagttctgtaaaagttgagataaaaagattggaatgaattgactcaaaaatggatacaaattagctttcattaaacatctatagctattggttgatgttgcaagtgtagggtgtgtaatagtgtcatgtcatctataaagtttcttttttgaaatttagaatggagattcgaacttgggaccacttttgacgagtgtaataccatttttaaaaattgaatattcgtgtttgaatcgtcgctaccttatttaagaaaattattcaaaggaattaaaagatgccaatctgtgatcagatcactataaccatctcatttttaaaagtagaaagataatcataatgatttgtgagcaaaaataagtgacaaaaacatgttagtgcaactgttgtaagttcttaataagaaaaccattcaaagatctaaaagacaaatctcaaaaaaaaaatgtaattttttatattagcttaaatatttagttctaatctcattatgtacatgagtgttattgctaacttcctatttcaatctccatgaccaataacacataccaaaatattttattttcgttatagttataacatcaaacctattttgttgttgatattttaatttattgtttaaaaaactttaaacatattcttaatactgtaaactatttaaaattttataaagttttatcaatactccaaactctaaaaaaaagttataatcaatactcctcatcatgtgttttttgtttttttatgctagtttgtataaaaataagcataacaactatcactatcaccatcactatcataccaccaataccaataaatcataactcttgtggactaatggtgctcagcactttttatagtcgttgtctcacaactagttaacgatattttctgaaaataattttcttaaattatacgagaccccaataacattaacattatgacactagaaagattattagcaccaaaaatacattttaacaattctctatactcaaaagggtctattttcatgtcactaaatgaagcaatagaatttcacacccttctctaatttttatacatatacatatatattaaccaagtcaaactaagcaaattaataatatgaaaaacaaaaaagaaaagtataatgtacccaccataacctacataacaaacccattactaaaaaaaatcaaaataaatattagttaaaatattaaaataataataacaataaagaagaagagaaagagatagaaaagggtacctaatatggaagagatcggagaagttacccatctcgaggtagaagttgacggcttctgtaaaagctctataggtatagatatgaagaccatcaatctttggatacggtaacttgggcctcggcggtggctcagccgagttattattagcgacccaccgaccagctgagcagacgtattccttccaaatattaccggaacccaccgccgccgttgacggaggtagacccacgaagcctaaggtggccataatgggttctaactcgtcatgggtcatgatgggtttgaaggttcttgtataccataaagccaactttctcatacattctttcatgtaatcttccattgttcgattctctaaaaattaaaacgaaaccccaaaaaggggtctcttctatagtttttttttcttctttttcttacgttttctggttaagtttgaatgtgggttttgggatttgtcagaggaaaatggatgaataaaactcgaaagggtctcttctctctctatcactgagtcaaagccattatataaaggactgggttttgctgtgctcaatattattattaataaaaaattaaagggttataaataaagaagatgaagttgttgtcgttttatcctattgacatccaatttgagtgtcgtttttgttgattcgattataatagtgtgtgattttgattttaggcggtggaacaattttcaattttcctttttatatgggggaatatatttatttagtctcttgtttttttttaaaaaaaaaaatatgtttttaataatatttaattggtactttatatttttaaattatacatatataatactaaaatttaatcaatataattttatcaatttaaccataagttttcacttatttgtaatcaaataattaaatttgaattcagaaatcataatattttacactgtgtgattatattgataaaattttattaaaaatatttaaatttatagtacaaacaaatatatataattttaaaataaggtactaaaaagtattattgaaaatacaaggtgttcaacacatgtactaaatttgtagacatttttgggtgtttttacaatgcacaattacacattcctataaagagtacaaatattcaggaatgctaattacaacctcctattacaatctcttagtcaacatccacgcctgaaatcacatgctgaaatatttctattttaatttttttcatagcaatattcgttagtgttacagtatcatccctgtaaatttttgaaaatttgaatagtttacaatgtcaaaaatagagttcttgattttctaatttattacacatttttaaaaaactttaaacgtattttcggcactataaactattcgaatttttttaaaaatttacaggaattatgttatgagcataaccaacactgtcatgaaaaaacaaattaaaaaatatttcgacatgtattttcggacacagaggttgactaagagattgtaataggaagttgacaatagcattcatcttcgatatttagaagaattatttagtctatttttttttatagttgtgcacgttacagttatttacgacatcctgcaaaattctaagaaatttggaataattacaatataaaaaataatttttaaataatttatttatatgcgggcatggaacagacaatttaaactttactttcaacgtattaaatttctttaaaaatctcaaaatttataaaattttaaataactacaacaccattataaaaaaaatgtactatacaaattttttcaagtacatggtgcttctacattgtaattttttttatattttttttttcctttttcatttgcttatttttaggaaatagttattttgaatttaaataagtatttttgggagtgacatgacatgataaggaaaaagagaaacaaatattttagagaggacaactcatgctatctaatactcataaattatgttataccctccaccaaaaatcaattgaaagatattattaccaaaaaaagtaatatcatcctaaaaaccatgtaacgtaaaaaatggaatgaaaaaaacgcttttccccaaccttttagattccttccacttcttgtgttctttcttcttcttttttttttttctttcaaaatagagtattagagtaaataagagtataaattaaatggtaaagttttagagttataagtttataaatagtataaattaaatatttattttaaccgtataagtacttaatatttataaaattgtaatttttctttaatttcgttagtacaggttccattttaaacttattaaaaaaatatttgaaagtaactaataatactacatgtttctgtctagacctaataatgtagaatttagactttatatgtgatattttaagacaataatagagtctatactaacgaaattagagataaattataattttataaatattaaatacttatgttgttaaaaataaacattaaatttatgtcacttataaacttaaaactttgagtacttacaataattgacaatgtttacccttcaaaatataaagaattgttgattgaaagagtcctttctaaggtttgtaaaaattaaaaagaaaaaaaatagaaaaaattacaaaagagaacttttacctattagtaatatgttataacaagttataaaaaaatattttatattatttataaataatataatatatctttatatattaaaagtgcctaaacgttaacaaataaataaaacccaataattaaacccaaaaaattaaaccatattttttaaattaaaaaaa

SEQ ID NO: 219108 - DNA, 1731 bp, Cannabis indica
atattcacataactttaaacacattaatccgaaaaatcaccacaaatttcatatttaagaaaatggttttgtgaaaaaaaaacatggagccctaaaatcaataactttggctcttgataccaattgttaaaataactattgctcataatcattgaagccaagatctagtatttatttagagcatcaaagaaaataaaacacatacctcccataccatccatgagagtgattatccttcaatgtcttcaaagaaatcaccaccaaatttgactaaccttgagcaaaagcctagagaacactttgtggagctaaccctcttttactcattaccattaacccactctaccacttcacttaatacatacacatatatatatatatatatatcatgcccccttaaccctaaagggttatttaccaattgggcttaagtggtccaataatgatatactataatttaatgggccaattatagttttttaagggtgctttcatgtgcctctaacataatatatgattattaaccattccattatggtagtgaacaaatattgagcacatagttaatgattgtgtttatggtattaagctcatgattatattagtccacaataataaatctaacataattaaccataaaaataatattttatcaactataatctacataactcattcatatcatttctatattttgtagtagctaggctgattatttggtttcttatgcttatgtttagactgccatgccttggctatatatttatccaaagggtattgaagaattgacactacacataacaaggaagtacaacaatctacctatttacatcactgagaatggtaacaagtgatttttattattctcctaatgacctaattttgatctcatgtcataaattaatcaactttttcttttttgttgtgttgttttctcaggagttgtcgacaacaatacaaccgcaatattaaaggatgccttgaatgatagtctcaggactaactaccatcatcaccatctattacatcttttaaatgccatcaagtaaatatttccatacaactttattattattaatatttttacattagtaataaataataataataataataaataaaacaaaaaaattggcaggggtggagcagatgtaagaggttactatgcatggtcatttcttgataacttcgaatgggcatcaggctacactattcgatttgggattgtgtatattgattacaaaaacaagttgcagagacacttgaaagactctgccttctggttcaagaacttccttcaaaaccatcgtctcattcaacaaaatccgccattgctttcctctcactaatttcattttacaatatttaaattgtaaatgtacgtcaatccaagtaaagttatgggtcaagaactattgctctgtgtttataccttttttagtctttgaaaaccaagtcaattagcttcttattatgagtttagctattgattgccttgcctccagttgatccccttccgaatttcagttgctcaacatgaaaagttgcctttgattgtttttcatatcatgtacaagcccaatcaaaatgttgatgcagaataaaagttagaacaatattattaataagatataatttctttaaaaatatttaaaatggtttgttttaagtattcgttgtacgtgaaacttacccttgaatcttgataattctatgaaaatagagttattt

SEQ ID NO: 219109 - DNA, 4660 bp, Cannabis indica
aaaccctcttttccattcttttaccgtctttagtataagtagcataattttcaaaaagagaccatgatattgtcagaaatcagacggccagggagaaaagcactttgattatcagagatgaccgtgggaaggatacttttctgcctgttagcaagtacttttgagatgaccttatacagaacattacataatgaaataggtcacaagtcactcatagtttcaggttgttctttttcggaacagaactatattagtttcatttaaagcatgagggaaagaacctgtatcaaagaactgcttcacttgggagataacatcttgaccaaccacatgccaatatttctgaagaaaaaaaacccagcgtcataccatcaggaccaggcgatttgtccgggtgcatctgaaaaagagcttttctgacttcatcatcatctatagcagcaagcagggtgttgttttgttcttctgaaactcgtttttggatagaccgcacaacctccatacaatccaccattgaagacaagaaaatttggttgaaataatcgactatcacactagacaagtcagtactccattcggcccaagtaccatcgtttcttcttagcttactgatcggattgttcctccttctagagctagccgtagcatggaaatatttagagttttggtctccctccctcaaccacagctgcttggaacgttgtctccaaaaaatctctttctgcaataacacttcttacaatttcacctcagcatttttataattctgaactgaaaccaagtctctacctgccttccaaactttcatttctgctttgcacatttttattcagtccttaaagtttcctgtgaagtccttcccccactcaataagcttctccccacagtaatttattttatcaataaccgaacaaccaaagtacaaatcccaaatatcctttacaatttgcagacaaagtggctcacggagccaagtattctcaaaccgaaaatttcttttaacagctactctctcaatgttttctaacaacaagtgtattggacaatgatcggaggtagatatttcaagattaattaacttagcaagagggaataaatctaaccaggtttgagtaacacctgctctatcaattctgacttctatccacgcatcactgcctcttcctctctcccacgtatacgggtaacctcccaaatccatgtcaatgagcccacaatcttctaaagtatcacaaaagccttccacgagcctacttgggtaaggattgcccccacgtttgtcttgttgagaagtgacattattgaggtctccaataatacaccagggcaggtttgatcgaggttttaaagttcgcatcagattccatgtattgtgcctcaaactcctattcgactcaccatataaccctgtgagtctccaactaccttgctccccacttgaaactgaaacatcaatataattagaaccataccctaaaagggtaacttcctcttcgaccttccacatcagagctacaccaccactcttcccctgagaatccactgaaaaaacaccatcaaattagacagcaacccgaagcttctccaaagcctccttctttgacagagtttcacaaaggaacactaacttgggcttcttttggattattaaatccttaatgaattgtacagcccatgggttcccaagcccatggcaattccaagacaatacactcataatgattgttgggcctgaacaccaaggcccacctgtacaaagttttttggatcctgacttgtttcttcagtattactcataatactatcttcctcctcacgtgcctccatgtttccttttttactagtgcgtcgccttttattctccaagatcattatttcctcatcatcaagttgaccagctaatgcattctcatcagtattaatactctctttattaggaatatcaataacctccttcattttctccccttgatttctctccttagttgttatttcataatcacccgtaatacctccagaaatcactccatcagatcccctagaatcaaggccattaatttgaaatcccacttccctgcttcgatcacgttcccccccatcgccactgccctcctcctcctctctgcccgttcgcagccactgagcccctatcaggtagttcttctttctgtttggtgccttcatccactccccatacaatctattagaagcatcaaagttctgatcaaaccttcgtggacataatctatctgtatgtcctatatgaccacaaataaaacagaacatagggacatgttcatatttgaatgtagtccatatccaggtgccatcttgttttattagtttcatacgtcgcttcaaaggcttctcaatatcgaccgtcactctaacacgaagatagtctcgccatataccaacaaaattcttcaggtcagtcttaacaaacgtcccaatataattacccacatgtttcaccacccattcagacatgaagccatattttagatcatgtagctgaacccacaagtctagcttatgcaagcgtaccattctgggatcctcacctctcctcagacgatgaaaaataagttgtaaccgattgaaggtccaggggcttccgtcaattacagtttgtatatcaagttcatgatagaactggaataagtatcgattagtatccaattccttgatgtaaactcctttccctggttgccaaagagatgccatcatatgcctcatagcatcaaagtcaatagtgcggccagtaagaaatttcccaactaaacaccatctatcatcaaaagcttaagtctcctcctcctgatcataagctattaacactccaccctcctcctcctccaattgaatctgcgcatacctatctaccagatcctcttcatgttgactgcttgaagccataatgtttcaggataataaccatatcaaactttctcctaacactcgtagcactaaacaccagatcaaaactttcactcataaactttcactcataagcaataacatacaataacatgtcaatagacaagacataaatataatgttatagtctcttatttatgctactattttcacaccacatactaaaattttcaactttttttttttttcaaaaatactatgtaattagaatttcacttgttgttttacggttattttttagttttccactgttgtttttaattgttttgttttattgttttacgattatttataaaagatagtatttatgtaaaatccgtgtagcagtaaaattgtaaatttttatccaaaatcaagtatttttgtaaaaaaacccataattttttaatctaattatacccttctataattaaaaactaatttatccattgtctctcttctctccctctttaggaaggccacaaccactctacacccacacacagtcaccctgctggaccaccctcatcggagctcccctcgtcacccatacacacaccgaccttgcaccaagggaaccattaaaaatgccatttaggaaccaaatcattgcaaaaaataatgactatataatttctttactaattgttgttagatttagttgcatttagtttgatatgtatagatctacacatatctttatttttgttttgtcattctgtgtctgcaatgtaagttgcatttcttggttttttttttcatgttttaacgatatttgcgttgcctttagcgatatctagcgatactagtgctagccagaggttaaggatgatgtttcacgatatttgtcaacgtgtcacgatatagctttggatatttgtgtcttagataattaacgatattttgaaatgttgtttgcgatatgttgcgatgatagtgtcatgcacaggtcactgatgatgtttaacgacatttatcgataaattttagtcctgcatcgcaaaacatttatggaaaatgttgaatgaaattacaaaatgtcgcaaacaatattattagcgacacaatttgtgatagcaacaacaaaagaatgcacttttgggctcactgcgatgtctaacaacatgtttgcgacatgttatgatttcttcaggttttcgtctgtttgatttatttgtttggagtatttttgttggttttttgtgtttcatcgatgtcttacaacattgttggtgacgtctaacgataagtattttgttgttgctgatatcgtaagacatcacaaacaacatcgcaacaaatcgataaaatgcaaaaaaccaatgaaaattgtccaaaaatataaaccaaaacagacagaatgaagaaatcgtaacatgctgcaaacatgtcgttaaacatcgcagagagccactcaatattcacataattgagtattgttatccatgttggtgggtggatgagaatcgatggtgggtggctcgggtatttgtatccacgtcgacgttggtctaaatgaggtggacttgacgattggccctcgattttggggcttcgaggtggttgtcatgggttttgtgggcttcacagcaccgaaggtagtcatcagtgcgagaggcaacaggattcatcgtcggtgcgagctgggcaatgtgagatggagggtttgattttgggattgtagtagcgccgtaagatggggtcaaaagcttgggagaaagtgagtagagtagagagagag

SEQ ID NO: 219110 - DNA, 5071 bp, Cannabis indica
ggaccatttacaactaagcttttctgatcttgtaatggacgcaaactatcacccactctctatctcctaacgtttggtctgttgaagttatggtgtgcccattatgaccccttcatctatatctgtcctaccataacttgataataaagaactctgaaatcttaccacagaaatatattacacaagccatgtgaggctagctcaagatgtatctcgatctctttcgagccctgaagttacactgaaagtaacatgcagaatcacctgtgtagtttcattgttactaaagtataacaataattacttcaatcatgaataaaactagttatagtatgcaaggatataaatttccaaaaggactgaatcctattcagatatctagaaagaattactaacattaaatcttatcatgaacctttgtttttcaataagagaattcatattggccagaggctccctgctgtggctctctgcctatcactaatatttggggactaggaaattatagcaatttctaaatagacccgaaacccaagaaagtctcgaacctcagatcttgctatatagacccgagagagtctcgaatcttgatcttgctatatagacctgagaaagtctcaaaacttgatcttgctatatagacccgagaaagtctcgaaattcagatcttgctaattttgccatatagacccgagagtgtgaaacatgaccttgctatatagacccgagagagtctcgaaacttgatcttgctatatagacccaaatgagtcttgaacctcagaccttgtaaacatacatttttgaccatttgaagttaaccctcttgggtatcatatattggccatattgagtattttattctcttcttcaacttaaccccctaaacattaagcagaaatgtttccacaaactttctttgtatatgatattttactttattttccaaccattttcttgtgttttcatcctaaatcgtggtactgtttgccagtaaattctctccaactttgcagagaaaacaatttcagtgacatctattcatatcatctacaatagatagtaaggcaaagaatccttcatgtttaccagatttactgacagtcattaactatttcttgttccattcacctaaaatacttaaggtgaataaaagtggcatcttctttttcaacacaaactatatcagcaacacagaaattgggaatagctcaattaacacagcatcaaatcagtattacgtattttcaggtcctcccctagtttctactacatcgacaaaaaatctcaagttgagtgagaaatatacaaaggaaacaaacatatcatgaatgaggtcgaggtcacctcccaaaacatttcagtatagacgaggttagagctgatgtaatgaattttaaaccggctgatccaccagggaaataagaaaacgcgtagtatgcgagtgcaagaacctgaaaatcatggaaagagcactcgaatgggaacatcatccagatggtaaaagaatacaaaaacgaaaaagagaaaagagattttgtgtggatacctgtattacagagaagagcacagagagaacatagctgtgaagcaccatggaaacatatatggtgccaaccatactgcctaaaaatatcaatgtgaaaggaagtctctggcaaaataattcgaaaaagtggcaacatgttaggtatgaacaaccgcatcaaaaaagaggaggccttatctagaaaacagaagtacctctttcgaagtcatgtgaacgaactgattttcgggcccttgagtgcaagaatgaaccgataataaagccacagccaagtgtaaagcatatagcgaattctgaggcatcaacaccatgacgggaaggaacatggtaaatgcgaggaaaacaaaaaataaccccagttgcaagaaatagaccgaagtacatgagagcttttcccgatgggacactactcgtggcagattgcaagctcccaggtagttctctcacacctttagaaaccctgaacaggttattaacaaattaaacagatgcataaagcaccactacataagattaccaacccaattgctacaccatttataaatcaggttgtttttatcctcaatgatttctttgtaattggaatcaaacatgatgaaaattggatatgcaagttctctaaccgcttgagttacaagtaaagcagaattatacaattccaaaaacaaacgcactatcatcatacagaattgaatttcgataagcaagttgcctagccgtttgcattacaagtaaaacagagttatattctacacacataaatggcactatcatcataagaattgaattgcattttcaatataatacagaacaaaaacacccttcccaaagtatcacttgtgtgtgtcatgtcccgttgctaacatttctacaaacaactttcccgagtgcttcgataaacacaatgcacagtttatttgagttgaaaataggagttggttttgactggaaacattttggtgcttaaatctttacatgttggcaatgtaattgtccttttcgtgtcggggaagccaagacgaaagtgttataagctagcagaaataagtcaattcctatacaattctctcttttacacaaatgatcaatcacattaagatcatgaagtctccaagatcaaattcacataagtaaacttctacatgctctccatttataagcaaaccataactaatcaaatcaaatcaagtcaatgctttcaaaagttactaaagaacctcaaatttacaaaatctctccctatcacaaaatctaatcttttatataaacactcacattcactattagaaattgaagttccaacaagttcaaattcaaccacaaattcataagcaaacaaaagaaatatcttgagatccctaaactgagagctaacttttcttcatttcattccaactcttaacaaactaagtaaatgttagaaccacaaataatactcagaacaaaacaactatcttctagatccaaaatctaaaagcagaacacatgtcaaagattcagcttctttacaatctttacaaagaataattacaaaatatttgggtaaaattgaatagcttacacagagaaagtgccagaaacagtgtcgttagcagatcgaacagcagattcaagatcgaaacccatattcaaagaagaatcatcttccaaagtttgggaagcggcgtatgagttccaatcagctaacagagaagaggaaggtctttccaatccgtcaccgccattatcggactgagaaaaccatccctgtgccattttctgcatgatgattttctcggcttccaaacactcaaagctcacttctttcttagctcaaatttggattaaagaaaataaaaattgaaactttaggaataactgtcgcccaattcaaggcttatggattaagcaaaagaagaagaagaagaagaaaacgacgtcgtttttttacttgtaagtatttttggtgcctatcattaatacttaatagtatttttctaagtaattaggggagtaactttcatgttttaatttttatacacttattttttttttttgaagcaataccctcttaaatttatttttgtttgcaaatttgaggtaccaattaaatttcatcgttaaatgttaattaggattatcactgtaatatatgcatacacgtgacacgaatccaatgaaaacatgtcatttatacgtgttcaaagtgtggcaatccctattgaaatttaattgacacctcaaatttgtaaacaaaagtaaatttacgaggaaattgccacaaaaaaaaattagagatttaagtgtaaaattaaaacataagagattttactgtcaattactctttttttaatggaaattcaagcattatcaactattattcccaattatcaaattatgaaacaaatcaattggaatagacttcaaattgaaacaacgattaggatacaaaatataagaagttgtagctagcaaagttatgagccactgtattagctaattgtttaacaaaataaaaaataaaaaaaaaaaaaaaaaaaaaaacaagaaatacttctcaattcagcaagcaaagttttacaatctttaataacatgcccaaataaagaaatcttaaaaataaatcttcttaaaggtcgcacgacacatagaatttgtctcaagagttacttgttgccaatgatgctcatttatccaactaagagcctcttgtacacccattgcctcagttagctcgcgcttgatagaactatgcgaaaaacaagtgcttccgtcaaaaactgttagcatgttgcatctacattaactttgatactattaactcatgttaaaattcacactaattgtcatatttttcgtatttttgatataagaatatttgtaattttctttcttaatatgatgatgtaaagtgaagttatttaagatattttctgaatacaattgatagtgaaagagttaaacaatgaactaaaccgaatataatgataatgaaacttaatgtgaatgagactcttttcactcaagcaaattgttttggctatgaattttgtggctctcttattgaagtgtttcaaggttgcgaagagttgttaaactagaaataactgagacagtaattatcaagaaagctttgaggtagacaaaagcttttgaatggtcaaatgtggtggtaaaaacaaactttattaatgtggtgcacgcaatcaagaaaactattatatgacatttagttaataattctaaattattgttatttgagttaataaatgtgtattgtttttttaaccatccgttaataagatatctcattattttgtttaggggtctctttattttgtcatttagttagttactattagttggagatttttatctttactatttattgtcctcactcttttagccaaattgctatacatttaaaaaaatagaaaaaagaaaaaagaaacaaaattcaaaaatctatacttgttctttgtagtatagtatttgcagtgtaattacttcttataagtgtgcatatataaaaataaaaatagag

SEQ ID NO: 219111 - DNA, 2044 bp, Cannabis indica
catacattctttaattgaatgaacttaattctttcttgcctatagtggaagattgaatgagtattgtacacatgaaagtttgaaaggaaaatcaagaggaataattaacagcagcatcaaattatgtcattttcaaacgaatacatatcaaattcaaggatgcttcttaaaacaatttttccagtgaaggttgaaattggatatggatgaaaaagtgatcacattcttcggacatttgcttatttgaaattgtatcagcattcattggttagattaaaacttccatttgataaaagaatagaaaaggagtagttaatgcacttttatatgtttactctatttgcaaagatattgttcaaaattgcattattctttaagagactttaatagtcactcattttggagtaggaaacaagttctcaaaatgtcagctataatgtatttcatttaagcttattaaactttcttatatactaacaatgctgttattctgattcttgtctgtgatttgaagtatatgggagagctgggctgtcattttgaagtttaccgcaatgatgaactaactgtggaagaactgaaaaggtaaaagtttatatttaaagagaacattattgattgctaatccttaattaagatgatttatattttctgccattcttacaggaaaaatcccagaggagtgcttatctctccccgggccaggtttgagtttatggtgttcgaatttgataagacatgatgaagaacttttataagaaataatatgttcttcaaggatcattagacatgttatttcattttaacaggcgcaccgaaagattcagggatatcattgcaaactgttttggagctcggaccaatggtaccgttgtttggtgtatgcatgggcttgcagtgcattggggaagcttttggaggtacctaattagatacaatcaatcatatcgattgtctcattcatctaattgctttttttcttgggcttatgattttggtgttgcaggtaagattgtaagatctcctaatggtgtcatgcatggaaaaagctctcttgtttactatgatgagaaaggagaggaagggttgttctctggattatccaagtatggctttttttcttttcaataatatttatcaccattgttggtaacacttcattgtggggtagagattttctagattgcagtgttttattctattacacatgttgtctaaactcaagtaccattgcgctttgaagccatgctgttaaaagagcataaatggctatgtcggagaatttttttttttttttttttcgataatctgctttagtttcatagtagttaatatgtttatattctttacagccctttcactgctggtagataccacagccttgtgattgacccggacagttttccccatgaacaacttgaggttacagcatggacagaggatgggctcgtaatggctgctcgccacaaaaaatatcaacatttgcaggtaaaaaatctttctttcatttcttcactcaatataaaccgagctctgcagatgtaacttggcgttcattgttgattttcaatcccgaaaactaaactatgacctggttaaggtgtagtgattaggaacattataagttttggttggagggtgcccttttcgtcatattggtttctttgatcacttaatgatgaataaaaaaatgaaattgaaacttttttgtcagggagttcaatttcatcctgagagtataattactacagaaggcaagggaattgtgcagaattttatcaaaatgattgagagaagagaggcagaaacagagaactagatctttggtttactacattcaattcaacacacattaggctttttttccattcttttagacttgtgatgaactatgctatgtagtaaactataatcaaagttggcaaactagtctgttctcttgttttaattgcttcatgatgagctttgatttctaaaataaagggggtgaaaaaaaaaaaaagaataaataggatttttaactatgaaacagagtttttgcttt

SEQ ID NO: 219112 - DNA, 3714 bp, Cannabis indica
catttacagtatgtttgatacaaaggaaagaaaataggggagaaagaaatgtaggagatatagaaaagtagaaggatagaaatgagtatatttccaaccaagaaagttaatttactttaaaactgcaatattatcattaaattattattataaatattgttgtgtatatatattttagtctttcacttttatttgtttgtgtgaaacatttctgaggaaaagaatttttaggtcccacaatgttttttcacttttctctccacttttccttcttattacacaactcatttttctcattactttttacttttctctcctggattgttgtcagctcttgcagttctcacttccaagtccaaactgcttataaaatatttttttaattaatcatctcatcaaatatgtcattgaagactgcattttgacttttgtagccatatgtcgatgagcctcaaaattacggtttaccagttgcagattatgaaaagctgttcaacatgactttagctgctgataaccatatgctacaggtccgttcttttgtagttttattaaaactgcctcagtaaaaattattacagcaatggcacttctttcaggttgccattcatgctattggtgatagaacaaatgacatgatcctcgatatgtatgcatctgttatttctaaaaatggaataagagatcgaagattccgggtaagattaagatctatattctagaataggtagaaaatgtgatataattcgtcaattaaggaaggacatatatactcttcctcaattaggcataatattacaatcaggaaagtaggagctaatcaaattaaatctaccgctgtaaatccagatttataggaacaaaacaaaatctttaaatttacaaaatacaacaaattcaggtaacaatcacaccaaactttgtctaatttaatcaagattctcaccagttaccataatttgaagctccaagtaccaattaagtattgcaaggttttaatattgatatttatttaaactctatttttacgtgattagatcaattttcagattgagcatgcccagcatcttgcacctgggactgcagaccggtttggtgaactggggattattgcttcagtgcaggtttttcatcacagctttagtgtaatatttaagcactacatgggataatttagtcttataactgatcccttattcataatcataaattctaatactggcaagacaaagattattgttttattcatttttatgtaaataggttgctgaaaattttaagcttattacagggagatatatccatgtatctcatgtgattccataatacttttttcttcaggagactttacacaggatgaattcctttgtacttctatgattgcttcaccatggtgtagaattagttgaattagtaaatacattatgtttgttgaaccatcttttaaaatattcttttttattaatatcttgaggtaattttatgtaaaatgttgacagccagatcacctattggatgattttgaatctgccacaaaaaagcttggatttgatagggctcaaaagggttcttatttgtttggttcacttctaagtggcaatgctacgctagcatttggttcagattggcctgtaagtctatttatctaatgcttagggcttttgcagcttctatctttgtctgaatattctttgtatagttgattgatacatcaaaataatttgtcttaggttgcaaacataaatcctttaggcggtgtcaggactgcaatgactagaaaatctcctgcatgggaaaatgcgtggaatccctatgaaagtatttcggtgcatgatgcattaaaggcgtaagttaaatcaaaatgtttgttctttttcatcttctctcttatgttaggacaatggaacatagaaaatttaatttgagtggtactaacaatcttgaataatgattatggtaaaataactcaactagtgttgcattaatgtaatgaatacttttatttttcttttagtccttcctttccattgtttgccacccaccttagctagctacgagatgtttaatgcaagttatcatttcaatatgatttgtaacaattttcttgaattgtttgatacattgtaatttttgttagtgctcttaatttcttaaaaggtctctcattaaataggtagaataagataatattggattgtatttcggaaaagaaattttagaaaaagtgagctgatcatttacaaacaataaattatgaagaaaatattcaaaatcataaacttttatctcatattatataaaaagaagagagattggggggaatgattcatcatcagatatcagatgggtaattgttaatttttataatatgctctccaataatattaccataacattcagtgaaaattattgaatccaagatgctatatccaaatcccccaagaaggcatgcgtgatcagcttttctcttccatggcgaagaagaaaagagtgatttgaaagtcggtaactaagttgaatctagcggatcccccttcaatccaagaagatttcaagaacgctgaggacagtggctcagaaggattggatttgattgcgcaaattctgcaatcaggtgatattctcaagattgacccagaattagcgtagggaagttgcgatgagaaggaagttagggatgcgaagatgagtttgacagggtaggtcgaacgagaggatttccaattgaactctcaacaatggaagcaattcatggaaggtaagtcttcagtctgagaatctaagttggtttatacagaacctatcttgaaagatgggattaaaatagcacaagttgatgtggatgaggttcaaaaacaagctgctaactggaactcaggttttgtttgtatggttttaggggctaacctcccaaccacggtgttcaaagaatttattaaatgcaaatgggggaatcttggaattacacagattgtgcatatgaacggtggctataccattgttaaatttaatgatgtagcaaatcgagatcttgtcttggaggaaggagtgatgcgattgaaaaccaataattgtgcgactcattaaatcggtattgttatggattcgattacatgatcttaggcttcattattggggtaacaagtgcctcaacgcaatagcgagtacgattggtaaacctatattggctgacaaggttactagggagagaacaattgttagatttacaagggttctggtggagatggatataacagatgaacctccgcaagttattcattttctgaatgaacatggtcaacttgttgggcaaggggttgattatgagtggcttccagtgagatgtaaagcttgtcatgactatggccatataatggcagactgtaggaaagatcaaaagcctcccgtaggcaataaattggtagggaaaccagttggcaaattgattttgaatgaagtaaaaggaaagaaagaggaagaggatagtatcattgagtgtgctcctgaacttaaagttgcagagcaagaaaaggagcaggctcctacagtagagaggttgacagagaatactattactgctgtggttatgaagcagccaaacagtgtaactattggggaagaagggatttgagtaaagtagggcgtgaagattggcaaaccccaaaaagggcaattcaaactagaaagatgggtaacttgaatacaggtaaacct

SEQ ID NO: 219113 - DNA, 7681 bp, Cannabis indica
atatttatatatatttttgagtgggaatagtcttcaccttacaaatagttaaccgtgagaattaatatttgattaattataataatagtgatataatatctagtagtaaatagtaatattgagtgtaagtagtatttttttcaatatttatagtcatgaatattttgcttcacgtgcgtagcgcgtataacttttactagatattagagtttgtcccacattgctaatgtgtggaaataaattgtgatatataagatgaatgtgctactccttctattatcaattttcagtattagcgtctttgacctgtttcagaatccacgaattttcgatgtgtacacccacaaatgaacaaaatttgataatacatctctaaaaaaaattgataatacatacttcaagaggtaaaattgtaaattatataatcgaagtcccaagttgagatggagaatatttgatcaaagagcatgatttttttctatcaaaattcaatgggtaaaataccctatttattctagataatttacatcaatccataacttttatataatttaacaatcacttccaataactaattattattattctatataattctgacaaaaattaaacagatactttttaatacttagtagtaattaaaatgaggacgtaaaatgttattcacatactgtataaagaaagaaagaaaataataaaattaaaaaacttattccaaagcccttactccttcagcgtgatattaacggtaaaccaccttgagtcaacgtccaaagagtaaatcatcacagcatctactttagtcatcgtcatcgaatataactcctttgcttctctctctttctctcactctctcacacactaaattcgtggcacgaaaaaactatggcgactggtggctcaaaccagccccatattctggtgtttccatacccagcacaaggccacatgctcccactccttgatctcacccaccatttggccctccaagactttatcatcaccattataatcacccccaagaacctcccaactctacgcccactcatctctgctcaccccatcactgttcacaccttggtcctcccctttccagcctaccccaacttaccctccggcgtggagaacgtcagggacatcggcaatgccggaaactttcccatatctaacgccctcggaaaactcagggagcccattatccactggtatgaatcccatcacaatccccctgttgcccttatctctgactttttccttgggtggactctgcaccttgcccagcagattaatattcccagggtagccttcttctcatctcaggttctattaagctttgttcttgatcagtgttgtagtgttttgagtgccttggaaaagagttcttgctcggtcgtggaattccctgatttccctggatccccgtccttcaaagaggaacatttgccttccatagtgcggctctgcagggaatcaaaaccagacactgatttcgtcagagatggcctcatggcaaactattccagctggggttgtgtttttaataccttcgaagatttagaaggagagtatttaagatacttaaagaagaaattgggtcaccggagaatctacggggttggcccattaagttcacttggcattagggaaagacctgatcctgagaacaatctagattgtgcaagcgttctggcttggcttgatgagtgtccagatgactccgtactctatgtttgttttgggagtcagaagctgctaaagaggcagcaaatggaggccttggcttctgcgcttgaacagagcgggatccagttcatatgggtcgtgaaaactggcaccgccgagcaggttacagcagggattggtgttgttccagatggattcgaggagagaataggtaagaagggattggttgtaaagagttgggcgccacaggtgatgatactgggccaccgagctgtgggaggatttctaagtcactgcggatggaactcgacactggaaggcatagaagctggggtgaggatattgggatggcccatggaggccgaccagcatgtaaatgctaggctgctggtggagtgcatgggtatagctaccagggtgtgcgagggagcagatgcagtgcctgaacctgctgagctgggaaaggcgatagccaaatccatgagtgagaatgcacctgagaaaatgaaagccaaagagttcagagagaaggctcttgcagcagtcagcgacggtgggagctctttgaacgatttggatgagcttgtgagagagttgcgtcagctccataagcctgttgcaaatgagatggtgaagcaatgaacttgagagagtgaaagacgaggaggtgaatacaagaataagatagtgcgaatatcaaaattatgtttaaatctattatgatattaacttgtactaaaatgtttgtgaatctaagattgtatggccaatcgaactagagctgcgtaaagaataattataatttgtgccctgagtctcatcaataaaatccgcacagatgtgccaagactattaatctaattaagttaatatcttcaccataatgcagaatgatatatcacaataaatggcaagatttagtaaatattagatctcaaaacatatgtaaaattggataaaccacttcttatagtggcaattgatatagcaattttttttttttttgaatggtatagcaaaagttgaaagaagggtaatactgaaaaaaataaaaaacagaagttagctgtcaatagtcaatcatttatagcattgatgaaaatccaaatatttcagggtttctctaacacctttgcaatctacataacaaaactattggataaattttagctctgatgttcagtttctttcaacttttgaggggaaatcattatttacctttattttccacgttctccctgtcaacttacattactttgtttcgtttctccttttattttagttctggtatgaacacgcacatgcacactcacacacacaaaaaaaagaaacttttaagtgaataccttgttcgttgcgtcacctcgcaaccaattcaatgtggtggtacagcgaactttgatcacacatttttgtaaaatatatacacgtataatttctctactcctgcaggggtggtgaactgaagaaatggttctcgagtttgtacacaacctaaccctccaatattcactgttttaatggtccagcttgatgtggagttaaagtatattaaaagcttggtacttgttctccaaaaggtactgttactttgctcactaaaagttctgtatcagtgaagctgtaggtcttctccaatgataaggtgataaagaatcttcttttcttttattatcattattcagttttaccaggaaccaagccagattttatcatcccagcgataatctctgattccgaattggtatcaccgacttcatgaaaagccttaagcatcaccccacaaagctctcgatcaggagcaatgccatcaaataacatcatgttgaaaaaatattttgcttcagtaattagacttcttttgcacaatctatttatcacagcactataatctctgacagatatttcaaatcctttctttgccatctgatggaagactctcattgcttgacatgcctcaccctttgcacaatgagctttaattattgtggtataagcaacttttgtcagacaaacattgcgttcctcaagagaaacaagtagacagtcagcatccttgaggtcgccatgtacacaaagaccattcaaaagaacattgtatgtagcaggagttggcttgagattatgcaataacatgtcgttgagtaactgaaaagcttttgtaaagtcccgagccttgcaaaaatacttgatgatggtgttgtatgtgatttgatctggcactaaacccttaatatacatattattaacccactggaaagtctcttgaagcttccactgtttgcagagtcctttgataaccacagtgtaggttacatgagttggcctcacacctatgacttccatctcctgtagtaatttaagcatgtcattgatgtttccttcttcacagtaagcattcatgagagtagtataagtaaccgcatttggtaccaacccatgcagcttgataatattcaaaaagttgaaagcctcagcaagttttccagttttacacaaaccgtaaatgagagtattgaaagttacaacactaggagtgatccccttttctattatttttttatacaactgtacagcttcaaaaatattacctgtttttacatacccatcaatcataatattatagatgatgatatcgtacatcaaccccattcttaacaaagtgttaaaatatttcctggcttcagatatatttcccttctcccgaagacccaacagaatagaccgggcagcaaaattattgggtaaaattcctttcaagcacatttccttgtataattgactagccctttgaacctttccttgtttgcagaggccatggattactatagaataggttattagatccggttccaaccccaaggactccatttcatcaagcaatctcaaagcttcttcaacctgtccacttttacacaagcagctaagaagtacaccatacaacatgacagacaactgaaaaccacgtgatagcatctcttcccgtagcttaagggcttcctcaatatctcctgcataacaatacccacatatcaggattgtaaatgtaacatgatctggattcaaccctttatgcaacatgttttgaataaccttccgaactccattcattagaccaagtaagtgaaaccctttagcaagaatgttatatgttactatgttaggttctaatccatgcttctccatgtcatttgtgaactctaaagcttcctccattgaccctgctacacatagcccatgaataataatattgtaactgtatgaatcaggaagcagtccatacttcaacatcatacaaaacaatgactttgcaacatccaccagacccaacttacaaaatcttgacatgatagtattgaatgaaacagaagaaggcccaggctcctctttactgctcctcaggaacaaaattgcttcttgcatcttcgattgcttacatagaccatctataagtatggaatccgtgtactcattttgaggaacaccacgggatttaatttcatcaaatacatcccatatgatgtctgtctccctcaagttatacaacagacagttataggttgccaatgaaacatgcaaatttaaatctttcatcttagcaagacaaagagagcatcatgaaccatctcacatcttgaatatgaaaatgccaacatatcccacaccaccctatttgcatcccagtccccaaacctattcatgagcagttcacaaatcgaaggtgcagaaccagagcctacatgatacattcaaatttcaataaacatagtatgcaatatctttaataaacccaacatcaaaactaagcaaacaaaaacattcacattagctatattatgacgtggttatgccaaaatacttgaaagctaatatttggagatataaataaggcccaaggatttttgaacagcaacaataatggttattttcaagacaaatgtagtctaaattgaaatttatgtcactaaagaatgatcgaagttaaaagcaataccttcctcttccaccatttgctttataaccaaacgcaattcctcaaaccagctttttgacgccaaaacatgggagacgacgaaccgggaaaacctcgaatgtccaaagccataaacatttctcaatgaaaagaagaaacccaaagcaaattctgggttctcgactctcaaagtatcaataactgaatccacctcaggttgattcaatgtagagaaagcgtttttgaagtaatccccgccaagaaaacttctcaaaccaaagctcttcaagccaaggaggatttcagtaacagtgtctgtgtgggtttggacaatgggttcttcttcgtcccctatctttgcagctgagacagtgagcttggtgaaaatgagggatgagagaattcgagatttttccacagacataatgtgtttggtcttccatcggtgtatgtgattaagcatggaaaatagtgaatttttgagggaaacgtgaaaattgaagaaaaatatggaaatgaaaagggaaaagaggtggttgtttcctgtgataatttgaggattgagacagaagtattgggattaagaataaagttagaaagaactagaagattacatgatagcatatccgaatagagattttgagggttttacgaagacgttattagggttttagaatgccgttggtttcgcggcaatttttagtttggccttacagacatgtatgttactacttagtacttactaggttgaacttcatttttgttcctctttttttaaagagaaaaataatacattcatttttgtcttttcgttcttttactgttattatttattggataaatatattttagattttgcaaaagttaaaaaattagattctctgttttgttaaatgacaaaatagattatgtattttttaaaatggtacaaataggatgttgagctcaattttataatttctttttttttttgaatggaaataatttttattaaataaccatctcagctaccaaaataggtaacaaatcagttggaacagactccaaactgaaggtgcaatcagggtagaatatagaggctcgggcaaagctatgagccaccatattagctgatcgtcttacaaaataaatactaacatcatttaaaaacttaagcatatccttacaaacattcaccacttgaccaaacatggatctcatctcaattgtgcttcgtaaggcttgaatcacttgtaaacaatctgtctcaatacacacatttgtccaacgtttcttcttgatccagcttagaacttctctgattcccatggcttcggctgtaatataactaacttgaacataatttataacactaatagatgcaaaaaatttaaccagttttttaataatacctttatgtcagattattattaagttttattttgataaacaaaatcagttcaggttctattattttgataaatatttatagctacattataatcactcttactaaatttatctaattttatgggaattttttactattttaatctataattattaaattaaaaattttacatttaatcttttaaaaagtaatatttttattaatgggtcggtccgtgcctataggtcagagcgttacaacgatgattgacttctctcttcttcttttttttctctctgtatatatacataaatatttctttttttcagtttttttttttctctttctgatactatattttttttatctttatatataaatatataataagagtacacttttatatctattttttaacacatattcactctcttataaaattttgtttttttatttttttaaaaaaaataatacaaacacttattctatatcttttttttttcaacgtttacatttttttactattcatactcaaactatttcatactattttctctaattaatcacattttattaaaaaaaatcttaattaattactttttacctttactaaaatatgtttcttttacttttacattttttctcatattttttaa

SEQ ID NO: 219114 - DNA, 3668 bp, Cannabis indica
tgcaagtaatgtttagttgcttgggtttcttggatagaacagttttgggtggagagtctaaagccaacagtgaagctaaattttaatggagtgtgccttttgcaagcttctgtttactccacatatcttattccagtaatgattttcgtctaattgaactgccactttgaaagattttctttcgtggttgataaaatttttggttttgtttccttttttttctttcgtatctcaatgtagttactgctgattattattttgtttgttaaacaagaaaaacttcagttgaatgagaatagatatttacttttttcctttgcagacgtttagattccattaatctatttttttttatttcaatcgttctcataaatgcatatttatagatttatgctaataaaatattaaaaataagaaaatcaaggaaaaaagaaaataattttggagagattttagagtggcacgtcactgcctctttatatatatagatagattattatccttatttcttatcattcatgattatcaaatcctgtagtgaaaggtagaaaccctaatctcccaaattttctccattgatttttcagtaacgcaggcctgatggctcctttcaaaggcaaagcaaagatgtccaagcgtgatgagggaaaagacgaaagaatagacctgaagaatattatgaaagatattgagcttttgggtatttcttaatttcacctctttcctttagaaaaaatttcatgagattcatatgattagtggttactaaagacaccaattttactctcttagtcttgaattgctcataatgttccttttgcatttgtttattcagtttctaatcataactaaattttgttgaccaggcatagccaactgagaactaagaaatcttcacacactgtgttttattgaattggagcaataataactttattaattatgttttagtggaaaacttatttgaaagaactaagggttaggtaatgggattattagaagtattttaagttagaggggatatgctgcgctaatttatcaagaatgtgcttattgagatgcaacacaaagtgagttgatctctgttttctattagatgtcatattctgacttaacataggggccatgatgatccagtgggattaggttgctctatttgagcctcctagtctttttttaaaagattttcttctaatttgattgtaattttacctctatgaataaagttgtgatttctacccctttaggatcatattcatgtcatctttattgctgaggaaatcaaaagaaaagtgattgatttttttcaagagacaaaaacttttgttgcttagtatgtatttggaccaacttgaccaagtgtcataattttgtatatcagtgcccagaaacgttgattacttccaactttaattttatataacaaaatgatttgtttattttgctcttattatttgataaaaatctttagttgtggttacttcacaaagaaagaaaatattacctttataacaagtagcctgctttataatatgatgttctgaacctgatgtacagtctcagagctttacataactataagatgctgagaccagtcacacaggaactatcttctgctgtagttcacagtagtgaagattatttttttttttttgccttcattttgccttctatgactagcgtgattaacctcaaagtcattagttagcagcatcctttaattatgataacattctctcagaagttaaaccttaaagatgtaattgttatatttagtcatcgtgttctgtcattgttatatctagaggcattttttctgagtggatcctgtctgttcttgtttcatctaccttgctatatgtgagtgggcttatcccctctttggtttatgtgagttgttataagtaggctatcctgtctgttcattttcttttagtatattatgcaatagcaataatttgcggctggattgttttaacgtttttagagagaattggattttggtaccttggtatgttcttccataaagatttctattaataagttgattattttgtctagtgtatatttgtttcaaggtgcctgctggggcttactaggtggatggtgctttcttatttcgcattgtattgtcagatgtatccatttgtattggttcaacagagggagtgtgattatcttgtacaagagtagaggatgaaggaatatctcttgaagatagattagaaacttctaacactattttgtacgtggtttgaaatccttaatatgataattttcaagtggagaagtgtttgtttcatcaaaaaaaaaaaatcacattttaatgtttcatcaaaatggaatgtcctggcaatcttgtggcttttatatacaccagtgattcatagggtcatataactgttttgcttatacatattcattaaccataggattcattgggtgtagaagtttctgatttgggaggctgactaaatatcatatctaaaactaatcaagtatttttcttctgattctggtgtctgaaaagtaattagatggattgatagaattcccatgaaattttcttaaattacttatactcgatttgtcattgttcctgtcttctgatttgtgcaatatataaagttttcctaacctccatttttccatgtaaggttactcgcatatgacatggaaggagaagaaggaatttgagaatatgaaggtggtttcccttgggggaaaggtatggtaaagatttccctgttttattcagagagcactcaactttgctctgagcaatgctttgagtgtttttatgtctaatgtccagtaagtttgtttttcttgaaaaaacgctcaaattttgtctttctcttgggacagccttcaaaacaacagagattacctcttagtgtagcaaaaccgaagatgaaaaaacagaaggaaagagaacagaaaatgcttcaagaggtgattgattctctctctctccctcccttggaaatttactgattattgcaaaaatatagctctggtgctaactgctgtagtttttatagaggttgattctcggtcgatttggtgggagttctagtaggaactctggcagtggtgggaaaagatccgatgtgaagcgtcgtcggccagaggacagagttctgaagtcaagtcaaggtgtttttagaaaaggtgtacttgatgtgaagcatttgctgagtcataatccatccagagcgactgaaccttccactcagatgttcaacaaaggaagaaagactggaaatggaaacagcaaagggaagagtggtggtatgaaaatgttgaaatttaatttataagtaaaaaaaaaagccaggataattcttgtttatgcatgacaaaattatattagtttttaatttacctttttatagctttagagggatccgtattctctctcagaaagagagatcattaatttttttcttttgtaacttaaatgggaagtattggtattcaatcaatgcaacgtttttgtcaaacaacatctaatccgtactaagtgcggatttcatattttagatccaattcgatccgcataatagtttaaatttaattcaatctacaatagtgctgattggatcggtattttggattgtgttttttttttttatgataaattatttaatattttataaaaaaaa

SEQ ID NO: 219115 - DNA, 2504 bp, Cannabis indica
tattataatataatatagaagttactattatgacttacaagaacatcatagaacaaacaaacacccatatatatattccttaataaaacataaactaattaataacaagacacagagagtacatatagttatatatacgacgcaaactaataatttaactaaatcccatgatctgtttttgctgtcgttttttaataattgttcctacaatctcaaacaattgcgatagggcccacattggcggtggtttccatggccttcatggcttcaaaccttggctccttagcttggaatttcagcccagcgtatagcttcatgtagtcctcaaacacaaactttgggtacacaacggctcggctttcgctctcgccctcattggctgcagcttcttccaacaatgccggcgctggaaagataacggcgtcacttccagggttatagaaagatgctattgacattctgttaccgtcagattgagctatcacacggtgcataacgctcttgtattttccgttcgtgattacctataaatacataatcaaaataaattaatatggatttttttaaaaactaatttaattatattaataaaaagtaaataatgacttgatattttatattaaaaattactgtaaattttatagtttcaagtttacctcaagttggtcaccaaggttgataacaatggagtgtctcatgggaggaacatcaatccattcaccatccttaaggagctgaagaccactgaccttgtcgtcttggaagagaagtatgagacctccggcgtcggtgtgggcccggaggcccttaataagttcgggttttgggcagggtgggtagttgctgaccttagttccgaaagttgggcctttggatccgtaaaatgcatttttgaggtagcctttttcaagcccaagattctcacacaacaaatccagaagttgctcagctagtttttctatttctccagcaaactctttcatcacatccctgaaaaaacatcttatattagaataataataacaagttttttttttttttcaatcatgaatagtactatatatatagtacataacataatatataattaacctgtagttttgatcaagatcggggatttgggacaagtttgaagtgggaagatggcgtaagaagaaggtgctttcccaatccaaatcgtcgatctcggactgtacggcctcaaggcctttgcttttcaccatatctttaaacctttgctccatgcactgtctgtagtgctcctttgttagcctctcaaccgtgtccagcagttcatgtgatattccatggttcatcaactgatcaaacataataatttcacatgaacaacaaaaagaaaaccataaaaaccgatcccagaaacaaaatatacagaagaaagaacagagctttataaaaaagctatctttataattataccactactttatatatatgtatgtatgtatgtatatgtatacctcaaagaaaccccagttctcacaagcgtcgttgatcaactccatggttgtttttctctcatcagtgctgagttttgccatgtcaacaatgggaaaacttggttgaattgccatttctttcttttttgttggaagagactactttctatcaatatactctgtttttgggtctctaagaagagtgagtgatcttaagagctaagtaagtaagtgtattgaaagttggtatgtggtgagattggtgtaagggtttgaagcaatttataagcgataaagagaacaaataatgatggagatggaataatagagttctgagttctctacagtgaaaaataaagtagtaaatatgttttttttttttggaagaaaagaaaaagaaagtaaattgaaaaaggaaagaaaaaaaagtgaagagtattgcaataaatgaagctaaaaaaaggaggtgtggagtcgtggaagatgtatgtgagcacatcctgtgggggccgggtgcccctattctttcttctttgtgctgtggcataatctatgacttgttttgtccaataaatgaataaatatattgtgtgtgttataatgcaattttctgggaaatgggcctatatttctactttggctctttctagtttattattatcgtcactttcttgtgtctagttactctctttctcttgtcagactcttttcataacagcaaaaataagagaaatgtattaatacaaagttagtaagatattgatattgatgtattttagtattgatcagttctgcatactttaaaatgagtagttctacatacacaataatagagattagagtaatgtaaaaatttgtggtaagataaataaataaaagaatttcaataatatattttaagggatatgattttgtcccgtgatatactttcacggaatgtatttcgtggtacattggatgagtctcagggtacattaaatgagtgtcagggtacgtttctacttttaaatcctaattatttctagatcaatcttagccgtcaga

SEQ ID NO: 219116 - DNA, 3929 bp, Cannabis indica
aatgtgaaactaactcttaatagtgtagtagtcttttctatttaactgaagctaatgatgaggagtccagtctaactaaggttttgttactaggtgtctccttaactctataaatgcgtattgctcttcataattgtacttttttgttgattagttgatgtacttctgttttagagacagggaagaagacttaatattgcactaacaatttttaatattttcaattatcttaatgggtcaatgatgtatgtttctatatcattgattataaatagtattctaaattgtgtgtaatatagaacggatatcatggaaaataagttcactgttagaagtttttgaataagttcttcatgtgccaagcagagaatttgttgatggggactttcgttgagaatttcacagggttatctttttctcagttggcagcaggatttgctttctttgtgccacaaacacaggcccaatcatccatctctgtcactgttatgccttccaggaatggtgagtaacgctccataatgtatggaacctgcatcaaacccatgatccaaactttatcagaggtccaagaaggtgtgatttataagaatcaaaagtatacaaatcgaatgtgattttgtcatatgacaaaacaaaaataataaacacaacttctctaccaaacaattttagtttgacgacatttgagaagatctaacaagttcaatactacagctagctgtttttttgttttaagatatacaagttcactacaccaattttaagaaagaattgatttctaacagtgaaaccacactaagctaaattcaagtctacatgttattgcgggaagttacctgctcggatagaattccagaaagagcaatcactgcccttggcttggcataagacactatattttctgctaaatctaatagtggattcatcagaatatttgcaaccaccatgtcatatttctccgtttctgaaatcatttcaacttcatagcagctttgttcttctgttgttccccatgagtctgttgccgtagtgcaggtttcgtttggaacaaggcataattgcatcttctcaggtcctatttcattcagtgcagcattctggcgtgcagatgtaattgcttggggatctatatcaattccaactgacaaggcagcaccaaactgtattttcaccactcaagatgtgaacttagaatttctgagttagttggcataattattgcttaaaaagaaacatgttccttgtttagcatcttgctttacaaaggatcaccaatgtaaagacaccaaaaagataattaagttcacattttaatgagaaagttataaatagtaagtgtaatatggataactgcttactatgctttggttcatacttgacttttgtccatgttccacccagtttccataagttttaggtttaagattcactcattaatgtataccttaagtgctgcaattgcgagaattccagaacctgtgccgtagtccaagaagagttctccacccttaatcaaattatgaagcaacaaaagacacagcttagtagtagaatgctccccacttccgaatgctaatccaggattaagtattatatttgttgctttaatgtcctataacagcaaagcaacataaatatatttactctgcaagtaagatatctttaaagatgacattcttcactatgaataacaatgaaccacagctccagcagactaacactagaaaatgaaacatttatacccaatcaccatgtaccaatgcaacaaatacttatagacaaagattaagataatcatacagggggacttctccactcaggcacaatccaaactccttttgtaacttcgactggattgaaggattcctgtacaattcatacaacaaagtccaactgattataagctgtttaaaataattgatgaattagcagaacttctcaacatatccaatccatagataaaatatttaattctcctcagtggcctgtctaattaagggtatagatctgcaataaaattcagataaagataatttcttgagtggtaaagcattcaacagaaacttaatgcatgagccatattagaaagtgctccaaaaagatcatggctcaagtatgatacaccagcaagcaacaatttagaataggtatatgatcctactcatgatccctattatacagctcttaagaaaacaaatacagatcagtgtcatcaaaggggtatataaaactgaagatagtataggcaaagaagcaatatggttaatctagttgcaagtatttaatataaaagacaatgctaagattttgcaacacctactgaaaggacaataaagcaaattgacctgagttttccttatccaatcatattgctcgcccaccctaacttcatatataggtaattccttcaggccaatagaatcagcagcatgtgaaatggacgaacttatattgtgatcttccggaaatatggaactaatacatatctgcaaaaaagttaatttacttttatgaaaagtgtagcagtatacatagtaatgtttacttattatagttggttataattaaggaaacattaaaaacatgaatacagatgaaattgaaatgcagcagattcaagtttaaatctctccattgttttcgttattccctttaaactttaggctcctatcttccgtattttaaaatatcatatgcattgcatattagtgtatcatattcatattttcactctcttaaaagttaaatataatggaggcacactggtatacatataaaaaaccttggttattgttccactacaacctctaaaccattctcagctgagcattccactaatgctttaaattacctatattgattttactctaaatcaaattacaaaaccttcactataaaatcttatcccttactgctcattgtttagtactattgtatgctcttaaaaaggttgacaagaaacataagacacaaaacaaaacagaaaagtgaagccatttttaaaaaacaaatgacataaaatgcaagcatttttaattaagctttttggccaatgcaagtgagagacagatgggttcacctcatcagactcagaactgtcatcagcatcattttggtcaatggtggcagagcttgctccaaagcacaaaagagcctctgaaagcatatcctggccaataaataatatgacttgggtcctcaaaaatccgtatgcttaataggaaaaagaagatatacccaacttaagtttggaaaggaagaagctaaccgcaacatgtttatggcagcgaacgtcgactacaaggtaagaagagacaagggagctggctgtggaagtctctgaagaaaagtttgaaatgggtttgggctggtttagctttagagttcggtggattctgaataagggtgagaaaagagagcgtgaagatggagagaaagggtgaacatggaatgggagtttgtggaagcgccgagagctcaacaagtgtttgacgaaactactgctgcctcggctcaacattgtgcctttgctacgcgacagttgacaaaaacacccgccaccaatacttattttgggaaaagataatgaaaaagagattttttctattataaacttaaaatgtaataaatttacatttatgaccctaaaaaaggaaataaacaaaaatagaaactataaagttgttaattacaaaaatgccggccaagcaaaacggaacaccatcttcttcgtgacccagccgcacccttcttcgtgacccagcgatccaaccccaacaacccaatctcaaccatctttcttccaaaaccagcaaaatcaaaatctaaaaaaatgtagaactcctaggaaacaagctgaatcccgaaaatccaaaatcaaaaacgaaaaggaaaaaaaaaaccaggaaacctccattgatgtacaa

SEQ ID NO: 219117 - DNA, 3048 bp, Cannabis indica
ttttttttaaaaaaaataggattataaatttatcattttataaaaaaaaaagtctaatcgataatttttacaaaatataaaatttaaaattgtattaaccctagaattaatatatacttattgaaaatgatattgatatttagattaggtctaggtgactagcttcttcttcttaacattattaatttgaatcaacaaattattaaaggcatatttgtttcaaggattctcacttctatatctacaatttcccaaataattaatcttttttaattgtataaaaaattagaaataattaaaaatattaactatacattattttttcaatagcaatttaaatgattataagtatatttaaagaagtaactcatagaattgtaagaaaatttatacttttttttttgtattaattaatgtgttttctctcacaacattttttcttggtaaaatgtaatattaatttgaacaaattatttttttcatacaatatatgtagaacaataataaacaatattgtgtggaagaagaagaagaaaatgattaattaagacatataatcaatttaggtcataaccaatcaacaccacatgagtaattataatcataatcataatagtaagaagaagaagaatattaattaagataagaagatgaatggtcattattgtaaattcctaatcaatcatatttatttatatatatggtaagaaagacttgtcatgaaatgattaattgttggtaggataaatattaaaacaatttaatagttatgttagactaattagagaataattgcaaaattaattaactatagaatagaatattataggttaaattgtggatggagctattttttcctttttttttttttttattttttttactgaaaagggtccattatttttcttttgaatgaaatactttattatgttttcatgcatgtgagatcattaaattttattaataatattggtaaaactatatatataaatttatataatataatatatatgtatatagtagatcaccatcacatgcaaactaatccaagacaaaaccaacctggcagatcaaatttacaaattacctctctctctctctctcatctatatacatattaataaattaaaagttataaataaattattattaactataatactatagttagtatataggtttaactcaaccctttctatacatatcatatatatttttattaaattattggtaaactatcattttaataatgtgttttgtcaagatttgttaagagaaaaaaagccaaataaattattggagtgttgagaattaaaaatatatatattttgttttgttggtggtgaaaagataataacatatatataagatttatgagttatttgggcgagaaatgagatttagtggttgcgttgcggatatacgtcagattatagaatttagtattgtcagtgtgtcatttcagtcacgttctgcgaataaaatattatattttatagctaagaatattttaagttgtaaaacttctacttcttgagatggaggtcgttggcctctatggtagaatcagtccggggcctgagaggcagtggtttaccctgtggcggatgtcagcggttcgagtccgcttatctccaactcacaaagctatatgatagcaccctatttttccgattcggcgtccctccaatggttgcctcttgtctatagattttgaaatgtattagctagttttgttcaaaaaaagatagtcatatacttttctcatagtcaattaattttgagataagccagactatcttataaattattagagtttagttccacataactaatgggtagaaataaaatatcatatataagataaataaactactcatttcattactaaataatgccacgcacacacccaagttttagcttatttattcatgcttcttaattttgtttgctaattctattaatttcagtttcagccattatattttattgtaaaaattatataaattgttatatttggtaaaaaatttacatttttatgttcaaaggtttttatttatatttttgcattattctataaaaacacataaaataataagaaaataacataaaaaataatatataaataataaaaaatcaacaacaaaaatacaacataaaaataaattaaaagaccgtattttttgtaaattaaattttaaaattctgtacaaccatatttttataattttttcaaaagtaatttgtggcataaatacctaagtataactcccgattgtaaataaatacttaagtttaattttaccggtaataatacttaagttatatttgtggaactttgtaggtacttagccgttaaatgtcaagtcattattcacgtgtcattctcttattgatatatttaaacaaatttttttaaaacaaaaatttaatgaccttgactgattaaggattgacacatgacaatttactgaacacttaactgttaaatacctacaaaaattttagaattataaattaagtattattagcagaacccaaattactaattttttaatgatgaatattttatttttgaatatgtataatttgggccaggctgattatttgggcttagatttggaattgggctttctcatcattcattcattcattcattcatcatataataattacaaattattaaattaatacttactcgaagccaaaaggacgaagagcaacaacaagaagaacagtactccaccaccaccaccaaaccttattttcttactctccataatatacatttgattatattatatattcacactgagtgaatctatttattatatagatcgaatagggcacatgacatgctgacacctatatataaccatgcacagctaccacaccatgcttaattatatgctgccacctgtactcttcataggaccatatttgtcactctctcctatcaacacgtacgtgtcattcctccatccttatcactagaggagagcacataattgttagggtttataaaacacttaagaaatatataaatca

SEQ ID NO: 219118 - DNA, 8047 bp, Cannabis indica
agagagagagaaagagagtttgggaatctatggggaactgtaatgagttatacaatctagattaggagcaagttcttattgaacttgtctctaaaccagtataatttatggtgtccttgtttcttttacatttcatttgattactaaatgtttgattttgattctttgaacttgtttttcactatgttttatccagatttgacacaacaacaatcaattctaactgattaccaattatccatagatcgagaaagaagggtaatgcagcagtctgtccaacacattgaaattcttgagctaaacagctttgaagaaacactatctggaaagcacaacatggaatggatgcacaagaacagaacttgggacttggtttctaagccaaaagattagtcatttattgcaagtggactcttaaggtcaaagaaggtatgaatgaagataagcttgtgaggtttaaggctagactagttgctaagggctttacttacattctcacttgtggtaaagtataaaactctcagactcatgttttctattagtgcacacttgaattagagcagcttgaggaaatgtacggcttggagggagatctaccctacaatatggggtcaaaaatgacaaaactgcttttctaatggtttgttgaggaagacatctacatgtagcagccacttggtttttaggtggaaaccagcaaacaataactattacaagaacttaaagcaatcttacttcagtttttctgttattgtatatagatgatatgctcataatgggcaaggacaagactgtgataaaaggtattaaaaagcttggacttgttcaaaaaattcttggtatagaagtgttaagaagacagcaagatggtgcaacatgtctcgagcaaaccaactacatagttctagtgatttagaagaacaacatgcaaaattcaaagagtatctctaccattaggaggtcagtttgttctttcaaagtattagagtccaaaagttacaagatgaagttgaataaatgtaatgtacatcatggtaagcacctggcatagcacatgctttaagttttttgagtaggttcatggcaaattttggacttggaccactgggatgaacttaatgaaatggaagttgaggtacttgagaggcccaactgatataggtctcagatacaaaaagatggatgaaaaagttgtgcttgaagggtttgtagatgcagactatgctgccaacaaaggcactagaagatcaactacttgctatgcattcacaacaaatggaaactgcattgttggaaattacagctacagtcagtggtgtccttatctaccacagaagcagagtttatggttgtaactgaggcaaggaacacatttggttacttcaagagtagaaatgctaagaggaaaagcaagaatactttcaaagagccagtcttcaattcatctatgaatctagtttaccatgaaaagagtaaatgcttgaacttgcttaagaatggtcactaagtattgccttgccatggaacatcatcatcaacatccgatcatgtggagcaactgtcaaattgtggctagaagaaactaatgtgaaatttgttgtgttaattcctcctatccaccaattcgttactatagttagacttatctaattaacctacttatccatctaccttcctaaattagttggtcttagagtgcctaaaagcacatgttcgactccgctattcggattaacactttgattagaaagtgagttttgcaagcaagattaaaagggagagagattacaaagaaagagagttgggaatccatgaacaactgtaatgagctattcgactttataaaagtataatctcgggttttagtgttcttgaaaaaaaaaaaaaaaaacatgagattgagagttctttgattggaactcttgctcgaaattacattgtataattactttattttacattttttaatttttatttttattccatataaatgatgtcttgtataattactttattttacattttttaatttttacttttatttcctatataaatgatgtctgtattatacctctttagttaatgtaaattatgtgttaaacttaaacaggttataaatgtatatttaacaacccactcacaaaaatggatatattttaatgaaatacaatatgaaagtatttttaattaatagatataaaaaaaaaaaagcattcaacttatcccgataaattaagactcgtttagtatatcgtattatattgtattatattaaatttagttatataataaatttagttatatatcatatctttaggagcaattctcaattctcattgaacttctcactgtttccaatatcttatttttcttttaaatttcatgattactaactcttggatttagttcttttaacttttcatactctatattaatcagattttattaattgatttcttgttacaggaatttagagaataattatacaacagtaattcatttttctatatatatttatgttttttatatctaatcaattatatcatttgatttatatggagtagagtataaaagacatttcaataatgatgtcatgtgtattttagaaattgaaaaataaatataagtaataaaaaataagccagaaaagaaagaagccatttttctctaatttgtgacttgaggacattaatctttctaatactcatttagggatatttactataacttctataaaaagtctgaaagcttagccaaaatccttcatcacaaactgcttacaaaattcataaaatgaccactgaaatagagctatgaagaaacagaagtgctagtgcagctgacaataacctttaaaatttcaaggttgttcactaggtgtgggtccacgtcctcgtctaccacgtacccctcgaccccgtggcacgcctctaccacggcctctgctgggtgaaggagaaactactccagctccagcttgtcttagcatagctctctgcctggctcgttctgacaaatttatggtagtggatccaccactcaacggcgaaacctgttttacctcttcagattctgtagcaacactgggactttcctgttttgaaacagaagcttctgaagtaggtactgttacagtactttcggagacaactgaagcagcttctgcaacctgatccccctccactggtgcttggtcggtaccatcatttgatttatcagaaacttcagcagtttcttcaggtacatcgacttcctcattcttctcatcactcggaatgtcttgagaagtaagctcactagcatcttgaatctcatcatcaaccctagcaggtgaagcgaccggcgttgaagcaggctcaggttgagcctgggcttccactaattcagcactccccactgcatcaccagaaccctctagctctgcagcatcaggcaacagctcaccctcttctctgtcacctccaatttccatcatagatgattggttctcaagatcagcattatcaagggctccatcatcagacaccatctctttccctgctgccccatctaaattctcttccaagatactgttgtcaatttgagaatcaacttggtttgtctctcctatctgtggttcttttggctcatcaaccttctcccctgcaacttcctcttctttctcaagatcagtaatggcttcctcatttgcagcttgaggcaaatccccaacatcagagacctcctcgatggctggaagtgtttcaagactttccaaaacagcagaaacctgcccttcggctctctcttgtagaggttctgacccttttggcttcttcagtaaatgtacagccacatcagagccactttccccttgggtagttgattcttcacgagaaccaaaatcagaagatgaagacagacgttttcgaaggttagtttgtatcacaggtacagaagaactattgccttgagtttctgtttctgtggatgttacaggtttattagctacttctgtctcggacatctcagtatcaccttggggttcttctggtttgagaaggcgtggcctaaccaatttccggcccattttacgagattcaacagatttaagtgcagtagatcttctttcactttcttcagttgatttggctggtaaactcgttcccagacctgcagaagctgcaacagtggagatatgaggtagtgatacatgacccttgaaaaggttttatgtaactaatcactaaaaagaaaatgaagacatgtaacaacgttataataatgaaaacagaatcattggaaaggatcagtgaagaagaaagaccagttgtagccactgcagtagaatcagcaactgcagtttctgaagggacggcatgagctccacgctcactggaaactgaacgtgacgctttttcgtaattttctacggctgacacataggcactactacgttcttccaaatcagatccaggaagttgctgagccagtgatgtgccctgagttttagaacccaatatgttagatattaaaaacgaaataggacttgtcgacatttaatgttagcatatcttgtcattagttttctattcacggtgtggagaaagtacccccaagtctaatcgaccaaaactaccaaagatctggtcactacaaaagctaatccaaatctcattttaaagcagatacaaaatttgaagcaaaacccaactcccaacaaaacaaaactgacaactaaagaggccacaaatcaaattgaagatgttgttattacctctgggagactttcttttccatgcttatacttgtccagttcatctgagagacgcttcgaatactgcttgtgcttctcaagttcatcaagaaactttgctttctcctgatgagagaattaaaggtatcataagcagatgtccagataagcatgttctccgtaaaagaaatcactcacatagaatgacataaacacagattttgtacgtcttaaagtcggtaacgagaccaaaatgattatttgtgaaagaccagaaactagttcttacagtatggaaaatatcgtatatgacaacacaacttacctaaatgattaattgtgacagttcaaaaactatttatagatatacaaaaatgtacgtgaacccaatcccagtgtggatactatcttatgataaaaacaccttttagatgcaacacatcagaaaccagtctcaaaataaataagccatacatcaaatgataatcttaatgtttaaatttacgaataattaataataaaaaaacaactaacaagttatcaacacaacaatattaatgaggattagatactacaacattactgacaaactaaaccatcttatcaggaattaatatttgattaattgcaatcagagaccgcaaagaacctgctcgatgtttttataagaatccatcactgccttctcatttttcagtcgccttgctttttctgctttcaattcctctctctgcctctctaggtgcttttccagaatctatgcaaacagcataagcgacagaaatgtaagaagagaattaaattaaggggaaaaaagatagtaacagcaaaacgatagttgcacgaacctgaattctagtgtctttctcctccttcatggcctgatcaccagatgtatcccctccagatttttttgctgtaattcatatttatatatttaagtaaaagctcgaatgaggtactatactgtagcatctcagatagtagacagctctgaattctgataccttgtttaagctcctccaattgcctagtaatagcttgattctctttgctcagttcctccttctcctttgacagaatctcaagtctcctctgtagagagaaaagaaatgtcattaaatcaagctttcagggtagggaggtgactaaatatgtcattgtctggttccaaatttagaaaataaataattaaatattgagaatttctatgcaccatggtgccagacacctattgatgtaacataatgatataaaatgtgagacccgatagtaaattgcagtgccccataacaatgctcttaaatcataggtgaagaatgaagattttgacattaggatatctttaacaacctttagctgagaaatcatcttcctctgcttttccacttctgatttcagacttgcctgtgcatgtaaaacatataattgagaacaactctaggatgcaataaatcaatagaccaaatcttcttttctttttcttttttgaatggaaaagacaaaaaaaaacatttcagtaggaaaaaataataattattctggaatacctcagcttgtaaactatcatttatccttttctccctttcagatagttctgatctgcaattacagaggtcttgttccaacagtgacacagctccctgtttttcagaaagaagccttttgttttcctctaattgagaatccttctctttcaatttttcctgaaacaagaaaacaaaagcaaggaaaaaatcagttacctgttaaatagaggacatgcatatttatagaagaatagtaacaaaaactaaaaaaataaaagataaaaataatagtcgttcttctgttcgtgggtctatggtttaaacagctcattgttttaatgttttattactttactagatgaatgttccaaactatttcttctgtcttaagctttctcttttacattccaatattgttaccacagttttcctccgccataaatgtgtggctccctaataaatttgggaggaggtcaagttatgacctttgtctccttttcaaaaattgataaataaataaaatcaacaattaatatcattatgaaacctctagtctagcaaagaacagaaaaggtagaagggctgaatcctttcctcttacattaacattaacatgtaaccaccatattaggaggttaagaatcaatatagggtaaagccaattttattctttcaactgttctttttaaatggttgaacagataaaattttgataaccaccttaaagcatttaacataatgaacttattagggtttccttaagcaatactttataacatctctaattacccacctgcatctgctgaacttcgtcttttaaacgatcatactcttccacgtcaatgtttttacacctttcgagtaacttcagaaaagagcaaggttagaatattgaatggcatatttatatataatgtgcatgcatgggagtacgtaaatggtacatgatgaggcagggcagcacatactctgataggacttggctaccaattaccagatcactaatttaccatctagataggtcttatagatataatatcctaagttacagacggaaaaaaagaagcttctttcatcaattaactctagttcacaactttcactttgtaatcaataatacaaaaggttttatagggcatatgatatgagttgattgacagaccgtctggttttatacgcacacactatatgagataaacaatgtcataaacaacacaaaggaacaacttttatcaggaaaatccacatatatttttcaggaaaagccttgtaactgtgactgctgaagtgattaacagagataaagctacatacctccgccaccctcttttccagttgttccttctctaacttctggatgagtatttctttattacaggcttccacctgaatctgactctcctttaagagtttttccatgttctcaatctcgacattagctttttgagccacttcacgcaatttctaataaggaacaataatttttaattaaaattaaaatggtcattgattgatgtcagcttccaaattggaaatggaacgtaaaagacagagtgctacctggcactcctcaaaattatgcttgttttcttctctgagttgcacattgctttcacgaagcaagttcatttctctcacctgtaaagaatttaatctattattatcgaacgggaaaactacggattaggcaataaaataatcttccttcgaattgtagggacattttccgttttggtatatagagaaattatgtctttaacttttttttatatgacaatgtata

SEQ ID NO: 219119 - DNA, 4925 bp, Cannabis indica
attggagcacagttttttttcctaagtgagctatattttggctttgtatcacttagttgcatctccattggagatgctcttaggtatactaatagcaggtgcaacataccttgtcattgtctctccttctaggaagtatggaccattatttaacttcccttgcatttaggatatgtgaaccttgtttaacaatcatcgtaccatcatcaatacttattgagtatccaagtttgttgaacatactaaaagataacagatttcttttaagtttaggtacaaatctaacctagtgtagagttctaaatttgtcacgatgagatttgattatgacaatcctgattcccttgatttccttgtcttttgttctttcctgataatattgttctattatgttcctctaagaatgagcccaacagtttcttatttggtgtcatatggaatgagcaacctgagtccataatctaccctccacgtggatctaaactagatgcaacaaaaacacttgtacactcatatccagttgcaacattagtatctccttggtttttgttcttcccttcactgttatctctctttaatttttctttcaaggccatacattcatatctaaagtggccttttttcttacaataataacactatttctagttgttcctcaagagtttgaactacatgtgaattttattgtgtttgactttgattgattacctttgtatcttttggaattctagtttcccttgtattccttgttgggatactttcctttaacaatcaacaaaccttggagttgagagaaaccttcacttttgtcatggtaaaggtatcctttccatacaatatcgtgtctacaaaatgtttgtaaatctttgaaaaaaaaactgagcagtatgatagcctggttttcaacatcaatcttcacaacaagattggtgagatcaagtatgaccatgttaaagtcatttagatgtttcctaaactctcaattttcatccatccgaagtgtataaagtctcttattgaggtaaattatttgcaagggatttcttcatataaatagtggacaacttgttccaaggcccaaggattttctcctcatttgatacctctctcaacacttcatctccaaggctaagaagaatggcactacgtgcctttgcctcaattttaattttcttcttcctttcttcagtaagactcattgcctcataatcgaatgtctttgatatgctttgatgaactagaaatgtcttcatcttaatcttccataaactaaaattattcaagccattgaactggtctttctcaaatcttattgtagctatcttagtcttgattcttgaaagattaagtatgaatcttgaaaattttaatgtggttcttgaaggtttgaatactagtcttgaaacctcatcttggaacttgtagctctaatattatttgtagtggattcaattcactgtttgattagaaccacgatcatgaacacacccactacttcaaactaaaataaagtaatcaaaattctaaaactagaaaatcaataaaactagaaaacttagcttgaataaatggagaattgaatgatctttattgacatgaatcaagaacctacaaattaaaattacaactcaatcatacacgactatggtgattaacaccatttacgtaaatctcacattgggatacatatgagcaaacacacacatgatccatttacaaccttcattcactttggttttcttggaaataattaaattagaagagtttcttctaagctcgagagagattcatgtaggtgttatgttgacttgagttttgagtgttagtgtctatttatctgcattggaggtagttggcccgagaaagagagagagtaattggccaactaactttgttactataaaaacaaagaaataactgatgtggcatttgatttagtgagctaattctccaacaagtttcatattattataagatcatgtgaatgttaaaagatgctctggccaaacattgtgatattactcctaaggttggattgacttttgaggtatttttatctatgctttcaatgactattggtaaagagagttaccataaaaacaaagaaataactgatgtggcatttgatttagtgagctaattctccaacaagtttcatattattataagatcatgtgaatgttaaaagatgctctggccaaacattgtgatattactcctaaggttggattgacttttgaggtatttttatctatgctttcaatgactattggtaaagagagtttttggaaagatttgcaaattctagctatggacaataaggttgttttggattatgataagagatttcaatttgattataaaaataaaatctgaagttgatctttctttctgcttaattctgactcaatctctctctgtttctttctcactttctagccttttctattgatacaatgaggagctttatataatgttagtagctgacatgtccagcacttaacaactcagccaaatcggtttataactaactaactaaccgacttactaaaacaagaaagtttgtaactaaaatatcagttgaacacaaccatatttggagaaaaaaccaatttagtttaaaatggattatcttccacaaattccaccttaatccatttaaactgaaccttaacaaaacttactacacttgggggagtgatcttgttgcactagtcaggacctatgttaagcaaatccaaacaatgtcggaatttgcgcactagcaacactttagttcctgcatcagcaggcttctcatcacttggaactttatcgagattaacttcaccatttctatttctcttatccaaaatcttctgatatcgatgtgtttagttctctcataatacacaagattcttgtttaggtgaatagaggattgactgtttgaaaacacaataactttgccttttatcatctgtagttcttctagaattcctttgatccatacagcttccttgaacgcctctgttgttggcatgaactcagcttctgtggtggagagagctacaacaggttgcagttgagatttccaacttatgcaacatgtgtttagctgaaaacagtagcttgttagagatttccttgtatctctattcaatgcataatcggcatcaacaaaaccttcaagttccaccttgattcctgccttcttaaatttcaaaccataatgagttgttgtcttgagataccttagcaaccacttgactcctttccagtgttcttcaccagggttagacatgtatctgctgagtgtactaacatcatatacaatgttaggtcgggtgctaattatagcatacatcacacttccaattgcttcagcatatggtacttctgccatttgtttcatttctttgtcatccttgggagaatgatctgttgaaaacacaagatgtccagcaagtgggacttttgtttctttagaatcattcatcttgaatttccttaagacagcttcaatgtaatttccttgagttaatgtcattttgtggttctttctgtctctcagtatttcgatccccaaaattttcttagccactcctaagtctttcatctcgaattcactattgaggacatactttagtttgttaatctaattttggtcctttcccatgattaacatatcatcgacatacactagtagaaatgtagcagcttgtgatttcagatttgtaaagtagaggcacgtatcatattttgatcttgagtaaccaacctttgtcaatactgagtcgaatttcttataccattatcgaggtgattgcttcaaaccatatagagatctcttcagcaagcacacaagtttaccatccttggattccaccttgaatccatcaggctgtctcatgtagataggttcttcaagccttccatttagaaatgcagtcttcacatccatttgctctatgttccaatcaaattgtactgcaagggccaacatcattctaatggttttcattttaaccactggagagaatatctctgagtaaacaacaccttcaacctgagtaaaaccttaagctaccaaccttgctttgtacaatataggctcatcatcagtcattccttcattgtgtctaaaaattcatttacaaccaattaccttccgtccttctggtttaagaactacaacccaggtcttgtttttctttaatgactgcatttctgaattcattgcagcattccacttcttggcttgtttactgttgatggcttcaaggtatgtctttggcactttatcttgagactccattgtcatggaaagtgcatagtcaataatatcagcttcagcatacttagcaggaggactgatttctctcctaactcgatctcgagccaattggtaagatcatctaaggcctctcctccatcatcaggatctgcttcagattcttcagagttttctggtgttatttcttggtcaggaacaactctttccaactcgatgtgagtgctgaattgatcatcaccttgcttgcctgaaaaatcagaaaccacacattcctttaaatggaaaatcattttcattaaaaatcacatctctactagttaaaattttgttgttttcaagaaaatataatctatagccttttactccattaggatagcccaaaaatataatttattgatcttttctcaagtttgtcttctacattttgtgcataagcaacacaaccaaatatccttaagtgagacatagatggtggtttacctgtccatagctcttcaagagtttttagctcaattttcctatttggactcctgttaattaggtaacagttagtgtgcaaagcttctccccagaagtgcttcttcaaacctgattctaatagcaagcatctaaccttatttagcaatgttttattcattcgttcagcaat

SEQ ID NO: 219120 - DNA, 3669 bp, Cannabis indica
atatggcttgaatcaatgcttagatttgatcaaatcaacttttacattccgaaagctaagtaaaatatgcacaaatgaggataacaaggtcctttagttcagctttacacaacaattttcattaatttctgcaattaattaaaacactataattcacaattttaaattgcatgagaaggaaaaaaaaaaatcaatatcgtttcttccaaatgattattaattacattataaaatatgcaaaaataccttcaacattgtaaattattatacataaatggactatacatttcacagaccccaagtctagtctagtagatagagtaacatgttagacaaagtaagaattatatttatatgtagtgtaccccagtaataactaaaataataaaaaagaaaagaactaaattgttggatgtattcctccaaccacagtaaaccaattgaatattatgaaaagtcaaggagttacattctacatgacagtctattttcgataactatatatcaagtatacatataatatatatatatatatgtgtacttttgtatgtatatatatatataaattataatggacacagcaacccatttgtagggaaccccaacagaagaagcggtgggtggtgaaataagggtaggggtccttctgtgttggttgtccagaagcagataaccattggagacaattatgccccaaaacattaataataatttgtaaccaaccatatattataataaccttactaccatatagatatattttcatatctatgtagcccaaaatacaaaaatatgtcaaatcccatttctcaaatttattacaatttattccttgatcacaggcagtaacacatggtctgcggctttaattaaacttttattaataccattcttactaaacattattctattaaattgtgtcacttcttatttattttcttacaatgattctcaattggaccacacctttttgaagcttatatatattatgattatttatacacactactttgaagaaaccaaaaacctgtctaagatttgagagtatactattgtactttaaaaaatggctgccacaaatgagaagcagaagaaggccggattcatgtccctttataagccggcggcagccaccaccaccgcgacgtatcaatttcatgtgccggagccaaagaagggcagtgataagggtggcaattacatttcacgaagctggtttttcatgagaaaaccaagaggaggaggaggagtacgtagtaataaagatgatcaagttgaaaaggccatccaacaaggaggcagtggcggtggcggtggtggcgatggtggttgtggtggtggagaagtggtgccagtggtagctgatcagggaagaaaatcagtgtcacatgttgaaaccaatttgagatcagttgttggatttctacaagtgaaggttttggtgagtgacatgcctagtttcatgcaagtgcatgcctttagatgtgctaggcgtactcatgataccttggaaaagtttagtgcaaaacacatggcttataatatcaaaaaggtacttaattaataattactaattacatttctccccattctctgcaaatataatttctgttaacatatatgttaacagaaagactataattactagcattatgtgcatatatgataatatgaagctgcagaagctggctattgcatattcattcaattattacatattcgtaaagtcaaagactataatgagtcatgaataatatctctagctatatattacagtttttgtgaaaagattgtaagaatgctttttagaagtacgtgtattgaatctggatctctttcattgtatataaatgccatgtgtttttgagtatggggcagctagcttatgatgagaagcttttccattctgaagattttcactgcagagttttgtgttaaaatatataacttggaatttggatctatctatctatcatcgccttattcatttcatttttctattagattacaaattttgtcaggatcaaatgttacaaacttcttcaaacaacccatgtggctgtaataataaaaaaatacacaatattaatttcatctctaatcatctataccaacaactaattatattcatttgactacaaaagtagttacaaaaggcactaaatcatttatttttttataaatataattaccactctggcttttcacacttaattataaatggtccatgtaatgcttagtagagtatacattttgataaatttattgtgattataaatttataaatactatgtcctgataaagttaatgaataaagtttaattatcgaacttatctcataaaaaaaatgtatttacagccatagatataatatagtatattgaacagcagagtaatgtgatttttgatgcaggaatttgacaaagtacatgggccagcgtggcactgcattgtgggctcaagttttgggtcgtttgtgacccatggaactggttgtttcctctacttctcaatagagaaactccacattttattatttaaaactaaaattgagaaagcagcagattaatattattaattatcaaaaaaaaaaaacagattaatattattattaattttattttattatatatataaatatagtccaggccagtactattttccctagaattaatgtaaatccattttactctctgtattaagaaccttgcacatggttaatatttatatattctgcacattctctactgtaaattttatttggttcaagtttttgctggaatgattgaccgactaaaaacgagtagattaataatggactatactacaatttcgacttttatcttcccattttttttgaatgaaaagaataaaaacgaagataaaaatgttttatatcatttttagttgagcacttaacctttatttttggttataaagaaaataaataaataaacaaaaagttgtcaaagacatagacctatacatacaaacctatgtcttcagttattatgtttttatctctttggaaaaagatgatcgaataaacttttcattttctctactgtcattctctttctgaaccaaaaatttcactgaactcaaaccactctttgctccataaaccttgattatgcctcatgttttttaaaaatctttaatatttcttagaaatatttactacatactacttttcctccaaaatttacattaacttttcataaccgacacaaccaccatactcagctcgaaccacaatttgctccataaccatggttttgcctcattttgttctaaaattcttttatatttcttaaggatatttactacttatactaactttttttttcaaagattacatttatattttaataaggaaatttttaaatttatactttctttactcttttttttttttttttctatctttactttctttatttattaaattttctattttttctttcctttcttataaccctttgtattttttggagagtacttttttatttttacatttaaaactagttttttttatatatatatttttatagaattctacataaaaatctctattgcaactaacagagcaaactaaatcacaaccaaaaattatatagcaacacacatagaaaccaccggaaaaaactatttagaaactcaaactgt

SEQ ID NO: 219121 - DNA, 2527 bp, Cannabis indica
tattatgataatcaaagataaggagtaatatataaaccaatatgtagtgtaggcaccaacctaatctagctagcttctttgttaataaaaatttggtttaattatacatatgaactaataaaaagataagagtctctttctaaaaaaatgagattaagacctaaactttctaaagtaaattttagtcaaaaatgaatgtttattggaccatattgaatatttttgggcatatccaaattcgattcaattatatattatgttaaccctaaagattgagacttgtgatttttgaggcttgtccattaatcacgtcaaagagaatgaaggagtacttcccttgaagaccgagcactcgcgagaaaatcaattgcatggcctcttaagggaaatgaaagagagtgtggtgacttggggatagatggagagagtgtgagtgggacatggtgagggtgtgggtgagacatggggaaagatggggagagtgaggatgagatggggagagtgtgggtgagttgaggagatgggaaagaagagaatggagagctggggagatgagaaataatagaatggagagttgggatgatggggaagaagagaagagaagacactcgacatgcatgcaacgagggccgcctagcatctatgccatacgcttgatcattgtaacaactcataatgtcccttaataaaatgaccaactattggtaaatttttagacgaagaatctaaaggacaaggcaagcacgtgagtgagaacatattaaggtacaaccacaccacctgcaacacctgagctcggggagaggacgagtaatagagaagtcttgcatggaagctctgttgtcttgacaagaagtacactgcaatcactactcctgcacccagaaccacctggcaaaaattaatacacgctggaagaccacctcctatagctgcatcctatatcctacatcgtcctttcctgataccttgggaccaccatggaatcaacttgtattttgaagccattaaagatccttataaaaatctctcttttctattaaagaaggggtttgaaactctttgtaacaaaaatctctcaagctgtcaatacaaaaaacatatttttcaccattttactctgtgatttctaagttttatcttcatctttatttgcattacaaactgatgacatttatatagagtttccagccactcacattgttgagaagttcttactatcaacatattgtatgttagatttcggtaaataatttgatccaattaatttcaatctcatgcacttgcgatccagaaattccaaccatttaaaattcaacaaatatcaatatgcatatacatatgtcacacacataatcctatcacaatcatcattatattacttttccaacatgctttataataatctaagcaggtatttcaatagtaattaatacaaacaattaccataccatgagtcaacctgtcttcgcaacaatgtacatattcgaatagtcttcaaaatttttagaagcatagttgctctgataccaagttataacaccctaatctatggggacaccacgtgtgtagttttataaactaatttagtaataataggttaattaattattaaaatctttgataatattaaaaacttcacgaaaaataaaatcctaataataaacaacataacgacactaaaattttattcggaggattcctgttaaaaaatttttacaaaatgactatatgcagtagtaactaaaaatacacagcagatagaaaataagaggttctatggaaatcaaggtagagacggatgttagaactattctaattctgagtgtcctcgttgtaagaaacatgatcttggggaatgtaattggaagacatgtttccagtgtggaatggtggttcactttaagaaggattgcccttaatttaagaaagattaattggaataagaggcgaaacccactctagcttgggtgtttgccatcgcttaggcagatgctgtcgctagtctttctatggcaacgaccggagggcaaggaatcatttatatttgttgggtctgttcagggttctcaattccaataattttagtattaaaggctaaggatttactacacaatggatgtgtagaattttcagctgttgtgattaactccagcagacccaaaacatttgggcctaagcatgttagggtggtaaaagggttcttcgatgtatttcccgaggagttaccatgattaccaccgtaacaaaaaattgatttcatcatcgatttggcacatagatcagagcctatttcaaaggcatcttatcgaatggctctaacagaactccaggagctaaaaatacaactttaagggatatttgatttaggttttactcgacccagtgtgtcaccctggggagcttcagttttatttgtgaaaaggaaagatggatccatttagatgtgcattgattactgggaattgaataagctaactgttaagaataagtacaatttgtaaaggattgatgacttgttcgatca

SEQ ID NO: 219122 - DNA, 3652 bp, Cannabis indica
tgcttccacatgtttaatcttaaattttgttaataagttagtcactattttgttatggagatctattgtttaaatatatctctatatgcaattttgtccaaataatgtttcgtgaagttttcttatttactgctttgccaagttttctagacataaattgattttagtttgttcaggttaatatataaaagatagggataaaagatatttctagattccataaagttagtcgttatattagtgttatacatactaatataattttagttaagatcatttggtgtttttcatagttaattttatttgatgctacattaatttgaacatgaacattgcttgtactggttactgtagttaaagttttttgatggtaagaatgtagtttctattttggtgtagaaatggttctttttattttcaacattatttattttatgtaaaagctacaagaaaaaaaccaatatagaagaggaaattccactctcagatcaccaatatgactattatattagaaataaaagacaggtgtcagttcaattaccttgtcacgggcatagagtgaaaagtccaaaacagtctcaggtgtttgctaattccattgatatatttccataaacccagaacctggaaagttcacttcttttccgtttatgctttcattgatccgacgagcttactaaaaacactctttcaaaaattacaaagcccaaaactaaaagcatattgggcataatatataacaaattagatccaaatccaaaattgaaaaacccatactttttgttttctttaaatttttgtatccaaaaccctgaaaacatctaatatcctcctcttttttacatagcacttctcattaccgcctttcaaatccaactaccgctacttcgttcgccacttttctaacgcctctttctgccccgtcggccccggtatatatttatttatttatttttttgggtgaatagatgtgtatttttttattattatttgttatttcttttggatttgcagatttattgttttaggaattgattaaaaccattttatttttttactattagcttcaccattcttttggcactgaattttattgttgctacttttccactgatgcagataaacatacactccccgcggtagcatttaaaggaacaagtttgttaccactttcaattgcttaatcagaaatggaggatacctcattgctagagctgtgtgtagcagaagatgttattcaggcgttatgcagtgcctcaaactcttcttccatggagaaatctttagagttgctaatagaaatttccagaactgcagatggtcgagtagatctaggttccaagcatattctgtcgatggtcattcagctgattcagtccattccttatccttctggtcgtcaatttcttgtattgtctttaaggcttttaagaaatctttgtgctggagagatttcaaatcaaaattcatttcttcagagaaatggtgttggagctattttgaatgtctttaggtcagcgaggctgtcttccgaggaagattatgggttcttccgaattgggttgcaagttcttgctaatgtttccttggctggggaagagcatcagcggttgatatggaaccaattattcccagacgagtttcttgcacttgcgaaaattcgaggcagggaggtctgtgatccattgtgcatggtcatttatgtttgctgcgatggaaatcctgaactgctgacagagctctgcaatggatgtggcctccccattgtaagggaaattataaggactactgctgcaggttccattctatcatttttacttcaatgcatttattttgttcatattatgcatgctgtgcttggatatgcctttgttttgttttgttttggggtatttatttatctatttatctggtgtttctcagttggatttggagaagattggctgaagttgcttctctcaagaatctatttagagcaacttcacacccctccacttttttctgtatcatctcttgttggtcccaataataccaaagttgaagataatgtggttggagatatcttctcaccagaacaagcatttcttttgagaattatatctgagatattaaatgagcgactagaggagattactgtcccaaatgactttgctttgcgcgttcttgaaatatttaagtcatctattgtggttatcagttctggctcaacaaccaaatcgggacttccaacaggctccatctctatagatgttcttgggtactcattaacaattctgagagatatatgtgctcgagagggtccgagagactccgaggaaggcctggtggatgctgttgagacactactatcgtatggacttgttgaattacttttaagcctgctccgaaatcttgagcctccagcaatgatcaagaaggccatgaaccaaggagagaaccaagagggacgaaccagttcccgctcattaaagccctgtccttacaaaggattccgtagagatgttgttgcggtgattggcaattgttcatataaaagaaggaatgtacaagatgagattagacagaagaatgggattcttttgctcttacagcagtgtgttactgacgaagacaatccatttttgagggaatggggcatttggtctgtaaggaacttgttagaagggaatgcagaaaaccagagggcagtggctgaactagagcttcaaggttctgttgatacgcctgaaatttcgagtctcggtctaaaagtggaggtggatccaagctcaggccgtgcaaagcttgttaacatctcatgaatagaagaaacttgcccttgatcctgatttattttctccagtttaggtgtaatattctttttagtttttgttttagttgtgtatgaaattctatttttgtagagaggttagcaaccaaaattggtgtacagaaaaacattgtgaaaataacatgtcaggcgtctaaaatgggagcattgtgtgtttactcttttttatttgagaaatgctaaaaggcactggtgactaacacttctttatgtgttaatattgctattagtctaattaagtatcgagtttcttaaaatttaatgtatcaacttttaagaagtatcgctaactaatcgtaaattagttgagatgtttattaatgaattattgcatagtctgaatctttaaattgtgtactattttttttttgctaattcgcttataagtatccactttccttccctctctaactttgatgaaatactatagcacaagcccttattttggagagaattttaagtgtacacacaaaaattcctgattatattgtttacttttctattattgtgtatatacacataataggaaaattgtaatgtataagaaggtaaagtgcaagtaaactctatgctatgttacacaagttagcaaaagactatacacaccactataattttctgacgcgaaacaaaacaatttagcactataatttgtgtttgaatatccatttctcattgtttgagttggccagtaaaaaatagcagaatcatattgtgagattttcctgaatagcaataaatgagccaactatatttcctcctgcatctgggaaattttcatgtccaggaaggggcctcaccttgtcttttcgatcaacttca

SEQ ID NO: 219123 - DNA, 5605 bp, Cannabis indica
aaaaaaattacccattgcttgtagaatgttgctccgtgtatgatgctccctccaaattttaaagaaaataagtggaatagcttgtagtgtagtatattatagtgtaatgaagttaagaaaatgagtggagaatgagtgaagagaaaaaaaaatgggtgggtagtgtgggaggggagttcgggtacagtgaagaattgagaagaagagagaggggagggggtaatgtaaatgggggtaaaattgggttttagaaaaagttatcctattttacaaattatgcatagtattagtttaggggaccaatttttgagtttattaagcatggaatttcaaatttctcataactaattaattaaatctttgaatctatctgataaacaaatgcttgatgttttgaattaatataattaacaattatgaaaaagtagcaaataacaatgatttagaaagttaggaaatttaatctcaattgcttctactttttagttcaataatgcaactaattctcttcctttatctagtgttatagcaaattataaattaatctatattttaattaagacataaaaatcttaaattgtatgcactattctaaatttctgagatataatatacatataatcatcattaagtaataatctaaatactacacaagccatacaaatacctttgttttatgtaaaaatatattcaattatagcataaccaacatttacttttagattttatattagaatcataaatcatataaaacatgaccaatcaaatatatgtaataaacataaatattaatagttcacacactcaataaaaaagaataattaaacttgcattaattcataaaaaatttcaatcaatctccgttaaaaaacctaaatatgagtttagctcataatcattattctataaaattgcaataaataaattgaaaacataagtcaaatgtaaaagaaaataactcttgaaaaataatgattgcgcttctataacctcctcatcctctttagttttcgcatctccaatactgtttaacccctctcctttttgaattaggttaactaaactcgatcagtccaaaaatcataggtgggtcacacattggaatcaccatatcgcgacccatgtctttttaaagaggcttcaatcacaatttaagtgaggtgggtcacgtcattgcacttctcatgtcgtagcccgtgttgaaaaatctgggcaaaacaaaatgaagtgccatgacattgattcaccaatgttgtggcctatgtgagtcctcccaaaataagctctctaacattttagcattgtgacattgaatttatatgttgtgattgtaacgtcctaactcgtaagggcaccacgtgtgtgcttttattaattagtttataataataaactaatgatttaagaaaagtgtggtttaattaaaacttttagtaagaattatttaaattataacctaacttttcattcaaaatgttactggattcgaggatccccttgtttataaattttacaacatattacaaaacaactattacaaaatagggttacactttcaaagcacaacaaaagatggatctcgtccactgagagccaagacatggcgactgatatgtacattgctgggactgcctcatggctggtcaagtttcccctgcccttacttgcaccacagagcacccatgagtcacaaagactcagcaagaaaagtagataaaacaatatcaacacataaagcataatcttattacaatacattgtatatactaagcaatcattcaagcgtaatacagtaaagataatcaattagttgtcttataagacaaaccgatcttgatgctttataaagcatccttaccactccttaccaatgagcttcatatgtcactatcgttacttaattaagtaaccgataagtaaaaagcctatcaacaatttccaaaagtgagtaataactcattccaaacaagggtaattatcatatctttacctcgattataatcgggtcacaaacgataataattatattttatttgacatgctaaatagttcaattgggttttcctactaatatccaacaatcagatgtgcgggccgatctgagtggaacgatgctcgatgatctcgagtcctatgccatgataatgaaaatttggtaaataacttaaccaagtcccaaaataggccctaaactcaaatcggacaaaccctaatcaatatcggtttagaaacagcctaaacattaataaaacatcataatataggttttggagaaacactccaaacaaggaattgattacagaaaactagggtttcccctactgatcaactgattgaccggttccacagtaccctgtagaaccggttaaccgattcttactgcagaaatggaaaactttgatttttacatcaaaacccaatcaaatctcctccaatcctaatgaaactttccagatcataccaacaatataaaaacaacatattccagccttcaaaactcagtaatacatcaaaatgacaaaatccccatagttgagtaaaatttgagttcttgaactcaattcaagatctaacagctctggaataatcaaattcaatcttaaacaaccttagatcaaaattagaaatcatgctatgaatttaattaaacctaaaaccacgaattcaaacaaaaacccaagcaaacttaacttaaaattctaaaaatcaaagagaaaagatgaagaacttacctccaagttgcacaacccctagaattgatttattctgctaagaaaaggttgaatttagtagaaattaattaggtttttcagctagttcttagggtttcgaagaaagagaagagagagatgaaagttaattgatatttatttttctaaagttaaaaacctaatcatctaactaaaagataaataaaactcatacttaatcttcaatactcagcctagtataccctgggtcatcaaataagacaaaaaaattaaccttagcgaaaagactattttaccctctattactacttaagctacaacataacctaggggtattttagtcaaactaactatcacgattaaacgacaactcaacattctaaactaatctgatataattctaatatatctcattctattgttgtcgtgacatatttgaccaatccattgagtttccaccgttattgaaccaaaatattttatttaaaaaatggtatataaaatacccacatattctgataaaatatctgtaattaataaattatgcttaagtattcatttactcaacaactactaattaattcacaattaacttaagtaagattataatcctactctaatgtttatataattacatatttaataaaatatgtccaatttaacataattataatttttgagatattacaactattccctctttatagaaattttatcctcaaaatttacttgaataactcagggtaccgctcccgcatctgcgactctaactcctaagttgcttcttcaaccttgttgtttctccacaacactttgactagcggaatagtcttgttccgcaacactttctccttcccatccaagttctgaattggttgttcttcgtatgataagtccgcttgaagttcaatgttctcgtaactcagaatatgggttgtatcagacacatatttccaaagcattgaaatatggaacacgttgtaaactccaaataaagcagggggtaaggctagtcgataggctacctgacctaccctttcttgtatctcaaacggaccaataaacctgggacttagttttcctttctttacaaatctctgaatcacctttattggtgatacttgaaggaagataaagtccccccaatctagaactcaatacctctatgcttcggatcaacgtagcttttctgtctactttgtgaggtaagcatacgagctcgaatcttttcaatggcctcactagttccttggattgcatcgggtccaagatatctccgttcaccggcttcatcctaatgaatgggcgaatgacactttcttccatatagcatttcatatggtgccacaccaataataccttgataactattattatatgaaaactcaatcagagaaaggtactttcttcaggaatcttcaaaatccaacacacacgcccgtagcatatcctcaagtatttgaatagttctctcagactgaccatcagtctatggatgaaaaactatactgaactttaatttagtacccattgctcgttgtgaactctcccataacttagatgtaaactttagatctcagtttgagacgatcgactttggagcaccatgaagccaaattatctccttaacatatagatcagcgtattgatctattgtatacatactccgcaccggtaagaagtgcactgactttgtatatcgatccacaattactcggatggaatcatggaatcccgacatccttggtaatccaaccacaaaatctatagtttttttctcccatttccactcaagaatcttcaaaggttgaagtaatcctgctggtctctaatgctctgccttgattttttgacaagtcagacattttgacacgtattcccctatatcacccttcatacctggctaccagtacagtgctttcacatcttgatgcatcttagttgttcctagatgtaatgagtatggcgtggtatgagactcatctagaatttcctatttaataccatcatcagctaaaacacaaaccatgcctttatatctcaataaccaatctgatgaaattgaaaattccttgtcgatccagcttcaaacttctctttatactcttgtaacactagatcactttgttgggctatcttaattctccctaacaaatcagactgtaacataatgttggctaatttcccaattacaaactcgattcttgctctagtcatatcatcagccaacttgggtgagatctttttcaattcatatacttgccttggacctttttgacttagagcatctgctaccacatttgcttttccaagatggtagaggatctcacagtcatattcattaaccaattctaaccatcgttgctacctcatattcaaatcattctgagtgaaaaagtatttgaggcttttgcgattcgtgtagattttgcatttttcgccatacaagtaatgacgctaagctttcaaagcaaaaactactgctgccaattcaatatcgtgtgtgggataccgttgttcatactcctttagttgcctaaatgcataggcaataactttaccagactgcattaaaacgcaatctaaccctacttttgaagcgtcacagtaaatcacgaatttctcatcactgattgacaaggttagtacttgtgtaataattaacctctgcttcaattcttggaagctatttttgcacttatcagtccaaacgacttacaattctttcgagttagttttgttaagggtgtagaaattttggcaaatccttcaacgaaccttctgtaataacatgctaatcccaggaaacttctaacttcggtatctcgaactgcttcaatcttcactgggtccagcaagatgtcatccttgtttacaacatggcctaagaagct

SEQ ID NO: 219124 - DNA, 7066 bp, Cannabis indica
acttgggaaggcacaactggtcccaagctttaagacagatgcctctattaccttgttcacagccccaccagaagtccctcaccataccatcaatcctagatgcaagctttttagaaagctttgtcgtctgcatcgtgtaaacaggcaaagcaagccccaccgatttgatcaacgtggcacgaccagccttcgataacgattttaatttccacccatggagttttgacaccaggttatcaaggatgaagttaaaatccgcatccttttggcgggatctaaaaagcgggaggcccaaatagtttatgttacccatttcacagttcaatcccagagtctgcttgatgcctcgtttcataccatcacttgtgttaccgctaaagaaaatggaggttttgagcttattaattctctgaccagaccaatcacgctcttcatccacaaactttaccatcaacagctagtcattcttcttccaagagtttggaagagagaaaaaagaaaaagacaagaaaacataaaatttgacatataatccaagcaatcgaatcatattaggctcagtttaaatgtttaaagtagattagaagtggcaaagcaggtgaggtacaaagaataacataaaaacactgggcggtacaaccaaaacttgaataaccaggacagattttacaaaagcaacttaaagaaaaaaggaacaaaaatatacaaaatcaaaccctcaggagagcctcaatggattcaaagaaaagtggtgccatttcagggtttggagtcttgattgcagacttcactccggggttcccgacgactgtggtgagttcgatcaagaaaggtactccttgagggagtttagcagagaagtagaaaacatcctggtttgcatgcttgcgttttgcaataaagaacatgttcgaagcagctagctggtctagagttgcttcgacagagctaatcaccgcgttagggaagtcccttgagacctcgtttgagtccggaagggatctccatgtctgaaattgggacaggaattattacatccaaaagacttaatttttgaatatctgaatctcagtatatgcaacaggtcacaaatcaaaactataaggtaatacagagttcaatgggtaacatcttctaattttagacctttcaagacttgtccccaaactaatgtcaaataacaaaagtggcttaatttcaaatagcttttgacacatttacattgaaacatgcttagcaagaacaacttagcaaggaatggcatgacgtattcaccaaatacatagcaaataaataacataaaacagggtagcaatataatttttacctcgagaaagtttgcacgctccattctcccttcctcggtgaagaatacatgcaattggattttatcattgaaataccacacaggttgttgactgtttttcacagcaacctgaagaagtgagcttgggggaccttgagacatattttggaaaacaaccattggcaaaagagttctcacagatgacccaggttgcaatgggggaacctaacagaacacaaggtacagtgtaaaactaaagtcgagggatgaaaaaaaaaaagaaaataacacaaacagtgccttaattattacctgcaagggtccagcagcagcaagaccaaaagtatttttgttgaactgaatcatgaagccatcaagaggagtctgtgtattgttctcaaacaataaattgtaaaatatttgaccatcccttcgggtcagttgagcactgatctgcaaaccttgacctgttgatgcaggcagtacaacaggtaatggagggctgcaattaacaaaagaaaatccagtaagccacatctaacaaatcaatctcagttgtcaaaccaaacacgtcttctgacaagcacaatggattttaaaaaattatcttatgattcatgctcaacttatgagaaaccaccaataatcagagctcatattttccactgcacttacccagcaggagaagcaggctcatcaacagggacaatggcactattatctaggcccattagatcaccaagcaaatctggtactggagcagctgcaggtgttggctgagtttgtgcagctggtataggactcgattgtcttgctgtagcatatggaacatttccagagctagttggtggagatgcagcagcagcactatcagtaacgtgagcaggagattcagaatatcctgcttcgcttccttcggcatattcatcatcttcggttcttgggattgtggtcttcacgcgtgttacaaatgcttctggtggtttatgatacacggaagataatgtagcaatgttggcaaggagttcatcgaggagagttggttcaagctggtttgaatcatcagtaatcactggcttctctgctaacacaacatcctttgcagcctgtcacaaaaaagtagctccataagacaacaaaaatggtatccctgaaatctactgttgcatgtactcacaacacaagacccgtatacaacctatctatcaagcgatctgaccaaccatccttaacatgaacaaaaaaatttccaacaaataaaaattccagaacggcacagggtgagatataagttgcagccttatagactgggtccaacaacaaaagaaaaattaaaattttgttaagttccatcatcaaatcaagtcgaagccaccccgaaatatatgacgaatatggcatatacatgaacctccactactgactgttaccaagacatactatctggagagaaatcagaagcaacaaagctactcctttcccagtaaagtgatcatacaaagagcaaaatgaaattattatcggaggagaaagaagagataaacatgtttttgctaaaccacacctcagggtcagttgataagagacgccaatatatgtacgcgcgatcccgcaaatcagggttatctgtctctacagttgcattattcaagacaacctgcaaacataaatcagtataaataaaagatgtattttttttaaaaaaaaatctaaaataattatcaaagctcatgttacaaagatagattctcaataagctctcttttattaattaccagaaaccaaattacaacagaaaaaccaaaattctgtgaagctctactgctatagtaataatgaccagttcagaacattttcttagaatttctacatgaactttgaaatctaaagcagctctatgcccaatatttttatgctgctactatgagatatgtctgtattcttataacttataaaaagggagggatcatttcgtgtcaataatgcaaaagctgacctgtatcatctgttgaggaccttcagttggcttcttgagaaaaagtttgacagttgcagtcagcaattgcaactggacttgtgcaggctcttcagggaaactctccaaaaagctctcaagcagctcatcagcattatcaattctttccgcatattcaccaattatccaaatcattgatgcctaaaaggacgtcaacagtgatatgaagacataatgagtagacaatgaaggtattaagatgtgggcctattcaataacaacggaagcaaaatgagtaccttagcttcaggttcatctaaggtgtctagactctcacatagtgttgcaatgatggattcgtagctgcaagggaatagagataaaacaaaatttttaaaggagatttaataataataataataataataaataataataataataataataataataaataaaataaattaataaaaaaccacatcattatcacatatcataaataatataacttacgtatttggatatctcctaaagatgtctttgatgacaataatagcctcttgaaccacataattgactttaatcttaatcaattcaagtagaacactgatgcaacgctcagctgctctttctaatttgatggcacaacggccaatagcacgaactgcctttctaacaaaatctacatcaacttcagtagcatactctttaaactctaataaaacctacagaatcatcaatgaaaaaaaaaggcagtattgaatgaaactgaatattaaatcattgccagtaaataagtttaatcacaactcttctactacaacagatacttaaaatacctgatcaatatttcggtcagatgcaagctttatcatgatttctaatttttccatcttcacataaattggatcattgtacttgcagaagaacacctgtcaaaaaactaactaattagatacaatatcttcctgcaacaacacaacaaattcaagcacatgtggtatttttatgcataaaatacaattttagatattgaaatgacaagttacaaacataagactgataaaattcaccttaatttcatgggcaaggattgtgggccgtctttgtactataaggttgatgttccgcaatgcaacatattgtatttcaggttcagcagagagtaatgtcacaagtggaggagccatcttcttacaaagattccgaaccacatctgtactagttataagttccatttgttgcagtatcatctgcaaggtaaaaggtagggaaagactgttacgatactgtatgttgacagaataacagcaacaaagtgacaaccctaaacaatcaaccaaggaatcaccttcacagcagaaagtacgaccgcacagttggcatgttgcagtctaggtgtaactctctcaacaatgttctcagcttcacgggcatctgctgccttatatctagaaagggcatccagtataaaaacttgaccccacctgcgacaattatcatttcaagttaaacaaaaaaacaataaataaataaagcaatctcaaaggaataacactaacagcaggcattggatgcaaactcaaacacaaaaataatatcaaaaagcttaatacacccacacaaaaggcctattgattctgtgatattacaggtatttccgatgaaaaaataaattaataaacatatacaagtaacaaaggagagaaacaaaactcaactccgtgcattcatttaaagcagtaagcagctttgagagagtgtgactagtgatctcaaaaaattggtctattactgttctcttgaatttcagcaagagcagccacagcatttgctacaaccattgggttgttgtcagatatcaaatccttgagagaatcaagaaaacctctatcctcaaccagctcagcatttatgtcatatagtttggcaacacatatggctgctgtcttgcgaacataggatcatcatcctgtcaagaatagaaattaatcagtaaccaaaaacgagctgcaaagaaaaaggaaacgctggcaaatgactaatatactaaaaataaaataaaaagtgccaaatcccaaaatttaatatgttataccttaagacacctctgaaggggatcacaaaggtactctgtaattttgtcaacacgaatgcaccccatagtgcgaacagccaaagcacgaattaaaggatttgggtcctgtgaatcctgcagaaatgacgaggtgaaatcaagtaaagatcgacaaaatcattgtagttaaatatagaagaaaatggcaaggaagcctcttctgtcagtccttgtaacccttccacccccgtacattgtcagtatcaatatgtagaagacagaaagtttattgaaggctttaccttaacaaaagtattcactgcaagtattgccaagtcaggctgactctttgcgtaatttatgagatacagataaacaagcttcttcaactccaaattttcagtttgcatacaattcactacatcagtgaaaagtgatgaaacatccttccctactgtcatagcagcaatcactttcttgacagcatcttttctcttatcctacatgacacataaaacagcaataatactatgatttcgggaacaaaaacgaaataaacccactacaggaaatatcgaattactagtcccagtaaagtttacatgctagaacgttaatatttattttaatatactttcaagggaattatcttcaaaaaagctaatagatcccaacgatacaaatcacaatttcacagtaactcaagcaaccagcaatgtcttcttcgccgctaaactaaataattttttttttttgaacaaagactaaataaaaattttggtcgcaatgaattcccccaacaaaaaaaagcacaaattttctttcccaatttcccatagtttcccagaaaacaaacaaacacagatcgttgacacaaactatacaacaaccccaatccagaaacgatattacgcaaatgaagcacaatcccaatggtgtccataatcaaattaagaagcgaatccacagatctacgaccaaatcccgcagagaaatcaggataagataatagcaactcaaaaactaagtgatacagatcagagatccacatataatatacagatatatatagagagaaagagaccttgtactgagaattgagctcctctttaagctcggggatttctcccttcttggtggtggagaagtacttggaatcgtggccgctcattgctgaggcttggtcttcttcgtcttcttgttcacctcgtctgagagagtctttcgagtcgaaaatgaaaaatatttgcagagaagccgaacccaaactcgaagccaacaaataaaccgtagtgcccgaaccggtactggttgactagtatgacccggttttcctatttacctaaaactaaccgctcttcccaaatttttgaactatttaaattttgaccctattatttaatgtttatcacatagaattacagtgtcaaattggcaatgcctaataatctattctcaatttattttatttttgtggaattatttcatatactattttttaactttgtaagaactctaaaagccagagtaatgaagcagagagaaacagggaagaagatgaaagatgaatgagaatgctcaatctcaacagattggcttttactaatatttatactgaatgtacaagtacagagtttgttacaacagaaagcaagaaagaaagaaagtgttacaacctaactaacttaggcgtattacgtgattt

SEQ ID NO: 219125 - DNA, 4724 bp, Cannabis indica
atttatatttttacagtatttttatttaaaataacattattctagaaaaaaaaacacttgtattattataaaaataaaaaaatcgttttacttttcctggcagcaacgttaacagaaaacaaaccctctatatatttttattaaacaaaaattcttaaaaataatgtaaacatttaccatttttgtatatttatgaaagaatttctatatagtttattaacaaataaacatgtaagtaaataagccagtcaaattaatttctactcttcattgacaattaagtgaggttacatacgaaaagaagagttttacatagacataataaaatcccaatagtaactatttaccaccactttcaattctgaattgtttgtacattatttatactttagattgcgagtactcatttcatcaacacaacaacgagtggcttttatcaaaaagaaaaaagaacaaacacaaattgcaaagaatatttacaattccccaaaaaaagactatgcttaatcatgcttaaatgaaaagactgaaaagcatataatatatatacaagaacaagtgcaaacatgtaagaacaaatcagacaatatctctatctaaaagtttaaccaaagaaagtgaagaagcctctgcctctgccttacatggtatgtataggacatgttgcacttataattttgggaaaaagaaatcactgtgttagtagaatctgactaaatgaaaaaaaaagcaggaattatagtaataaaaggcttcgcccttattaatattatatagtcatgaagtcatgataatttggtattggtacttgtctcatcgctcagtttcttgtattctggtctcagctcgtacgttccttgatttgctcctttgttgttgtacacacacagatctttcagtaagtctttcacaaattgctgcaaaaggaccctttgttacgattgtgagaaataaaattaaggctaattagatttttgtcccctaaattttaacatatgtaccaaatcataactcttaaatttttttggctgttaaaaattttccctgaactattgaaattgttagatttaaagacttttgtctaatttctttcaattttactatttcagtgattgtttatgtactaaattatgctacccagactttgatatctaccaaattatatctctcaaattttgagatgtactaaattatgccccctgaactttcatctatattagactttttttactaaaattggacaaaagtccgtaaatccaacaacctcaatagtttaagggacatttttaacgaccttaaaagttcaggaggcgtgatttgatacatgtcaaagttcgaggcaaaaatcctaattagcctaaaattaaagtgggcagccagcctaagttagcctcaagattgatgaaatacaagagtttttcaagttatccttctcttcctagtacttcatcattgggagtatctatcataaaacgtcaattctaagaagttgatataaatagaagcttatgaaaaaaaatagtaggaaatcatagggcatacttcaggttggtctgtctcttgaatcagttgttttaaagtccaatttggttgcctctcaaacagcttaaacataatctcttccatttctcctcggtccctcctcgttcttttcatttcagatcccttggttggcgttttcttcttatcctatttgattttattaacaaagtatgttaatcaaaaaggcaaatagtaaaatacaaaaatattaatgctgaggaaaagtgtaaagtataattacaggtccagaaacaataaatcccatcattcctggcataggcctcattcgagctccattgtcattctcgatcacctgaaacaagaaagcagaaaagtttagacgaataatgtacgagcttagactacacacagtacattgactcaatattaagtactggaaatggaacctgaatctttctagtcttagtcatatatttttgagtccgttcgcggcatagcttccgatagctctcaaggttctcaggatggggcttcatgtcaaatttgtttagtatcttcccctccattgaaatctttcctacattgagacagtaaattcaccattcattctagggattacagtaccaaattaagacattaacatctcatagctagtatgggctgatcttcagacacatatgaaatggaataaagatggaccaagctacttatagatgtaactacaactaacatcacaaaaacatagtcgaagtgaattaggagtctgaccaatttgctaatcgcgtgagtttttataggtatcatgcagtagtttaagggagctgtctctgattattaattttgctacattacatttggtagttttggctgcattgctttttttaaaaaaaaaaataaagctgacaaacaagattaagaactgagttaagaactcaattctgataatatgtaccaagcatcaaagcaacatggtaaatttttctgattttccaattacagatttcagcctaaatagttttctgtagctcctttactacatttcagtacaagtatagtttaaacatacaataatttgtcacataaaatgaaatcctcatagctaggtttcatgttttataatgaatctggtgtcactcagaattgtaataaaacctccatttgacaatgctactaaatttctgacattgggcaagaggatttgaacttatacataataccattaggctatgcctacaacctcaacaaaggtactaaattttgaacattattcgattatctacacaatggcataatgtgaatgtccgtgttaattattgtcgatgtaatgaaatcttttatggcataatgttaaagcagaggtaataattaccaacgggtttagtcctaagactcattccaaatgcagaccaaaatatttacatcagagagatgcatgctcaccttgcgaagactccgagaatactgccattggaatcaaatctttggacatttccatagagaaacgcttcggtatattgccagattctgcaccagccaattccatggtgaactgcagaatattatgaagaaagtatctcagacaaattactcatctcagttccttgctcttaaaatcaatgatcagaactcatattcatgtgcaatcactacaacattatatatataaaaagcacaacgatcaactaataaacataagaaaaatgaaatgtaaaaccctagagatctgaggaggaaacattgtttgatttaaaaaggcaatgcagaagcaaagaataagcctcaaaatcacagaaagacgtttgagacataaattatattaacctgaggagaagcagagtcgtcattggaatggagagggtcgatggagacgatgaccttggcgagagaaggagaaggatgatcgttgttggaggaacgaagagagcacgaaacgaggggaggacatttcaagagccagacagctctgtcggctctggtggtctccacctgctccttcccaccctccttctgcttcttcttctcttccattcccactctttagtcttttctttaccccttcacacacacacaaatatatataaatataaatataaataagaacgttacaaatagagtagatgagaggagacacaaatttaaaacggtttttcagatcttccctctaacaaaccaatgtgacgttattgaaattttcaataacacaaactattattattattattattattattattattattattattttattttacttttttctaataaaccatgcattttattagatagtatcatccataaaacaaaaatagttaaattcgtccctcaatacgtgtcatcttattaataaagaaatagaacataaactattaataatagccttacaaaactttttttttttgaatgaaagcgtcttcgattaataagaaaagttagacctcacggtcatcacataaaatgttcaacgggatggtagatattggaatatcactaaataacttgtgggtgaacgcccactttgccacattatgggccacaaaattacaagtcctgttaatattagaaaaaatacaacccgaaaataaagaagagtgaatattacaaaaaaagacatagttttcaatagcccaattggactccttcccattgagcgcgttgatgactaccctcgagtcgctctccacaataataaaatgggccttcacttccagcgctgcagaaatagccaaacagtaagccgccacttccccacaaagcgcgtcagcgaagtccactctagccgtaagaacccgaaccatctcacctaaatggtttctggcaacagctgctaagcacatgctatcaagccacactctaacatcacaattcagcttaatctaatcctgaggaggtggagaccagaactccttcaggctaggagcaggggtaaggaaaatagtagcatgcaaatctgcaaaagaaaatcgaatagaatcaatacaatgcctcaaatccaacgtaagatttcctgtgggtacccgcctctaatggcacgaagatttcctatctaaatggagaacaggacagggatggggattaaatttgagaaaattacatttactatgggattttaaaagtttttatgataaatatggtacatttaagtttgactaatttatatggtatttttttgtttttatttttttaatggtatttgacatgccatatatatgtaaattagg

SEQ ID NO: 219126 - DNA, 3554 bp, Cannabis indica
gatacgatccgccatcgatgatttcccgcttatctccatggatacggagtttccgggcgtcgtgatccgaccctcggtagatccgacgctacgaacttcccaggccattgcgcactacgaggtcctcaaggccaacgtggatcgcttgaatctgatccagatcggtctcagcctttccgacgacgagggaaaccttcctgatctcggcactaacagcctctacatctgggaattcaacttcaaggacttcgacgtggcgcgtgacgcacacgctcacgattccgtggaattgctgaagaggcagggtattgatttcgagcggaatcgagaatctggtatcgattcgatccggttcgccgaactgatgatgtcctcggggctcgtctgcaacgatttggtgagttgggcaacgttccacagcgcctatgattttggttaccttgtcaaggtgttgactcggcgtcttttgcctgatgagttggctgattttctgaagctcgtgacggtgttcttcgggtccagggtcttcgatgtgaaacatctcatgagatactgcgcgagcctttacggtgggctagaccgggtctgtcaggtcctgaatgtgagtcgggtcattggaaagagccaccaggccgggtctgatagcttgctgaccttacatgccttccagaaaatcagagaggtctatttcaacaagaacgggcttgatcagtacgctggtgttttatatggtttagaaatttcgtgaagttaatgctttgtagatttcttctcttttaaaaaagaattcaagtaaatttttgtacacagttgctttatatcaatcctagtaggttacttgatttggttttatttaatttgtgcaattctctcgttttattgaaactttccttaaggtggttccttcctactagctcatacaccaatgcttttgtgaattagtttgcttggttggtagtgatggtatttgggatgggacttataagattggactttcccaggtcttttccttggaagatagcaagatttcgaaggtgggattttgcttcaattgcggaattagatgaagttgactttaggggttaggttgatagacatagttgggtaccaaaatactgaattgggatcgtttgaactttctttaaaaccacttggacaagtataaaattaacttaatgggtttgaaatgaagggtcttgataaactttaatctaagaagacacgtcttcaaagatgaagtcaacctttataatgcattgtactatgagttcagagaagaacaagaggttctttcttttggattttctctactcgttgtgatactagaataatagctaaatagcatacctcatgcccacacgattcctctattaagatatgctattaattttttaatatgttacaacatcaacatcatacaatatatgttaatggtctttttctccgtatgtcagctacttttgtcaggtctttacatttatcattgttaattttgagaatgattagctaattcatcccttcttaattgtctgtagtcaatgcttagtaaaacaaaagatgcagcccggcccatgaacataataaatctctagtgaaaacaacttaattcctaggtcccatgtccaaacaaataagagctatgctagcccataaagagagaaatccgactatgtgagtcaacggtttcttaaagagatcaggtcaacatggctagaatatcctagttcacgttgcttactcccctttttggggccctgtatgattaagagcaaaaaggtctcatctttgagaacctttttcttgcatcaaagaacatcaaggcattgttctagatcttactttgtggagggtatcatgtttggaaattcgttctcttactagcttgaatacattttctctgtttgaagtatcaaggaggagaaatagggagagaaactaagttatttttgtttagtcataacatttactttgcattagtttgtttgtgtcagggatgttttagtgaaaacaacattctccatgaccctatgtaaagtaagtatgaataacatataaacttatcttctcgtgggggatttattattagtctttttaacctgtaattgttttgtgacacttaaacatgagctatgtatccatgagcattgagacagatctgcttgtagctagttgcaatatgaaacagtgtcttcgcagcagcatttgattcactacttgcagcacatggtgtaatcctattgcctgcatttaataattgaatgattctacaagttgttgattgtttccacagtggtcctcataagtattccagtacaggagtcctgttttcaactgacctatataacatttgaaagctactacactgctgttgcactagagtgtagaaggtaaaagattatgtcctcgagttccttcttgcaattcttgatagtagtctgttacagtatgtgtttttgcttttcctggtagatctaataatctagtttcttcgcaatattcagactgcaacttacttgataattgaatctcagtgctaccaaaagtatttagttaaaacaacatttctcatgtaactcatatatgtgtatcttgattagaaattttttcataatagccatcattgaccacaaaatttatgtttagggatcatgaatttgacttaagaacttttacttgatgtaattttcgttatgcttagctttactaatactcgcccagggcataagtggcatgatgacttgatgtcatcctcaccttcctccggcttatcaccggcagtctattcaggttccaatctcaacagtgatgctttccaggaggaacttgctaaaatactcgtctgcaagttgtggttccgcagaagtccaatagctacagggtgcaagtatctgcagcttaggtaatgcttttttgttgctagaaattcgggaagttttgttgttgtgttaggaggctgaactgaacattctggttcattatattaataatttcgattgcagttacttattttaatttggaaattttatgatttatcccaggctaaaatttgtaatagagacactgttaaaaacttgagctgttcttgcagcaacgaggagagctagctttcactgtttagagtgatagtcatttatacctaatagttaatatcatcccaatcttgttttatgtctaggggctaaaatcgtttcaggaacaaacaaatcacaatggtttttgacgtaggactataatattagattgatttttctacatgatacccttaacagggatttgaactatgcatactcactcactcaccaagattcactatggttgaaggaagaattgtaatattattaattattaattgtaattttgttcttaatacagtcttagaatattagtgtaaatatttggccatgctttcttcactctgaccctttgcctttttttcatacctgctaaacaaagaaatcgaatcttccttcacaacttcttagtaaggtctgttaactgttaattgtatcctatctgatttgatctgattttttattcttttttagtattcatag

SEQ ID NO: 219127 - DNA, 5744 bp, Cannabis indica
gtttaatgaacattcccttttttatttttttgatgaatcggtccttttatgttgttaaatatgttgagcttatcatggaatttaactcaggggctatctccaaatcaataacatacatttctagaaattttgcttggaactttcctttattctttgtttgtgaataatttccaagccctattaagtgttgcattgttaggaacaatttagtaaaaaactctattgcttgctattgatcataatgcagacatattatagagcttattgtataagcaatagtgtctttactcagtatttttagggaatgaaactagtatttaagtttaacatttatttgacgtatttctatggtttgactgatcagttttgctctgtgatcttttgttttcaatttgtctactttttcttccattacagtagtactagcattgatctggagaacttaacaatgtcatttaagtataaattctagaggtgttccacatgctctgttttgttgattcaactatttgttgttcacttgcacaattcaagttgtgtagaagctatatagtaaactccatattaataaaagtattattgatcatctatcaatattgataataagttgtgattctacttctaatgttcaattattgatcatactattatatttttttgggtgtagatatttcattttctttctaattcaagcaacttattgcttgtttgatattgtgtatttggtttaggatataacgtttctcctcgtaaagtttcagttttagtggcatagatgttatcgaagatataaagtacaagtacaactccaacaacaacaacaaaactaataatcaattcaatacattgcaatgtttatttacttattgattgtaacttgtaaggattctggtagaagcattaatagcattggttatgcttgtttttctctttttcccacttactgctttgtgtttggtttttattttcagggtcttccttaaccaacagagaaacactagtggagaaacaactaactttattttcttctcaacattgattttttaaatagttgttattgcagccatgtatgtttacatccacatattatatagcttattgtatttagcaactattttcaagatttagtttgattgtttaggtttgttatgtatttttgtagtggtgaataaacaagtttataatttattgtagaatgatagtagttttttttcaattatatttaataagtaaattatttaaatttattgtaaataatatttatattatgcttttaaattctttttgttgattttagtattttttttaattttttaatccactttaagtgtcaattttaaaccgacactaaagggagttttagtgccagttttaaaacgatactaaaactcaataatgtcgttttgaaagtgacactaaaggaaaaacatatatgtatacattaagtgtcaatttagaaccgacaccaaaactcaatagtgtcggtttagaaccgacaccaaaactttgactttttgtgactatggaataggtattggttttgtgaactggaactaaaagtataagtgtcagtttaaaaccgacaccaaaagtacattttgtagtagtaagattcagagcttgaactcaccgagtacgctcacttttcctttctaggcctattccttgaagtgttggggctcagtggcataaatggttgaaggcaccgtattggagatggccttctcgatagttgaatacttcaatcagtgttggggttcggtggtggttatggtttcttgagtgattgaagagagagaaagagaaagagaaataagaaagagagagagggagtgtgttttgtgggtggggaaaaagaaattaaataaaaaaaattggatcccacatcctatatcctaatttttttttctcattttactcagtttgaccgattgtttacatccttccctccttgaagaaattttgtccctaaatttaaaagtacaactacaagttgaaagttaaataagtgaggatacttcatatatatctcggactcttacttctaatgagcctcatcttctttgtggttttggcataagaccttgactttggaatctctttgttccttaacacttttagctctctcgccaagattttgacaggttgttcctcatatgtcacatcttcctgaagagggatggcctcatactcaatgacatgtgatgaatgtggagtatacttcctcaacatagacacatggaacgcattatgaatatgccccaaccgtactggtaagtttgatcagtaagcaaccaccctaaccctcttgataccctcaaaaggtccaacataccttggggctagcttaccctttattccaaatctcattacaccatgcataggagtatctttcaagaacacataatcactaacataaaactcaacttcccgtcaatggagatcgacataactttttggatgactctgatcaaccttaagtctttcttaaattcccttactcttttcagaggtactagtaataatctagggtccaatagggacatgctcatttggttcagccttacataatggcgatcacatggtctaccatataatgcctcataaaaagccatgcctatattggcttggtagatgttgacctccaaaaattactaagtgtaatatttggagtcattagtgttatgcccaaaagttttccaaggtgagctccacactctaactcctccatgcaccaaggggagctccacgcactagctcttctgactcagccaaggggagctccacgcactaaggggagctccatgaacctaggggagcttcacgcacaaaggggagcttcacacaccagctcctcaacgcagccaaggggagatccacgcactagctcctccatgtagccaaggggagctccacccaccaaggagggctccacccatcagctcttacacgcagcagtgagtggcctcctcatctcaaacacccacggcctccggttcccatgtatttggcctactcatacaaatttaagcaaggagaagatatcgaggctagaaacgtttaagccaagaatcacaaataagataaaaactactcaatgaatattagtataggagacaaggttcattttatctgaggtgcaagtaaaagaggaaattttagtgtaacttaggatgtctgatacatcaaacatcctgagatactatgtcatcaggtattaaagggacttgacatcctatgattttgagatctggtaagattgtaaagtgtgaagggctctctataaataaagcccttgaactcactgtaagggagactctatggtagaaaaagtattgatgaaattgtatctttactaaatagtgaagagagtaatatttacttcaagtattattctattaagatcttgaaacaacatcttaagttcttgtcattttgttgactagttcttaccatcaataatttgtcattgtttgtgggaacgacaagctctagctacattagttcctaaaccattcactgtaatcttcaagacgtcaagaaattcccattgtctctgagaaaatggggtgcactgatgtgaaaaccaaccgaccaccatagtaagagaacatctacctccaatttgcagagagggccagagggagagtaaccaaagtgtggaccaccacgcaaatactcaaaaagggcctaggacactacgtgactcaataatgacattggtggctaaccctattgatagaagtattcaactatcgagaaggccatctccaataccgtgccttcaaccatttatgccattgaaccccaacactttaaggaataggcctagaaaggaaaagtgagcgtactcggtgagttcaagctccaaggaggaaataagcaacctccactggaagaacaaaaggttagaaactagtgtgctggtatgaaaaaagtgttgagtagcatactcaatggcaaagccaaagcctcacactttcatcacaaaagccacagagtgggaagcaagatctcaattatgtatgctgcaaaggtgattcgatatcatccactaacagcaccataggagatgaacatagaaggagcttctcgcgagacaaaagtttaataggccaattgagataactcgggcctacctatcatgaggggattttgttgggggaagcaccccatagcctaaggaagagacttcagccaagaggtcttatgctaggggcactttgcctatggcttcccaccaagtgcaaggtaagcagaaggccttatttgtcagctttagttgtaatttacatgtttttcaaataagaggagtaccctccacgagccttgtgcaaaccacatgaaagacccaagttccactcactaactctcaagagaggatgagcaaaaggatgaaggagttagagggagaaatgcaagacctacttcgaaagatagtgttgaccgcataaagtgatcaaccaatagcagggtcgtacaaacttgatgctcgccatgcgtgtgcacaaataagaatgaaaagccatagacaataagatttttgatagaggttcgacccccttgtggttatggtttcttgagtgattgaagtattcaactattgagaaggccatctctagtacggtgccttcaaccatttatgccactgaaccccaacacttcaagaaataggcctagaaaggaaaagtgagtgtactcggtgagttcaagctcccaagcttactgctacaaggaggaaataagtgacctccactggaagaacaaaaggtaaaaaactagtgtgggtagtatgcaaaaagtgttgagtggaatactcaatggcaaagcccaagcctcacactttcttcacaaaagccaccgagtgggaagcaagagctcaaatatgtatattggcaaaggtgataccatgtaatccactaatagaaccctaggagatgaacacaaaaggagcttgttgcgagacaaaagctcaacaggccaagtgacacagtccctctctttctttcgtatttcgctttctctttctctcccttcaatcactcaagaaaccataaccaccaccaccgtcggtgatcatactccgactaccacctaatccacgtgttgcaccactcggacccccgaccaccgacgatctcaatcccccaagcagtgcctctgtatgcgccactgttagcgagagatcacgagtcaaagtttggaggttgaaactttgagaacattttttgatcaccttcggtgtccatctgacgatccttcttcaccactagaattaatttcttgaggagaacaatctgtactaagtcatttcgcccaactcgatactttttctgatgaactttttgtagctccacccctttctaaaggatttttagtgataccatgtatcgttttgataaatggtttgtatgggtgctatctacttattgaggtggtcgttctgatatatgctactcctattttcaaaggtgtttctggtagacccgatttctatcgcaaacgatagttaatgtgaaccacttaagtgaggttttagaactccaaacattcaatatagtcatattatatgtcactagactcgattttgaatgtagaatacaattgtgatcattttttagacatttgacggtataggtaaaagtgatatctaagattggactaaacaattagagcgcgagacttgagagcttaggatagtctcttttgataatgtttaatgacttgggagaggtagggactca

SEQ ID NO: 219128 - DNA, 7012 bp, Cannabis indica
tctacagatattccatttttgagaaaaatcaaatatttcctttctagtatccttaaaactaccatacaacatagctttaaatgggttgaaagtgtcgccattctacaacgaacacatttaatctcttctttcgccaatgtaaaatgaaacatcattttcctcctcaaaacactcatttttctctaatattgactcattaattacctcagaaggaccacaacaacaatggcagtctttaaaaatcgagttcggatcatacccctttaccaaagcagcctttggacactcaagaacgtgcccaccacagtccatgggcgaaacacccacgagctcatcctctctcctctcgaaccttagccaagccgagagaacaaccttcgagtggacatcctcggcttgttgacgcgccgcgcgtaggcaccgtcgaagcagcttgggatcggctaggccacgcatgagcgagtattgctcgacgagaagcaacgactttttagacggagatgggcagccttcgattcggcggtagagttcggctaatgagccgatgaggtcaactggcttgagataaggctctaaacagggttcgagaagctcagttgcagggagtccataaggaagaagagcttcagagactgaaacagagttgtgtgccttgttgggctttgagtttgagacaaaagatttgattatctgagcttcaagcttagctctcacagtgccaccacgtggggttttcccgccggaggtgtcagtgggattaaaggcgtgaacttgggcactcttgaatcggtctataagcttaagaccacgcatttttcttcttattttctcttccgagaaaaaaatttgatgaaagaatgaatattttgattcaaacttatcaaatggattcaaatctcaaatgggttttttccgctaattttctcttgagaaagcagagaaagagacaactgtgtaaacttaagcatggtgttagtttctcgggaaagtaacaaggaaaatggctttttagacttagttctttcttgtcccccttttccttctatcatatcatgggggatatattctttataaggcttaagcaaatctcagtgttgtgtgttgtggttctctgatttatggtagtttttgttaccggaaccattactatggtctctatagtcgattgattaggtggctaactccaaagtccaaactcccaaagcaacaagattttattttattttattttattttatatcttttatctttattgaatgaaggaaagctatggagttcagttctactgttctagtacccactttcatgatgcatgaaccactccataaatgccacgtcatcaaaaggtcccacttaagggagttggtcaactcactcatccagttcttatatttttaatcatttgtttcttcaaactgagctaataaatctctcatcgtaattcttctatgattctaaaaattaataattaaaagtagacaagataaaatataaaaaggtgaattaagttgaaattacatgtcaagcaaaggtagcattagcatgaagtgaggtggtgtcaagctcaagcagattatctcaaaatgataaaagagacaataaagaaaaattaaagagaaagagatggttaaaaaattctaattattataggttaatgggtcatatcaacacctaaccttaccctcctcctataatctaaaattggttaaaattagaataaaataagggatgcaaagttttttattttattttttttaggctaagaaaatgacatgtaaaaaaggctaaaatcacttgtgacgtgtttgagcatctatctaatgagactgaaaataatgcttttgtttcaattaattgaggacttatcatataagcaaataagaaccccagaaaagaaattgcagaagtgatttatttattaaataagcttgaattgtgctcatatacaaaccatgtacataaagcaaatcctttaaagaaaataaagatgaaaaggtgttaggagaagaaaaagattacagttttgactaaaggagaagtgtcacaatatgagtttccttccaaccttttctttatttttttcatttaaagcggaaaaagataatctagtggctgtgaaaatgatgatatcagtagaaaaataaattactgtgacagaaaaaaaaaatgaataagacaaaccaaacaaacagactattctataactaataataatataataaaaaaataattaagaccataaaattataaagtaagagaactcgagatgaagcttattaatggggttaggaaaggattagatctaagcacagattttaataatttagattggaatacataattcaaagtaggtgttccttccacttgcagcctctacttgtggttggctaaatattattattcaaaacaaataataatgctaaatcgttaagaaaggctatagataattgtaacaacttgcattgcacatacccatatgaccttatcttataaaaattaagacacgagaatatattattagctcagtccagagagagagaatatatgccaaatcaggtcacaggtcacagtgttatattgttacaaagagccaagaaaatgttatgatattggctaagacccatgtgaaatttcaaaagctgcttttgtttttgattccatacaaaggtcaatttacagcagctgctgccaaaagaaagaaaaactaatcatgttttcctttttcttccttaaatctaagcacaacactgaactgaaaaaaggggtgctctgtgtcaaaattttgattcagtgattaaaagatcttttctttgattttctttgttaaaagaacttcatgtttatgtcacaaacagtcaaagtaagcatcatttaacatcactggaccatacttttgtttgcctatgttaattgctatcacagaaatgaatgtaaatgaaagctgagattagatgtgttcaattcaaaaggactttaatgcattagacatgtctacaaatgaatatcaaaatactaattaatgtcagctactgatctatttttttgtaacaaacccacattagtacagagtgtgtataaccaaacaattattaacaaaaatacagcacatcaaataatataattcatgaagatagatggaacccacttaaataagattccttggtccacttcattatactgcctgccaaataatcatttaccatttaagtcactgcaaagtgaaagttaaaaaataaagatgggtacaaactccaagtccaataatggaaaagaaaacccagatcatatatccatgtgggcaaatttgtaacattataataatgaataaataaaagccctgaatactatagggtgacccaattacatgttcttggttctgatcaattccattgtccccaattaagcatttaatttcatagctaatagaacagaaggaaatgacactagtgtgaacaggatcataaaagaagaacatgaatgaggaagatccaagcacaaaaggaaagatagtaagattcacatttataaatcatacaatcaataaaagagtatatacatatatacataacaaagatgtacctttcctctgtctttagatgtcataatccatactgaaatagcagaacgaaacatataaattctgaaagcatgttctacataacaaaggatcaaagtgtacacgtgaaatttcaagtgaacacgacaaaccaagattctcaccctgtttcaagaaattgaaactaattctgaagcgtaagatttgcatgtatcacacataataatctaaattatccaactaatcacagcttaattacatattttaaagtagtcatcagagattcaagtaaacaacattttttcagcaatgcagttgatctgcctaccaactgcattacttgatttacatagtgacatacactatacaaaatttacgtatgaagagcggggagaattaaaggtatttgagtcactattatagtgttacctatctatactttagaaagatggtttaaccaaaccgatgtccttcagagcttttttataatccaaagcttatatttctttatatacaaatatataagacaaggcccaatcaaaccattgtcagcaaggcgcttgcatagtttcaggtaactttccactgtaccaggtccttggattctctttcgcagcccctgcagcacagcagccctatccaaatactcaggacacaaacccaaatcaagcattttgaatactgtttctgcagctttatcaaagtgcccccctttgatgtaacctcttaacaaccatgataggcttttcttcttacgcagtgagccagaaacctccaccttagtaagcattcttcctatagcactagtctctttttgagaggccaaaatggctagaacaatgtcgtggaggtccccatcagcctccttaccaacaagcttcatttcccataattgctttccgcctctattccacggcctgcaacaataaacatagcaaggagtctttcatgaaccaccccgtggaatgaagaatttccttcttgaattgcccaattggataagcgcactccatcagctagaagatctgactgatatttctctacaagctcggtactttctgtgtcaagttcagttatcaatccacctctcgcgaaacctttcaacttgcgcaaagcttttgcaaattcattgagttctttaacagcagctgtcattgcaatgagatagctatagacctctggtttcaacccagattctcgtagatcaaccaccaacttgactgcatccatatacttaccctcaacctgatgaaatacatcagtctttattaaaggaagctgaagaagctaaacaatacaaaagaaaaatgttttcccaatatataataaactattgaaatactaaacagaaagttatacatattttttcttgtgcccactcctgaaaattcaccaataccaaggacgagcaattttctttttacttcactttatccaataatagataatcacaagaaaaagaccctactggtattaaacaataggctgtaagagtaatctagaacaccccaatttttgaaaaatcccataactgaaaggacgacatgttccaccaagaaaggaaataagcactatttcaactttgaaataagtgaaaaatcagttgaagactcaaaatcaataattaaaatcacctaagtaactttgaaaaacgagccaacccgtattgcgcaatggcgagacagaattctacattgaatgaaacgctagagcaatgcacaatattggaaatgaaccactacggcagttcattaggcatatggtcttaaacatcaagttagcataaaacagaaagtaaagacctcttccctccatcccacttgataaaataacataaacaagaacataaagcaatctataacttggaaagaaataagtgagtttgaatagcatcaaaattaagaactattttaaacgtcattaccatcatcttccaagcaagatatccagtaggcccttccttgtgtttgtttccattaccctcagagtaagcaatcccacgttgtaaaacttctttcacaaacaaaatggctctctccttctcacccatttcccagtacaaagatatgaccttctccatcatgctaaaactcggcctcaaaccaacacaatccatgtccacaagaaggtcaaccacatccgcaacatcatgctccgcttcgattagcttcttaatccaactgcacattaatgtaaccataagctccatggtctccttatcaactcgattctcctttctaagccactcgaacacctctaacgcacaccatgagtctctaccctcctgagaaaagtacacaagcacaagctgcaactccctcgccgataacctatcattcatttcctcaagcacatcacttggttctctcgtcattcgctccaattcctcaattgcctcaaagaaaccttcccccatttcatcttcgtcgtcgctggtcaggaactggtccaactcaacggatttgaataacctaaactctcgaaacttacccgggttttgctgtttgcaacaaattatgggacaaactcgggcggaagtccttcttccccagaaattcttatgattttgatgaaagaaaattcggctccgttgaagttgaagagagatacacgaagaagacgatacacaaaattcagtcaacggggtaaaaccttgagcagaacccatttcttaaaacccccaactccacccaaagaaaggaactttaacttcactgtgttcggtccccaagaaaatcaatgaagacggtagaagaaaacaaaattgggaatatagagagaatgaggtaacacgccaagtaaagtaagttaaagagaggcattaggaggagacttcaaaattatacttcctgcctttcttttcctttccattatcctgaaattttccccacagacaaacaccaaattcaggttcgaattcaaaatactcttagaaggagaataattcagaaattgaacgataggtgaaatagggcaacaaagaagaaagtaaaaggggcgagtgattctcgttgaagctcccgaaagttatactagggttcgaaattttgtggtggtcttgcaatggcggtcgaagtcgaacgaagtgatactgttcaccgtgtgcccaagagccaagacagagacactgtgtgtgagcttctttctttggttttggaaccgcaagcactggccacgtgtcgtaacggtgactacccaccgaatctgacctcttcccgcggttctaatttacgattgtacccaccttttagcaatggttgtgggggctagtttcgccatttcagataattatgtttaaggaaaattttatttacactctaaaaatttttaaaaatatccattttaataatttttattttatataaaatttatatccttaattatactaagttttttttaacttttttcttccaattcatatctttatatattaaaagtgcctatctaacggcaatt

SEQ ID NO: 219129 - DNA, 4486 bp, Cannabis indica
tatcctcatccacatgttaattttctcattcgctgtatcttatatataatctattaatgtcacggggtgatataaaaataataattggaacgttggtgagaaatatactattaatgcatacaagggccaaaacaaaatagttctgactcatcatacccttgatcaataaaaaaacacccaaaaaatagctgtatatgaatgtgatatgtacaaatggacgtaatggtggcataggcctttgtttttagtttggtaagagtttatgtaaattaaaatctcagattgcacaaaaagacatccaagaagaaacccaacaaaaggaaaaaataaaattggaaaataataaaaacaaaagaaaacggctcaattttattttctttctttcttagtccatcttagtatcttacttacttttaaacctttttcttttcacatctaaataaataaaacgttcaaatgcacaatacccaagaaaagttgcagattctccatgtacattacttccccagctattaattatcccttctcctaacttcatcatctttaactctctcctctttctctctctagaaacaagcaaaagtgaacaaaaggcttcttctttttaccttaaagggccctgctttgagggctacatcactcttcatgtgtggttacttaatggggtttcattactttcatcttactgccattatcgaccactagaaaagggtatctgagtttttcattgttctgcttgattcattgacatattagctcaaagggtctgcaaatggtggatgtgggtttttgagtagttgagcttagaaagcaattttagtacaaatctcggaggaattgtgtttggttccttgctgggattttgtggtgtggtctcgaaatgaggagcatttatggtttttatttgattgtggtgatttgttttggtatgtacattagcacgttttgtcaggaggattcggatgaagacattacagctatttatattgttactcttaaagaagctcaaactactactcattactataatgagatgagaagtgtgaatcatagttccaaacttggtggttatggaaagttcgacgttcataaaagaaggtcatttttcttcacatcctttaattttttattttatttattaattaattatttttattccaattaattggaagttcaattttttagcagatataattatttatttaagttccatttttgtgtattttattgcttttattcgagaatttgcggacatggagtttgttacttggtgtccaaaaataaataaataaacaaacaaacaaacaactttcttgaaatttttaagaaaaattgggtttctttgatatcattgtatttttttctcctttattgtacatgtttattgaattttcattttgctgcttgaaatggttcctcaagtacacacaacagaagcaagtacacatgagtaatcgtaggatatcttgggcttgtgttacatttggagtaaacaaaaattatattactgtgtgaacattggtagttagttactgttttttttacatgaaagaaggtttgtatattacttgagtatcttatttgtgttcattctggtagactttctaaggaaattgcctaaatttgcattcatattttaatcattgtatcatgtagtagtcttcgctaatagtagtgactagagaacaatgtggatggtcaattttttttctcctcttatttggttgcatttttgttaatgcactttgcatctcttctgatgatgttttgaatgtcttgtttaagatttagaaacatttcgaaaacggatcgacgctatggttcttacattgcacgagttcacgattcattattgaggaggactttcaaaggggaaaagtatctgaagctgtacagttaccattacttgattaatggatttgctgtgtttgttacgccagtacaggtatatatcatatcattcaaatataattattacttataattgctttttctgtttaaattagtgctgtctggtttattcatattggtcatataggaatgtttgatttgtttgttgtatgtgatttaaaggcagataagctttcaaggaggagagaagtggctaatgtagttttggatttttccgttagaacggcgacaacacatacacctcagtttttgggtttgccactaggagcttggccccaacaaggtggatatgaatcggccggggaaggaattgtgattgggtttattgatactggcattgatccaaatcatccaagttttgcagatgacacaagtgatagtcaatatccagttcctcaccattttcaaggcatttgtgaagttactccagattttccatcaggttcatgcaatagaaagcttgtcggggctcgacattttgcagcatcagctataaccaggggaatctttaatgcatctcaggactatgcttcgccatttgatggtgatggccatggaacgtgagtttatgtggtttttcttaatatattgtactttatattgtgcctttgagcctgttttgattttctctgtttcatatcggtagcattactgccttttctttttcccatcatgaattttgaatttcggttgcagtcagaatgtgtgaaaatttaataggtacatccatgcattgcagtttgggatttgacttggtatccttattacacatatgcattgtgattatgataactttctctataagccatatgagctgcttagaggatctctcctaaggcatcagaagatctagataacaaagtattgcgtgcagatgctttaggctcaaggcaaaagatagagccaacttttgaattgccaatgagataactatgtgctcagattcatgttgtttttattgattaagaggtagctaattttttcattgaggcactttactgagattcagacgtagttcctcataatgattacctaaaataacaactttccttgttttacttgttattaatgctagtatcactgttacttttagggctgtattcagaattcagattttacttacccatcaggactgcataaaataacagctcttcctttccttgtcattattagtagcataattgttattgttgtattattgtcatttttgtttgtttccgaagatcggtatgcaccacactgtctccatttacagaagtgtgcgttacaaaactggatacacaactgtttgttcatttcatattttgttagataatgcagactctgccagtaggtcctttttttgtgacatagatgatgtataaagacagatatcttagatgatttgaagagaaaatatataataatttttcctccctctattgtctgaactcttcaagtgtcagcttattgatcttgatataatgtacaggcacacagcctctgttgcagcaggaaaccacggggttccagtcattgtatccgggcattgctttggaaatgcaagtgggatggctcctcgttcacagtaattatctagatctagttatcgatcagtttgatttgttgttagtattgcatcatattagatatgttttctgcaattttatttttcaagaaaaaattttgttgcgagaaattatgtattaagtaatccatatctttctcagtgttgctgtttacaaggcattgtacaagagttttggaggctttgctgcagatgttgttgctgcaatagatcaggtatataaaattgattttctttaatgtatttgcaactaattcatctataaatttgacaaaactaattgtatgacacgtgcaagagatagaacagtttatatgatattattttcttttcttttcttttggtttgtccaatgcatctaaattatggatttgagctcggatggttgaagctatgctcatactctattttaacttcattaagtttattctcaggctgctcaggatggggtagatataataagcttgtcaatcactccaaacaggcgtcctcctggtattgcaacattttttaatcccatagacatggcactcttatcagctgtgaaggctggcatattcgttgtacaagcagctggaaacactggaccatcaccaaaaagtatgtcttcatttagcccatggatcttcacagtgggcgctgcttctcatgataggatctacagtaactctatagtccttggcaacaatgttactattcaaggagttggtcttgctcgtaagttcaccttgcaaatgcttattttatttccttttaatattttatgtaggattgttactgaagaactggtttcaaagaaaactttctaggtttgacaatgaatatatgacatgaattttatgagagaattctggagttatgcttctaaatatagcaccaaaggagaacacaggattttgagtatacataattagtagctggagtgcccaagtagttaaccatccaattgcacacttaggtggcatttggttgggaagaatgaaaacataggaatgagaatgggaatag

SEQ ID NO: 219130 - DNA, 9190 bp, Cannabis indica
gggcataaaacccaacaggcatagggtctccattttggacatcttgtgcctgagattggtcgttctgcacataacgacgcaagtggggattgttcttccttatgaagaattcattctccctcttcaaattctgacacttattgatgtcatggtcgatatcattgtgaaatcagtaaaactttgacatgtctctcttgctcatctctctagacttggcatatgctatgagcatagtaagttgttatattatatgttgggattttaggaagtctttgcgaaaattcaataattaattattacaagataataaaggaataatatgatcacaagagttctcaaggattaataatagagaattaataacatgaacataaggagataacgattagagataacaaatttgactgaaaaaattaaatcttcaagaggcatgccacattagaataatgttatccaataaatctttactccaaatctcccatggattgctaatgacttctttgtagaattagatttgggactttaaaccttgaattgtttagggttagcaaaactctagaataattgggagagaactagagaacttgttttgagagagaaagagaatgttagagagagattgcaaaatgagtgattaattcattttgactcactcaacacctttatatacaataggaatcatcattaacaataattcatgtgattagatcgttgaataaaattattttggtcatttcttgcattttatgaaatcataaaatttcttatgcaaagctccagcaacatgtcgcctaccattgggcgacaagtcgcaatatcaggaaataaaataacaaaactcaaattactgtcatgctcactactaaaaaattgggcaatttcggcacctcaatctcggcaattctgtgtggaactatagagatatataccaatctcagtggttacacaccgaactatcgagactggtgaattttttaaaacacctgcctcactcactagccagcccgcaccccatcacttttttccctctctttctcttcttcttgcttaacactaagagcaagtccaaagaggctgcatttatccatatatgcagtgattcatcctccaaggagactttatttagtgcaccattttgacattttttctacagtgcacgacatatatgcgtgcactgtagtcacgatattttttttttatatatatttaattaatattaatacatttatgttattatattcataaaattaagaatttatttttagaaaataatgtacgaattactcctatttgttttggcatagattttttcagtttatttttttttataaagtcgtgtatattatagttatttaaaatatcttataaaattttgagaaatttataataatttaacatgctgaaaataatgcacttctttaaacgtggcatattgatatacgcctacatgtttcaacattctagagacttgtttagtttttttttaatgatcgtgtatattatagttatttaaaaaattctgcaaagtttcaaaaaatttaaaaaaatttaacatgctaaaaataaaatttaatattattatctttaatctaattattaagtttatttaaattattatttgaacataataattgtggttatttttaggagaattaccctatatactattcttttaacttttgtttcaaatttacagtttgagtttttaaagtggttgcagcgttagttgcaataggggtttctatgtagaattctgtaaaaatgcaaaaaaatttgttttgaagtgtaaacataaaaaaatcccttatttttattaatttatatgatactgctttttttttattattttattaaaaaattaatataataataaaaaatatttttttagtgtaattattggtgttagggttggagaagaaatattttttgaccctaaatttattgatagtgtaacctaaagcacacgccaaagagcacagccaaaccagatccgattccggccattttttggtcgtcgttcgccctccagccacccacacgcaccaaggagcacagcctgtgcccgtctctctttgtcttcttcctaaaaacatgacaatttatttttcttctccatctcttctccctacaaaagaaccaggccactcttctatggctctacgattcttcttcttcgattcccacttgctgatctactaccagttggtgctctagattcattgacttaacataaccacaaggtatatatttctaggtctttatttactctaccatttacattttgatttgcttctttttcttttctgagtttgttgatctaagtaaatttatcatataggtttgagtttgctctaagtttgttgaatttgaataatttctctaatattttgaatggttagtaagagaaagcttgtctagaagctatgccttggttcgttgaggtgtgtgtcctctttcaaattcaatatttatgttgtgtggcttttgaagattgtaggttttctttgagttccactgaattgtattttcattaaaaaaacaattatacttgatgatagtgagtaatatgaggttgaattctctacatcagtagagagttgcttttgctctctgcctttgtaagggaatttctctctatgtttctttaattcaataagagctcccatctttcctactattttcttgtcactgttctattgttttctattgttattgctactaattttggtatattatttatagatataaaaaagttctgctttgtttgataaatgataatggctataaaaaatttaattgttggtatggcatggttatagatgaaattaattagttagctactgtaatgcttcatttccttttaggaagctctttagttattttactgcaacatcaattctgatatatttgaatctttattaaaagaatggtatgtttctaatttttcattatataaaatattagtgagagaatttttattttttaagtgcgatttggtgattgcgtttgcttgtgaatatacatatatatatataaatatatttatatgagaaaagtgatttttcttcttccctttatccactgttttttctcacctttaatccacattatttgattttgtaattcgtatgatcatggaagtttgattgcaaactgtggtcatatgtgttattgcctagtgcttggggctcataagtgtttggcttagtttatggaatatcagtagtttttgagtgagtattttttatttctttgtattttcacacaattatatattgtactgtgttctatctgtttgtgcttaatttggaagcaaaaatatgattatgtaaatttattttaatttggaagaatataaataaatttttgtagccagtgtattttttatttttgtaattttttttttcttaaaaaaaaagacctatatcttttggcaatggaggaaaacttttgataattaaaaaaaaatacaaatgtacgcaaatgatctcaaataaatccataatgaaagaaaaaaaaaaagcatttagaaataaacctaatatttccaaattatcaagaaagagaaaaggttgagacttttgacactttcgtgaaaatacaaatgtaccaaatggaatttaaaagtgaaaaagagatcatattgaccatggaaagaggcagtgaggttaagaatagttttagcaaccggaataatttcttgagtgatagcatctccatggagcaaagtaatgggaggagactggggagtcaaagcacataatcctacgtgacggcttgggagagtaaacgattctatcatgttgagattgccaccttttgacctatcttggcaattcaaaaggtaactgtcgagattgctatctatctcggcggttctaagtgtcgagaatgcacatatgcgtgagcaaatgacacacctgtctcaacggtcagagataggtctatctcgtgggtttttagctgttgaagtgacatgtcgctcaaacatggagacatgtctccttggacttcgacggggttcttggttagttacttggaaaatattctaggcgatatgttactgtgcaattttctctaaaatatgcagttgacactgttgattggctcagaacttctcgggtggcttagtttactcaaaatcaaattttaggacctaagagcaagttccaacactcctacaaatacaagtttaaagtacacattctcttaatgtgttttggtcttttaacttgtatcattagttatacatttctcatagattagtctttactaatcttattgtattaactttaagtatttaaccattatagacactggttagaagcattggagtagacttaagttgattatgtgatatgtaaaaggatctctgaatattgatctcatactcagtgctaaagctccaaacacagaagaagtatctaactatgttgatcatagaagaagtatctaactatgttaattctgattatccaggttgtaagataactatctaattatgatatcataggtcaagatggatgttattatatactatcatataatatatggttgaaacaaaagccgtgtcaagccatctggttaaacaatttcattaatcaaagtgttttgtagttaatgaaaaatcccatgttccataagagatcaaatgacatcaagttaaggatgtgatctcaagcaaggaagttaaagtaaagaagattaccataggtcacaatcttgctgatatgttcactaaatgtgtaactcaaagcaagttttggcattgcctagacttactgaaagttagtaatgttggataggtctgaggttcacgaaaccatctctactgagatagtttggagataaggaagtgactaaaccaaggtgtacatttgtgatgtttatggtttagccttaattgtttggacaagctgttacagttcttcaaagtggttaagttagttatctattgccaaccatttgagctctattctagaccgtgctctttaaataaatgctaatcaattcacttagagatagaggtttggaagagaagtttagagtagtctgtagtttcattgttaaatgcttatgaaccatttgagctgtataaggttcttaagttttatttgtttgaagttaatctttgtggataagttttgatccttgcttgtttcttttaatctttgcttgttttagtgtgttcttgttaagtgatagataagatgacaacagtaggctactgaatgcatacccaagtccatgcaaagaacgccagttggaaagaattctgcaaccacaaagccaatatatagttatatatatgtcattagaatgttgctaagcttagaaattatttataatatttccaacaaaaaaaaaaaagaaaagaaaagaaaaggaaaaatatgttaaaacataatgccacatgtgctattaaaatgtaatatcaataatatatcgagggagttaccaaaggtataaatgtcttacaaaagcaaaaataccataaaaatcttcaattttgttataccaacttgaaattatcctatatccagattgaagttaaatggaccatgcactttttattttctctgataatggaaacccacaaattttatatttaattactactcgaattggctttgaaataaagtagcaaaatatatgaaattcagtcgaaaagtcacctggaacaagatgaagtgcataagatggagaagcaatctgggtcggcccaaccagaagaaatggtcactaggcctcactagaaaagtgcctcttacgacttcagatttatcatggccgtccaagctcatcttagttatgatgctttgtagattcgttcccactactaatagcatctataagaccataaatttttagtaaacatacggtacactatatcacatgacattttataattgatgactaattttttatattatttatttaattaaaatatgtttgaccaatattaaaacataccaataaaaatatttttaatggagtataaatgtagtttataaatacatctgaacacacttaattaatttttttttttttaaataacacttaataaaaattattatcctaatgttattctaaaagtgtgttaaatttaatatatgctaaaagttatgccaaattatatacaaaatatagtattgtattaaatttggccaacaataaatactatttttttatttaatataattattagaatttattgacttttaataaactttatattttttatttataatattattattatttaaataataaaaaaataaaaaaaaataaaaaaaaataattatttttatattctcaagaaaatatcaaatcattatcaatataattaattatatatttacttattttatatagagcacaaaatacaattataaatagtaaactaaacataacacatttttattttttgtgaaagtctgcaaaatatacttgtggtgatgggtactttaaagtctctccttgatatatttctggcacacatatatataaagccattataattcaaaatctttgttattattcttaccactaatggaataataggaagccatagatgattgtgaaagcctgcaagaatttagacaaacaaaaatgtcattataagtaattggaaattttaatattataaagattactcatacactataaagaaatcgtactatatataaaaaaatcataaatataatataatctttcttactatgtgcgttgaagaacaaaaagagtacagaaaaaatccagatccaccaactgcataatgaaaagaataaatttaagaatgttaattgttatgagctaatgtagtactaattgtgttgtttttttaattattattttttgaggaagtagtactaattgtgttatgatgaatttgatatcatattagaaaaatatcgaatcttttgtgatcactttaattaagtttaagcagaataaaagtttcactatttaatccttgaagaagtttttccacaaagagaaagagagagatctatgaggaagactttagaaaagcttcactagattgaaaagtgggaaaaaccttagttattatttaaggtgttatcttatttatattgatcaagaatacagaacaattagttacagcaatcttgactccaacaacctctaaacagagtaacaaaactaaagctaactaattctaaaacagctaattaatactaaccgtataaactgcttagtgtcttggctaacatctcccctcaaaggaaacgggaatagaccaaatgaagtttggatttcaagtacttaaaatgatcagtaggaagggccttagtaaggacatcaacaatttgataaatcgatgggacatatcagactaatagttattgagcgagaattcggtcacgaacaaagtgtagattaatctcgatgtgcttcctacgagcatgaaacacgggattcgcagaaagagcagaggctccttcattgtccacccacaaaataggagcttgagatagtgaaacttgtagctcaccaagaagagaaacaattcacttaatttcagcaaccacattagcaagagcacgaaactcactttgagtgctagatcggactacaacttgttgcttttttgcacaccaagatatcaaatctccaccaaggaacatagcataaccactagtagagtgatgatcattggggaagctagcccagttagcattataacaaccatgaagatccatagtagtagttggtgtaataaaaagaccctaagaaacaatcctttttcaaatatttaagtaactgtttgcaagcttcccaatcaacaatagtaggatcttgaaaaaattgaactagtttattaataataaagacaacatcaggtttggttaatgtgaggtattgtaaagctcctagtgtactacgatagagagtgggatcagaaaaaaaaaaaaaaaaagaagacaccttcatgacgagacaatttgtgagcaaaactagttggacttggacaagctttagcaccctcaagatgaagtttagccaagagatcagtgatgtacccaagtcctagaaaatagtgtaatggacccaagtcttaagagaaaaattggagttaagatcacggataagcttgtgactgatggtggaattaggaccaataaccaatatatcatccacataaacaagaagaagcacaagtgtctatcctgaaccaaaaacaaagagagaatttccataccgagacactttgaatccccactgcagtaaggtggttttaagcttatcattccaggcacgaggagcctgcttgagactatataaagctttgtgtaatttgtaaacacggttaggtttggaaggatcaacaaagctaaggggttgctgcatatataccacttcattaagagtgccacttaggaaggcattgctaacatcaagctgctgaataggctaactggaagagacaaccaagattaacacagttcaaaccgtagtcgatttacctacatggatgaatgtttcttcataatcaattccaagcttttggagataccctttagcaaaaaggcgagaattgtaattatcaagactaccatctgcattcaactttatcttgtgaacccacctatttcgaataagataagtacttggatcatatgaaaccaaagtctaagtaccctatttagtgagagctttgaattcattattcatggagccataccattttggatctttgagggcagctctaatattggttggcttaattggtaaaagggcctctagaagtgggtgatgagtagctaaataggcctttggtttatagattgcatgttgggatctagtaaccatcttgtgaactcaaacatgagaggatgatgttctacaactattctagtattgagagaaacattttctggaataagagaagaaccaagggcttcactagtagatgcagatggtaactgaaccagtattgcaaaaactgcaccaaaaggcacaacaagagcagaagcaacaacaataggtgcaagacttggagattgagacacaacattagtctcagaagaagaggcaataattacatcaagtgtgatagcattgacagatgttgcagcatgagttgcagcaggattttcaaaaccataatggattggagtagcaactgttgggttttatgcccttaataaaactcatttcaata

SEQ ID NO: 219131 - DNA, 7123 bp, Cannabis indica
atttattttgcagaaggaatttcgaattttctcactgaaaaaccaatattcaaatcaaaaaagaaaataacacacaaagattctcctttttggtcccaaaattttctctttattaaaaaaagaggacccattgcattcaacataaatataaataaataaatatacatttaatattggtaactacacattatacatacatacaagatttagaattttagtgtcactatgacccataattgaatgttttgaagtaaaagaaaagaagtatttaatgagaaaattaacagtttcaagtcttttcattaccttttctctctcccatctcataaaaatcaaatttttatttttttttgaaaaaaaaaaatagagtaaattaattacagccttacagggcaacgatctcgatgcccttctgtacccatttacatgtattttcgtgtaatgaaattcaaaaataatttatagaaaaagaaaaagacacaaactttttttttcttgaagcaaaaagacacaaactttaacaacaaggaggtttcatttcaacctttgctttctcactacatagtttagtttagtgtgagactagagagagtgagagagtgagagagtgaagctgccattggaaggtttgagaaattaccttcctttatttatttctatttattttgaattttttgtcaactatttatttaataatttgaatacaggagctgaataaaatgtggggtatattttgtcagaatttccattattttcatctgaatagtcattgtttttttttggggtttgtttgggtcttgaaggagctgttctggactccaacattgaaagaagttgcctttttttgttcaaactttgtgaagctttctttttgagtaaaaatcttttttctaagattctcagttcttttctaagctactacacttcactttacttatctgggttttctgccatttctcttaaaaaaccattattaggagcttcaaggagttggatttctctactgagcaattctggatcaggtatcatttctttaaagagagattttggcatctgggttttctttattcagcttattttttttttaccaaaacaccctgaaaagttatataagtaataatgagcttttaaaagaagttgttgttggtggtgttgatgattacctaacttttattttgttcaaacttagcttctgatagttataattatacccttttattatgttttgtaagtttactgtcattaattcaaactctagtgctttagaacttactggttttggtcttttctgggattatttacctaatttagcatcattagaataatggggttttggttcttttttctttttagtatcttttttctagtactaaggattattgtgctatttttattataaagtcattttaaaaccattttaggtgagtaaagtgaaaggagtaaactatcatataatgcaaaaagaaaatctgattaattgcatgttacaagatttgatttgatctgtaattctttttagtacaatataattaattaatggaggaggaagagggtctatgagatttgattctgtaggtgggtcttgggttaaacaatgctcttttgtcttccaattttgaaaaaagaaaagttaaaaactttgtatgtaaagcttccaactttaaaaatatatctactgtgtttgtaattgtaatctattccacattttcacaggtcagagaacattggtaccatttctactctgctcagctcgccgtggtggactggattgagattgatcatctcttctctcggttagttgagttcgatcacagttatttataaatgcctaatctgtaatctacttttgttgttgtatgcatttgatggctgtgcttgtttgttacagttctgagtactttcattagttagtttgatttttcttaattgatgggttttcggtttctcttgtattagtggcatttttaggacaatatttttattcttctgtttcttgaagtttattgtcattgatcccaactctgttgttttcatttagaactttcttgttttggtcttgtattagattatttacctaatttatcatcatttgaatgatggtttttggacctttttctttttgggtaactttttctagtagtagagagtacttttgttaaataaagttaagaaagaaaccattactttctctaattgcccttggtcatcaattcttaacaaatttattgttaagctagtttcactatataaaaccccaactattgggatttttttagttatataacaataatgcatgttagcctgcaatagtgtaaaggcacccgtagtacttagtaccctcctatgtgttaatatcgctaaccaatcataaagtgacatgtctagaggtgttaggcaccactgatgctcaatagcaatgctcttttaaactataattgctttctcttgtttggttctttttttttatcctagctttcttagaaaactcttttaactgcaaatgcaatgtaggcattgggggccaacataccaaactagtcgaaacatacacaatattgactaatctaactaatattgaacttggctaaatgaaatggttgaataatttaaaaatgtgcttaccaaaaacataggtcctcacaaagtcgtaagaccatgtatgggggccaagtattgttataaagcttgacccaatgcaaggcatcattttaaagatgataatgattttgagatagatccatggtgaaattgtcttttgtagtacagttcttactctttaaatttaagtactttggtatctgttagaacatattgaaattctcttcatacacaacgcagttgaaattttgtcagtctcgggagatctcactgcagttcttatgtataggttgatatcgtcattggagaacttcggtgttaaagggaccgaaagttaaggtgttggatcgatttttacttcaccagatcggatgatgcttgaaagatggcttctcagcctgtttttcctcttagtcagcatcaccaatgtactaggtaacataacaagctcattgacatatagtaactcgaaaggacctattgtggaacagaaagagttatgatatgaatcgcttagcttattttatctattttgtaggtgcatttgtcggggtaaacataggcaccgatgtttctaatcttccatcagatacagatattgttgcgattctaaaagcacatcagtttacacatgtacgcctttataatgccgatgctcaattgttgaaggctctatcaggcagtggaatagaagtaatggtcggtgtcacgaatgaggaagttctcgggattggagaatcagctgcaacagctgcagcgtgggttaataaaaacgtcgcagcttatatgccttcaactaatataaccgccattggtgttggcagcgaagttcttaccgtggttcctaatgctgcttcggttttggtttctgctatgaattaccttcataaagctctagttgctgctaacctaaattttcaagtcaaagtctcaactccacattccatggacattattccaaaggcttttcctccgtcgactgcgacctttgactcttcgtggaattctactctttaccaaatccttcagtttttgaaaaacacaaattcctattacatgttaaatgcgtatccgtattatggatacacagaaggggatggcattttcccaattgattatgcgattttccgaccacttccctcggtcaagcagattgttgatcccaacactcttttccactatagtagcatgtttgatgcaatggtggatgctacctattacgctatggaggctgcaaatttttcggggattcctgttgttgttaccgaagctggttggccatggcttggtggtgctaaagaaccggatgccaatcttgaaaatgctgagacattcaataataacttgatccgacgtgttcttaacaattcaggtccaccgagccacccgaccttgcctataaatacatacatttacgaactgtttaacgaagacaatagaccgggacctatttctgagaagaattggggtgtgctgtttacgaacggaacttctgtttatcctttgactttgggaacttctggccaaattactggaaacagttcttctgttttctgtgtagcgaaatctgatgcagattctgataagttgcaagacggtttgaattgggcatgcgggcaaggccgagctaattgcagcgccatacaatctggccggccgtgttataaccctaatactctcgaaaatcatgcttcgtatgcatataatgattactatcaaaaaatgcagagtgctggtggaacatgcgactttgatggcaccgccacaacaactaatgtcgatccaagtaagttttcgactaatattctctctttcactatacaattcggattgagatgagacagtttaacatcataacttgcaaacgtcgaaacattgattgaaacagagattaagaatgaaaaggcttctcatttttcagttgtttgggacatagaaaagagaaaggaactatctttaagccttgaaacactcttaactgttattttgtgggaaatttcttgcaggttatggaaattgtatatttgcaggaaggtgagaaatccaaaccttactatagtttaaaatcattatttattgttacccaatatctataatctctaaacaaacacgaaatgtttgttcttttgaaacagttctaattcaagtactcacggcggattcatgcctccctcggctttttcacctgaagttgcgccaggatcgtggagttcgttccttcaagtatcgaactttcagcttctaatgccagcggcattgctcgctttggtttttgtttgactcgagaggcgcttgtgtaactgaatcatcggattttgagattgtaaaagctaagactttaattcttttttgtctcaatgttgtttgtattcctagttctagtgtagtcattttcttggaagtagcagttagaccattttttatttatttggtaaaacataactgaaaaagttgtttattttgtatctttgtgttaattatatacagaaattgaggtcataaatgtggtaattcttttttccatgaaagatatttatgtagaagaaaaaaatatttattttatggcaacttttgctatgcaatttttagtaataaagtgaaggcattattggacaagttagagataatcacaaatttggaagaagagagtaacaaaaaaaagagaattttagagaagagaatgttgttttagttgtctattgaggccttgtaattccatctataagtttaaaatgtataattttgttgggtttagttgcaagattttggacttttgtttcccaaaatctatactttaatttttatattacacactataaataaattagtatataattttaatttttcatgttttaataattctaattataaaattattatatttaaattttattgttattttatttatttataattgataaatgcatttttttcttattattaataaattataagatttttaatatgtcgtgttgtgttgtatttttggagcttatcacgtgtcatgcattcagacgagtttattcgtgctactcgtgtcatgtcgtgcttaaggatatatttttcgtctcatgtcatgttaatttgtagcatcatattgtgttgtgtctaaattcgtattttttttgtgtctagtcgtactcaaatcttcgggctcatatcggtttcatgcagtgtcaaaaagcctgacccgtatttacaatactactaaatagtggtatactgctatatattagcacttttaaggaaattagctttttttaatggtatgttaaactttagaaaaatattaaaaggcaccttaaggtaccaaccactataagaaggtgacatattgctattggtgcaatttaatattaggtcccacaaattttaatttaataaataatataaaaaaccgctaaccactcataacacgccacatcagtatagtgtatactctaaattatatcccaaattagactcacattaaaagatcaaccaaatttaatacaaaatataacattatattaaatttcacacacaataaatgcaattaacataactttgtcattcatcatcaataataagctttaacatatttttttagttacaaaataacagttttgtattttttttttaaattatataataagctttaatatattctataatttgcatattagagcataataacaaataattgatgatacagttttttatcaacagatctaaaaagattataaatgagcaagataaacacaagtaatcgttatccaaagtaaactggtttatcgaaagaaatttaacgaagatgaacacgaggtttttatagtggttcacccctgtcagtggtaatagactagtccgcttggagtgttattgatttcaatgcttaaggagagttctccagagttacgttctccaagagttaaattctcaagtgagttttcaaaataagagagtgggagctcgagagaatcgaaatcgggggtccctttacatgtgacttcactccctttatataggtttacattataggtttaaaatatcttaacccaagatgcacctcatcctaactctaattcggtaagtttaaaatacaaaataataacaaaaatcatattttcaaaataaatatctaaaaaaagatgataataacacatgctagagcatatgactccgacatgggccgaagtgacgatgctaagtagcacctcgacatgggttgaagtgataatgttgagaataagaggagactgaggtgatgatggcgttggtgagaagatgaggccgaggtgatgatgatgttagtgagaagatgaggccaaagtcataatgatgttggtgagaagatgaggccgaggtgatgcctaactgattagtaggctaaggtagtggtatgagacaagctcgagatgatgctttcgtgaagaggtcgagataatattctcgattttggtccaagatagtgagctttagtacgaggtgatggtgtttgagccgagatgttacagttatggggatgtgcatcttggctagagtt

SEQ ID NO: 219132 - DNA, 3908 bp, Cannabis indica
tttttttttacggttttttttttttttttaaaaaagtttttttaaaaaaaaaaaaaaaactttactaaaaacaaatataaacatgaaacgacaaataactattttgctttttgttcgagctctgctcgtacagaaaagttttcaggtcacgtttcagtctttctgctttttattcatcaattggtgttttcgtagactttcacgacatgggtaaagaaagcatggaagaagggcaactgtcaaatcctctgttgaatgttaaagatagaggtggaggtggtcatagtggagatgagggttctaagattttcatttctagacaaggcggtactagccatgatcctgaatcagatgatgagtcttcctctgttaccactatgctagttcttaccacgttggttgctgtttgtgggtcctatgttttcggctctgctgtaagtctttgtgcgtgcttgatgggtttcttgagatatcactagccgtccgattgactgactttttgaactcgcgattcattttcaggtgggatattcttcaccagctcagtctggaattgtagatgacctgggtcttactgtggcagaggttagaaatttcatttctttattgtgttttggaactatttttttgcatagtttatctgtttttgtattttaattccaagttattcctattggcagtactcacttttcggttcaattttgacaattggggccatgattggtgctatagttagtggtaaaatagctgattacattggtagaagaggtgtaagtattttccactttcattcctcactaactcttttagatatcattatcctcaaatttgcttattctttatttgtttttatgaacagacaatgggattttcagaggtgttctgcattgtaggatggctttttatagtttttgccaaggtcttatctctttctatttccaattcaaaagtctgcagaagtgagattttggaatttagaaaataagttcctcaaattgaaatgttagactattatgtaaagtctctattgtcttcaactgagttcagttcttgtattgaaaggttgcttggtggcttgaccttggaagacttctagtaggatgtggaatgggacttctgtcttatgtggtaaaaaaaatgtgtagagattgtaattttagtttgaaatattttgttctgtgccaaaaaaaaaataaaataagataatcttttcattcaattttcatttaggtacctgtctatatagcagaaataacccctaagaatcttagaggtggatttaccactgttcatcaggtaaaaaaaattagcatcaataaaagttaggttattttttgaatgattgtcatgaagcatagtaattactgcatttccctctcttaacagttgatgatatgttgtggggtgtcattgacatatcttattggggcttttgtaaattggaggatcttggctgttcttggtaacttaccttttgtcttcttgttttattacttagctttaaacagaatgtatattttatacacagattatgactgcttatttttcttctttgttcaggaacaattccatgtctggtacagcttcttggcctattctttattccagaatctcccagatggctcgtaagtgatatccaaatctgttttggacataaaaatattatatgctaaggtataatcatgcatgattttacaaattcgagagtatattacaggcaaagataggccgagaaaatgagtgtgaaagctgctttacagcgccttaggggggaaaatgccaatattctaaagaagttgctgaaatcaaagtatgtctgcaactcaacagataactatgctctcaagttagagttgttaacatgtgtttcaatttcttcaaggattacacagaaactcttggaaggctttctgaagctagcattactgacctgttccaatggagatatgcccattcacttctagtaagcttttatcacttctataaagatcttttgattctggttttatactcttgttttgtttgaccctttaacaatagctttagagtggtcttaggttggagttggcttgatggtgttgcaacaattcggaggtgtaaacggcgttgcgttttatgcaagtgctattttcatttcagctggtatatgaatgtgaaaacactagtcaattaatatcattatattttgaacaatgaaaggaatagggtatctaatctttggtttatgtcagggttttctggaagtgttggtacgatagcaatggtggttgttcaggttctttgattactttcataagattcaagtgtatgattctatctgctacaaatgtttcctcctacttcgttgaaaagaaaccactatatacaggttccaatgacggcattgggagtggttttgatggacaaatctggaagaaggccacttcttttggtaagattaaggaagtaagattaaaattaatttgacgggatcgaatgaaatcctagtgttgaagtctgctaatgttctcaggtttcttctgctggcacatgcttaggttgtcttcttgtgggattgtccttcatctttcaggtttttatcttaaatttttttttcttaatttttattgttaataatctcattctttgattgggagtgacaaagattgtgtcaaaactatgttcaggacattcaaaaatggaatgaggctacaccctttttagcacttgctggagtactggtaatgcaaatgcactcaaatctttaaaattccttttttttttttttttaactttgtgttgaaaagatcctttcctttatatggtgttaattagcctgaaaggtaaatacgttatactccacgacatttcaagtagaaaagtttagtcgtttattagaaaacgacatgtagtttgcactgttattgttttttaagtactataagcgtaatagcttagtaataatatgtgcattcataaattatacttggataaatgttattggtttaaattgtcacgtcacttgtgtaatgtaatgtttgagtgtagtttattagtgaatatatcatttctctaattatttataggatagacctctctcattgtcgaaaaagaaatcatgttaggagattatttgtattttttcattcaattaattgctaatcattcatgtatattgggttttaaatttcaaccttacttggcctgaggttgctgttttgttttttagggaaactaagaaaagacgaagtagtaagtttatgataatgtttgctttcgttacattatttatgaaaaacgacacatagtttaaatatcagaattgtaggatttatagctacagatttgattcggacttaatttttatattgttgagtcctactgttgtggtacaaggtatttcaagtaatgtttttatttcttgtccttatagtcttgttattgatgactgtaagaggcttcttcctaaaagcctcaatgatgtttcattttcttttgttatacaatatgggaatcaaggggctgattggttagctcgcttttcgggttctaatcatggtaacaggatcacaacaattaaagtgaagtggattgtccctactggtttacaagctattttgatagctgattattttgattatagaaaaagactttgttgtggttaatatgcttaaacgacctgtcgttcacttgctatacaacaacatgcaggtttatacaggatcattctcattaggtatgggaggaattccttgggttataatgtcagaggtacctagttttttttttttgctttttattttcttaaatgaggtatttagtttattaaacttaatgattcaggcacaagactaaaattgtgtttttatttttatggtttttaaggtacaagtttgcaaaaatatgacctaatttttttttttttaaaa

SEQ ID NO: 219133 - DNA, 2339 bp, Cannabis indica
ggtatctctctgtctaaattattgtaagacaagtcaagtacttgaaggtaggttgcattacatatggattctggcatagtacccgtaagcttgttctttgaaacagaaaagaatatagtaactttaagatccttaccaatctgtgtgggaatcgaggaagtaaagttattgctagagaaatctacataggtagaagctggtggtagacggggaatctttccacgaagctggttaaaatgtaggtcaagaatagagagactagtagaaggagcatagggttctttcaggctcgtcagttgattgtgcgatagattcagatggagaagattcccattgccaagtgcccaaatccaatcaggtatctcaccaggaagtttgttgtctgaaaggtccaaatggagtaattttgattgattcttcagatcaggaaatgtggtcagtctacaagaagcaagttttactgtactcacttgcggaaaggaagggaatgcagaaattctactgcttgcattaaccaacaagttgttgtaagaaaggtcaagtgaagtaagatttctcagtctctgaattgcatcaaattgcatggtgccgctgaatttgttaaaggccaatgatagaattttaagttttctgagttcaaagatggacttagcaagaggccctactagattattactgctcaagtcaagagtatccaaaattgacaagttaggagttggaaactcaggaacttgacctgtaaaattgttgaaggagagctgaatcttctgcactgatggagctgcaaacaacgcaacaggaatagtcccgccaagagcattatggctcaagtccacattaaccagcttcagaaggccttcccaatgattggatggaatttttccagttaccatattatgagataggtttatttgcgtcagatttttagccatattgaaagatgggatttgaccggtgaatttgttaaatgacaaatccaagtacacgagttggcttaattttcccattgagtttggaagtcctccactgaaattgcaattggaaaagtctaacctgctcaagttccaaagatgaccaatcgatgatggcaatcctcctgaaaaattacttgaactgagtaccagtctctgaagagaattattttggtgaaattctggcaaagaaccatgaagcaacggattgtatgatacatctatactctgtagtgttggcacctgaaatatctctttaggaaaatttccgtacaatccgctagaggtgagatccaaggaagtcaaatttgagaaatttgcaaaggatgctggaaccatagatgacaaattattattaccaaggcgaatcacagataaagagtgaagcttcccaaattcatctagagggccagaaagataacagtttgtcaaactcaagactcgtaatttaggcacagaagatgacaaggccttgcaccactcactcccaggtgctgatatattcacaccatcaaggtatagttcttcaatgttggaaaggttctgaaccagcatccccaagtctgggttctcaagtttcagagaagaaacgcttaaaaatgatagagtcgagatatcaagattgaccaagtttgtcaagtgtgatatggtaattgggatttgcccaacaaagccagcattcgacaaatttagataactcaaagttgagaggttaccaatctcatctgggatcgtagagttgaaattgttaaatgataaatccagactcttgagatgttgcagattgaagaggcttgaattgtggattccatcagagatccactcattgctcaagctaagaccagtgacacgtccctcccatcaaaagttacacctttccaagctctacaatctgaattttgactccatgtgaccaactttgtcgacatattggctttgaatttaaggttgttcttcagttgaagcaaccaagattgctgatcggtaaggcattgaccagaaactacatcttgatcaagactaagtaatatcaagcaaaagggcatgaagaaaagccatgaaaacatatgaattctcatttgaaacccaacaaggtaaacaaaatgatttgatgaaacgaacaaagtagcttcattcaaggtgggtcaaggctaaagaacataatatttactatatggggttactaaaacatggccaatcaagaagattggttggatttggttcagcaaaatcgaaagctaaactgggtggtagaacaagaaagaagaagactgaagaagaagaagaagaagaagaggtaggaattgaaaacgatggggatttggtcagcaaataagcgccgtcaaaggaaaccgcgtcttttgtttt

SEQ ID NO: 219134 - DNA, 3342 bp, Cannabis indica
acataattattaatatttataacagtatatgctaatttattcttttcattttttttgaccattagtagtcttttattattgaagaaatgtaatgataaattaagtatttaaatcagtagctaaaatttacaaccccaccacttaatatttagaaaggctaaaaattatttcctcttattataaacattaaatattttaatatattttaatttaataattattataaaaagtaccaataaataatgataaaacgtaatttgatggtagtaagagaattcatataaccaataatgctcgttactattattgagtaggtgccggacaatttgcatagcatatgcaatcttaaatgaaataaacaaaaattgttttaatatagttttgttattttcccattaaatttaaattagtaacataatttggattttcaaattaaatatccactaattattttgtaaatgaagatcggaacaagatatttctatgctgcactagtacagtaacatagttcaaaacaggatatatattcaaaatttcttcccatatatatatttatatggttctttcattattatcattatctttttttattattattttgaaaaggtaatcaatcattattaaccttcaaacatgaaagcaaatcagttaggatatcctaaaatacgattaggatataaattagaaatcgtatgtggatactatcattattattaatttgtaggaatccagtcatgtccttggatgaaattttgaactgaatatgcattaacatgttcaggtggaattcggctactccattgcactctttgggataggtctgacccttttccagtattttcaaattctccatagaaaagcgtattcaaaccaacatcattatcccattccaaccatccttgaggcgtgatcaactcttctatgttacatcgtatgaaaactgttctcgaatatactttccatggccttcccaagtagcttttgtggattttagggttgctcttatacaacttgatgtattcttcagtgccattaatggagcaattatggaaaacaaagccagaaaactgtgcagggtccctcctactgtgggcagttactgcattcttctcccctttctcagaaatgtctactctaggagctattaggatttggcagtcttggaaaaatgaagcagagtttccaaagatgaagtctacgttgccttggatgcgacatgatttatagaattggcgaagtgagtgagcataaagagtgtcttggtttcctatgaattcacattcctcaatcactgaatgatcactgcttgatctgaatgctacagcttggtgtgcatcaactccggctgtgttttggaaggttatgcctttcgccatgaacccatccccaacaactcctgttttaagtaaaccaaaacaaatatggcattaatatttctattcaactcattattttgaaatggctaattaggaatttttctacttgaactttgacatgtaccaaatcatgtcctttcaacttttcaggtcgttaaaaattctccttaaactattgagattgtttttgtctaatttcattcaattttgctaatatactaaatcgtgaccatattttgatatttacaaaattatatacctcctgaactttaacattttgctgaattatgcctcctaaattttcatttacgtcagactttctttagtaaaatttttacaaaaaaatcttaaataggaaatttttaacgccgagaaaaattcaggggtaaaaaaatcaaaattagcaaaattcatgatacttaagtgattatatatataaacatgcatatgtacatacattgagtgaaaatagatatttttttccatccattttcaccaaaagagagggaaaaaaatagatttatcaaaagaaaatttattatcttttttaaaaaataaaataaataagaactcaccaactgtagcagtatcatatgtggtaagtcccatgagaccaacattaagtgaaccagtaataacagttttgcccataccatcccctatgaacacaatattctgcttcacaaatgggaccctcacaatctcctcataaacaccagccgttatatgtataacaaactttttaatgctaagatctgccgaagcattaacggcatcttgtattgttttgtaacaaccgtttctcccgtctttacacaccgtcacgtccaccgttaaatttgacgggaacccacctcgaaaaccaagatccaatgacgtcgtaggagtagtagtagtagtgttctcccaaaatccgtctcgctcggttttgggtggggcccatgctgacatgtcttgaccatagcggtcgtaagatgccatcatgctaagtgcattgcttgataattcagccaaagaagacacaaaagacatggtttgagtgaccaatatttgggtgtcattggaattttttagggaagaccaacatccatgttggtacattagtgatgcactcatccacacacgtgcatcttttatattcccacttggtaatgaggaattggctatagatatacggtaattagcgttttgaaatgtctcaaggcaactctttgtggccttttccaagtgcttgttattagttggtgaattagcgataaattcaaccattgaattggcaatgtggagattatcagcgactacttttaacgctgcttgaataacttgaattggagaggcgttgggtcctacttcctctccatgctttgccattgtggtcaagcatgattctacgaaacgggtggctttgcatgcttgctggatgattggcgatggcgttagcgttggcgatggcgatggcgatgatgttggtggaaccggattatcattgttggctgatgatgagtaagataataagaagaagaagaggagagagaggaagatgaggttcatggtggacatgattattattaatattctattgcctaatttcaagaatataaatagggctatttccagagacaaaagagaagaaaaaaaaaaataaacggtagagaataatataccaccctacttcctctcatgttatatttagaattctatcttaattatatcacatttcttgttttagaaaattcaacccctctttctctctctccaatttttatattctaacaaataaaaattaaccaaataaattagttaacagtcttttcatttcgtatctcctacccaaagtatcataaaaaaaaacattgctatttaggtcgcgtttgtttggaggtaataaaatggaatggaataaaaagaaaacaattttcattccattcttttatttggttgcatttaaaactattggaatatcatt

SEQ ID NO: 219135 - DNA, 4161 bp, Cannabis indica
ttatgtcggtttgtattttttttcggttttgtcggtttggtttagtcgggttattcgggttgggcggtttacgaaaatttctgtacagccctagttcaagccactcggtttctttggattttatggattcggatggctctttggacaatgacgcggtgattgctttgcaatcccgcgaatcattatgaaaatcttgagttggaatgcacgaggattggggaacccgagtgcgttcaggcaattacgactgcttattcaacaacagtcccccaatattgttttccttatggaaacaaagctaggtgttaattctatttctcatgttcgacaatccttaaagtttaataatagtttagagatgccaatagttggtttaagtggaggtatgatgctgctatggaatgatactgttgacatctctctgaataatattggtcgtggctattttgactgttttgccacttacaatagctgcaatactttccatttcactgccttctatggagagccaactcttcaaaacagagatgcttcatggttactcctcaagagattggctgacgttgcaccattattgtcgtggcttacaataggtgattttaatgaaattttgtcaactcaagacaaacatggtggttcaacaagaaatggtgcacaaataaatagctttcgggatgccttagaccactgccaacttcaaattctgccatattccggggacaagtacacatgggtgaagaatagacagtccattgctacaattaaagagaggcttgattggtgctttgttaatactcattggaaccaagctttcgaacaaccacaagtaacacatcttgactttcacctctcagatcatagagctattacagccgaattccaacaactgaataatgcaaacatagttgagaaaagaaggagcaggtttcgttttgaaaaattatggctctcggatcctgaaagtaaagacatcatcgctgcttgctggtctaactttgctgcctcagaccccatttctgatgttattgcaaagcttgattcatgtgcaactcgccttcaaacttggcacatcaacaagtatggtagaatgaagaagaaaattgccgatgctcaatcaaaggtctccactctgaacaatgttgaacaccacacaagctcttcaattgcaaatctgcaacaatccgaaaatgtccttgatgatcttttggagcaagaggaaatttattggcagcaaagatcaagggttgattggatgcattcgggtgacaaaaacacaaagttctttcatgcaaaagccaatgccagacgtgctaataataaaatcacttcccttaagactgatgatggcaccacggtcacttctaaaagggatattgcggagacaatttgccaatactttgctgaaattttcaccacaaactcaattgatgatgcagctcttgctaccaccttggatactttgccaacaactgtcacagatgacatgaacaatgatcttacgaagcctttcactgcctcagaggttgaagctgctttgaaaacgatgggtgccgacaagagtcctgggatagatggaatgtcagccatgttctatcagcagaattaagaaattgtgggggaaagggtcactgctgctgtccttagtgtactcaatgatggcgtagaccctacccctcttaacttaaccataatcacactcattcctaaggttaagaggccacaagttgtgaaagacttccgtcctatcagtctctgcaatgtcatctcgaaactaattaccaaagttttggtgaaccgtttcaagcatgtcctcccccatgtcatctctgaaactcaaagtgctttcctgcccaaccgtctgatcacagataacattctagttgcctttgaactcattcatggaattaaacacagaacaacgggtcgtaaaggtgccgctgctcttaaacttgatatgagcaaggctttcgaccgagttgaatggcgctttctacgctcaattatggagaaaatgggcttcgcttctaagtggatatctttgatcatgagctgcctcactacaaaccgattcacttttcaagttaatggtgaagttactggttcactcacaccatctagggggctacgccaaggttgtcctttatcaccatatttgttcttaatctgttctgaaggtttgtcaaggcttttacagcatgaggaaagggtcgacaatctacaaggctattctctaacccgtcatactgctccaatttcacacttattttttgccgatgacagcctacttttctgcaatgcaactgagaattcttgtttggctattaaaagatccttggatttgtaccatagagcttcgggacagttactaaatccagacaaatcagtattatccttttcacccaacacaactttggcaaaccaaattttctttcatcgacaccttgctatgcctataagtgagtgtcatgagagatatttagggttgccatcatattctggtaggaacaaacaagagttgtttggggatataaaagacaaagtgtggaaactaatgaatagttggagtgaaaagattttctcagctggaggaaaggaggtgcttcttaaagcggtggtccagtccattcccacctttgctatgagttgttttcgtttaccaacaacaacctgcaatcaactagagtcaatgatggcaaacttttggtggggtaaatctgaatcgggatctcgaattcattggaaaaattggaagctactctgcaaaacaaaatcaaatggaggcatgggatttcgctcttttgtgcatttcaaccaagctcttttagccaaacaaagctggaggatccttaatcacccgtcttcattgttaagcaagatactcaaaggacgatactttccacacacatcttttttggaagcttcacatggtcactccccttctctcacatggcaaggcattttatatgggagagaacttcttcaggccgaccttcgttggaaagttggaaatggtaagaatattagttgtgcatctgatgcttggatcctaggacatcacaactttaaacctactttttttttcgggtcctccatcagcaaaagttgctgactttattacagatgaaagagaatgggatatccctctactacgtggctgtttctcaaatgtggatgtagaaaaaatattgacagtacctctaagttattttcaaagtactgatgctttgatatgacaccacaacccaacaggcctctacagtgtacaatcgggttaccatcttgctgctactcttgatgatattgccaattcttcggcttcttcctcaacaacatgccaatggaatttcttctggtctttaaatttaccacagaagattaaaatcttcacttggcgagctctccaagatgcactaccagttgctacttcacttgttcgaagaaaaattatcacggatgcaacttgttctctatgtcatcgggcttgggaatcaataggccatgctttctttggctgtaaatatgcccgtgcagtttagcgatatgcgggttttactcttgattggcaatcttcctcaacaatgcataagggcgattacttggtacacctttcaaccatatatgctaaaccagaaatggaactcataatttgcattttatggtgtatttggaccgagcgtaatcgtgttgtgcacggtcacaacgccaaaccagcaagaactgtgggttcctttgctgccaattatttgcatcaatttgctacaacccaaacaaagtttcatcaacgcagctcagcaccacagcaaccatctggatccgcaacacatcaccaacaacatcaacacaacgcctttgtagctgctccttcatggcagccccctcctccatctgctttaaagcttaatgttgatgccgctgtggatagtcagcacaacataattggagtgggagcagtggttcgtggctcgtactggttgtatacttgctgctatgtcaaagcctagtgttggcaatttcgcatcccatgaaatggaagctaaagctttgtttcacagcatcaattggattttacaaatggaagtgccaattactcatattgaaacagatgcgctcatagtttccaatgccttgactggcacttgttatgcaatttctcttttcaag

SEQ ID NO: 219136 - DNA, 2809 bp, Cannabis indica
gaattcttgacaaggttgttgaatagtaaaccaatataaaacttgttttactctgttgaataatatgaaagataattcattttttcaccatgtttaaaaataaatacaaatttgatgagcatattacttttttttttttaatttgagagtctcagagtatcaaatcccgggttggttttttttttttaaatgtgttgtgattctcgaatatttagcatcaaatatcagttcaaatattaatggaatttgttttattattattttattatatataaataatattttattattttattaaataaaaattaaaagtcacccaaatatcagttcaaatattaatgggatttgttttattattattttattatatataaataatattttattattttattaaataaaaattaaaagtcacccataaatttctcaaaaaccaagaattttagttatataggcacactttatatagaatagatatatacacggtaattgatatgtggaacgttagtgacgttagtattcagtaattatttgtgtaaggttatttttgtaaatagtttgataataatgtatattgttgaaaaaatcccaaaaaaaaaaaaaaaaaccagacaataaacaacatcaacttgtttgtgcggctgttttttcagttaataagaaaatattcattttctcaaaaaatccaagatccctctaatagagtattacgtactactaaccagatcacaattttactcggtcatttagttttagcagtttgacaaaagagagtaacatttgttatttttttttctttaatttcagataatttccagttttccaatatcttggcttcgccattcaattcgttattggaatgaattcattaaaaagaaataaaaaactatggagcatctaagcgcttcattgataaaaacttcactactgtaccattaaacttagatatggaaaacaaaaatgaatcttatcatagaaccaagataacccaaagcatttccttttacaaagattttgataacttgaaccttctaataaacgaccccatatatcactgataaatgttgactcttgtaagaaatttagtgagtaattttcttctggtactggttttattttttggtcatcctccaaacttagcaacctttctttgctcaatttgcccggttaatggacattgcatctctgtccagctgactggaaccatagttgcacctacaaggaaaaaaacacaagtggaaagaccataaatatttataagaggaaagtgaattttaatacaaatatcataatatgtaagaattttaatccatgcttttgtctgaatttttttattaaaatgaatatgcttacatgctgcactctctgcagatacaacgcccaactcattttttgcagtggacagatgatatgcccttgcatcaccaagagatagcttattgaaagcattaagggaaacccatttggttaccaaagaaatttcatcactgaaattttatataacagagaacaaaagtagaggattaggtatcctagaaaaaagcaatcttatgagtacctaaatttccatcaaagttaattccattttagtgtctcattggttagacttttccacagtgacgcatatttcgaacataataatcatcaatttctaacggaaaatatatttgttttttttcaaggcataaccagaatattatgatcttttccaactagtattgatattatcatatatttacttcaaaacataaaggataccacaatagctctcacaatgtcgccaacacgaaatgatgtgtgcatatcgactttatcaatctctgttgctctaacatcttgttgcctgttaagaaactaattcagtttagaacagcacactgaatctaatgttaggcatgtcaatctctaaatgaagcaacgaatagaactgttgagggggcatttagatccgaagctaaaagagaatataaagttattcaaacctacagtaattatctacattcaaaaagctaagcatgtacaagacactacaaaaaaaaatcttaaaactgtcaattacctaattataccggaaaatttctctggcacagactttgtgcctacacacataatgtcaagcgaagccattctggccatcactctagtaacctatcaaaatacaagacaagagaatactataaacaaaattaaaggcattcaaacactttggtgtaactcttagaatattttgtaggaaaaccaagtaactaccagttataaaagtagaaaagctaatcccttttgacagagatcataataaccatgagtgcattgccaagtaaaatgagccacttactcgaccaattacaatagacccaggctctggaacaaccccatgtgccttgtgaccagttacttcaatagtaggtctctgtagatataataaatgatgaacaaaattaacatcagtcccacaaattctaacaccaacacaaaaaagaattcataggttcaaagttgattaatgaaagctgaaatgaaaagctcaaacaaagcatactaaagaagaagaagaaaaaaaagtactacttttcatctttagaagtattgaattaacgaccaaaaacacttcaactaactaactcaccgttacatgaaagggtgatagtaaattgtatagttagtataaatatgtaaagccatttcacaaatagataagaaatcaatgaaaatgaattacaattaagagtattcctatcggaagattggcactgtctgtacattttagagatttgtccagtcttgaggagaacccgttaaagcaccaata

SEQ ID NO: 219137 - DNA, 7477 bp, Cannabis indica
tatcagtacaaaacaaggggtcatccaagcacttagaatgtaatcaataacagggtgtaacacgttcgtcaaaactcatagaaactttctacctttatttcattgacagcatgcttccttgatgacgatgagaacctatttacatatatgacctgagaaaataaagattgagataaagcgtgaagattaatacaagtgtcaacaacaaaagactattatgagctgtattaatcaacatattaatccaagaatatttgcaaagcattatttacctgcattgctctgatgatagttccaacaaaaggaatagaatcatgggactctgatgcaacaatggtaggagacagttcataaaaatagaaaatagggtcaatgtatgatacatgattagatacaactataggagctgtttccctaggagctggcttccccttacgtttaatccaatgatacctgcaaggaaaagatccatgtccacaaaatcagcattattcataacatactttataaagtaaaagtaaaatatgtttgaaaaaacttgtcacccgaattacacaagtgatatggtcactagcgaagggaaaacatactagagtattacatacattcagcacactaaactatgataacaaaggtaagacttatctttgagggattttattttataggagattttcaataccctttttttcaaatttaaaaagttaattaataagaacaatataaagaacaaaaaaattcagggagttcccactaatatggcctctcgatgaatttggaaaggaaaaaaaaaatcacaaagagaatttttcgactgagctttcacaaccacaaattacacctacatttgttaaaagttttactgattttaaacataaaaaatattgaagaaaataaacaactagatgattgaatttatgaaagacaatataataaaatatatatatatatatataattcaaatatatcagatgaacataataacacttgtatttgtatatgagtattgaatattaaaccacaactcgcattgagcagaatagaagtatgcttctgtaactaatcagactaattactatgctaacatagttacatcaataacatctgatgatatttgcttctcatcaatcaaaagagttcactaaagatccaacacagatcaataccttaattttttattgcagcatttgaaatttataaaactaattcaaactaagcatccaaccatacaaagaataacctcataatctttgttacagcatttaaaaatttaaatccaagttatattaagcatccataccatacacaagattaacgtttgaaattaaaaccacaagccacttcccaactaaaccccaaagcaaaacccataaatattcagaaaactttcatttccaactcagcctagtacaaactaaccacaatgagttgaataagaaaaacgcattttgtatcaacgtccattctccaagatactaaaacgactatcaattttagataataactcgaaaatctaaattatctgtaatattacccaaatgtgaagagaatacaccgtgccgaaaacctagttacccacataatcctgcacctccatttgggcataggattctgcctatccttccaacccgcaagagctaacttggtagccaaatatcccacagcaagacaagctccaaaaagaacgagtcgaacaatcataactggaaaaagaatcagaattttgagccactcgtagaccccatcgatctccttcgtatagttccggaaggggttcacggtcggctgcaggggcacctcgaaccagtcacacccaagaaacgcatacgggttgcgagaatccaactggttatcatggcgagcgaaattctgatcggtgggactcaaatgatcggttcggttggacggctgttggtcttggtgatggtgatgttcaagacggtcgtcgttgtcttggacgtctaagatcaagtggggatgatcagacggcggagatgggaggagaggcgaggtaatatcatggtccgccattgtcctctctcctctgtgggttggaaaggaatgtgggggaagagcagcactgcttttggagacagaaaacgacgatggtggaattgaaagacagaggaagagactttgacaattttttttttatatatataataataataattaaaaccgattaataattttattctgaaaaataaaaataataaatggcgtgaaaaatcgactccagtacgagattttatgccatttgtaaaatttagtggtggcgattgggaaaaatcattaatttattgatagccacgtggcacgtgcttcttcgtatatgttgatttattttgtatatttatgtcttttttctcattcctttttttaactactcactttctcttccaaattctactattttttgaaggtaaatttatttcatctcttttgtaaaaaaaaacatatatattatcttctttctttatttttctaacgccacttaattaaatatttacttgaaatggaatatgaaaaagttataccagctaaatatttaatgtaaacgtgtcttagttttagcattggatttttgactaatttatatcaattgaaggatatgtttgtggtgtaagtaaatatattaaaatactacttaaaaaataacgaatatatttcagctatcaaaatatcaaataattatgctaattttatgaaaatatattatgatttattaattagtaaaactattactacaacagtcttttgaatacgaactctatttgaatcctatattaggagggagggtgatcgaaatccatttgacttttcagaagggtttttaaagacatatttaaaacaaatagtgttaaattccttgatatattaatattctcttggaaaaaaaaaatgagataattaatataataatttcattgacttaagagttggatcataaaagacctcaaatatggttctatcaatcaattcaacgtttaggtcggcaaagacgagaggaagagtgcgatagctggtggtatgaggagacgagtggctctcaaagcctcacttggcattgtttatgaacaaatatatttggccttttaatcttttattatttatttatagaagataagaataaggaggtggatcaattcaagcataagtggacacaaaaatgggccccgtacccattacatgtagtaaaagatgtttgatttgagtacctttgttttacctttaataaaaataataaagcgtgagccgtgagacatgtactccacactataattttcatcatctcatctcacgacgtagccacatgcgctcaggaggcataaaccttgtcaactattactttatgttactatttctttcaagaaaaaatcttactaaataaagataaacaatatttcagtccctccttaatttgaaaaacatatagcattttgaaatctggctggtctctgctatcatatgtaatattaattaagattgttaagattctttaataaaatattagatggctaagattctaacaaaagcttgggggaattcttcttcttcattttttttttagttttattatattttaagcaattttggctagatccatataatgcaaatttgacatatgacagcttttattgtcattaaataaaattacaatagagtgtttaaccagctaatgatgatgatattggtggtttattttatcttttgtagtttctttttattattagcatattacagtgagattagggttaggtgatatctgtcacatgttgacctcaatcacatggtattcacatcacatgagaagacacagtcccttcttttttttaatgttagatctatccctatctaattcagtcagtttgacatagagcaagttgtcacaacatattaacgtaacttgaatctaatggtagttttgtataatttaggtgtttgtttattattctcttcataaatggccctacaaatgctttgcccgaatgggactcaatactggaacctggatgggaatgggctataggcccagtgcaccaaagcaacaaaccccttttcatctggttgaaggttaaagctaaaaagatgagaccaactcttacaaattggtgtaaactaatgaagttatcacaccatgtacaattgctggcaattctatcatctgccaaaagaatctatctatacactaattggctttgccttttactatgtgaaactcttcttgctattcttatattggatcgttttctggtaatgatctccatccgcaaagatattctgtggatattttgtgttgccaaacttccagaaagcacacatattctcttctttttagggcagaaactcctggaaatgcaattatcaaaaattcagcaagaaaggaacaacttataatcagcttgactggctgtcattgtcttctacatcgctttcatgtttgtcggcagcagaaatcatatttgagtcatctactgaattctgatctgtagctgcgaagtatccatcctctgcaggcttatagtcctttcccctccaaaccacaatctgctccttatcaaatgttactggtatacatggcaccagatcctgtggcaacaccaaactaaatcaataatgtaaatgactaaattaattaaataaaaagtttagaccaggttttaactaaaatgaaaaccccatcatgcctatctataacaatataacttccttattacaaatctttaacagcagaattgagatgaaaactagaaacctaagttatgacatctgggtatagttagaaatatgtggaagctggaacaatggccaggaacgacgcatcagtggaaattaactgaagaaattagagcatcaattttacaaattaaataagaagaaaagaaagataactgacaaacacacatatgagtggaatctgcaattcagtattcccaaaacttaacgggaactaggaattaaatcaccttgttttatcttaatcctacatgagacttctgtataaaggctagaaacaaaaaagggctgagatcgtataaggatatgtaaagataacatgcaagtctttaggcaaaaggcatgttttagttaaaagatgctatttacccttagtttgcatcctatttttttgtaatcacttttctcaagaccttggcaatcgatccgaaccaaatcagcaaagagaaaagcatctctgaccattggtaccagactgccataataaccgtttttggctgcattttcaattagttctattagtcacggcaaaaacatatagtaccaacaactgaaaaccacaaaacagaaaaataaaataccaagttttgttagaacaggaacagctaatcctctctttctcatttcctttgtttcctctatgcttaagccatcaatagtagttttgatcagccttggatatatgggctcatgaggtctccacatcattaatggaattacaggtctctttttaggattatagttcctacccctatacaacataagaagaccaccctgtttgtggataatttttccaaaagttttgtcctgtaacaaaaacatgaaaattttatttgaagcttttacaaggaacaaggaatataaagaaaattgacaaaatatatgcttgcaggtgctaacatgcagtgaatcagataatctgtaacggcttcttaatgtgaatagcaatatagccttaaacaatttccactcagctcgcaagtagaattgttgagggaaaaggaaaaacattaaaaaccaatgctaatggcaaacttaaatgagaggtatgacagcagtacacaccaaaagcttacgaagttggtaaaggaaaatagggatttgaataaaactacttccaaggtgctttaagtagcaggaatggtgatataataaaaggtaggtaactaaggtacctcaagctgggtgcacacatttttcatgtcaacagttggaacgcctagacattttatcctcactgcttcagcatgtttccaatgattatgaatgtcattcagcatattgtgtgttagaccatctcttcctacaaaaatagcacaaagctaacaattgagacaaaaacataaataagaagaggaaaagagaaacatacaatcttgcaaactcaatataggagccacattatagaactacagaatagctgaaaattacaatgaaatattaagacgtggtattaataagtaatgccaatgcaagggtcttcaaactttagctcaaacatgagaataaaaaatactaaaaatcgttcatttttcaccatgtgagtaacatcaaaagcaagaagctatatttaacaatccatacagatctcgccatctcttgctatgcctattaaagacttgaagaaaataaaaacagaatggcaggttacacactacaataccatagcaataaaattcaagcaataaccgaactcattgtaagcttcaaaatgttgttctcaaatggaaattattaagtactcacatctaaaactgacaaagaacaagaaagtttcaaattatactctgcgatttataaaacaaattccaaaagggctcatacccagattaacttgacggctggtcttgtgcctctgacagttctcgaccaaaattttcctctctgccccagtgagcggatcaccctgaattctccctctcgtcaacttcctcttcttctccaaattcgggtcctcctcctccactccctcaacggaccggacctttgggtctaacgctggagcacaaaccccggtccattcgcggtcaatcctacccggcccaaacggcgaatacttcggttcccttaggccgataggccgcaccgttgggctagtttccgtgtaactatacctgaaatcgaacggaagctctgaatgaatgggtttggagccagtacggtcgagcgaggagggcggccggtactggggtttcttctttttcttgagattattggtcctggagtcagggtggggctcaatgttctggggttctggaacgagagagggtgggggtctgaaggagtagcgatcgtagagattggaggaggagaggtggcgcgtagagaacgtgaatgcaagcgcgagtggagatcgattttggcgggagagcttagcgaggaacatttgagggtttaagctgataactagggtttaagtctctgcgagtttccggcggagccacttcgtaatgactgtaaatcataaacacccacgacccatttctaactagcccaaaagattgatacaatttttcaagaaaaacacgaaaatttaaaatattttttttttcttatatttaagaaaatcccccaatttaattttaatataaattgcaaccttcaatttttttttattattttttaaaataaaattacaaccttttttacctgcattttttattatattattttgtatgttaaatatgacataaaaaaatgaaatatgttatatttaattagtcacaatgtaaattaatat

SEQ ID NO: 219138 - DNA, 4466 bp, Cannabis indica
gaacaatttatgtttttatgtcattttttgttacttcatttatcatttatagtaacttttgacactaagcctttcaaaaggattgaattccatcaagtgctgtactgagaaagtatagaagaatggtgcacctactttgtttaacagaaaaacgaaaagaaactactctataagaagattagaacaagaaataagagcaatgcaatatatatatcctagctgataagctgataaaacagatactaaggtcctggaaatacgtaagtaaatcactaagtatgcttaggaatgcgaaggcccacctgaacagcaatttttttaatagaagaatcctcagagaaaggttgcagcattgtcactccagggggtaattttgtgtcaaacattgtctctgccagcctgaacatttcctgctgctcgttctcacatttgcttaaggtgcctatgccaagttccctatgatatatgtcaagccaatcgcatctcagaaaggtatgaaatacaagagaaatcaaaaaagaaaaatagccctttatatttacacttattttttttctaaaaaaaaaactacggttaaacacattggtcaacctatctattaattattaaagaagttacaaaattaaattcaatgttaaatgcagaatatctgcagagagatcatgagtgtcattttcttctctgttggtttttagctcattgttccctattatctattctcatatggtatacttttggttacttgacaagagacatatgaaccaatttgtttacagaatgctacctgtagctttctgccgcccttttagggtcattatctgctatggcaagaacaagattagcatatccaaacctcaacgcatctgggagatcctttacttgcccatagtctagtagggcaacctgatatgaaaaattatctgatgttagtacataaattgatcttatgcacaaactgtataagtagcaccagaatctaattatctttcgcacacattttcaaatttccctattatcaatatctctacaaagcaaattactaactgaaaagttcaagttaatggtaatagtaacaaaatacaaaatctctgatgtcacaactagattagaaaaggaatgaagtgttatgggagcataaatggggttttcactcgcctctgaacctttgcatatcaagatatttccagggtgaggatctgcatggaagaaaccgctcttcagaatcatttgtccatatgctagtgttaaactcttgagaattttcctgcactttcaaaaaaaaaataataagctctgtctgtgcataactattagactgatggaagaaatttgttctcctctgtttgatctaagcctaaaacaaatgcttataggaataaacttgttacatcaaaaccatattgctcaatctaaggtatgttcagcactattcaatgataattgagtaaaaggaataagtaatagattgaggaaataggcccttcaaatggagaaaagcacactcagcaataagctagggagggaaaaacaaaatggcatttaaacaaaagaatgaaagatggatccctcattatctggcttcaaaccttcaagtaatagaaaggcatagacagattaaacgcaagtaaatagaaattcgcaagcctataggaagagccaataaaacaaaaaaccacaccaatgctcaaggaagatcagagccttactgctttgctgctgctgcaacgttaccatcaggatttattcctctttttggctatttcatcaccaagattgaggattgggactccgtctatatattccatgactaaaactagtcctgctcaaacccaaagaagagagagagagagagaggatatcactgaaatgtttttctcacatatacttcaaaaacaaacaaatgaaaactgtgtaacatggacaaaataataaatcacgaaaagaaaggggcaaagaagaaaaaagaaaaacaatccagcttttcagttaacgagagtcataagattaatttgtctttgcacaaaaggtatagcatagcccaatatatggtgagaatcatataggcagagtggctagaatgttttgttttattagaatgactaatacaaaagcagaaacatgttatgagaaataaaatacatatttaccaactacaccttctgcaaaaccacatacagtgttgagaatctaagagagaaatttataaaactaacgattaataaaaaaattatcaaataaataaacaccccaggtccccagtgcatattttcctggaaagacagttagccatttaccacatatagctaatatctatgtatgaatgagataaattgatatatcatcttattccccattagaaaatcctaaccgagagatagattgggatgaggcattacaaacctagtaaccatgtctttcactactctaggcaccacaacaggagtctttttgttgctttcacgcagaaaccttccaattttttccatagcattagcctccctcacgaagtcaaattcgtatccaatcttacatgacataagtacagaaaaattacaatccaacattcatgatctgattcatatttcacatttaatctcaatggaaaacaagtcagaaaggaaacaatgtgatacctgtttctccatttccttggtcacagaaaagagatcaaatttgatatctgttttttgcatatataatgcaaaagcttgtaagttatggatatctgtcatcatcaggtcctgaactccagggtgttgcacctattatagaccagagagattttagaattttatggacacttagagcatactatcctgacaccagacctgctctcctcaccttgacaacaacatcgcttttatcgcctttcaatcttgctcggtggacctaatttgaccataaaatgtaaagtaagcacaaatatcatgaaaaaagaatctattttcaaattcggtccaaatacctgtgcaattgaggctgaaccaagagggtactcgtcaaatgtttcaaacagatcccaaacatttcgaccaaactccttctccagctcatgtctgactacatcaaatgaagttgcaggagcttgatcacacagtgtaactagccttctcacccacgcagctggagccaagtccggtttcccaacaatttgagcaacctaatttaaaccccgccccaagacatgttgatatcaagctcaaaaactataaaaaccaaaaccccaaataaaaaatgaaaaaacttcacaactcttcattcaaaccaggtaagaaatgtctaaaagaaacagattaaaaacagaacaggtaaggcaaggtgattataaagcataatttctaaaacaaatactacaaagtttattgaccatttccatcatactccatacaccaagtcaacaaattgagatccccattttataatttgatacattttactcgactaaaataatcaaagctgacacaataaaaacaaaaacacatgcaaggaaatggatcaaaacccatttcaaattcacaattccctttccattgaattaaaattcagatgcagagcataaaggaaaataagcaaagtactttgagaaagaagccgccgaggtcagcacacatagaatatatcttctccgccgcaaattcatgctgcctctcccacatttcatgctgcttcctcgcatctttaaccaaactcactcgaacctgaaaaacctcacaaacgaaacaaaacaaaacccaccaatccataaactaccacaaatccaaaacaacagagtacgcaatcaaaaatacacacacacagagagagagagagagagaccttgtagccagtatagatatcaacggctcgaatccaaaactgaaaggagcgttgccaaggcctgaaacgggtgacgaggttgtcctgaaaatccttgaaatcgagaatggggaggggaagcatttggggtacgtcgttggagttcgttattgtcgtattgatattaaaaaggtgcaacctgaagacatagagaagtgggggaaaacgacagagaaaggaaggaatggatatgtgggaagaaagaaaatgtggtgttgaattgaagaagagaagcaaagaatcgaaagcagtaatatcagaggcagaggcaacaatgaaaatgacagccacaggaagaaggagagagaaagaggttgttgtgttgtgtcgtgcgataggagtgtagagagaatactactacagaacagagttgtgtcccatggtgatgatggggcatagcatagcatagctaaagtgtgtaactttcttgtgttaaatgcgtggcttgtaaggcttgtaatgtgtatattactgtatgtatcgacaaaaggctttaaaaacctccttaaaactcaaactactacaacactagtttactagattagattagattctactaacttgagtgagtcgaatggagattgacaatttttctttttttattttactta

SEQ ID NO: 219139 - DNA, 4213 bp, Cannabis indica
catcactaacagtataatagtttttttttgaagtaactgtatttgaaaagaaacaaaataagaatacagttacagaaagtggagaaactatatcctccaaactgaatccaaatcaagccttaatgcatccatggcattgtgatgggcgtatgattgttactttgtgggatatggtataaggatgcattagggaagagaaatagggattcttgaaccatgttaataaggttggataaagtcgggttgtcctcccaagaactctgaaccttggtgactagttgtagacaatttgactcaattgttgagcaccaattgagagtagctagaagggcttgagcttcggtaaagaggggagtcgaagctccccatttcgagatagagaattctgtaatcctctgatttttccaattcacaattaaagctcccgaaccagacctgaggtgcttggagtcgaaagcagtatcgacatttaacttgtaccagccttgctagggaggagtgggaactagagcattaactgctggtgaactaaagtctggggctgagtcttcagtagtgttggattgagatgtaatggattgaaatgttttataatcttgcaataaattccaaatgtagctttctgcatcaaggagattgttagaactgttattgaaaagtgtgttatttctcttgttccacatctgccgagacaatcccggtagcaaaataaatttatccttactaagaacttcaagacctcttaagtaaaattctttgatgtcacaattgtgattattagaataaaactctttcagtgaagattgtttccagacagacttagctaaaggacattgaaggatggcatgggtgacagtttcgaccttgttattacagttggggcagtgagggtggggaagggtttttttatggtagaagttaagggaacaaggaaggatgtggttgaaagctttctaggtgaaatgtttcattttgggaattatttttgcattctagactgcttttcactgggttttatagcaattaggattggaagaggaaggcaaagtagggaggggttggagttggctaggtggtagggcgagttgacagtgaagatcccggaatggtgaaaaccccaaatgaggctatccttttgagtgagatcaattgggatcttaaagatcttctggacctggtaatgggataatgattgttggaggatggaaatgtccagttgcaattattgtcaatgaaagaggagattgtctgttcagtagggtcaaagttgttaaggaaagagagggagtgaaaactaggaattcagttatggtcttttaaggatatgaacctaccatttctcactttccagatgaggcctttctttagcaattcccttcccaaaggaggttctccatgtatttgaagggaagtgaccttttggagcattgagaagtcattatttttgaagtatctagctttgaggagagagtgaagtagggttgatggatttgtccaaattctccaagcctatttggcaataagggcttgattgtgattggtgagaaatctgaaaccaagaccccataaaattttgaaagtgcaaagggtagaccaatttttccagtgaattttgctcttattgctacaggatccccactacgaatttagagatcaaacactgcaaggattgacaggtggtctaggagagtttgaaacaggacatggcaaaggagggaatagcctggaccacaaccttgataaggatttctttgcctgctctagagaaaaatttaccattccaaacattcattttagaggcaaccttctgaacaagataggggaagtgcacattgttcatcctaccagtacagtgggggacacaaagatatttgctcacaaagccctcacaacataggccaagagagttttggaacctgtttttagctccaatgtggtatttggggaaaacataatggaagatttggcaaggtttatggtttgcccagtagcattatgataaatagagaatatcaatgatggcttcactggaactctcagtgataggagtaaactagatgttgtcatcaacaaagaggatatgagagatgataggggcatttctacatatcctaagaccagtaaagttatggctatgctccttagcacaaatagcagctaaaaggccttctgcaactaacaaaaaaatgtagggagaaagagggtctccttgtctaattctattggtagggttatgacctcagagagagtgttgttgatagatatacgataatgcacattcgaaatgcatttcatgataagagaaacaaaattgcaagggaaacaaacacaaaggagagtggccttgacaaagccttttctatgtcaagttttagagcagcccaaccatgtttgccttttttcatatagtggatagcattgatgagctcattggcaataaaaatattgtcaaaaataagcatatctgagagaaaaacactctggttactagagataatggagtgaaggatagttttaagtctgttagtcagaaccttggaaataatcttgtaaagtgtagagcagaggcttatcgatctaaaatcacgaatctttttctgagggattaagaccaaggtagttccattgatagtggagagatcagaatggttgttaaaaacattaaagagggcagtgcaaaggtccttgccaaggacattccaattcttctggtagaaatgggcattaaggcctacagagccaggagctttgtcaccagaaatggtaaaaagagcatttttgatctcatcagcagtgaaggggctagccaggttagaggattgactgggggagaggtgattagagacaccaataaagatgttggaaatggaggcttcatcctcccgctgagctataaagagatgggagtagaaattagcaaaaaggggtagaatagagagaattcctctagcagtggaaccatcctcaagggtaatggctctgatggagttgttcttttttctggcagaggctttatggtggaaagattttgtgtttttgtccccatatttgagccaatcaatacgagatctttgtttccaatatatttcatttatgtgtagaaggtttcccagggtagattgaagagttttggccttggaaatatcatgttcactagggatattagattgaaatagtttatccaaagcgtgctgggtgttagagatgtcatgcttcaaggaatgttggctagtgctccaatttttgatgttagcaacacaattattttgattacagatgaaatcggatagagtcttggtggttttttgttggttggaagattgacaagaagaactaaccactatgatttttttttatcagagaggcaatggttttcaaaaatgaaattgttgctggtcctaggacctctgatgtcttcctctaatatggttttaatggatctatgatcagagccatagaaccctaaaggaaatagagaaacaaaagggaagagggaatgtcatgaattattagccacacaccagtcaaggcgttcaaggaggcaaccatgcttccaagtgtatttactaccagtatgagtaagaggaagcatattatacttgtaaaaaggattgaaagtcattcatggcataattagggggcctagtgggagtgtttctgttgttaattgaaagatagtcattgacatcaccactaatgcaccacggcagagtaggagcagaatcaaaaatcctaccaaggagggtccaagtaaaatgtttggaagcagagtaaggggaactataaaaaccaaacaaatgccattttatatcatcattaatattaacaatacagtctacatgatttagggaaaaagttaaaatattaacattgacaacattgttccacaacaccaaaagacatcccccttaaccactcggaggctctttgaaaacattatcaaaacttaatctattcttaatatgcattctgtggcctgtaaggagcttggtttccatcataaaaaacaaataggttggtgctgattcaccaacaaggagagatttcggaatgctcgaggactccttaatcctcgagcattccagcaaatgatattgattttcctcgacggggttgcgaagcaacacctgttgggttttatgacctaaataaaactcatttcaatataatcagatttgcttattaatatagatcagaaataacatttaatgtt

SEQ ID NO: 219140 - DNA, 2133 bp, Cannabis indica
tggtaaagatagtataattttacgcaatctcttaatgcaaatcaataccaaacaaatatagaattatattaaataaactaatactatacaacacaatcctacacaatataatgcaccaggatgtatcaactatcaaatgagccctgattattttaattaacacaaaagatcaaatattaattattaacttttgattaaatatgagttgcatgtgacatacatggataggagggaatacccaagttggcaacattttgagcaactaggacttataatagcatggggattatatttaaataaatttacattcacttattaatttatcactcgtcataatctacattaaaccaccaaaaatccatatatagggattctctgcacaaaatgcaacttgggctagctgtcctttaacaaacaagcaaaccctagccattattaactcattatatattaataatggacattaatcatttattaagattatttctctttcaatccaagtatatgaatccattaaattacaaaaaataatttgtccgtacaatataaatgtagtggttttgttggtttcttaaaaaagtacatatatatatataataagaattgtaaggggaaaggagtttgatatgctttttaatttatttaaatattgtaagataagagattatgattacaagggtactgcattatataatgatatatctaatgtttatagggtttgtaaagatctgcagttgaaaatttgttacattattagttacttattagaccatgttcaatgtatttgccaaacataatattaaatttggtaaaaaaggcaaaactacttttcgacactatatatttttgatattatatttttatccatagtatttaaaactagctaaaaaataaataaataagtaaattataatcaattaaaaagtggagtctattcagttaaaagaggatatacttaagtagtgtctaatctttttaatctaaactcgtctttttcaattcctctactaaatagtagtatatatgctttgtggtctctgaaaattctaaggaaagtaaagattttcgcttggcgagtatatatgatcaaaatatctttctcattggtattgtgctattatctcaacatgtttcaattttctgaaatgttgcttttgttgtggctcacactatgatgatttgatacatgcctcttattcctttgccctctttcaatctaagtttggaagctttgagaattttgaaaactagttaaactaataagtttgccctggaatattgtctttgtctacacaccaattttacttgtttatcactctcatttggtgtatctagggagaaagaaataaaacaaaacatgacaccttgttcaaagatggacaagttagtattatgatagttagtttaaagcccaaaatcacaccctcaagctacaaagatccctcttcagcccatagttgttcattgaataactcattctaatagtttgttaaagctaaatggggatggtgctatgaatagtgataatgagattattggtattctttgtgattctaacaattttgcctttgggattgttttgtaagacctatgcttgctagtttatatcctaaagaagctaatgtcttggccctatctattgctctgaaatggtgcttgtagcttgacttcactttgttcctttgtcgagagtgattctaaataagatgaatttgatagatctagcatggattttagagttgtaagatacaattggtgaaaaatttaaagttttggatgctcaacactctcgtttgtgatcaaaaatcaagtctgaaaattcaaaccaatttttgattatgattcgttcactttcaagaaaaactttttgaataaaagttatagatctttctttatcatcttttcaaaatatcttgaatcgtgtaattctgagatgtatcaagatagttatgaccaaaatataatctatcatcgcggtaggaaatcatgttaaacgatgattctgaaaagtaaaaaagtcacaaatcgtgacatgggaaaggcaagtcgcgacctaccttctttagtttagaaaaataggtttaaaaaaacttttttttttttttttagagtagagagagagagagagagaga

SEQ ID NO: 219141 - DNA, 7472 bp, Cannabis indica
taaaataataaaaaagcccccacgaaattaaataaatttagtaagagtaattataatatatgtataaatattttttaataataaataagccccacaaaataaaatttctgggtccgtcactgcctctatgtcattccttcaaaagaaatgagattttacataataatagtaattttgtattgatgaagaaaagatagatatttatctcaaacggaaaaaaaatgaaaagaaagataccaaaataaacatgaatcacatgtgaactttttcttttttgtaatgatcatatgtgaacttataataccaaaaaaaaaaaaaaaacaaacatcggcagtgaactaaattgagtagattttcaaagaataaaaatgtttgagttctttcgtacaacacagaagtggctgtagtttagtggtaagaattccacgttgtggccgtggagacctgggctcgaatcccagcagccacatttcttttattattatatcttactcttttcttttttgataaattatattttaacttcttagaaagaaaagaaaagaatttaatcaatgaagagatcctggccgttcatcttaataattgcatcgcagtggatcagaaccctctctttcccgccaaaacaccactctcttatactcatttgccgccaagtcccattctcatctcttccatttccattctcctttctttcttctcaggctccatacttttctctctttcactctttctcttctccgtgtagccatgatgaaggacctcgatttcgatgcagataaaagtaagcaatcctttcattactttctccgttttcaggtttctctttcgaacaactattctgattacgttttgtgtgtgtgttttcgcctctcagcactcgcgaaagagttcctttcaaattttgcagatgacaatggcgaggccaaatacatgaacatccttgtgagtttctatgtttttatcaaactccgaatatttgaaatgaagctacttagcactttcggtagcagactttgagctttgtttgtttgtttgttttaatagcaagaggtcgcgaatcgcaaagttcgagctgttgagattgatctggaggacttgtttaatgtaagtttagcatgtgctgtggttttggtttgaaaaccctagttttctgttatgaatatattttgatttttcttcttctttagtataaggacttggatgaggagttcctcagaagggttaccgaaaatactaggcggtacgttggaatttttgcggaagcaattgatgagcttatgcccgagccgacggagggttttccagatgatgatcacgacatattgatgacacaaaggtctgatgatggaccggataatgttgacggttcagatccccatcagaagatgcctcccgaaatcaagcgctattagtgagttcagagcaagactttgttttgcgttttggtgcctacttccttgactaattggtttttaattcttttttttacagtgaagtttacataaaagcatcttccaaagtgaagcccttcaccattagggaggtcaaggcatcgtacattggtcagctagtgaagatatctggcattgtgatccgttgttcagatgttaagccgttggtgcaggttgctgtatatacatgtgaagaatgcggttttgaaatttaccaggtaaacttgcttaatccttttatgcaacactgaataccatctttgtctagtttcataatgtactagaataatggcccgttggctctatccttccatttgcataattttgtggtatttttggcatttggttgaagttgaaacttcgagtaacttttgagattttaattttgtttttattcttgtctttcaagtttcaaccacttcagtaaagttacttgagcgaaacatgaaggattcttctttttgtttaacttttttctagcacttctctcattttctttttttttcctttttgtgggtctaacaggaggtcactgcccgaatttttatgcccatatttcaatgcccgtccaagcgttgtgaaattaatcgaacaaaagggaatcttatccttcaactcagagcatctaagtttttgaaatttcaagaggtgtgtaatgaccaaactacaaattttgccaatgacaaatctacaccatgatttggttaaaattttgttattaatttttcaaagctccttttctttttccatgagttaccattttgagatgattaaatttcaggccaaaattcaagaactggctgaacacgttccaaaaggtcatattcctagaactatgactgtccaccttagaggagaacttacaagaaaggtttgttattctttctttaacttattattttttggtatctttgatatagtgaacattatggcactaataattgtgctgatattattttaatttttgtgtttttggaagaactaaaattgcttagctgcagatagtgttggtcgtgcttaacttgtatctgctgctactttattgatcaccttaatattcacatatatatttccgttatcaggtgactccaggtgatgttgttgaattatctggaatatttctccccattccttacactggttttagagcaatgcgagctggtctagttgcagatacctacctggaagccatgtcgattacacatttcaagaaaaaatatgaagagtaagcactttgaagtgtcttcccttacactcatttattctaactttctgtttgagactaaagtgctttatccttcagaattttatgaagttagcaattaccttaaaaggtcacctatatatgttgctttcctctcttttcttactctagaaacctgtgcttcttctgagaaagattttggtaaaatcaatcaacttctggaatgattctgtgtacttgttaggtgtaaagatctgctgtttactaaggtatgttcaattacaggtatgaccttagaggtgatgaagaagagcaaattgcacgtttagctgaggacggtgatatatataacaagctggcccgatccttggcacctgaaatttttggacatgaagatattaagaaggctttgcttcttctccttgtgggtgctcctcacaggaagctgaaagatgggatgaaggtaaacacattggattatcatggtattgaatattacttggttctatgctgagttctgcctctcatcttatctgcatgaatctagtaacatcaacttaattggttgttattgcttctgtttgatgggtgacttttaaacatgttaataggtacttctcttatgtgggatctataaaacacatattttgttgaggttaaaattgtatatatgtgtcaaaaataaaaagctcctttttttcccttgcagattagaggagacttacatatatgtttgatgggtgatcccggagttgcaaagagtcagcttcttaagcatataattaatgtagctccgaggggagtgtatacaactggaaaaggaagcagtggagttggtttaacggctgctgttatgaaagattcagttacgaatgaaatggttcttgaaggaggagcattggtgagtcatgcacaattatgaaggcatcgtttttgtttgattccacctatgcatgacttttcagatttaagttgttgctgcataaacagagtaggacgatttttttttctcattctgaattgaagtcaagaactggagtaaagttttttttttgaacaaaggaactggagttaattaagaagcttaagtttgtgacattatctcaagtaactgtttagtttagctgcttcttgaggagtttttctttccattttttggcttggaagttaatcatcatagtaaaatgactgaatacaggtgctagctgatatgggtatctgtgctattgacgagtttgataagatggatgaatcagatcgtacagctattcatgaagttatggagcaacaaactgtcagcattgccaaggctgggattactacatccctaaatgcaagaactgctgttcttgctgctgccaatccagcatggtatatttatcattttgttcctgctcatcttttctagccatctccactccgttgcttttctacttttttaatcttaaccttgtgggttcttttctgtcatagatgactcatgactttgttataccaagtttccaatatagcattgtaagcttacactcttgaccctctgctcttccaggggaagatatgacctgcggaggagtcctgccgaaaatatcaatcttcccccagcccttttgtcaagatttgatctgctgtggttgattcttgatagagctgatatggatggtgatcttgagttggctaggcatgttgtttatgtccaccagaacagagaatctccatcccttggtttcactccacttgactcatctgtgcttcggtaaatgttacataagcaatattttttaatttgcttatttaccactcacttgagaccatgccttttgtcataaatttttgtgttgattttcgtttaagttctgcgatctttgcacatgagcatatttgtgggcttgtttttgtaatattttattttattttgtgtttcagtgcatatatttcttctgcaagaagattgtctccttctgttccaaaggagcttgaggagtacattgctagtgcctacactgctattaggcaagaagaagctaaatcagataccccaaattcttacacaactgtgagaacactgctcagcatcctccgtatatcagctgtaagtcttattttacattttttttttcgaagtctacttctcaattgccacggcaatgtttattttaaatatagtttgtcataggataattgaggttggagttataaaattgaaatggtggagcaaagtacaataaacttataaattttgtatttgtttcattgttatccacaaggtgcattgaccattcaaaaataaaaaatcattgcaatagaataagtttgctgaaagctataaaacctttacaggcactagctagactccgattctctgaaacagtggctcaaagtgatgtggacgaggcacttaggttaatgcagatgtcgaaattctctttatactcagaagatcgccagaagtctggtcttgatgctatctctgatatctattcaattcttcgagatgaagctgccaggagtcacaaaatggatgttagctatgctcatgcactcaattggatttctagaaaggttagtttcattcctcatattcattaattacatgtcttttgacctgaatattatacttggttttactttgaatataatatgaacaggaattgaatataataactattccatcaaaatggtagaaaacccaatgaaaatagacaaccaaatttgatcttagattctgttcattctctctctctctctctctctctcccccaaggtaataattttggttttggtttggttttgttctgagcagggttacagtgaagcccagctgaaagaatgcttggaggaatatgcagccttgaatgtgtggcagattcatcctcatacttttgacattcgatttattgatgcataatctctctcattttataacatatgaattatggaagtgcacattttttttcttctagtttgtaacagatgtattttaattatctagtttagttttgtcaatttgtatttgcagcaaatgattagattgcattttaatttaatattaactaaccaacaatatcccattacagaaaaaaaaaaaaacaatatcctatttcatttattctatttctttcactttttattcaatagtgacgcgtagattggacgctaggagatcagaatatattttagcgccaaaaataaattcaggttttttttttcagtaaattagctcatttatttcattggaaaaataaaataaaatttccactattttcaccaaattataggtaaaaatgcagttagttgttatccatgggatcacttgactttgcgctgttcagttcactgttttaattttactatcttattgaacacgtgtccagtttctatttgtcttcgttatgaaaccgaaaactaaagcaccgtacagagtaggggtattatggtcatttgagagtttgtgcactgatcataaatttttttccatttcgatatactggaaatatattctttaattatttttctttgaatccatattaattctaattttattttcttcccacaatatattttacggacactattttgcagctttccctgttcttatgttaactgaaaaaaccaaagtataaaaactcaagaattcgagcaaagctcctgaaaattggttttttttttttttttttaaaaattaatttaattattgttaatttattttattattaatttatattaaatgaagttggtcgttcagaccagctctccttcaacctaggaatggaaacccccaaaacccccatattgccctcttccttttttgttcgaatgagtttgaacccatctctcatcgaagacgacaccttttaaggtaaacgtttcatattttatttataacatttgttagatctaatctccttttcgctattgctctttggtctttgcattgtggattaagattggtggcgcaagcaatttttccattttcaaatcctaaaatgtctttaatcttacaaacaaagcaaaaaaattatcaactttctattctagattcctattttctttgttaggtctatctgtaattttgaagtgcatttaagttgaacgatcgtctattgggcttatgtattctagtattgtcatatgggtagaactcattttcattatctactaggttgcacttaactgaactttttccaaacctgccataactgtaaactgcatttcattactagaagccagagattgtcatgctggtaataatttgatttttgtgtattttatttattttttagaaaaggtcatgtataaggtcaattttagcaacccatagattcatttggaacatcttgttttattatttttttagacataactaagggtcaaaaacacatgttctgatgttttaggttgctggtaaaaaacatggatccttggaattgcgacatcttctgttggtgtgccttctttcgagaaggcacctcgtaaattttctaatcaggtgcctgagaagactcaactggagattgtagagagagctagttgccatgctgctgctgagactaaagtagatgtggaccttggagaagtttactttttgattttgcactttctatcttttagggccatgcaagaggacttttacacaattcttgggtgagcttatggagaatcagctcttgcctagaagatatcacgcttggttttcaaaggggtggtatatctagtggggatgcaagttgatgatggtgtatccttccctttggactttatgactaaactcatggagaggtatgcatgtagtctaatataaccatggtgtttttttc

SEQ ID NO: 219142 - DNA, 2250 bp, Cannabis indica
aacgtaaaaaataaaaacaaaaaaaaaaaaaaaaaaaaaaaactaattttaaagtagtaaaaaataaaaaaaataaaaaaactactaaaaaattataaatatataaagtcaatataataattatttgtaaatatttataaattatataaaattgtgtaattatattttttttttatataatataattgatttacttgtatataactaaaaattaccctataattaactcaaataccacataaatcttgaatttcaattttaatccatgtttgtaacatgaatgttaaaaaccactacaaacgttataatgattattgctaattagcaccatagatactcgattagagagtccgatattgctaatgtgtgaaaagataattgaatatataaggaatgagctactccttctattgtcaattgattttaaaatggaaccccattcatcttattttcaaattctaacaactcgacaccttatgatttgttcctctacctatcaatttttttaaaaccatcataactcatatcattagtgtttgacaataaatttgtttcattgcttattctgtctattgcctagtgatattcatctaatctaatcggtattattttagtcatagtacacttaatctgcactaattagtgcggattttagattttgaatttaattcaatccgccatagcttaaatttaatcaaatctgtaaaagtgtgaattgaatcagttattttagattggttacttttaatattaaataaattaatatttattaaaagatatctttttttttttataactaactacaaaataaaataaattattgttgttttatactccaacaacatattaaaataaataaatagcaaataataaattcaaaaattagaataaaaagttgtatgtggaaagaaatgtttaattttgttttaaattatatttttcgtatgtataagaatgtaacatacatttgatttattaagttttaaaatatatttgtatcgtatgtattatatttttaaattactatttttacattaaaatattaattgtatatattattttttaaaaatatatataaattggattaaatcaattacttttacatgtcaatcaacattcaatccacactaatgcggattttggatttttcaaccaaatccgatccgtgcaagtacgaacatccgcactttacagattttatcatatggactggattgaattgagtattttatgaacaaccttaattctaccttatcaatcccacctgccaaataatatatcctgttatataaactagtgaaggtaacgtgctaaaggcacgtgtcacctattcattaattagcttaacgtaactctatcaaaacttgtaggttaatcgtatatcttacttttattaatttcgtacataaacagtgtgatacaagttcgcttcttgaagctaagatgtatcatctgttgtcttatttaaatgcaagtctatgtgattttctccatcactataattaaaacgacacaaaaggatcatgtaggtcatgcttggtttcatgtaatagagattaatagaatcaaaattgatattataacctttgattttcttttaaaaaagatgtatgaaattatattatgtgataaaatttttattacattggaaaagctatataatgagaattacatcataaacatttccatgtgcatgagatcgagacagattgcaagacaattacagatgcgctaagctcttcctgtgaaaacatctccgcttttggagacactctgaagcaaattaaagacgctttatctcttctctttgctgcccaagtctcccatgttcctcggtctgcaaatacttttgctggcaaacttgctcactgggctgccgggttagatgaagctgcaatttggattggcgatgacccctgtgatcttcgagtttttctttctctttagtgggctccttttccctaaaaaaaaaaaaaagaagaattacatcataaacattaaataaaataaaaataaaatgactcaaatatcatattttttttaaaaaaataacgtacaagaaaattaatgtggaaataattttataaacttatcacttatttcaacaagaaattaaacatcataatcaatgtttattaccattctcattccattactactattactattactattaccattacattctactaaacttaacatcaacctgatatacttttctacacttttatttactaataagaaaataag

SEQ ID NO: 219143 - DNA, 5421 bp, Cannabis indica
gttaaagcatcagcaatttgatctagtgctggaacataacgaacagacagtcttttgctagtataaggtctcgcacaaagtgtaggtcgatttcaatgtgctttgatctagcatgaaatacagggtttgcagccatagcagtcgcactctggttgtcgacccatgaaacaggacactgattttgaggaatgtgaagttcagatagcaaggagaccaaccactttatctcggcagtagcattagcaagagccttgaactcactttcagaactagacctggccacaacatgttgtttcttggccgaccaagagaccaagttacctccaaaaaacataacataaccccctgtacttttcctatcatcgacacatgacgcccaatcaacatcagagtatccttgaatggaaagagatgtagcaggtgtgaagtgaattccatgcaagatggttcctttaagatacctcatcaagcgtttacatgcctcccagtgagtggttgtaggggcatgaataaactggctgagcttgtttatgatgtaagccacatcaggtatagtgagagtgaggtattgtaacgcaccaagggtacttctgtagagagtcttgtcttccaaaggttcaccatcagtaagagacaatttggtgtgctggcacttgtgggattcgggcacagtttggcaccatccatttttaatttgacaagaagatcagttatgtatttggtttgagacaaatgcattcctgtttgatcacgaaatacttctattcccaagaagtagtgaacactgccgagatctttaagagcaaaagattgatgcaactcagagatgaatttgttgacaaagtgaacatcgggtccagtgaccaaaaaatcatccacatacacaaggaggatgattaaagtgttgcccgagccataagtaaagagggagttgtcagacttggatagagaaaaacccctttgaatgagagtccctttaagagtttggttccatcctctaagtgcttgtttaaggccgtataaagcttttgtgcaataaacacacatggttcggcagggagggatcaacaaacccttcaagttgaaccataaaaacttgctcctgcaatgttccattaaggaacattgcttatgtcgagttgtttaaccacccaattgaaggaaacagccaatgtgagtatgattcgaactttggtaggtttgaccgctggcgagaatgtttcttcataatctatacccggggtttgaaggtatcccttagcgaaaagtcgtgacttaagtctgtccaagcttccatcgacattaagttttactttatgaagccatttgttaccgattactatcattccaggagtgtagggaaccaaagaccaagtaccagctctttttagtgcagaaaattcatgttgcatagatttaagccactgagggtgttttagggcagcagaggtggactttggttctgacagaattagagcttcgggtaggggaaatctagtggccatgtaagcttttggtttggtaatgccattttgactgcgggttctcatggtgtgagttcttgtgtgagtattggtggtatggcatggggcagatgatgaaggttcattaagtgtgggaggttcacatgttggtgggattggtgtagtggaagtatttggttcctgaggaatattgggatgggcatttatggctgatatggtctcgggatcaaggaaaggtgctatgattggtgtaggagttggtggagatacattgtgtggagatggtacatgatcatttgtctcagttggtggggagggtacatttgaagtctcaggagccacagtaccagtagtgtgatttgttgcagacaaggcagaagtaattggtggattagtatggagactaatattagatgtattgaaggtgaatgatggacaaggagcagaatcatgtacctgagagggttctgaagtagggaatgtagcaggaaagtgtgtttcattgaatgaaacatgtcttgaaattatgactcggccatcagggtgctcatatagatatcccttgtgatgagaagagtaccccaaaaagaggcattgttcagatcgtagctcaagcttgtgagcattatatggctgaaggtgtggaaaacagctgcaccccgaaaggttttaaaatcctgtagtcaggtttctttttgaagagacactcatacgggctcatgttgttaataacaggtgttggaagcctgttgatggtgaacacagcagaggacatggcatgccaccaatactccatccttaaaccagcttgagctaacaaagtgaggccggtttcagtgatgtgcctatgcttacgctcgacacgtccattttgttcacttgttcgaggacaagggtgttgaaagtgaattccttggtaagctaaaaaccgagcaaatggacgatactcaccctcccagtcagcttggacacttttaattggtaagtcaaattgtttttccactagacttttgaatttaatgaacacatcaaatgcttgattttttgttgtgagagggaatatccaacaatatctgctaaaatcgtcaaggaagtgtacatagtacttaaaaccatctttggaaggcatatgggacggaccccaaagatctgtatgaataagggcaagtggttgagaggctcggctattagagggagggaatggtaatttgttactctttcccttgtgacaggcagtacaaaaatgtaggttctggatggagccagtgtaaggtatatgtggtaatatcttggtcatggtactaagggaggggtgtcccaatttgtgatgccaattgttaatgtcattttgtttagtgacagatagagcataatgagaagagtaagaagcaggaaaagatttattattattgctgatatctgaattacaagagtccgcaatgtttatggaatgacaagaacaattacacaaatgagtagtactagtattatttggtacagtattaagatggcattgaatggtggcagaagagtcacttccaagacgatatagcccatccttagccttccctttgagaagaacagtccatgtttgtttgtccttaacaaaataacacgatttgtgaaactcaagaaacacatcattgtcagctgttagttgggaaacactaactaaattctttgtcatagaagggacattaagaatagaatttagctgaacaggatgatgggttaaagaagatggtatagaagtatggctaatatgagatatagatagtttcttaccattgccaacagcaacagtttcactgccattgtagtggtttgccatgtcaagattggaagtaccagtggagatatgattggtagcacccgagtcaacataccaagactcatcatccccaatttcaggtatcatgttggtagttaggggcctgtggatcgaaagaaaattagtttcaactaatagagcttgagattagaggtatcgtatttgggagtgacccaattcttgtcaaaacggtagtggcacacagcagctgtgtggccagtacgaaggcagacttgacacaatagtttggcacctgatccacgaccaaacgaacgatagcgattgctgtcagattgggaaccacgattagttccaattgggggtctgtatgggtcagttcttcaagatccaaatgcaagattagcttgcattttcatggataagtcagtgacagaattgtgatgttcaaggcgtgtttcatgagaaagaagcagtgcctgaacttcttcaaatgacagagtgtcactcctggaggtaatgccggagacaaccgagtcgaattcgggaccgaggccattgatgagctgcataacaagatcttgattggagactggtgatccagcaatcatcagcgcatcagagatggactgagctttatccacatattcggagatcgatagattgtttttgagaaggtgagaaaattggccttttaactggaggagacgggcgttagtttgactggcaaatctttgatcaagggcacgccacacgtgaaacgatgtatggaaattcgccacagatgcaagaaagatgcaagaattggttccttcatcgatgatcgcagccacaagaggaggagctgatccttcttcttccattgagtgaattccggatttggggcacctgtaaccagagtcgccggaggggagacatcaaagaacaagattggatctaaatcatgaccaatcacggttgggacaacttgggacttccaggagatgaagttgttacgatcgagtttaagggtgagggaagcagagagagattttgagaaaggattccaagggttcatagcttgagcagtagcagcggaagtaagagcttgaggatcgaaggttgcagactccattgacgttagtcagaagacgatgataccatgtagaaatggatgagctaaacagagagaaaaagatcaatgaaagaaaacaagccttactcaaacagagtaggcaaagcctttgtttatatcaactgaatattacaaaagagttccaagaagagaacaacagaactaactgaaaaactacttaacagaattagttaataacagaaaatgtaactaactgacaggaggatcaaaaaggttgttaacagaattagaatgggaatagaatggaacaaaatttaaaatgcataaaaaattaattaaaaaaataatttaattttttcaaattttgcattggaatggtctttccttctattttaaaatagaatagtcattctatcagaatggtattccaatggtttgaaatgtaactaaacaaaagaatggaatgaaaattgttttctttccaatacattcaatttcattactaaccaaacgccacctataatgcttaagaatttcatcctcaattgtagaagcgcttcatcaatcatgaatcattaacatcaaacattaaccctccattaatttatattatatataaaaaaaacaaaaaaaaactttaaattaaaaattttgctatataattatatttcatacataaagataaagatatgcttacaagttttgtgatttttttttaatgaatcagctgattgtatattaaaaaaaattaccacatttacaacctaacaacactcaataaaggcctaatatcaaactttatttacgtgtgcactattagaaaaaatatttacgatcaataagtttagaaaagtattatcaaacaaatacatactatttgtaacaaattaacatctgccatgttattaaaagtctgcacctcataacaattcttactcgttgtcaataatttaataatgaattatttcgttatagaccatttataaaagataataaagaaacaaattttgaatataattaattaatgggatatttgcagcgaaattctcctaacatttataattgttatacat

SEQ ID NO: 219144 - DNA, 2892 bp, Cannabis indica
tagttatagtaatacaatttttcaaatttttaaaatacgacacttgtgtccttgattaatatttctattgtctctatagaagcacaaaaggtttcacattcaaatctggtgcttgtgaaatttttttcttacatcttatttttgaatcattaatttttgtatagaacttgacaagtaagttttaccaaaaaaacaaaagttacaaaaaaagaaaaggttaaataagtaataataatacaaacattgcatagaaatgtaaataacaagagttgaccaaaaaaaaaaaaattggaaaaaaaaaacactccatgcattacatattgtcccataacttgaaataaaattccaaaacattttttgtttgatacacacaaaatccaaactttgaattcaattaatttggtgcttctaatttatggaaaaagaaccaacatcctaaaggggtccccaatattgttatgcaaagtgacaaataatttggaaattgaatggtaataatataactttcaaaacaatatcgatattatactataattataataattatatataaattgcctttaatcacgcggacataaaaaggatttttacctttcaatattggaaatataaaagtttgtccgaagttggagggtccaatcataatgattataaatatacatgatttattttcttaaatcaagttgtatgtgacgtacccattaggctaattctatggaaattattaaactttgtattctctattaattcttgtgagagtgatatgttataatttggttacaattgccattaatgactttgaactaggcatttgagttattatgcctcattattgaatgaagatacatattaaattttaaaacgccgcaaactgaaaagaaaacaacatacgtagtggcattattgtaattaaatagatttcagaggtcgaaaacataaataataaactgatagaataatttcaaacgagtggccgttggaaaagttttaaaaacagagagagaattattttaatattattattatttttttttaattttcgaatgcaattaaagagaactgaaagaaccattcaaaccaaagctcaatttcaacagctatcttctttctctctctatagttctctctttctagagagagaaactctcgtgtagtttacagatacagagataatgacggggctgattatggtgaccaggggtggtgggtgtgctggtggtgatgatggtggtagcggtggtaatggtggaagtggaaagggttcattgaaaagctcagaagaagaccaaaaccaactctcattggtgacgtttctcttggctgctctgaagaaatctatggtggcttgtcgtgtcgagagaggtgaagatgtaatctccagtaccgttcatcagatggagattggatggcccactaatgttcgtcacataacccatgtgaccttcgatcgcttcaatggctttctgggtcttcctgttgagttcgaggttgagatccctggtcgagttcccagtgctaggtaagagttctcaaatttaataaggaattgtttttgttcgaagtatactactagttgagctgaggtatattagatttttgagctgagatttagctcttgtggctcttgagagttgaaatttatgtcagtttggagctgaagtacggatctattggttggtttgaggttaaaagggtttgagatttagcatttaaccataaatttgtctgatgagaaagattagcagatgtagatgaaacgataaactgaactaagcagaagagttatgttcatatattcgttacagttactattgctagagattcatgcatacaagattcttatgaacatttctacgattctatagcaatgaaagtgatactagcactattataatatctgctttagttaaataatactgttcatatatttgcttgcacgattcttatgatttgaatattcttccaatttacagtgcaagcgtctttggggtctccgccgaatcaatgcaatgcggttatgattcaaaagggaacagtgtgcctactattctcttgctaatgcaggagcgcctttactcgcaaggaggtttaaaggttgtaataaatttcatcatatctatggaataatcaaacccctaatttgcatgtgtcacgagtttacttgggtgcccataaattcttatatttattgaaaaggtttgtgttggtatttgaatgatttattattcggtgcaggcagaagggatatttagaataaacccagaaaatagtaaagaggaacatgtgagggaccaactgaacagggggaatgtgccagatgacattgatgtacattgtttggctggattaatcaaagcttggtttagagagcttccttcaggtgtactagatggactttcacctgaacaagttctccaatgcaacagcgaagaagagtgcgcagagcttgtgaagcaactaaagcctacagagacagcattgctcaactgggcagttgatctcatggctgatgttgttgaggaagaagagtacaacaaaatgaacgccagaaatattgctatggtttttctccaaacatgactcaagtatgataaaaacagctatcccaaatgatgtttactttgttttcctattaactattattaatgaacctcagattgaccaactctttttcttgatcaccagatgtctgatccattgacggctctgatgcatgcggttcaggtgatgaacttgctcaagactctcatcactaaaacactaagagagcgcgaagagactgcaacttctggaggatattcacccatgtcatcatgctcttctgatcatcatagcgatggagattttgatagtcagcaagagctggacactagcagtgaaaccagagggcgt

SEQ ID NO: 219145 - DNA, 3449 bp, Cannabis indica
aagcatttccgatcccaccttggtccaattgaaggcttatctgtgagttcttcatcctttaaagactaaagtttctactgcaatatttttctgatgtagagtcagaattaagcatgttttgtcattttgattttgagtaatgagtacttaattgtaaatttgcaaatttgcatgtgagggaataagtttgtattttcatcatactccatcactggacaaccttgttgtgttacgcactccatggctgcaacctacattgcagattaaggtgcaagtaccatcgttcattgtgaaaggggtagttgaaattcttgatagtttgacatgtgcttaccatttggtttgcggtgttcgattattcaacaacgatcaatgttgttattgaggagcaaattgattagttgcatttatcatctgagttttttgtttgttctaataataggaaaaatattgttattagtgcagtcctcaaccatgacttggttcagccatgcaggttagttctgatggcttgctttgctgtacaatttcaaacgatcatgctgtcaagatatacgacgtagtcaactacgatatgatggtgatgattcgcctctcctttactcctggtgctgtcgagtgggtctacaaacaaggagatgcaaaagcaaggcttgctgttagtgatcgaaattcaagatatgtacacatatttgatgcatggtctggttcaaatgaagctatcatttccaaagaggtaacactagtgacttgaggagcataattattaacccttcataatatttcagctatcttttagtttttatgtaaagtattttacacagctgttatttccttactttttctctcaggtacacttggaacctgtgaaagttatgaagtacaatcaagtatttgatacagtaatttcagctgacactaaaggaatgattgagtattggagtcctgtcacattgcagttccctgatgataagtaagtacactgtgctccaacttaagtttttatgaagacttatttttggtctgtaaattgtgcatgagatatgaattttggtcttattttaatagaaaactctctctggcatattgctctggtttcgtaactactaatttaccactaatataaactataatcttctttgcatgcttgcagggtcaagtttagattcaaaagtgacactaatctctatgaaattataaagtgcaaaactactgtctcttcaattgaggtattttggtctatctttttcgagtttttgcttgcagatggataatgttttccctcataaaaaatatgataattttctatttattatcttaggaatttctctcacttcgtttttggtattttatttgacctaaataattgttatgtatgaaaaaacaatttacattattactgatttacaatgaatctgatgttctttaggtgagccccgatggtaagcaattttcaattacatcaccggatcgacggatacgtgtgttttggtttgaaacgggtaaactaagacgcgtatataatgaatctcttgaggtaaaattatttctttgtaaaatcaatactttaacaactccaagaacaagagttgaggatgtattattttatattgaaattcctgaacacttgtatttgtcaattttcttgtgttgttcaggtggcccaagatgttcagagaagtgatgtgcctttataccgtctagaagctattgactttgggcgaagaatggccgttgagagggagattgaaaaaacagaaagtgccccaccgccaaatgcaatttttgacgaaagctcaaatttccttatttatgcaaccctgatggggataaaagtaagattattgttctgaaatcagactgtactatcatcaagtatgcaatcccctgcttcccatctagtggagacttttgtttaccttatatgtttttgccctaggggtatcaaaaattgaattttctttttctatttctccgtactcgtaggtggtaaatctacacaccaataaagtggctcgaatacttggaaaggtggagaacaatgataggttcttgaggattgccttatatcaaggtgatcgaagcagtaaaaaagttcgaaaaattcccgcagctgcagcaaatgcaaatgaaagcaaagatcctttgacagatcctactcttgtatgctgtgctttcaagaagcacagaatttatctattcaggtacttatattcttccgaaccatttttcgaacactttaacattttgctttctaaaggcatgtactatagtataaattcacttagatggatagttgtcgtgcccttgtcttccatatgaaaatttgaatgaagcatttttatctcagaccatcaatggtgcttcttacctctagttttagttataatgaatttggctgctttaacaaagaaggaaaattatagtgaagattggattggatgtataaatgtcatttgatgtactctttgaacatttttagtcggagagaacctgaggaacctgaagatgcaactaagggaagagacgtgttcaatgaaaaaccacctgctgatgaacttttggctgtatcggatattggcaagtctgccacaacatctcttcccgaaaatgtggtgggtattttttttttttaaaaaaaataaataattgcaatctttagatgcataaaattgaagaaatgttgctctataatttttctggctggctttttattcgtactcaagaaagtaggtaaaagaagataataaatgatacgtaaggagagaaaaatgtaggctagtgtttttttccgattcaatgaccatattttccattttttttacttacatcatgtgtatgtccatgccaattatttttggacaaaaaagaaatgcttgtattttgagtaattgaatcggtgtgttggttttctaatttcatgccctattctgccagattatgcataccacgatgggtgatgtacatatgaaattatatcccgaggaatgtcctaaaaccgtggagaacttcactactcattgtcggaatggctattacgataatcttatctttcaccgggtcatcaaaggcttcatgatacaaactggagatcctttaggagatggcactggtggtcaatctatttggggtagagagtttgaagatgaatttcacaagaggtaatatgattttttatttatttattcattattattattttcaactggaacataaatttttgtcttatattcatatttatttacatcatttttgtatctgcagtttgcgacatgaccgaccgttcacagtatccatggctaacgcgggacccaattcaaatggatctcagttctttatcaccacagtggctacgccttggctggataacaagcatactgttttcggcagagttataaagggaatggatgttatacaggtacagtcgtcaacgatgcacctttctcatc

SEQ ID NO: 219146 - DNA, 7061 bp, Cannabis indica
  modified_base (743)..(743): a, c, t, g, unknown or other
aatacaactaaaaggaaagtaggtcattacccaaaaactaagggggtcaaaccgctataaaaatccttgtgttcttttactttctagttctaattgtgtaacacgtgtcaagcatcagtttaatacaaccccgctgtcaattggacaatttttaaggtcaatagtttggtgctttcattgagagcaagttggtatcataactgataaaacaccatggttaacatgagaagaactctagttgcaccatgtgcatcatcgggtcttcctcaagaccctttaactgtagatctagatgtccatgttccagccatgactggaattcccatgaacactacagatgtggtcaatcctgtcaccacaacatgcactttgaatctggtcactacagctggccaaagtgacacgaacatcccagtggatttgaatagcaggcccttgcctgcgagggaggacccgccactaaatcctcccactaaaggaaggacccttggggaatatcccccgggaacaacaatcaaatctcgtctctagtactatgctagagagacaggaccaagaattggcaagtctgctatgggcgagccccatgtggacttagaagaagatctcgatctagccagactaagagaggtcgtctaccaagccgacctaactacagaaccacgtgctgctaattgtgatgtattcgctcagcagatatgtgaattcttgagatggatgtgaattcttgagatggatggagngaccaagagtacatcctttgatctcaccaggcagagcagattgccgcaatagagaacccaacagcttgataaggtggctccattagagaaccaatggaagaggtcaggatgtcattagagatccactccaaggaagactagttgatagatcagggagggtctatcagcaaactgaccaaccaagtttttcaagaactaggtcaggccttctcctacccgaaggaggacaggccttgccatgaaggtctaagggaaagaatagcaagatcccaacaactagcggtttgggggttagctagggacctcaagcttaataatagcccccatcaaccaaccttatgtcggtcacccacctgcagaaatacctctggctggccaggggagtacactcccaccccaaggggagcgagccactcaaaggccaatctttaaccggctaggaccagtagcgggtggaaacacccaaagcaacaatttgagaagtgaaacttatcactttagatatctaaatccacctatctctagcagctgatgtgatctacctcctgacaacacactagcagcatcaaccaactcgggaattgcgggtagctaggccctacctagtacaaggctaactggccatggacaactgctcaataagagcttgactggccaaagccaacatccgtaactgggagtggccggccaaggccagcaacacaataaagggctaaacaaattcaatcatacactctcccagagtatggctagccagaccctagcatactcgagcctataacccctctgaagagggtcagtcaatcaagtctctacaacaacagatacttctgtgtaagcatagttggatcaaatcaagaacatgatcaagcgcctagctggtccaaaaccttcgaaccttgagctacataggttgaggggatcattattcatgacatacataaataccttgcccttgcccaagttcaagatgccaatatggaagatgtataatgggatagaaaacccactggaacacattaagtacttttgagatgcagctcgatctccagaagattattggtgatgtctaatgttgcatattcgtagcaactttgtcagaaacaactcagtaatggtacttcaagctttccccaggaagattcgattcttgtaatgacttttcccaagaattctacacacaattctcatcctcaaggcttataccatcgtggctagaagaccttgttaaagtcaaacaacaacaaggagaatctttgaagaactacatcgagaggttcatagcagaggccaccaaggtcaaagggcttacaaaagaaggccggtatacgaccatacaggggggcatcctcccactgagcgacttctagaaagacgtctaaaggatctcaactaacaacatgaaggagttcgtcgatagagctcatggctttattaaactagaagaagatgtctgacaggcccagacagggcaagtcaacaataggcagtcacaaggcatcttgtagtcccatgacttgccaggtgcctaggcaggttccagcaactctgtcaaaacctccagtggcaagaacactaagagcaagcacaacaataatagctctggaagaaacagtggcaaaaaggggaagttcagcagttctcccacaccataaaaccagaagaacaaggaggagaagtacacatgcttcaccctcctgacggagaaaactgaggccatatttatggaaactcaaggaatccatatagaaagccctttcccatcaaaagagagtttggaaaaagggacatgtcgaaattctgttggttccataacgactttgaagagggagattgaattcttcataaggaagaacaatccccacctgtgtctttatttgtagaacaatcagactcaagcataaggtgcccaaaatggagacccaatgccaccactagtggcaggacacttaggggtcttcattggagaaccatatattgtcggcaagaccaacaaagctagggagtattatgctcagacactccatcacaagcccaaaagcaacatcctggtagtctaagaaaaaggctctaagcaaccaaagcttggagagcacatgatctctttctcagaaagagatgctgcccaagtcagttttttgcacaatgaccccctggtcattattgcactaattaagaatatgattgtggcaagatgcatggtggacaatggagcctgctccaacattcttttcaaatcaacatatgaaaagataggctctaactcgctgatttggcaacctgcagtcaagtgatgtgtggcatcttttgctaagacatcataccaaccaggtatgttagattacccctgactgttggagaaaatccaaccaccagaaccctgatggcgtattttgtcgtaatcgatgttccctcaacttttaatcctatgataagtcgaacagccctatacgaactgaaggtggtaacatccatctactacctctaccggaaattcccaacaagggattgggtaaatgtttgtgagcagaccaacaacatgcccgtcactgtgacaactgggccttgtccaaagacaagaaagagaagatgcctatcaagagctctgacaaagagcccaataaagggcaatgaagtctagcccaaagcggggatgcagacatagatcctcactttgggaatcctacaaatagcttcaaacctatagaagagttagagggagtggaagttgatcccacttcactagctagaaaactaaatatcgggaaaggtttagtgccagaaataaaataattattgataagatttctaagggaaacctgaacctctttgcatggtcacatggagacatggtttgaattgacctctccgtgatgactcatgctctcaacattgatctaaatatctaacctattcaacaaaagaggagattactggacaacatacgcacctaagtcctcaaagaaaaagtcgagaggctacgagcccatgaactaatagcggaagcattctatccactttgggtatccaaccctatgctagtacctaaacccaacaaaaagtggagagtgtgcatcgacttcaccaacctgaacaaagcatgtccaaaggactgctttctgcttcccagcttgttgatgccacagttggccataaaatcttgagtttcatggacatgtattcaggttacaaccagatagatggatccactagattaggagcatacaagcttcatgacagacataggcctgtattgctacaaagttatgcccttcaagctaaaaatgcaggggtcacatatcgaatggcttgtgaacaaaatgttcaaacatcttatcgaccgaaacatggaggtgtaagtggatgacaggcttgtcaagttcaaaatggttgggggcatgtggaggacctagatgaatgcttcaaaatctttcgcagctacaacatgaagcttaacccgtcaaatattcttttggggtaggcttaagcaaattctttggcttcatagttaatgtcaggggaataaaagcaaactcaaacaagatccaagcccttttcgacatgaagtcgcccacaaccatcaaggatgtacaaagcctaacagaacgcattactgcactaagtagatttgtgtccaagtctatagacaaatgagtacccttctttaacattctcacaggcaacaaaatatttgactggatagagaaatttgtaactatttttaaggagctgaagaaataatcagctcaaccactggagttgtcaaagcccctagacaatgaagagctaggcatgtacctagcagtcacaaaatatgttgtgagtgttgtcctcacaagagaaaaagatgggatacaacactctgtatgctacattaacaagagaccgattgacgctgaaagtcagtacccactcatggagaaacttcttggcttccagaaagctaaggtgattcttcaaagcacaccctataaaggtgtacaccgaccaaccattgcgacatcttttacaaaaatttaaagcatcaggctgactactcaagtgggctattaaactttgccagtttgacatcacatatcaaccaagaatggccataaagggtcaaacccttgcagacttcttggctaagtgcacaaaaactcatctcttgaaatatctcaagagccagagaagaagcgagagcaagagcagcagcaaaaacctatagaaccaacatggaaactccatgttgacggaagctacaatgaccaattatttggtgtaggcagtgcccttataacacctggggaaacagttgcacggagcaatcaaatttggattcaaaacctcaaacaacgaggctaaatacaaaacctttatagtcggcctcaagctggcacattatttagtgactctcaattagttatgaatcacctcaaaaaaaaaccatgactttgttgtcaagaacatcatatgttcattcagacttccacaaaaatttgtttcagaaaatggaaagcaatttgatagtgacatactcactaatttctgttgcagacatggcatcataaaaagcttctgtgccatggcccatcctcaagcaaatgggcaggtaaaagctgtcaacaaaaccgtcgaggacaccctgaagaagtgccttgaggaagcaaaggggaacttacttgaatttcccctagagttcctatggtcgcatatgactaccaagaagacagccaccgagcaaactccattcgctctagcttatggctatgaggcgatgttgcctatagagctggtgccatcgtctcacaggaggagaacctatgaccaggataccaataacatcctactggcagaattccttgacgaagtagaagaaagaatagatcaaggcaacctaatgctgcaggcctaccagcaaaaaatagcaaggcacttcaacaagcaagtgaaggataagaaattcttcataggagacttggtactccgaagagtgttcccaaataccaaagatttagaagcaagagtgtttgaacctaagtgggaaggcccctatacagttacagagataactagtaagggagcctataagttagaaaggtacaacgagaacatggagctcattctcctaccaagatatttgaatggagaacaccttcgcaaatatgatcagtaaccagcttacaaaatactacttagcagtgttagttctatacactcaacattagagtgtaaaagatatagtacccacaaccttttttggcgtggcctcccaccattcttcaatagtggcctctgctatgcaagtcaagcaagggtagcaatttgatatctagaagaaaaactttaaaatgtaagcttgtatattaaatttatgtatgttgcgcagcaacaaagaccaatataaaaataatgtttatgtcgaaattattgtgtctaaaccacttactaaaaagattaactttttaaagttattattttttcagttccacatgcgtatattaggtagcaccctaagaaaattcccaggcaaggtctatgacacttggtgaattgtaagtgatcaagagagcgtaagtctacgagctcacttggagcgcacccacaccgtaaaatggattgaactagagcagagaacttatgcagagaaattttaaagcttaaaataagatactaaacctgcctcaggcatacttcagcttgacataaagaaacgtaaatcttgatattgaccacctggctggtcacacaatccatgataaaaagcagcaaggccaaacaatagtaatgttcaaaaacagagtgcctataggccaagggtacaaacatgaaggccatgaggctaaaattaagtagtgtttaaaaagtaaaaggcccacaggcaacacaaaacataaaatgtctatactataaaaccataatgttgaaaactaataagttgaatctacatgtgtgcatgtgtaggtggggctgaagcagaagctgcaaatttcggatcactggagtgtgggtcggccatagcctccacaagctggccagccacctccttagcagatgggctgaccatctcctcatcatagtgctttgaggatgacccctcaggctggacagtggtctggtccgcttccaacctactctcaaacatcactttcccttgtgtagtgtactctctaggaaagcatcgtcacccatgtatgaaagattagcattgggtttgcgcagcttaaacccatagatgagttctaaagacaagctgacgtactcatcccttatggcctactagccataaagggatgccctcagcttctgttcacaccccgtgaggtcagtctccaacct

SEQ ID NO: 219147 - DNA, 7420 bp, Cannabis indica
gaaaaaataaaatgtgagaaaaaattttgatgccgcttatacatttggagccttaaataaataattggaataagaatcttgtttggaaaatagacaaacaacagtgttgaaaaggctatttttatgcatttgtcaaacacaacttaatattttaagtggtactttttatcccgatttttaaaaactgggataaaaggtccccatatatctgggccttttaattgttgggccggctacacatataaaatgaacaattaactttgggaaacttacaaaaatactagaatttgaggtaactttacaaaaatactgtcacaaggaaaagtttacaaaaatactgtgtttttataaaacaccagtagaacaaaaaacagaacaactcaaaacactagtaaaataactaaaaaatactagtaagaacttaacacagtatactgcagtatgaaacttataaaaaaacatagtaaaaagtaaaaaataccatggtgtatctctcagctttagtccttccttactcttttatcttcgcgcatcatctcaagctagcgacctttttctagcgaagaatgagtcaacagagttcggattcaagctccatgccctctgaaattaccatttgtcttctttttcttttttttattgagagatatgtgctccacgtacgtcctctaatctcgttttacttctttttttttttttttttctaaaacgctcatcaactctttctccttctctctttctttaggtatgaaggttcgtggtcgacggattcgtggtttttcatggtggacaaagctttgttagttattagttttagtataattttttttgttctttttttgttacctttaatcccgattattataggaaaatcgggataaatttatcccggtttttaagggaaaatcgggattaaaaatgggtttttatctcgatttttctataataaatgggattaaaagtgatttttatcccgattttttaaaattaagaggatctaattggtaatttttgcaaaacacaagtcgtatttacctattattatccaaaggtactatgggattgataattgtgataatatagttgttttacactaagacggatccaaaaattgaaactctagctgggaatgtcaactttggtgctgggtagagaccctaggcacctaggttgacttctggggtgttatttcgtctctttttaggctccaggcttcggacttggattcttcttgtcttcttggttcagaatactgaagaatggtgagttgaaaataaattggcgggatccaacacccattttagagttctcaataaagtcaacttaggtataaggctaggtaccctaggtcgactgttatgactcgggactacttaacttcataaaatttttttttcttttcacgttaaacattgatgttcacgtcacctaaatcaatttcgaagtaaacacaattcatgtgaaataaataaataagctttattagggaagtcaaaacattaatatacaccgaccactatagcatatgacattttaagaattacatagccatagaagaatgtgttccactagcactttttgcttctatgatcataattttctcattatgagtacataaagtaatatataattaaagtcgatgtatatattaattatggttgtttttgcaaccatccatcttgatttatgaaattattgacattgatcaacttttgcaactctacattcgttaatttcttctcccatgttactcttttagacatgtgagcacctggtccttcacaccccacctcagcaaaagtgattaaactcctaccaataaattaaccaaaattattacaattagattaatatatagcaaaaaatatattatacatgttaaaacatcatttcttaaagtcatttcaattatatatatatataaaatttaaataaaatgtagggtaaatattattttagataccatgtattttgcaaaagttactaattagatttttttgttttgttaaataaaaaaattgatcctatattttccaaaataataaaaataagactatgaactcaatttcaacaattttatttcttaatataactaactttaagacaatttctaacagatacagaaaatgtaactagttttgtcataatatctttagattaaattatttttaaattttattttgacaaaaaattaattcaggatcctatttgtacaattttgaaaaagacaaggttaattttgtcatttaacaaaacaaaaaatctaattggtaacttttgcaaaacacaaaattcaaaatgatatttacactaaaatgtatagtataactatagtatataatattatatacacaatgttcatacctatcaagttaatattaattaagaaaaaaaaagtgtaaataaataaataacatagatatatcttactcatgaccaatattaaaccaagcatcccaaccctgaggggatataatattatccatataagtgttgtaatagaggactgtggcataagctctgtatgctcttcctaacaatgcttcaccatttccaaatattttgcaaccattgaacacgaacccacccatgtcactttcgctatttcgcccttgagcggtgatgtaagacaacccaatcctacttcctgttacttctaaactacaactctgtatattcaaaaatatcgttaactattcataagacatcacttcatatatattgacagtaatgttatctaataatgaaattattattacttgataaaaggattgggcatcaccccaaatgaaatcaattgcgccttgaatgtggcaagattcaaaatagtgacggccatgagcatcagacaatgtgtcttgtagactaatgaatccacagcggtaaaagcttgctttgtcagctgcgatcatggctgctggtgcccatgtaatgtttctcatgcttcctttttttcccatattatatgtattctgtataaatcaataattagtaaaattatattttaatattattattattttttaaaatcatattttttttattattattattattagatgcgtctttataaaaatccacacaaacgaaattatattacatatctcttttaatttgatgtttttaatttttattctattttttgaaatctattatgcatgtttacttttttttcaatcattctattctaccaattttacctctatctcttcacaataatttttattattctttaatcaaaattttgctcaaattttctcacaaacctattatacaaatctacattcatctacaaaaaatataaatctattacattttatgtcttaattatgtaagtgtgtgtgagaataatttgagtacaatattcataaaattaaaaaaatatatttaaattaaattttattttaaaataaatttagttaatgtataaaaaaaatatagttcaactttttctttttaaatatgaccacttgagctagtcttttattattaataataatgatttttattataatattaattatttaattaattaattaaaagaaccacctgaaatgtaatatcatgtgccataaagttatctgctaacacagtgaatgttgtgttttgcataccactgtcacctccagcatcaaaacttatggttgttgtgtctttaccttcaccttcaagatctatgtattgcttgtcttctgggatcaaaactttctcactatacatatatagtgaaatttatatcatccaaaatggttttataatttaaaaaattataaaataatgtgagttgtatgataactaggttcatctgaaaatcaatataagtgaaatatagtctttgatgtattataaatggtattaattaatttctatcagttaagctcctaaaaggctaaaattacctaagaaaaagagaaatgatgatcagttcaaacccaaaatttgtaagtagtgtttagttgggaaatgaaaatatatgagtaagaatgagaatgagaattggaataaaaatagaataaaatttaaagtatataaaagaactgaataaaaaaaattattaatttttttttcaagtcttgcattggaatagtctttccctccattttaaaaatgaaatagttattaaattaaaatggtggaaaatttatttattaaaataatattcatacttttaaatgcaactaaataaataaatggaataaaaattgtttccattctatttcattatttccaaccaaacatccttaataagtaataccacaaggttatacctaaaaaaaaaaatcattcattattagtggaactcttaacacatcatatatataataaaatattgtttacttaattgagcaaatactaatttttatatgaataattaaaaaataattaaataccacacatgccattttatttgtttatttaataatttaaaaataataaaaacaaaaatatgaagtcaatgtagtactaatttacaagtatattgtgaaatatgattcaaataattaaataattttcataagatatatatcactgtgttattattaatatattatcacacgagtaagaatataataatattattacatacttgtaaataccagctttaacatgaatacgaatccataactggttgttgctgggtacagaatcaatggcttgttgaactgtaataaaatttccatggcctgatttatcgacaatgatggtcttcgaaacgacattattaagggtgtcgtatttcataatgtttgaatgtttaatgtcacgagaataagtagtcgaagcactacatagtaaaagaatagtaataatattaatgaagttatgatactgaagaaatttcatcttggtgaaaaactttaagaaaggtatacaggtaataataatctatggttgaaaattgttgcaatacaatttatatatttatattacttgagaagatgactaaattggtaattaatttatttgattcaaatatggaacaatttttattgtatgatttccttacacagcatatttatatttggtatagtatctgcttgaaaataaattgtatgttaggttaattaaattataagggactaattaagaaaatgaagatatataaaagggaaacaaaaattgtgtgtggctatatatagttaatttgtttcataaacatatgattttcttcttgttctagatattttcttaataagaaatgtccttattatcatttttgtttgatacttttatacaaaatacttaaagacatttttttttcattaatacatattttatatttatacggattatgattgatttttttatttattattttttaagaaaataacataaaaaaatataatgtaaatgtagtagtaatttgaaaactgcgtatacaaacaacataattgttaaaacaacctcaattgtttatatatttgttaaaagaaatttcgaactgtaaaaatattgtaaatttgtatttttataagtttttttttttgtcttttttttttttgatgattatgaaaaggaaaattccctttttgtttcttccatgtgttgatacttaaggtcacgtttggataattaaattagataagattgaatagtattaaaaaatagtaaaaaaaaaagtgaaggagttaatgaccatttgccaacaataaattcatatggaataaattggataaatattgttattcaaaaaatctgataagatagggtaaatagtattttttgataggtaacatgcaaaatggcacaaaaaaatcatcaagcaactaggcaatatccaggtgggttggacactagacctaacacccaaccaggaatctgcacccatgtgactacttttgaatggacaaatgatttttagggtcgtttccttcaataacttaatgttgttcaagaaaatacactgaagtcattaaacaaagcaaaaaagatgacatgcacattatcacaatgggctagtgttggtcccattgcttaggcaccctctaggttgtccatgccatgatttcgaggtgtataagttaattttgagactattttacgaagcggtgcacataatcaagtcttgaaaaaaaaaagtataagaataggtctggagcaacggttaacttgtgttttactgagcattttacctaccttgcgcccaagtaggcattttagactttgactgagttttcatcaactttcatgctgtaggattgattttcggatatgatttcctacttagtcatcaattggcatcatacagaatatcatgaattgactgactcacaataccttgcacccaacactcctagcacccaacatggtctttcactattgttgggtgcccaactcttaactccaatttcatctctagcttcatatggatttcaagttatattttagcatggaaacaaggttcttaactagcaggtatgatttcaactcaaagtaaggagtcatgaacccctataggggaatgtccaaacctcagtgcctaggaaggtgttttcaactcccgaatgagtttctcacatcagtttaccttgattcatatcaactcgtatcaaatcatgttatcattctagttgttacgaggatagatcattccagtagataagtcatcttggagagcaggtcattattcttaagatgacatatacaaagttgtcaagtaatttcaccaacacttaaaagctctgatacctcatcagagatcaacgatctacattagattcaaatatcaatggctaacattcacttccaagtgcaacatatcttgtccgcctatctagagccaagattaatagatgtcatcaagccttaagattaatgatcaagattgaagtctactgttcaaattcaacgatcgagattgagcaaaaggaaagattcttagaatatgctattttaaacagttatttattattaatttttaatataaataactttcatactttttctataaataagtggctagattgttcattattttataagctctcatttaagcactcatgttatgctattagaagctctatgattttctagcgcttagagtaccatgcgctttggtgcaaattttgtaatcagtttttaactttatgcttaagaaactcaatggagtctcgttgtgatcttgagtagatgtaggctattaccgctaaaagggatcgaactaatataaagttattattgttagagattttataacaatggaagaaaatcaagatttattacaactctattgtaaaataatacaaggactaaaataagagattgattaaatatatgttacaatacatatatatacactatatatgttacatatatatatatgaaaggtagaagagaagattacaacacatgtaatataatatatgtatatatataacaagagaataatatatatctataaacactcactcacaacctt

SEQ ID NO: 219148 - DNA, 3334 bp, Cannabis indica
atatatacaatttgagaaaagatttaatgaatctcaaacaaggcaatcaatctgttagtatgtattttactaaactcaaaactatatgggaggaactaaccaattttaggccatcttgcacttgcaatggatatacttgtggtggagttaaaaagacttcaagatcattatcatatggaacacattatgtcttttctaatgggtttatctcattcttactctcaagttcgagggagtattcttctaatggatcctttgcctgaagtaagtcgtgtgttccaccttgtcacccaagaagaacaccagaaaggtaatgtttcaaatgctaataataatgctaatcctgccatggcctttgccttccaaggaaataaaaatgcaggacagaaaacagacaatcaacaatccaagaatcaacctctaaagcgaaataggccattctgtacacactgcaacatcctgggacataccatcgagaagtgttacaaaattcacagttacccacctggtttcaacaagaacaagtccaaagaatccagtgcaaatcaagttcaaattgctgatgaaaatggcagtaaccagcaagaaaatcatgcattgcttcctcaaataaccacaacacaataccagcaattacttaatctgctggcatctcaacaatcaaatctgaacacctccgaaccaagcacttcctcaggtaattcaggtatcgttttgtctcataactctgaatctcctttggataattcatggattatggattcaggagcaactaggcatatatgctcaaatataaagatttttcaatgcctatataagatctttgctgtcaaattgattctgcctgacagtacatgtttctatgttaatagcagtggaactgttcttttgggtaacaaaatcactctcactaatgttctctatgcacccaaatttaaatacaatattatctctactagttgtatgactagaaatctccctgttacaattaaattcacttctaatgatttttatattcaggacaatgccaaccagaggatgattggaaaaggtagcaatgtcaaagatctctacatccttgatactgcaccagatccttcccaagttctttctgtgtctgctgaaacttggcattctcggcttggacacttgtctcaaaaacgtttagatcttctcaaggatactttgcattgtaatacctctcttttgtataaacataaaccttgctacatttgccctattgccaaacaaaggaaactcccttttggaaatagtaataaatcaactgaacatgtttttgatctcatacattgtgatgtttggggaccttatcacataacatcacacactaatcacagatatttccttactcttgtggatgatcattctcgatttacttgggtttatttgatgcaacataaatctgatgctaatattgttatccctcaatttttatcttatgtgcaaactcagctcagatgcatctttaaaatattcagatccgacaatgcaccagaacttgttttcaaagatttatttgcaaagcatggcatcatgcacgagttcacatgtgtggaaacaccagagcaaaatgctgttgctgaaagaaagcatcagcatctgctcaatgtggcccgtgccttatatttccaagctaaattccccatcaaattctggagtgagtgtatcatggctgctgcctttttaattaacaggattcccactcccttacttaaaaacaaatctccttatgaatgtctttttcaagaaaaacctgactataaccatcttagatcaataggttgtcttgtttttgcatctactctatctgctcacaggtctaaattctcacctcgagccagaacgtgtgttttcatgggctatccacaaggagttaaagggtataagttgtatgacatcaacaacaatcaattttttttatatctcgtaatgttgttttccatgaaaatatatttccatttcatacacttaatactgattcatctaatattgatcctttctctcaattagttcccccaaatacgaattttcacaacattcctgcctgtgattaccccacagatagcaatattagatcttctttgcctcaagaggtacacgaagacatctcagcacctgaccacagtaatgaaggcattccacaacctgaaatcaatgatcaagacactctgcaacatgattcagttgctgatacttcaatatcagctccttcagataccctacctcagcctactggttcagctgcttcaacatctgttgctccagatccatcattacagcctaccagaaaatctagcagacatactaaaccaccttcttatcttgaagattttgagtgttactcaattcttcaagatcaatcttctactcctcactatttatctaaatttttatcttattcccaattatctaatccttacaaagcttttgtttttgcagtttctgctatgagggagcctcgatcatatcaagaagccatacaatttgagcaatggctgagggacatgcaacatgagctaaatgcactcatacgaaacaagacatggagtgttgttaaactacctccaaacaaaagagcaataggatgtagatgggtctataaaattaaattcaatagtaatggaagtgtagaaaggcttaaagctcgacttgttgcacaagatacgcaacaagaagggctagattttttcgatactttttcccctgtggccaaaatggtcacccttaaacttttacttgctatttccactattaaacaatggcatatcttgcaactagatgttgacaatgcttttttaaatggtgacctcaatgaagaggtctacatgactcttccaaaaggtctaacactagattcttctaatactgcagaaacaaatctggtttgcaagcttcacaaatcaatctacggactcaaacaatcctcttgccaatggtacaaaaagttgtctgatgccttactcgaagaaggcttcaagcaatcccaagctgactacactttattcactagaggctccaacgacaatttcattgctctccttgtttacgtcgacgacatcatcatcactggccctaatcttccccttcttcaccaattacaagcctccctgcaccagaaattccaactcaaaactcttggtgaccttaaatactttctcggcttcgaaattgcacgtgcaaaagaaggacttttcatctctcaaagaaagtatactcttcaactccttgaagatacgagctttcttggcagtaaaccaagtaaaactccaatggaccccaagcttcgactagacaatgaacatggagagaccct

SEQ ID NO: 219149 - DNA, 3711 bp, Cannabis indica
cagttagcattctatcaagctatgatgatccaagtcaagttcactacggagcagccaagtaaatcctcagatacttgtgaagaacaaaactcaatggtatttggcacgaaattacaaatgattctaaactgattggctacacggatagtgactgagcaggatcagttcacgacatgaagaacacacttggatctggaatattttcttgggcatcaaagaagcaaccaactgttgccaaatcatctatagaagcagaatatattacatcagctatgactacaagccaaactatatggcttaaaagaatacttgaaggcataggagaattacaagaagaagttataatgatcttttgcgtaagtatatcagctacaacaatggcaaagaatcccgtatttcatatagcagaacgaagcataaaagcatcagatattatttcatcaagaaagtagaagcaagcaaagaaatagagctcaagcactgcaagactgaagaacaattggcagatattttcacaaaggcgttaccaagaggaaaatttgagctactacgagacatgattgttgttataaaaatttgtaccaatgagaagtattagagaatgtgctacacttttttaaaacaccttagtctagaaatttctacacatttgaagaaaaaattctataagaaccttaagtaatttctagataagatttaatctggaaaatattagctatgcgaactttagatgtgtattgatacaatttcttctagtaaaagaagaatccagaaaatataattctaaccacaaaatgtaaagagtaagcaactataaatacctcatcaatgattccaaattgtataaccaacatccaaactattaataaagcttactactttctcatacaatcttcttctaagccaaactattatctactatatacacaaccaactgtaaagttatcaccatactaccatcatcatcatcatactacactagtcactaaacacattacaaaactatcacctaaaacaaatcacaactatttactttattctaatttaacaaaccatcaattactgtatatatcaaagaaatagtacgaatcaagaatattcaaactaactaaccagtactgaatttacaatccacattattagtgtttcaaataaataaactaataatctagtaatctaccttattacctcatattgcctaatttttacttttcttcctatgatctttctgtattaagatagatactgtatatctttacattaacatgcacgagaaattgcactagaagtagctcatgacattttaggtaatttagttgagatgaactagcaaataagtgcgccactagctaatttagctactatattgttcatttgttctaacatatattatatgcatatatatatatattgattataatattattccttctaaaactataggaactgagtagccaacaggagtatttgaagctaaaagcacgctatgatactctgctaaggaatcacaggttaattcatacacagtactagctattaattagctgcaaattaaagatgtttatttttgtaatattgtaagcatatatatgcatctgatgttagttatccaccgtagaaaccttatgggagaagaactaggaaacttaagcagcaaagagctcgagtcacttgaaagacagctggatacgtcactcaagcagatcagatcaacgcgggtatttatttatatataaatatatatatatatatatatattaactcatttataattatttatttcatttttatatatagaggaaaacccagtttgaaagtgccaaataatttgtggtttcatgaactaactctggactttgttttgtcttataatgtagacccaatgcatgctagatcagctcaccgatcttcagcgtaaagtatgaaaaatatgctttatataatatgccacactatatatatgtttacataaaaaaaaattgaaattttcttacctctatatatgtatgcaggaacattttcttaacgaaactaacaagaacctgaaacaaaaaggtgataactgtacatcaacattatttctaactcttcttggtcatatatatatatgatttgatttgttgtgtgtatatatatatatatatatatatgtgtgtgtgtgtctataatgtgtttgtggtttgcagctggtgaaggttaccaactaagttcactccaacttaatccaagcgccgatgagtatgggcggcaatctcatcaacagcaggctcatcatgatgtgttttatcaccctttggactgtgagcccacattacaaattgggtatgtactaattaataatcctatatatataaagtactaattaaaactcactagaaatcaatcatggaagtaataatacaatacattttgtgtgtactggttgagtaattaagtaacataatgggagaaaaagaaaaaataaaaacatactttatccaaataatctatttaataatcgtcgattttgacatttatatatgattaattacagatatcaggcagatacaatatcagttgtgacagccggtccaagcgtgaataactacttgccagcaggctggttgccttgattgatcatatcaaactaattaaagggaaaaaagatcataatagtgatcaaatcaatatcaccatgaaccatggcctacttaaatgggatatggttgatttcttttgttaagtaatatccttataattataatttgtgttagttattttgccaattaataataaaccatatatatatatgaatatatattagttggccagagttgtatgcatatgcatgcatgtcttatatataaccacccagcaccttaaatttaagggcactattattgtgattgtgtgtgtgtttgtattgtttgttttagaactaataattttgtgtgtagtgtactctaaaaaattcagtacgtactcaaccttgtgtatgatttttttcatattatttccaattttgcagtgaatatatatataactatgttatataattttattatttttgaactttcgaatatccttctaataaaatgaattcaatttttacctttctgtgaaataactatttatttccaaaggaaaaagtagatactccactccaatgtgtaaaaaatttaatcttgttatgaaatattatttatgaagtctaaattaccaaattaattatcactattaatgtttggttgtatttttctttattacattaatttaatttcttattattttagtcatatttttatataaataagagtgcaccccattagaataaattattaagaaattctcatttagtttctctttctttatttaatttcgtcttcttttctttttatttattttatattattttataatacgttataaacatgagtttctacccaagtcccaaggtaaatattatattaaaggttttgaatattgttttaaggtcacgatacactaaatatatatttatatatatacttattaatttgactgaaacaatttcaatttttttttcttttttatgaaaactctatttttctaggtaactttaattttttcttaaggctaaagtcatccaagcaatctgttcatcttgtactttgatgattaattaattagctcgatctccatccatgtacagtagaatctctatttaagaatactctattcaagaataacctc

SEQ ID NO: 219150 - DNA, 3505 bp, Cannabis indica
tttttaaattttttcttacgaaaaaaatcaatattgtagcaccataccatgacattaatccattcgggtctaggttcaggtatggtttcgagtctaggatccgaatatgtgagcaaaatataaaatataatatgttagataaaaaaaattatgtttgaaaattgaaaacaatattttaatgttttctattttctagtttttaaaactcaatttttaaaaaacaatttttaaaaaattttgtcaaacgacttttattagtttttaaaaactgtcaatttttaaactgtaaagccaaccaacctctaatagtgtctagtattttttgatgcgttaatattgttattgaaccaactaagtatctaaactcatctaatttaatataataacaagaataatcatttaaaatcattaagccgcactaatactcatagtaaatacatgttggagtgaagaagtgagtattgaaaaaagagattgatttagtaagggaagtaagtagactgtttttgggcaaaatacaaataaagagtcaaatactctgaccagctcccgaacgcaatccccataggccaaatgttatgtgggtcccaaccacctacagatacttataaaaggagatctttttttatcttgctctccggtggaattattccacgcgggtcctggtgcgtgatttacaaacgcgggggttggtgctttgctttgctccgcgacaaaattaataggtggtggccattaataatatggagaaattacattgaaatttattaaatgtttataaatttatgatttactttttttaatttatttgggccaactttcaataatatttatatttttgttatattttataatatattttagtattttcacaatttaattatatatatatttttaatagttacccttcttataaactcgttaatataatatagcatataaaatctcatgagaatttattaatttaagcgtgaaaaacttttagggtatcggctaacatgatctatataaccatagcaaaagttgatcattcacgatccattgttcaaagacaaaattctcttacacaataaactgatagtaccatctagttttgttgctaatggtaagagctccaacaattcggatagagttcccttgaggtaaccatccaattaaggcccacgaacaatggctgagaccattatcttctatagtgaaaagttgttaggatccagcatcaaaatgaactattggtttagagtgctaccgaattaaggaataatcacacctcaagctaagttttaacttgtgaaaggtgcgattatatctccaccagttattgaacctctatatgtggatacaacctccatgaatctcgacgcacgccaaaaattgagctctaataccaacttgaaaatatacataaaatagtagaataataaatgatatttgctcagctcaattcgagattaaggaggtgtgtttcattatataagaaaactttacataggaagattctagataggtacatctgtccattgatagctcatgattggcatagaaatatttataacagaaaaaagaatattctatttaataaaaaaaataatattgttgaatacaacgtgctgagttgtccctctactcttcgtttcaattgcagacctattgggtcgttgtgtcattttctcaacaattggggtccatcaccataggatcacgaagttcagtcgacaaggatcttcttgtcaaaaccatgattgccgattcaaaagtggattgaaaatcgtaggttgatgagagctagaaaatgcttcaatgctcttaatgaaggcactaaaatgttgacctcgcttttagccaacgacactctttaaagtaatagtaattgtaaagaaatcaatgatgaaataagaataataaatgacacacgatatttatagaagttcaaccccttataacagtaatagcttactctcttttagttgtattaatatgaagaactattaagatcacaaggtccgcccaagtgagtttctcgatacgtctcaaaaagtgtacaaatatttgtgtagagcgtctgttctcaataatcagcaacaataaatgtgaatcttgatattaaagaagataaagtagtgtgggaactcaaatgtgaaatcccacgaatttctctacttcataatcaaatcttgcgaaaatatagatttaattgagttataattgtagaagcagttaagaaaaatatctctaaagatcttcacttagtgcgtacttttagttggcaaatggcattgtttgacacacatgtctaatcgacgtgctataaggtttggcgatctattcggatgatagtcattgaaggaccaaattttaatcaatttggcttagactctatctgaaaagtataatagagagatatgctctgcccaggtcaaaatatgttcaacacgtgtcactttgctgagtgccactgtgacaattagtagtcctgtgattgattcataaagggaaatacgaggcaagctaggactgaacattttggtcggtttgacccggacctggccaacccacccaaacccaaacccgacccaaccaacccatttgtttgggaaaactagttccttacaggcgggtcgggtccaacctgatcaactcttttgggcgggttcaggtatgatttttattaatctgcaggttcagattggacccataccagcccacgaacccgaatgacttttttttttttcatctagaggtaatctattttttttaaagaaatttaatatataaataagataaaaaaatgtatttttttataaaagattttagtaaaaattatatgtatatgtgtaacaatgaaagtaaaaattaagatataaatatgatttttttatattttttttctgttatttattttatctattagataggaaatgaaaaatttaaaattatgtgtgtatgtatataatatattagtgtataactattattttataaatgcttataccttatatcaaatggacattaaatttacaaacactttttgaatttaaacatttttatggatatagatatatcgtatgtagggattgtggtggacaataactagtacggaatgtatggatggactatagagtatggactttgaatttttagtcacaatttagttcgatacttttagtttttgttatcatattcatcattcatgattttcacgaacaatgaacataagttttacttatattattagatttacgtttctactttggatttgaaatgtttttttttctctgaagaattttggtgatataaaaaacattgatcgagagttgatctgaccaacccaaactcgtggacccgaatcttttgaacaggtgggttcaggttccattttttaggccaaaaacccgcgaactcgaaacccagccaacatgctgatgttcaaccttagggtaagctgtgcaatcccaattagggctgtacatcggtcggtttatactatatattttccaacccgaca

SEQ ID NO: 219151 - DNA, 4980 bp, Cannabis indica
ttttgaatttattattttttgttttatttattttaaattgttattagaaacataaaacaacaataatttatttattttgttattagttatattaaataatttaatattaaaagtaatcaatccaaaataactgataaatacacttttgcagattgaatttgatttaagttattatgcgaatttgattggatctaaaatataaaatccacacgaaaacatattagattgaatgaatacccctacatgtcaaagttcaacatataaaatccctaattagcacccttctcataaaatatgcacactttcatatgacttaaaccagctttcaacactaaaaacttttcacttttgtataattatgtttcagcctttactagaaccaaattagctaaatttgcataaatgaggtgtttgttaagaaattcgttagatgaacaaaattgcacaaaagaaaagaccatttaaatatagtaaaagcaactaaaataatcccaaaaagtcagtcaaatgcatcaaaatttacatttctcagggtgaaactcaaagctacttctatattaatataaataaaccaggcctaacctattattattcatcaagaccatagtcctcaccaaaatactgatcaactaggccatttgccatgtttctaaggtcttcattttcatggaattgaaacctttccatggcctcaattccatcctcttgctcaaccagctttggaccctctctgtttggcattcccctcaacacctgcatacaatggccggccaaatcaaccaaaacactcatcaaacattgttgaaaaataattcgaattttaacttgaatcaattaattttctgtgttcccttacaagttccatgaattgaagcccaagttttgcagcctcggtatcagcagaccttaccaactcgataaaaccagatagggatcctccgccaacgagtgagaccaaatgctccacaatcagcgttggttttccatcatcacctgttggagcaacacagaggttccctagcacatatgccacttcttttcttatatccaacggtgctgtagttagaagccgtgctagtaatggcactgcctcgctagaataaattaattgcttgtgctctatagaaccagcagctatgttggatagcacccaagccgcttcctgcattaatgttgaatcttaaaatgagcatactttcactaaatgctcaagtaaaagaaagatttagtcaaaggaaaaagaaattgccttcttcaatactcggtgttcgctcttcaaacactttactagaacttctactactttatctgcagatgttatgaagtagcaatgacgtgagtatgataataagaacaaaatgtgtgtttaatgtatgacttctgatttagcaaacaagatgcacttcacttgcctgtgatttctcgtcctggaacaagaactgcaaaagtcgtgtgcaactcgccagcaacaagattacctaaacctcgtagaacctagacaagataccatgtataaacataatctgttaactggaccgaataccgaaacaagaatacagttcaaatccatttagttttgattgttacaggaataagcaattgcagactacttgctgttgccaatctttccacaagaagttgaagaacatcgctcctcactaacataccggtagcaacatttgaaagggctgagagatatacaacaacccatgctacctcagttgccaattcatcatccctaatttagaaaggagttgattatactttagatcctttgtctaaacataagattttcaggatgaacctcttatttcttgacatgattaagtaaaaatgaaaagaaaataaccatcagcaaagaatcttcaaaccttcttaaacaaatcattaatttcaaggcagtcaaaatccacttacgcttttttcaagtgtcgaatgattgcatccaatccccctacaactctaatgagatctgttgctgctctaggatctggtccctgcatccaagcaaagcaatatatagtttgaaagaaatatttgattccacaacaataccaagataatcccatccccaagctcatcaaacgataaatgcataaaaatttgtgagaattgtaggatgaaagattgggcaccttgattagatttgacaatgcccaagcagctgttctcacggttgaacctttgtttggaagcatcatccttgcaagaggttgtaaggctccttgagaaagcaaaacttttctcagctcttcaccttcaccggcaacatttcccaatgcccacgcgcactgctcagcaacaggcaaggagctcttttctacaagatcattgcaaattaattacaaatcatggcaactgcagcaacaaagttttggtttaatgaagactggaataggcacgttatggactttggaagagaagcatgttttttattaacctccaagatgagcaataagcaagggtagggcaggcaacaaggctttggtttcttcaggctttcctgctgctatgtttgtgaggcaccaagctgcttcatgcaactgcaatacaacaaggaaaagacagataagcatccagaaaatccgtaggaggctttttatatataatagaactcttctcaaagattatatctacagtttttttctcattaaattttcttttcttcaactaattgtatagtattcatttagttcatgtaaataaaaaatttattactgaattcacaataaggtaaattcaatgaatcatcaaaggtaagagaagatactcaaacctgttcatcaggagatccgaatgaaagacattgtacaagaatgggtattgctccagctccaagagcagtttcaataggagggaatacggatttcgacaataaccgccttagctcacgaagagcagtcactctcttttgtaatgcaccttttcccctatttcaatagcaaagatgacttaacttaatataacattgaaaagaaaaactcaaccaaaattaagtccacacttctaattaatggtaacaaaataaatatttttcaatcatgatcacgtactgatatgaaactgcagacaataattcttctactgcagaaaaagtttgagtctctaaatttgatagctcttcatcaactaccatcccctcatcatggggtagattatcatcctcgccacttgtaccaactctgcataagcgcttagcacgaaccagtgattctcttctttctttcccaactgtaacggcgtgttgacgcctgcgatttgcagcaacattcccgactaaccgaaaatgattagcaattcactcataaacaatcccatctccagcaaatttaacagcagaaatgtaagaaaattaataagtccaagtattcatatttggttcctgggcataatagaccctcttttcatcttctaaacaacacacacacacacacaaaaaaaaaaaaaagtctttcttttctaatggctaaagtgcatacaatagtcaaatacactcacttgctcatccaatactattgccccctaaaaatgcaaaactcggtcaactcctaccactaaaccccatttcaaaaccccagaagcaaacaaaatcaatatggccataccctttttttttcttcaatttaaattgctttcgtgattaaatttggcacccaagaaacccagataaacagttcatttctcttctaattctatagcttcaaccattggtaaaacaacttccccaaacaaaaagaaagaaatactttccttttctttccatcaccattttacctcaaatttcttggcacagaaagctcaaaatcaaacgaccacatcctaaattgaattcaaggcgacaaggaacttacctgatgacttaatagattctcttttggggataaataaggcatcttcagacattgcaagcaaagcttcaaagggtttcgagtttaagcgaaatctttaactctattcaaagggcttcgaaattgcttcatcaacctcggtgtttcccgtcgtagtttcattatatttagccggcgtgaacccaaaagacggaaaacgacaatttatctggcatacgacacgtcgataaaacgacaataaaatagtaaaatacaaattttccctaggagtaattagcaatttcccctttgaacttttgacaaaattgattttggcccctaaaatatatagcttgataagaatctcttgaactattacatttacagaaatttagtccgtctgttaggttccgtcccattattccgtttaaatgatgacgtgtctttatcaattagcaactttgcccctgttatcccatttttcgcactatgacatggcagcacatcttggtgacacgtggaccttattttctacatctgactgaagggatgttccgaacaaagctcagcatacacctgcacggacaatgtcttcccgactgagcgaggtgggtgtaaacgattcgaacatcgtatcaacacttagcaattccaagacttgcatcgtgaagcacaaaagcaatctctataagtctgggatcgtatcacagagatatggcaaactgtccagatctcataatctatgtattctaaatatgtaatatgtgttcttaccaactatagacattgtaagcaaaagggaaacctttcctcaagcatttagccctataaatagtgatccattctcactgatataggggtcgaaagaattacttgagagaaatctaagagagcatactcagcgatttcattgtgagagcttcaagagaggaaacactgtattctttgttcttgagttaatacaatccaaggggagtaggctattaccgaactaacggggccgaatctctttaaaatcctatgttctactgcttatagttcatacttaattatattttctattgcttactatttgactcattgtcgttggctaaaagcaaggtcaacattttggtgctttcattgagagcaataatccaagtttgctctttgc

SEQ ID NO: 219152 - DNA, 1773 bp, Cannabis indica
ttttttttttttttgcattgagacattatcctttacaatatcatacttaaaaattagagactaatggtgccaatctctaaatatatttaaaattttaaaatagtatatttagttatatttgcaacacggactgtcctggtgccggttgtcgtctcaactggctcaatattacaagtggattattgggcctacgatctacaagcataggcttcattatagtgtcaaatttattggtacgtccatttcttattatttttttaaaaaataattaaaaagaaagaaaggtaatgaacagaaaatataaagttcatcatgatcataatagcactactggcttaggtagagatattattgatgtccagcagtatcaaagttaatacatatttgtttggttggaagggaacctgtaggccacattattgcgggaatccctcgtgaaactattatgataatatataatacttacttttacatttttatttttcaaaggatatataaaacataactttttttattttaggatatgtaatacttaattagatacaccacatttaattttatttatttatttatctttttgaaagcaatacaccatatttaattaaactccatagaatttgcattgtgtactgttgtcattatgttttttcttctaaattattcaagtttgggttagctagctatgtttatgagaacccttattaccgtagtggttggtcttttacgcttggtactttattagaggtggtagttcaatttttggacctaatctttataaaattttgtatattatatgtttctagataatatatagcaccatgtgaagtttatttgtaaaataaaatgcaagtttatttaattctagtatgaaactttattattttttttttatttaaaaaattaattgatacataaattttaaatgataattaatttaatatataacaaaagaatcactaaattaagagactttgttgagctatgttaaccataatgtttgatgagatatgatatccacactattaatgaaagtaccaaactattgacctcaaaaagtgatcaactgacagtacagtcgtatgggtctgatgcttgacatgtgttacaacaaatagaatagactagtaataataaacacatagatttgttataggtaggatctgatatagctctctataaggatacaaaacatcaatcaataggtagatccctaatgagagagtgagattttcttagaggcgtgtgagagacgaacagaggagagagcccttgggggtgtctagtagagagagagaaagagaggctaggggtttttacttagagtgatttggaggcttagtgacttagggttaaggccttatataggaggcctaaaccctagattacaatttaaattcctatatatttgcataggtttttagataattacaaaagactaaagtgccattgaacctagatattatttagccattctattgggcttttagggcccaatttgcagtccatgacttgctgtctacattttgggctgtacatagaatcctgccaggtcctacaagcgttgacatgtaagatgctgcagaccttgacctgtcagatcctacaggccttgggcggccagacctcccctaaaggtctatgggcggtaaggtttaacctggcaggactctatgtacaacccaaagtgtggataggaagttatgggctgcgaattgggccctaaagcctagtagaatgatcgaatatatctagattcaagggcactttagtctt

SEQ ID NO: 219153 - DNA, 4626 bp, Cannabis indica
ttcgaccagtactataataataataataataataataataataataattataataataataataataataataatacatggttaattagtagtgattttctactttgtgttgaattactgctagacaaaaactcaaaaataataataaagctaccaaacattgacattaaatcattagtatgggtagttggaataataataataataataataataataataataataatatattattattttttaattttgtaggtatttgggttagaagttacatttcctaattttgagttttttttatgtattaagattttattgtttggatatctctatatgcccttagaattaataataaagatgaaagaaaatccttgagtaattttgtaaattttttatttttgttattttaatctgtatcaactatcttttaaaaaaataaattaatgtggaagaaaaaagacaatagtttataaaacgacaacttttaataaaaacgacaaggatagagaaacgacaacattataggagatcgacagagatttggaagaaacgacaaaattggataaaaaatgaaaataaatgacacgttttgagataaacgacagcaataagaataaagaaccgacaaaatccttaaaagctactatacatatggaaaacgacaatagttgatagaaagaagcgacaacaataaccaaaaacgacaatagattacagtatttgattttttttaataaaaaacagtagaataaagaataataataataatacatgactagctattcaaattttgatgtaaatatatagattttttatgaaaataataataataatatatagatttttgtggttaaataattttattattatatatgcataagttttttaaatctcaaatatgttgaaagtagttatagtcatgtggtataattgtgttcgaatcttaacacagcacacaaagtttgtaataacaacaatggtgagttgattaaaggtttcgccctcttaagatcaacttgacgtggattgtgccatctataatggagattctcgaagtcactactaataatctaattataagatgatctgatgtacctgacatacggtcttacaaaattattaaaatgactaaagagataagaaagttggataaaaatgaaaataattgtatgacatatggacctttatttgaaatattggaaattttaagtagtaatttagccacttaattgtgattaggggtggacccacataaaaataaggacaaatgccctagtgaaaaaaagaatcgaaaaaaatgtatttatttttaagttaattaaactaacttatattatataatagaagttaagagttaaaattttttataagaacattttttattttttaatattaacagtttacatcttgaacaacctttttcatattaattaatttgaagaacatgtgattccacatgcatctatattatccttaacacatctcttgggtttttctgtttttttgttttgttttttttttttgtttggccatgcatatatatatatataatattgtataataaggacaaaacaaatattaatatatatgatgaaactatatattttgaagtaaatttcatcaccacatacgtagcttatctattttgtgaggtcatcaaattatgtgcaagtcttttaaatcaaattctccacttgagatctaattttatgattgatattcctgcaaaaaaatatattttattgtcaataaaaacaaaaaaaaacaaaaacatatctcactatcaacttcttacttaaagtcaatattttaatactaatttttgtttttatatatagatttattatttagtaattaataagtataatacaaaataataatatatatatataccagatacacagcaaggagagcttttttttttattaaaaatattattaaaatatatgagacgtaatattaaatttctctaataataatatatttacgtaaaaaaataatattcatgatattacttttgcattagcatttaaataaatatttttgaaacttaatttaaataaagtgagaaacaaaacatgaatccatataaagagtaaaaaaaccaaaattataattagaggtaaaaaaaataaataaaataacttttgaaaatttttttatggtgtttttcattacttgaataataactttattttttttttaggtgccaatatacattgtatatatttatttataattattctttaaacttttaaaaatttaaaataatttacaatactaaaactaatatttttataaaactaaaaatactatttaaatcatattttctcaatagtaaattattctaattaaatttcacaaacaaaatattatagtgtaattgatttttaaagttgaaaactatctataaaatgaaggaaccatccaataactttaatatttaaatacaattttattaaatatttttcatgtgaaaattattcaccacaaaaataataataataataataataaatatataataataatatatatagtaacttctttctttcttcttcttcttctataaataataccaaaaaccttatcaaattactttcattcaaaatctctcattttttttttcttatcttaaaataaaataaaagaaaaaaaaacagagaaggtaaaagccacgcgccgccgcaacagaacaatgtcacggccaagatttcttcttgtaacatacccagctcaaggccacgtaaacccatctctccacttcgccgatagactcgccgctaccggtgctgacgtcaccatcctcaccacaactaccggatactcatgcgtgtcacgtgccactggtcacgtgactaaatactttgaaaaaccccataaccaaaacgacgccgtatcaggcgttatatcctttgctccgttctccgacggctacgacgatggtttcaaaccggaaaatgacgtcaaccactacttggctgagatgaggcgctgtgggtctgaagctgtgagaaacgccatcgtttcgggtcgaaacgagggtcgtccgtactgttgtttggtgtatacgattcttattccttgggctggacttgccgccggcgaaatggggttgccggcggtgcttttgtggattcagccggcgatggtgttcgatatttattattattattttcatgggtatgaggatgttataagggaaagtagtaaacgacaagaaattggggaaacgacaatgacattcccgggattgtcgttggagtttagttgtaaggatttaccgtcgtttatggacgcaaaagatacttatttgtttgctattcctctctttcgagaagaatttgagatactcgagaagaaagttaggccgaaagtcttggttaacactatttacgagttagagagggaggctttcgaagctgtagaaacccaattaaatttgattggaattggacctttgattccgacatcttttcttgatggaaaagatgtcacttctaataatgatgactcgtcgaaagagaagtatattgagtggcttaactcgaagcctaaaacaacagttgtttatgtgtcgtttgggagtatggcaattttatctgagcaacaaatggaggaaatggctaaagggttgttagaatttggtcgtcctttcttgtgggtcataagggaaaatgtgaaagacaacaataataatagcaagttgagttgtagagaagagttggataagcttggaatgatagttccgtggtgttctcaaatggaggttttgagtaatgagtcagttgggtgttttgtaactcattgtggttggaactcgacgttggaaggtttgacttcgggggttcccatgatagggtttccccaatggtcagatcaaggaacgaatgctaagttgattgaagatgcatggggaactggggttagagtaaaactcaataaagatggaattgcaggaaatgaagagattaagaggtgtttggaattagtcatgggaggaaaagaaaccgtagcgggggatagtgggaaggaaagttgggtggaaaagagaagaaatgcaaagaaatggaaggatttagctcgagaagctgttaaagaaggcggatcttctgataagaatctgaaagcttttgtaagtgagatggttgaacaaagtggtaataagtaatatcttgaatcttctaattaaaatgttatttgcatatcttaaaagatatgtttacacaactatcattaaatgaagatgttaattttaaatttcttgatatttttcaaattttgtgtgattttgtccttgaatctttcattacatgcatgcattgtttggttaaaaggatcaaaaagtaaaaaaaaaaaattaatagaagacagaagttaaccagttccataaattaatgaaattagtttttacacatataataacatatttattttttattgaggaaacttgtttctatgtgtctttatgtaacttttattgatttataaaactgaattttggttgttattatatgaatgaaaataattaacaaatacaatcaaagtcagatacagtagaacgaacttaagaatactctattcaagaataacctctaatttattataaaaaaatcaagtctcaat

SEQ ID NO: 219154 - DNA, 3771 bp, Cannabis indica
tattaccctagtgattattgattttttaaatgctatgccatgctttatatattgatttgaagaattatgcgttcaaggcataatttggttagactcggtaattagaacggagatgaactgttctaaggccttattgtaattagacgtgtgagcgtaacacgtgggtctatgccacatagacataattaggcatgtgagcgtaacacgcaggtcgatgtcaaatagacaataagtgtaatggcataaatatctatgtgatatattttattgtgtatatttttatttatagtgtcttgttgggcttggcttacgggtgctctattgtgcaggaaagggtaaatctgtctgtaatcaaccatgagttcggagcttggcggtgcttgtacatgttcaggccacactagaccaagcaggttgggtctaccagtgattgtattttgtaccttcgaattttgctacttaggtcagcaagtgaaattaacttgtaatattttgtgaaaagttttgtggaatcccaagacatattatcattttgttttgtgtgtaaagtttaaaattattacaagttatattttcattccactgtaaataaagtttaaatttttctctcttacctttatagtaatctcgatttatcaggatctgggttttattatcggttgtcgtagcgtgcctaattatttgggcgttacacaagtggtctttgatgctctttcccgatcccatcttgaatgagtacattttttgcttcaagtgtaatcgattggctagggactttgttaaatacaaacttttgagctttgaccagagagctgcagttgtcttctctttcaaaacttctctctaaaccttgtaaataaggcttaaaatgatggcactgtgagctttgtccaatacctctgtcttttctttctatgtcaagcttgcaagaagcttatcttcccctaacaaagcagattgaatccctttctgcacaagcaggtctctcatcttcaccctcctcaatccgaaatgattcttcctagtttaaattctccagatcaaacttagcaatacccatggtgacagattttcaccctaatcttgatccaagatctaagattgtcttctttgaatcgtcctcaccaactttgataccacttgttgagaattaattcttgatcacattcactatttttagccaaaagcacaatgcacttgacataccaaaacttaagaaataataaatcagaagttgaacaaacacacggtctagaatgaatgaataattcctctattttattcaaatgtgtgtaatagttacaatttgagaatacaatgtatttgatgcttatttataggcattagtgcatatgttataaatttttataacagactttactgccagtcaagcttgccacccctagctaactaaaactaaccaaaacggttaggagaatgctaagcactagactagaaattactctaacactacacaaagaagagactgaattattagaacagctgaaaatggaagctaatgaggtagaaaattttttgggacaagcactgactataagtgttaaatctcctagccattgttaaacataagaaaacagagaaaagaagaagagaaagaaagagagccaaaggtagaagatgaaagaatatctcagttattcattgatgaatggaagagtatttatacaagtacagcaacacaagaatcatctaacaacaaatgacatcagcaacaataacagaataacaaccactaatagttagttgtgtaaccaacataatagatcagtaacaactctgagctatcaatcagctctaacaccacccctcaaacttagaagtaaagcatcttcaatgttgagtttgtttctgaacatagagcacctttgattcgaaattgctttagtcaaaccatcaaccaattgatcataggcaggaacatgtttgatttgtaccatcttgttgatgagaaccttctctcgaaccaagtataggtcaagttcaatgtgcttagtcctagcatgaagaactggattttgaattaataacactgtacttaagttgtcacactaaatcgtgggaggttgaggctgctaaattctaagttcagaaaataagtagtgcaaccatgactttgagcggtaacattggccacacttcaatactctgcttctgtacttgaacgagagactgttggttgctttttactcttcaaggtgatcaagtttgagccaaagacaattgcgaaaccagtggtggagcgtctatcatcaggatctaacgcccaatcagcatcacataatgcaaccaaatcatatgagctaggtctttttaagttaagaccaaagttcatgttgccactaatatacttgataattcatttaacagccatccaatgtgtagttaaaggcctttgcataaactagcaaacttattcacactcaaggagagtttaggtcttctgatattaagatattgcaatgctcctactatggatcgatagtgttgaacatctaccagtggttccccctggtgagctgataaacgaatggtacttgtcataggtgttggagaaggctttccatcagccatttgagctttcacaagtaaatatcgagcatattttgcttggcagagatgaataccttgatcaatatactgaaccttaattccgagaaagtaatgcaggggacccatatccttgagagaaaattgagaattgagagtgacaataggattagtgacagcagtgggatcacttcctgtaacaattatatcattgacatacaccagtaccaaattagtagatgtatgagtgtgtagtatgaacagtgagtgatctgaattagaggagagaaaaccaagggatacaagactatgctgcagcttgttaaaccaagctctaggagcttgtttgagtccataaaaggcattgttgagtttgcaaaccagatcagcttggccaggaatttcaaacccaggtgactgcaccatgtacacctcttcttgtaattctccattgagaaaggcattgtttacatcaagttgcctgttgagagtttgagctccatttatccctacaccagatgcattgtttccagcacagcagcaacattatttcccacagccaccatgtttaccacaaggggcgggaaatgctctgattgttggaatatgttttaccaggatctagatttactaccttgtatgttatttaacatcctaaatatgaatttctaaaacaatgtaaataaatacatataaagtttgagaaaccttacagtaggtgtagcggaattaaatgactccttccactcaaatttctaacccttgtatcctttctgtagcagagtatcaccaagatctgagcccgaaactccttccttgtgtttggattcttcacagtcttacacactatgattgaggaccaacttgatgtgtgtgggcacttactcaatcactaatggctgaatttattttgtgaagaaaggcttagtgttttgaaaattcaagaggaagaagaagaaggaagaggtctcatcagaaagctaggtttttagctttggaggcattagttggatgaagagaccatagccttccttttatactatcttcaatagggttagggttgaattattgggaatgaaaaattgataaaaatagggtgaaaaaccacttgatggccgaccatttaatgtgccccgctcaagtttgggttttgtcatttttcccaactattttacatatttttcataaatacaactttttaca

SEQ ID NO: 219155 - DNA, 3873 bp, Cannabis indica
atatgtaattattttttgtttatagatttttaaagggaatatttgtcttttttatttttaattaataaaattaaaattagaatgaattaaactaggaaaaggaaaggtattccctataaaaatggggggagaacctttccctttgttttctctcaaatttgtgtgggtcctactactttcacctctttccaaaatttagtaaacaattgtatgggaatcaataccataccattcattctcattctctttaagaaacatgccataagaagtgaatgaaaacaatgcttggtttgcttcagcataatactaatataaatgtatgcatacattttctattatttgaattgatattgaattatgttactttctatttcgataatttgtagatagttctcgaaagtagtttgaagcatattttgttaattaattaaattgcaagattgttaatactaatactagtttgggctgcattgtatttatactattaatgacaaaatatattgcatacttaatgacaaaattgcatctttagtataaatgtctgcagatattgctagcaaccatggtagagatggtggcggtgaggacccgccaaattctactactatgccaactttttgcgagtcataaggtaatttaattattttcttaatattataattaaattaacaaaaaaaaaattaaaatgtgtatgttaatgtatttattttggttattcacttgccttatttaatagctcccacgcagaagaaaggtcgtggttctagtcttggtctaaatctagagcagagaagggagaaagctaaaaaactgttgcctgttgtgtttgatgaaattgcaatgaagatagtaggattagagaatcaagctttccctcgcatgttcggaaatcagatcaaacgattggttcctggatggtacaaagattgggcaagtgtccctcaacagtacaaggaccaagttcttgccaaagcccgagtacaaatatttataaatactttaaaaatgcattataatagataattattaattttttttgatgcaatattattatcagctagatgataatttaaatttcgacaaattatgcattataataaatttgttattaatttttcttttgatacagtattattatcagctagatggcaatccaaattatgacaaaattatggcgattgctgatactgagatgaagacaagatatagagatcgtaagacaaaaagacacacccatttcaaagagtattataaaggaccagaggacatcgaattagctgtctgtcaccccccaaaagaagtcaacatagaacattggagaaagatatgtgagttatttacgtctcctgcgtttattgctagctcgaaaaaaaataaggagaaccaaaagaaaatgaagtacacaataacacaatggacaaaatcgttgggagaaagacgattcgaattagtaagttttatataactcaatttaataaagtatactaaattacaaattttctaacattctctttatatttattaggaaaaaccttaatatattgagacatggagagaagttcacataaagaaagcgacaaaaacttttgtcaacaagaaagctcaaaaagattatgtaagttacctaattttatttttataatgttccatattcctctcattcatatgcttgaataatctagactgtatatgtgtgtgtaagcttggataatctttttgtagtcctctttttacatttaatttatgtggaaaaatgtggtacagcccgaactccaaacctttatatatagttagaaaaattagttaaaaccatagtctccattggcaagtctttgggtcttaccctgatgttaatttaaagaaaaatgttaattatttagtaatgaagtatctgatggttgttagaaagtactaactaatgaaaaagtaaaatattctatatgttatctaccaaactggaatgttattgttgaaattaaaatatgttttaacgtttgcacaccaagctaaattttgttcttgcaaaataatgatcgataatatgcagtagttgaaatagtagcattattattccatttcaaaaaaaaagaggaatgataatctttttgtagtcatcattttgctgttcagattttagagctcttttgtaaaaataagggagaaacaattggattacaaataatagaaatgaaggataacccttattcaatatgttttgtatcacatatgcaaggttataaacaagctagttagtttgtgaatgtttaatatgtagtacatgctttcttttcaataggttgctcttatgttttataagtctcggttggtggtgccaatctatttcttttgatgagttaattaaatatgtcttgattttcccactcatttctcttttcaaataccaaactctctctttttgatggttttgttgtttatacttaatagatgacatttttggtatctgtcttgttctttcaatataagaacgattgaaagaagcatatgaagcacaatctgaacagcaaaatgatgactctagttgtcatgcttattcctcagttgatcagatacaaatacttcaacaagtgcttgacgagaggagcgattacaaccgacgagtgggacgcaaagtgaagggtcaatccacaactagtcacactcagtacttccaaaacacaggcaatgcctactcaagaatattcagaggaaatacaaagattggagcgagtaatagttaaattggtccagcatataagtcaaaaggagcattttccaccaaacaatgagatagatgacttgattcagaagcattcaactaggaggcctgaacctcaaatgtctggagatggttctggttcgtcttttcgaacttcgggaagccactccaacatgcactcagctttttcgtgtcagtggcagatgccacgaccaccaccatcacaacaacctactcctacaccctatcttccctaaatgtatggtcccccatcatagcatcctccaccgccatatcactatccttacatgtatggccctcaaccgcaacaacctcagtcgcaggagcctatgccgccttatgtctatcccgaacatagagacatgcctagatcttcatcttttcctcagcagatgccaccatattcatggcctatgccgcctatgtcgtcgatgccacaacagaaatcacaaaatcaacatagtgagagcggggatagggaggatgaagaggcagatgtaaccagataatttttattatatactgattataattattattattacataattattgtaagcttccatcatctgtgtctagatatatttgttagaagtacttgataataatctagctccataaactctatggttgtactgtagagcaataataatagtactcatcaacaaaatcataatgaacagacccttattaagtactacttgtttactactaaacatggtcttgttttcttgtgtttagatatatttgtttcacttgaaattgtgacaataagttgcataattatatcatcttaaactgaaactttagcttgtaggtgtcttcaatcttttgtctaactaaacacttatttttgttttaaatttctttcacttgggtatcccacccgatgagtgtgcttatatttactgatttcgatgtaggtgctgataggaagttacttctgccgcctggattgtctatgctactagaccagaagttggatttcgatgtcggtcattattatcgctttttgttgaattaccatactatgtacattgcttgatacatatggtatcctgaaactggaaagtttgaaaatgaattacaccaattcatttgatatacaactttttctttgtaattgaaattcaaaa

SEQ ID NO: 219156 - DNA, 3168 bp, Cannabis indica
acatttttttgtaatttatttttatttttaaagtaatttttattatataaatagttaaatcactaaaaatttaccacagctactgaaggttccagaataaaaaaaaacacaagaatgaaaggaacaaaattttttgtaatttatttttaaatttttaaggtaatttttattatatttaaatagttaaactactacaaattggccatatatacatcagggtatattgtggcacatttgaacgaaaggcagagaggttatacaagaaaaaaaaaggaaaggaaggaacaaaattgtttgtaatttatttttatttttaaattttaaagtaatttttattatattcaaatagttaaactactaaaaatttgtcacgtgtacatcagatactaaggttccaaaagagggaaaaaaaaatgaaaaagaatggaatacaatttttttgtaatttatttttatttttaatttttaaagtaatttttatatatttaaatagttaagccactacaaatttatcacgtgtacattagagtttactgtggcacataacaaagctttttaaacgaaagggagaagtgaggtttggagggttttattatcaaaagatttatgtagttaaatgtcacaaatggtataatattttttttttaagggcaagttgtatagttgagatagttttgtcataatactcctaaaagtattatacaaataactaaataataagtatacaatataaaataacatgaaaacttcaaaagacaatatttttttgtaaataaaactgtaaaagtatctaaaattctgtatttgttaggttgtgaatttcatttcccttacattgttttcattaaagtcttgattttcttttccaattcatctttggctaattttgtttttgtttcttacaaactattatggctaagaaggagaattgtaatcaacaattgaatcgggacgatctggctgagtcgctcaacaatcttttcactagtgtgttttccatggtcaaatcagaggttcaggtttgtgttatgagccaaacaacactatttgatgatagaatcaaagctcattcccattattcacttcaaaaaaacatatatttatttttggtgtctagggctcaaacaacaatttagagctattggaaaagatgaatctccgaatagcagaggaatacaatggctatggagacgtggcttcgggacttagggttttcgtagagcaactgaagtccaaaagctctagttttgatgaatatgcgcggcaaatagacaccatagagcaacaagtgattgagtttgaggctgtaatctctatgcttgacagatatgtatctatgttggagtctaaacttctatctgctacttctcatactaatccatccctttaatttgactccaaaaaatcttttatagtctgtttgaaataggaggaatgagtattcccttttttctttttctaatcttttgtagagtttggcattgcatttaatcacaatttttctttccttaccagtagattgatttctatttcatcgtgaaaatatagttaacttggaaattggcattgaagatggggtcattagcaatttgactttggagatggaatcatgagcaaattgtcattgaaaatatagttaacttgaaaattggctttgaagatggagtcatgggcaaattgacattggagatgggagttaagagcaaaatatatttacacaagtgactgtttcttcatcaacacagaagtccttttttagcatttggataatattatcggcaaaatgccactcatttggtacgttaattaattattaatagaagacataataaatatgagcttgtgtagtaatatgtatgaacttaggttaggttgtattgtggtaaagtcgaagttagggtctagatcagagttggggctatgctttaggtccaagctcgaggcatagggctcggggttgaggtttggagttcactgttgggaccgggtttgtggtctggaccaaagttagatagaacgaactactatatatttttgtgtgtgttctctattttacatagctatttctaatttttatctcgtctatacatacaagcgagttggttaattttttgtgtcaacactttttcactgtcaatatcggtctagttcgatgtatagctgatacattcaatacaagtttactttactaatgttttgaaaaaacattctacttatctaagtgtaagtaaaccacattgttgattattaaatccagtaattgataaattgtgggactaaataatttaaggcatctaatcatgattattttcgctgtgtagacaacactataatcacgaataacaatatgttcagaatttaacataatttgtatattaaacataaaatcatgaaagtaacgtgtgacctgtaatattctcttttcttgaaagataatttttaattttcttcatacttagtttattttatttgccaatagaaataatttatcatttgaatatttttgagtttagtggagtatcagatttttttagtgaataatttttttttttatttcgttttgttttttatttttttatttttttattttgagggtgtgtataatgttagataaataattaaattattggagataagtatattaactataataatattgataaatatattgtagcatattatttaatttattattattattattattagacatacataatataatagtatgtacctgtgtttaattgttttatatatttttttaattttaattgttctagggttaagattagagtttggggatatataaaaaatgcttatgagatatctttagggtttagagtgcagaaagaaattgaagggaggaggcaatgcgtatcgagcgacaccgaaattgagaaaagtgagattttgggtttttatattttgagagtttatgggctgctctagattgtttctttgagttctatagcctctcatagagcttttgaaatgtgattaacaggtttggaaacaaaccattcgagaccaccaatgtttacgttcaaaaatattgttcttgaaacgaaccatgattcgaacacgtttaagttgtttcaaagatcaaaggaggttttatttgagaatatgggaccctaaggcttggttttgatgtaagaaaacgaagct

SEQ ID NO: 219157 - DNA, 3176 bp, Cannabis indica
aattaaaaaaaaaaaaaagagatgaactgttgtcacttcatgtgcataaattgggaactgctttacttgttgcaaggttacattaaattcagcctaatagtttttttaaaattagtaaattactgatttcttatttctgtttttgtaattaaatggcctttaattaacttctcttaagataagtagagtaaaaagagaatctaatccccgtaaatttaatattatccatctgcatgtttactgatataattttttagcgaaagaattaattcgtattataaaataccatatataaaataaatagattagttttctcattgtaaattagtattgagatggaactccgtgcaactttatcccaaattctaacagtgtgttgtgctaacacatcatatatttattcgtgcttttcaaaatacagatatcttgccatgccacaaaaaaatataggttgtgtcgtggtaatacttttaaaggctacgcctagcacaacacatgcccagtattttcgtaccgtgttcggattcgtgtcgtgatttgcttgtgtcagttcgtatttcttaaacacgtaagtccatttttaaatctgagttcgaattagtgtttactttttcaaattttttttacattactaaactatatatatatatattttatagctttagttatagttatataacttctcaacaatattttacaaataatcatatgcaaaaattattagtgtttactaatcattttcaaaaacaagattaagtaagagcttaaaaaatttaagcaattgattaaatgattgagattgagatttttgcgtggttcggacgttaaagaaccctactccacaagtcgatatattgacatttagagcttgaagaaccttagtttttgctatagtattttcccctctaggtttttcttagtgaagcagaaagcttaaagaatatttctcataagtgttttttcttgttctctttacatgaagggttaaaggggtataaataggcttatacttgggtccgagtatacctgtgacctgctagggtttctgtgcaaaaatgagctcactattgggataaatacattaaatacatgacattaaggcccacggaaagatgctatatctttggggcagaggcgtccatacagttggggacccatatgatttggacaagtgtcacgcacgggtgctacagtagacaagaatatcagagagtcaccgttggacaaaagaagtgtacatccccttgcggtacatgcattaccatgttctggtagaggagacaacatctaacggggtgggcctaggcattagaaaatagccacgtcaccgtatgacggcctttggatgcaccttaggcttccccgtccggatgcacctccttaactcttcggagggctctgttcgctccatctcctagaaaggttgaaagggtttctgagagcgggaggatcttatctcaaagggcgaggctcctggaagtgtgaagggctggggtctgcctctagtttggactgggccttcgcatgctggaaggctcgggccactgatcacgcagatcgattacatctgtaacatgtcacgtgtcactcaaccggaaacatggataacaattagcattattagaattttttaatatttacttataaatactaaaatttttatatatatcacgctctataaataaattaatatataattttaattttacatgttttaatagtttaaattatggaatcataatatattcagtattatatttaagttttttattattattttaacattgataaatatatatttattattattattaataataaattttagggttttttaatatgtcgtgtcatggcttgtcgcatgtatagtgtctttcgagctagtctattcatgtttatgtggcgtgcttgttatgcttcttgtgttgtgttgtacttaagcatatattttttgtgttatatcgtatgccaatttgtagcatcatgtcgtgtacccaaacttcttttttttttttgtgcctagtcatactcgtgattttcgaattcttataattttatgtggtgtcaaaaaactcaaaccgtatttactagcaatggtgaaatgtaaagacaaaaacaaataaattaacaaactaattaaaacaaaacaaaactaatgtagcatactgatcattttatttgttttatgtacttattcttattttgggtcagattaatgctaattactactaatatatacacataaaattactcagttttattacaaatagattattaatacccaataatgtaatagaaaagggaccctcaaagacatgcccacatcatctccacccaaatccaagctgtcataaaccaaaagcagttcccattattatgactacaaataagaccacgatccgctcttatgatcctcaccattaacatttatatacccactaaaaactactaagcacccagtactgttcgtcaaaatgcctcatcatcaccaaaaatttctcctcctcttcttcttcttcctcgtggcaaccacatcccacgcccacaacatcacgaaaatcctagccaagcaccccgaattgtcgaccttcaaccagtacctgagccgaactcgcctggcggccgacatcaaccgccggctgaccatcacagtcctggcggtggacaatgcaggaatgtcatctctcatctcaaagggctattctctctacaccattcgcaacatcctctcactccacgtccttgttgactattttggtgcgaagaagctccaccagatcagcaagggctccaccttgacttccagtgtcttccaagctagtggtgccgccccaggcacctccggcttcgtcaacatcactgacctcaagggcggtaaggtcggatttggtgttgaggacaatgatggtcatctcacttctcactttgtcaagtccattaaggagattccatacaatatctccgtcattgaaatcagtcaggtaaatattatatatttgcatatattttgttaatgtgatatgcatacatacataatttttctttttttttttttttgtagggagcatacatacataaattatatacatgagattctgtcattttaatttgctaaagtaacaatacaaactacaaaactaaggataatagtcaaagtctttagagtttggaggaca

SEQ ID NO: 219158 - DNA, 4124 bp, Cannabis indica
aaagaatttgtggaagccaagcaccaggttaactctcttgtctttactcaaaaatcagtatatcgattctgttttcatggtagtggttacctaaacattcttgaattacttttcttttcagaatttaagtgatggaggtgaggaagaaatactgaggaagtttttctcacagatattatcaattgcaaaacgtcatgaatgctacaatactttgtggaaagtttgctgtgatctcaatgattctgacttgattagaaatctaatggtaagtatatggttatttattgttttctagtatctaatggcaataaagtggattaaaaaaaaaaacgaaaagaaaaggaccaagtccagtatgcttctgaagcattggcagttaatgagtcctcagaaattctgctacttttatctctaatttatctaccaaatggtcactataaactataaagaacaaaaatgtatttctctctgtgcaaaaggcgaatttgtgctgcctacaattatccaactttacgaaatgcaaggggatttcattatagtaaacatttctttattttaatcatcaaaatacatccaatctttttaatgtctataggtagttttgttctgttatggtgtctgtgagtatgtatttagatatttgttttgctagatagaaaaaaaattcatttatttcattgttcttactcttcttacacttgagacagttgtccaactttccaaaatgtaaggggattttgtcatagtaaaatttctttcttttttgccattaaaatactatcaaatctattttttttttttaaaaaaaacggtaaaaattagttctattgctggctttattctgttatggtgtctgagtgtatatatctattcttacacacacacacacatatgtaaaatatttgtgtattatttagaacaaacagttcattcttttattgttcttactcatctgacacgtaatccagttttactaataccctgtaatagtgactgattagttgtgtttatttttagtacttaattgctgaaaagtttttcaatgatttgttttatagcgggagagcatgggacccaatggaggtttcagttattttgtattcaaacaattgtacataagccggcagttttctaaacttctaaggcttggggaagagtttccagaagagctatctatatttctgaagcgtcatcaggatcttctttggcttcatgaactgtttcttaatcaattttccttggcttcggaaacacttcactcgttagccattactcaacaagaaagcacaatgtccgaagctgaagaggagacagaccccagctatgcaaatgtggtaaccaatttacaggacagaaagcgtcttttgaatctctcaaagatagctgcaatagcaggtaattgcctctatggtcttctttgttcctatgagttggttcttgcagcaattcaaattcagaatggtttttctgtgtgattttgttttctacataatgaagaaatgtattaatttgttggaagcagtgttacttgtataagaagccttcaaaaagaaaagttaaagttttacttattatctatatttttcttttataatgttagattatgcttcttacttcttgtgtttatttcttaagtcaagtatgtgcttcattaatagaataaaatactagcatcgaacaatcttttctgtttgctatttctctttctattgtgcaagatcttgattgttgctttatgtctgtgttggtgattgggctttccaatacttaattttttcttatatctgaaagtctacttattggcttaatggataggtaaggatactgaatcaaatgtgatgcgtattgaagccgatttgaagatgttaagattgcaggtatattaacaaattcgattacttatcttgacatttacttaaaggatgttgttgatcgttcttcatttttctatcctatgattggtttcagatctccagctatgaatatttatacatatatgtatatgtatatatataaatagataccagcattttcttaaaatggtcattgactcatagtagcctgtcttttatagtctcgtggcccctcttgctttgttcttgcatgtgcagtataattactaggtgcccaaatgaacttcaattgtaggttccaattctttaaaatggcagtatttcatgcagcatcttctttaggatttatatagtaacaagaattctaacaaaccttacacaatctcctacacaataataatagtagtaggtagtaatgactacattaaaatatttttgtttctttttacatttctatttagctcatgtattgtttttacttgtagtcatctaaagctttatgcatgatatttaaaaatattatagaaaatatttaaggggttattttggaaaatactattttaaatatttcaaaattggaataaaatgacttccagaagtggtcattccggattaggattgactcatttaggtggaatagctattccattaaatgattatttctgctgtttatttctgcatcttccacttttgatcattacgaatcttatacaaaatcatcacgacattttgttctttttgcgctttgacagtacattaatgtctataaatacctgatttcaggaagaaataataaagttcctgccggacgatggtacaaaacaaactgttggagaaaggctcctcaatcctgaagaactcattaagctgtgtcttgaaatgagaagcccagagctatccttgtgtgcttttgatgtgtttgcatggacaagctcttctttccgtaaggccaataaaacccttttggaggagtgctggaggaatgcggcagatcaggatgattggagcgaactttatcaggcctcagtcattgaggggtggacggatgaggcaaccatgcagaacttgaagcataccgtgcttttcaaggcttcaagcaggtgttacggaccgctagctgaaacttttggggaaggatttgatcaagtcttgccgctgaggctggaaaccttggagtctccggccaagaaagatgcttcagtagaagcaattctgatgcagcacaaggactacccggaggcagggaagctgatgctgactgcaatcatgatggggagtatacaggctgataccaatgaagaagaaaaggttggtgatggtccttctccaatggagtgacatttcatcgagttgattagtgatcataatggtaacattttgaacttttcgtatgaattacctttttgcttctaacactagctcttatagtcgaagatgttctctaatccaaagtacatatgatttcttagtgaaaacaaaatgaaagaaggcatgttgtgatgtcccttataataagtccattagctatacattttttcttttgaaagtgtaccaaataccaatgttgtgtgttatgactaaattttgttagaaaagaaaagttatgactaaattttgggtttaccttgttcttattctttaccctagttatttatttagaattgctgaaaaaatgtgttctttaggccaacttgaatggaacggcaaaatgtcaaaattagagtgatttggatctaaatcctttccaatggtactctaaaacttattttatatttggacttgtctatagtgtcccactaatattagtatgttagtgggaaactatactaaaatacaaattttgttttttagtattatttaatacagaataattaatatttttgtctccaaaattttcgacactacttgatttttgtcctaaaaaattctctctaaaatgtaatagttacataatcatgtctcttctgttaggttctgtctctttttaccattaaaaattagaatttttacctcttgaacattgataaaaactaaaatttgtctcgtttcattaaaaaaaattaattttaaaaattataattttctattaatttggaaaaagttaaaaaaaattattaaaaaacttgataaaaatattaaatgaataaaaaagagtattaagttttattaaaaaatttaaatattttaataaatattcaaattttattttatttataaacacatatcttaaaaaattaaatcaaaattattgaaaaattcaataaataattt

SEQ ID NO: 219159 - DNA, 4177 bp, Cannabis indica
gtaatggtcacttggcagatatgatcttcttgcacaatgctcatcttaatctagacggttggatgagctcttcaaagttagctcaggtatggaacaaagctaacagccttcatcatctttcttctcagaggaaaattacacttcacagcaaaaaaaaaaaaaaaaaaaaaaaagaaaaaactcgcaagttgcaacattgtgtatgtaatatgtgcatatcaactattagatgtgggaagtcaaaaaaaaaaaactattgtttgtgcacagtatatagaagtttgtctgagccctcttcattgcatttcaatgcagcaactcgcggacggtgtaattccaaatgaatatggaatcaatccaaagcagaagctgaagattggctcaaaggtaccttcttgctgtcttttactttattcttattagcctgccaacaggatgttgggtttagtagatatgcttttgacatggacttgtactctatggttgaagaatttttttaagagtaactggaatgatgtttgaaatttgtaatcctgaaatattatttattgatgttgtatatataacaatttaaatgtttcttacatcttgatgttttggtaaagtaagtgtgtaatttgttttcatgggagtttgttctgtagaaacatgttttgacattgaaaataaaaatttctgaaatttcccttatagatacttaaaatctaggccaagttgatgtctatttttacaaatgtgtttcaacaatcttagacataagcatcttggttgagtctttatattggtttctttccacaaaagtgaggagatgacataactgattgcacctatagaaccacaaatatttgtttgtttacaggcaaaacatcattttatgttctaacagaattgtatgttctgcatatcagattgctcgccgtctgctgggtaaaatgttgattgatctgaggaatactcgtgaagaagcaatcagtgttgctgagttgaagtgtagccaggaacaagattcaagacttgatactgagaaggaagatgcagaatatcaatccatgttcaatattaagaatgatgacatgaaaaaattaagcaccaatagtgaaatgctaaaggttaaaattaagaatgatgacatgagacgaactagcactactacaagtgaaatatcactggatcaggatgaagatgatgataaggaacccaaataccgtttggatccaaagtaaatatatgagtctttaaatgcaattttgccacgtctccaaaatatgattgtttgtttacatttttttcttctctatattctttcaggtatgcaaatgtcaagacacctgaacgtcatgtgcgcacacgcctatattttacatcagtgagtagagcaattctctctatcattcttctatgtttcgtatggaaaaagcaataatcattggctcaagtcttttcctcataacgtatacggtgctctgtaaatatctatagtgttgatatccaattagaattctatctgacttatccgtatacctaaattagttgctttacatattaattagctctgagttgtgcaattaattatctgtggtaattccaattaagattgttatttgacttttctctatagctaaataatctgccttacacattagttagctttaagtacatgaaaggcaatcctctcctctaacccgtaacttggatctgatcttttcttgtctttagattcaatgccaagtcacttgtagaaaccaaattttactttaatttccacattctgtttatcctcttaatctttgttattattcgatgacaggaatcacatatccattctctgatgaatgttctccgttactgcaatttggatgaatctcttctagaagaggaaagccttgtttgtcacaatgctttggagcgcttacataatactaaggagcttgactacatgagttacatcgtactgaggatgtttgagaacacagaggtatgtaattttgaggtttatataatcattgttaacaaatgcctattatatctttcttataagatacatccacagaagcttgaaactgaactgttattaactagcttattattttaatatattgaacaaataagatctgtatttagatcaatatgacgaattatgttaacaaaaatttacatatttaataagcttgatcattaaaatcgaagttagatgatacagtgtgatagtagtagatttttaaactctgaattttttcacttaaaagtgataatcatatttttgtctcttggtgagatattgttgccattaagctgagtgcaattatgtgttttttaaattgaaacggcaggtagctttagaagacccgaaaaggtaccgtattgagatgacctttagtcgaggcgcagatttatcccccttggaggtagtcagttttaactgagcaaccaaccttgtcctacttttctaatttatcattatcagcttaatgaatgcgtttgtcttgttctgttccgattaatttagaaaaacgacagtgaagcagcttcattgcatcaagaacacacactaccaataatgggtccagagaggctgcaagaggtgggatcttatctgacattagagacattggagaaaatggttcgtccatttgcaatgccagctgaagactttccaccaccatcaaccccagctggcttctctggctacttttcaaagagtgcagcagtcctggagagactggtaaatctctggcctttccataagaatgttaataccagtggaaagtaacaaggcttcttctcccttttcaattttcaaagaccaacttatcttcatcttttcattctcgtaatttgaaatattccgattctttaaacaattcgaagttagtaattttgagtctcttctgagaaaattacctgaagagactcttactaatatcactggcagaacgaacatcatgggaagttaccatggtgatcggaactgagttagttttgtggtttggaatttcttcattatattgtcgtgaatatatcaatttttgtcagttgttgacttcacaactcgccgcgtaattgctggtggttcgaaccaaaaaatctgttcgggacgttcaagattctttagttttaacttacaggtattatcgttgcagtatcatttgtttcaatgtttccaattttaatttataaattagaaatgtaatcttttttttattactatatctatatatttacattatttagtatttgtttacttacaatagttgtgtacatattataacaagaatgtcgcatataaaagattaccacgttatttacctaactattgattactatctaactattatttaccaagttgtatgatcttagttccttttttaaaattgattgtgcatgaatgtaaagaacgcttgattttgctcgactacttgggagttgggacagtctagagaaaagatttactaaccaaatcaagagtttttacacaatgttttgcacaatttccataagagaatatttggactccctgctgttaccggaagataaagctttctttatcttcaaaaatcccaaactgccatggatgaatgaacttgttcaaccaaaagcttgaaacctacaaaagattagagaaacagacgaaacaaaatatcgactatcaaagttagttaatcaaaatgaacttactaagtatttaaactcaatcagcataattgaaaaatcaatgaaaaaatcacgtccaattaaaactaatcaaaatagaactagtaaccagacaaaactagagaaacaacagattgatcacaacataacatttgccaaataaaccaatttggtattgcaactatcattatgtttgacatttttgtaacacaattataattattatgtaatgaaattgtttacgaaatgagacagtttcagcttaacattttggaccaaagcaacatatgttataccataagtaacccaacatatattaaatagtaaatactctgtaactgaaaaataaatcacaaacagtatggcctttttattttcagaagagatatcttaaatctaacataaagtttcagccaataaaaagaaatctaacataaagcgacacttaaaagtcaaaacagcaatttaaataccaataagaagtagaagaagaaaacgacaccaacttaaagtttgaaaaaaaaaa

SEQ ID NO: 219160 - DNA, 4193 bp, Cannabis indica
aaccctttagcgtcgccctgatcagcgtcggtagcgaatttcgcgaaaaccgacgcctaaagggcttaaaaaccgcctctaaagggtgtttttgtagtagtgaatgtaattacaaaatatactgttttgtttttagggtgaaatataaatacacaaaaccaaaaaaacataatattttttttattttatattggggatgggagatttgaagtagagaatttttctttgtgagaaaaaaattaaaatttatgtctatgaccatatgtgtatactattattattattatttttaggtgtatactcaccatgtactttttatctgtttggagaattttttaattatttgacatgcgtataaaataaaacaatttcacgtgcagcggattttttgaatcttattttcagtgtgttaattttttcgagcctctcaaaattttgtaaaatattttaaataattatattgtaaacaagtataaaaaaaaatgatataaaaaattccatgagatgtaacctattttaaaagtgtaaattatagaagcatggtatgttatttacatattggagagaggacgtactcatcacatggggaaacaaccccttttgtggatctgagagtaggtatctgttaggttactgttttgggcaaagagtgttatgatgaagagggacatgaaattcacaagcaagtgatacaacggttaaaaaatttggacacagctgcccaagtcaacatatttacagtagtgccacatttatctgtcttttacaaacagagactttcatgtgtaaaaagtaacagctaaagctctatagcctatatatacatagctctagctctctaaaagaaaaaactataatttgataaatgccgaaaagataaaggtaattagaatattctcacaatcccattatatatgtaatagtgaaaattgttttttcaatttggttcacactagcgttgaggcctcatacaatgcatgatataattaataaagcaaatttataatggggaaccgtatgttgaatgagaaccatgccttgtttcctctgtactttacatatccatttttgtgatcaacacaaggtctttcaataagtttttccacaaagataagtaaccaattggagacaaaagctctttcacttttatggcagtagaacaaaaaaagaagaaaaaaacatgaataaaaaagagttttgaaaattaataatacattttgccacttaccaaccaatcagaacacaacgactatgttgtacataaatataaatatatattaatcttgcgcgccgatatattagtcggcaaacaacaaataattaaagtaattagtcttatatatatattatgctgcttaaccattagaaaagattgtgtatgtatggtagttatttgaaagaccaataaacatactcatttgcccctgtcatttcgatcttttgaactcattaagctaattaataagtagctagctaatgatcatattatataatacgtacaaattaattatgcaattaactaaaaaggaccacattcagacaataataatacatagcaattggaataaccataagaggtaattatatctcattatcttgtcaacctttgctttgtaaataccaaataatatcagaccaaaaagttatacaagtcgacaaatgcagccgtcaccatagtaacaaaataacatatgtgggtgtcattattattagtgcattctcttgttaattaactgtatatatatatagcacaattaataatttagaacaaaaagattaattaatggtacttcacatatatacaagacaaattataataacccacatgccacttttataatttatttacatatagagtaagagagagatatatatatagagcttcatgaagtaaaaacaagaaagctcttctctctttgcacacactacaagagaatcgaaagatatagtagattgatctagtcatgatcaaaaatagtaatacaaccagtagtatagtactactgctctactctctaaactcaatcatgctacatagttgataagatataaattaaaaaaagcaacaacaaaattattctttacatgtagatgatcaatcatcaaacaaacatcgatcatgataagctacccctatccaccaagccgtacttatagtaactagctagtaattaaataatataagctatgtatacatatatagcttattataattaattaattaattattacatattattacctccaccacctccgtggccgtgatgatctccacatggatcatcagtacagctccatggagaattggtgaaatagaaggatgagttttgagtagtggttgcataatggttggaactgttagcagaagaagaatgagacgaaccatggtggtcgatggtgcgggcgtagcgcatgagatcggcattggtcgcatccaattccttttgaaggcgaatgacttggcgttggaggactgagatagcgcctacgcagccgtagacaggatctttcatcctggcctcggcttcgtaggccagagaattaacagcgtcctctctctggtgagggaggacctcgttcaggagcttgctcacattgctcgccccaaatatttgtggacgtttgcgaatttctgtggctcttcaggagggaaatacggcgcgaatatgcagtctggcatgcattttcgcctaagaaacttgcaagctgcgcagggagagttggagtagctacttgatgaagccatctgaatctgaatctgatgatgttattaattaatctcataattaagaagatattataactcgtttttcatattacagataattatttcattaagggctaattaatattaaatcaaggggaaattaatgtttagaaaaaaggacagtgtggactagggttagttagctccatatatatatatgtgtgtgtgtgtgtgtgaggaccatatatacactttgttcacatttagttaattaatatttggtgacagaaaacagcagccaccgccaccacaccatattatatatactactttggttttcaacctccgtttgcgttttttggccagtgcctgcaacttcttttttaataattctaatgatcatatgaatattttatatagtaacatatatttagttaagtattaatagaaaccctacaaaaattctatatatttatagtatatattattcaaacttaatatatttgacaatatagtcttaatttcctgttttgatagatttcaaattaattgacctgttgatgtcgaatccaattggccatcaaaatattattttgatatatcactttaaatttcttatttgactcttgtttcaattagataatctggtaaccttgatatatatatacttatataaatagtaactataatatttgtcaacaaatcctctttcttttattatatctctattaattaattaacctaattacagtattatatctttactaaatcagtattatagccaaagcttagaatatccaactctcgaaacctatcctaaatcactattatatatgtatgtatatatgcctagattttcttcatgagaaaaacatagtatgtatatatatatacggtgataattattacctttatatttatccttcgtgtgagagaactctttcaagatctgttgtatatttggattgaaaatgataagaaggggaaattgaagtagtgaatgaaataaaagatactgttggatgtgatcgagtgggaattaagagcaggcagctgtagtggccagagaaaccctagctatatatagctatagctatagttgttgcagcagagagagagatgagagagagagagagagaaagagatgaaattagctagctaggccctcaaaacatatacaaaagagtacctgaaaaaacaaaacacacagtgtgacaaaaaggcaaatatatatatattaagagagaaataattaggaccagtttggggaggcaaagagcattttcttctatcagtagtgagagagaattaatgaattgagtaatatggaaagcaaaacacactcactcactcacactactacatacacacaacacaagagttttgtgtaataataaattattaaagattggtatgacacttactactactactgatctgcctttataataataataatgtcaaacactgttcattgttttgcaat

SEQ ID NO: 219161 - DNA, 5783 bp, Cannabis indica
aattttaccttaaatatataaaaattaaaacataaataaaatttcaccatcaattacttgaatttatactctcaaaattttatgacgatattagaagtgactcaccgatctattttgataatctttaatcttgggtataactgtggtatacccttcaataggaattataattccatcatttagtggaattctcatccctcttatttctagcaacatttataattgataaaatatacacatctcttaaaataatatatacccttttttttatatatattctcatattcacataaaatttaaaatcttctcacatcacattgaattgatgattttttaggtaaaaaataatttttttctaataaaaatttttttaaaatatatatcatatgatcattatttatattgagcaatacttcattaaaaattaaaccacataagcaagttcattggagatgctctatagctttattcataatttttgtgtatctcttttctactattatttagaataataaaagaaaattactattaggcactagtagtgcctaatactcttaagacgtatcgctttgcgattgtctatcgatacttcttaaaactattatattaaattacatgagatctgatacttaattagaccaattgcaatattaacacgtaagagggtacttggcacgggtaccttaattttaaaatttctcataaaaaaaacaatgtgagtctcctatatcttaatttgataataataattattattaaatatcctaataataataggattactcttaatattggtacgttaattaaagcacaacacaaaaatttggagtatcggctgagactgagatcaagtctgacaagaaaaagcatatcttctcaacgaaaatgtcctccaccttcagcggtgatgaaacagctcccttctttggcttcctcggcgccgccgctgccctcgttttctcctgtaattcaacttcatatcacctctgttttgctttgttacttgttttaatttcatacctatcgaattctgcgcgattgaggttttttttctccttctcgtatatggatcgagggttcatttgggtttggatctatctatgtttcttattaatattgccttgtgattttaggtatgggagctgcctatggaaccgccaagagtggtgttggagttgcatcgatgggggttatgaggccggagctggtcatgaagtcgatcgtcccagtggttatggcgggagttttgggtatttacggtctcatcatagcagttattatcagtactggtattaatcccaaggctaaatcctattatctctttgatggctatgcccatctctcttctggtctcgcttgtggccttgctggcctctctgctggtatggctattggaattgtcggtgatgctggcgttaggtatatatattctcttctccttcattctacctcctaaatttcgagcttagacatcatacatttttggtttgtggtttatatcaatgggttgactttaatttaattccatgccttaaacatgaatatgatgtcgatacttaatacgcaagtgggctttaagcttagatcctaatatggaagagtatatacatatagggactagtcttcgattttaaagaggatttcgatgttacggaaggtttataacatcattagcattgttttctttatttattttttattttaagacacactgagcaactacaagaactgaaatgattgatgatcctggaagttcatatttggtgtttatcctgagattttgacattcttacgtgagaatcatagttaattccctgaatcacttgttgatttattatatggtgctctattgcaactttgtagtcacaaaatgttttggcttttagcaaatgaatatgttgctcttctgttcttactgttatacaactaaacatatttatggcaatacaatataaattttgtttaaaaggaccgctgatatgtggcccctaagattttattagtactattgttggcaaagaaaatcgatttgcatttgtaagatatacaatgaatgatattaatggtcgtccgcccatctgaagctgaactgttttaagcacatgtattgggttttaatgtttcattaatcaaaattgtaggtgggtgtaattcatgatttctttactttttcttttggatgtgtgcatcattcatgtcacaaagtaagcaattaacacaatttgctttcctttttcttcttttattgatgtgtagggctaatgcacaacagccaaaacttttcgttggtatgattctaattctcatttttgctgaagcccttgctctatatggtctcattgttggtatcatcctctcatctcgagcgggtcagtcaagagctgaataagaaatatttccttctggttgctatattcatcattgctgtatatctagagctacttgttatcctttaaaaaagaaagctcagtgaagtgttctataagatcttgtttgcggtgtaattagaaattctatgaaattgtttgttaaagtttttagtttgggtgctgaattgctgatggtaggatatatatagaattggaaattagtttcactatctaatagcaacattttgtgcagactcattgcctgtattatattttgcgagttagctagctctctggatttgcattactattgccattttcattatccacgcttctctacgttgtatttggattttaaatgttaatctttctcctgatttgtttctcagaaaagatttgtaaatgttctgatagacagtgttgacgaaattatcagtaccacttaatttgttgcataaatctataggttagtacattttttttttgaaattataggttagtacaattagtaatgaaagtgtggaaaaaaaaatcatagtaaagttcatcagaagagaatgacgcgacacttaggcatggcaaacatcaattcgaatacgaggatttgtgacaattatattgccacagtttattaggttacctgattttacagaggatgtagattcaacatgatgctcaaattttagactggtaggcacacttgccaatactcctttacacactatttcagatacagggtacattttctcatggagagatcatgaggttacacacaaaatagttgtttatctttcaataaagcatccacaccatgttaatcacttaattttggtaggatctcgtttcagagcaacatggaaaggagcagtcttaaaccatttttggtaatctaattttacccctcaaaagattgtcaggcatctacattaattcttatcatttctagttctaactacattaccatcatttcaatctctccttttattccttttcgttttctttttattgtgggatgttacattcatggatttgagtgtgacatcaaatgtatatatcatggcattctgggaaattaatcttgagatttttttgtggttgcaacatttttatttaatgatatttgcaactgctgcattcacccaatgctgttgggaataaaaatttaccagtatattagtctaattctatgcttgtaatctagaatttatatgaggcagtagagtatatgcttgtagaagtttcatctcgtccgacttcgataaataatctattccagaggatttaacaacatctccaatggtaaaactttaaaatattatgtggtaaaatattgagatgctataccattagagagaaaagaatgtcattctagaaatttgtaaggatgctatgttatagcattgatgctatttattattttttaataaaaaattgaagttaaaaaagttattgtagctaaaaattaagatatatatataaaataatagtgtgtgagatcgtaattataacatttttaaagagttatacattggaatatttttagaagtaagagtgccaaaaataatgtgaaagagagataaaataaaatattatatttttagataatgtgtacattttttagcatttttagtatatgcctgaccggcgtttgctgtaatatttttctaccatttttttcttcacctcattctatatttgtattgcaattactttagttagtcacactgtcacacatgaatgacgcaataatatcattcatattcacttatttttttcaactcatgtatcctagtgatgttgtaaacccgaataaatgaatgttgtgtgctgtgttgaaattattattgtgaattgatataattatagacataattttataactacaatcattaacaatatgcgcaatatttattaataatcataatggtgtggttaataattatttattatgttaaaaacacatgagaacacacccttataattattattggcctattaaattatagtataccattaatgaatcactttagcccaattagtatataactccttaaagttagaaggatgtgagatatatatacgtgtttaagtgtaaaagggttttattaatggtaataagaaagatagaaggggatcaaaataaatttgctgtctttaaaatggtgtctcctctccgttcccactagctctacattttgtttctctctaagataactctaattttgtgcaattgtgttaatcaacattggagattcttggtatcaaatggctcaaatggatagattggattaccagtgagaggtatgtgtttatcttgtttttgggtgctctaaataaaatatagatcttgattgatgattatgagtattgatgagttatatatattatatgtatgtttaagtgctcataatctgtgataaaaataataattgatatcgagagctagtatatttgattttagggcttaattttttgatgaaaaccattttttacccaaacaataatctcaaactttcgtatatattttttttttcttcagattaatgtgttcatgatgaataaatattaattttattgtttgagatgagtttatatctgatttttggattgtctttttttttcccattagagaataccaagtttagaggtgttcatcaatggaggaaacccattttcgagtttatgcttttgggtaatgttttttgtaaaatatggatgaaatggatgttggaaattggtagagggttagaaatggaagaaaatcccaaaatatttgacgaaaacgctggctggacgcatcgatttaggcgggtctgattttgggtcctgtcgacccagttcgtcgacgtgcacacccgttttcaaggtcagggatgacctgcacgcctgcgcgacgtgtcgttcacgtctcttagggtcccatcatttttggtaaaacgacatgtcgtaaactagaccaaaaaaaaataaaaaattctaagggcgagtgataagtccttttagaccctttttccatttttccactcaaattttactactctatcatttctgaactattatgcacaaaattaatatatgaattttattttttaaataatcttttgtacataaatctaattatttattgacaacaatcattgtattttcttgctcgtcataagaataattatttattgacaccctacgagttgtggtcgggtaagaaatcgagtttgcatcattttcatatttggggatgcaaagctgaagtaaggccatataatccaaaatataagaaacttgatctgaaaactattagtgtatactttgtaggttatactattggatcgaggggttccaagttctatggtccttctcacaccaccagagtgatagaattagatagagctgtttattttgaagatgaatttggtt

SEQ ID NO: 219162 - DNA, 5589 bp, Cannabis indica
agttgatttgcaggtcagagagaagcgagctgaacttgaagaattagaaaactactatttgttagaagagctttctgtagtttttgcgaaatttactttgcctagtttagttgatttcatgataagtgacaagagttacttttcacaggtaatgcttaagacttttgttccttaatattgatttaaagtgtaacatttgagactagaatcgtcgtgattatttttattttattgtattacagaggggacaattgaaaaggcctgatcatgctgatctgcggtacaaatgcaggacatatgctcggcttttacaacatctaaaggtttaatttagattaagtgtgttatcaaagataaaaaaaaattgtatatattaattaaatggtcataattatgcttctcttttcttttctttttcttctttactgaaatctttatgactgtttttgcagagtcttgataataactgcctgggcccgttgaggaaagcatattgtagttcccttaatttgcttcttcgtcgagaggtcaggaattaaatattctatacaattgtcagtattctacttggaagtttattataagtagtagtgtgcatgtgttcactgtctggagattttttctccccattaaaaccggtagtagtgtgtgatggcgatgtgatgcttaataccttattcttgatgccaatgctcttgtttttttttccttttaaagaacatattaactttgttttgctagttttacactccttgcccttcccgcatcacttaactgctttatgtttatggtgttccttatgttttacattttaggggtaaaaataaattttccataaaatgcaccttttcttttttgacttgatactcttgccaatgatcatttatttacaaattaagctttggaatttattctccagccaaaagaatgactattagcttgacatctccaggctcgtgaatttgcaaatgagcttcgtgctagcacaaaagcgtcaagaaatccaactgtctggcttgaagcatctacaggatcctcacaaaatgttaatgccgcagacacttcaacagtgtctgaagcttatgctaaaatgttgacaatttttatcccactccttgtggatgaggtaagagattagttgtgtaaaggtttcaaatctaaatgctgtttatgctcaagttgaaaatttcttttttcttgcttttactgcagagttccttttttgcacacttcatgtgctttgaagttcctacacttgtgcctccaggaggtgttgctaatggtaataaatctgggaacaatgatgatggtgacgatgacgatttggggatcatggacatagatgataatgatggaaaaaatggtaaaagtcttactactttagtttgtttcattattacttgtgtaagttcagtttatttgtagattttgcaattttctctgttaatctgcccgacgtatgatgaagattaaaagaaaaccaagttgtttttcttcagtgcataatatcttatatgtgctattgcatttggtaggtaaaacttctgtggagttagcagcactaaatgaatctcttcaggatttgctggatggaattcaggtgattacacaaaatattgaaattactctcttttgaagttacattttggatatcagaaaggatcccataatttgtataactggttgggcatattaactctggattcttcttcatgaagataggactcatatttatgtaattttagtgacacttagtcttttccatgaaaaactactatatctacttaatacttgattggctggttcatggttgtgatccagaggaatgcagaatgttaatattaagtacaaaaggtgttagttggggttcactgtttgatgttgccattgattaagtctctataggtttaaatgatcttggttgaagttaattactggttggtaggtttgaaatatgtactagagttgcaaaatttatacagataaaatttacttgttataatatcaggtatattgtaatccacttttctaacagaagagaattggagggagggttgttcctcctagactgcaaaatgtatgggaggagacctgtctttgtcgttcaaccccttttttaagcagttcttgttactgtccacagtgatgtagcgttgtgcactatttatttgtgtctactagaagttttggaccaagacacatctctaaggttctagttttgactttgcagttgtttactcaccgtgtgaatttcaggaagacttctatgccgtagtagattgggcttataagattgatcctttacgttgcatatcaatgcacgggattacagagcgctatctttctgggcagaaagctgacgcagcagggtttgtgcgtttgttgcttggggacctggagtcgagaatttccttgcagttcagtcgtgtaagttccatttttaagcttgagataatcaaccactatatgcgttctaactcatgtaagttttaatatttccagtttgttgatgaagcttgtcaccaaattgagagaaacgaacgcaatgttcgacaaatgggtgtcttatcctatattccaaggtaatggggttgttgatgctcactctttctattcagtgtcatgatacttgcccagatggtccaggtttccaatccagaaaaatcacaaatgatttgtgaaaatttctactcttttttgtgtatgtagtagttaaggatatgaattcttaggttccactttggcttcctttttctttttttctttctttcaactgtgctatttattccctttcatgctatgctacaacaaaaggtgttcaatacttttttttcttacatgttttgcgtccaattattttctgacattgggttttaaataagttctttgcacatttggcttccattttttctgtttctttcaactgtgctatttattcccttccgtgctatactacaacaaatgtattcaatacttcttgttcatgttgtatttattttgcgtagatttgcgactcttgctactcggatggagcagtacatacagggacagtccagggatttggttgatcaagcatacacaaaatttgtgggtccttctcaacctgtagcttggtttcctttttactgtttcattgatgcaagatctcaatagtgtatgttggtttgaggcatttgttcttgttcctactacaattttcaggcatcaccagttcagctaatgaaatgtttatgaatttaatgaaatcacttgtgagattacgatatggtaatttaaagtgaagctgtactttaaccaatcgtgggtacggaaatagcaagtgcattatgctcattataagtttgtccctgtagctttgataatgttatcaaaaccatagccaaatttgtgcttattgaactacatggatcagagtataaatctcttatggtgttttatgttttattgtattatcttgtatgattatgatgtggctattgtctgacaggtaagcataatgtttgtgactttggagaaaattgctcaaacagatcctaaatatgctgatattattcttttagagaattatgcagcatttcagaataggtacatatttcattcttttattttttctcctgtatctttcattataaggagttattattatttgttttgggtgcattgctgagtagaagcagtttcatgcagcttgtatgacctagccaatgttgtgcctaccctagccaagttctatcaccaagcaagcgaagcttatgagcaagcttgcacccgttatatcagcacaattatttacagtgtgagtatttggtaaattgtctctttttcctgttttccattttaaattccacctttttttttggagtagggacagaattagtaaggtttttcaaccagagaagcatttcttatttattaaagtacatatcaataacagataagaaaaagaaattatgacaattaggaagtgtacatttttttaataaagcttcaaaaagaccttaaattttcaagaaaacttatgtttgagaagattcagcatttttagcaacatcaggatgaggcaggagggggtgaacactgttagtttcaactgcaatttcttatttaattaattttgtttaggcatgtgcattcagtttattcttttaaactaggtagacttcaaatgtcatcttcagcactgtaatttgaatcctcatcaagtttgctctatgcagcaatttgaaaggcttttccagtttgctcgaagaatagaagattttaatgtacacaatcacacctgaagaggtttagttttttgctctttgatgatgtttgaatgcatattgaacaaagtagcctcaagaacttttgattgtactgtaagaattgtctagttattgttggattctgttttttataatttcttttttctaaataaccagattgcattgttttttttggctgtgtcgtaattttgccaaatcagattgtcagactactattgcattgttcttagtggtattacttcttgctaaatataatgggttaaaatattttttttttattttttctcttcacaattttcagatccctttccagcttggattgtccaaaatggatcttcggaagatgttgaaagctagtttatccggggtaagtttgttggtatctcccaaatcatctcatcatccttctctattatctgtgtaataatatctttgtttctcctgtcataggttgacaagtctatcgctttaatgtataagaagttgcagaagtacttgacctcagaggaacttttgccttctctatgggataagtgtaaggtaagttggtctgtcctttctgtagaataataatatcaaacctgcgctcccaagcatatgggtaaggagattcactttagcagctctattggcatttgaactagtgcgagtttagggtagatgaaaaaaacataaatggagagatagcatcgtcaatacagggttcctcttgaggtgaaaccttctattgagagagagagagagagagagtgaatgatagcttcactgatgtctccatcttggcttatatacataaatataaaaacataaatgctgattctgtgtccttaaaatttatccaactttgatataaatatctgtaatatgagtcactctatattatggaacaaaaacagtattggaatgacacaaatgaaagagatagcattgtcaatacagggttcctcttgcttgtgaagttatgaacatataatttaggagtaaagagaagaaaacttgtaataaatttgtactcttttgctaatgttattaatacattcagttctttatctttatttcttcaatttttacagaaggagtttctagacaaatatgaaagttttgcgcaactggttgccaagatttatccaacggagaactttccatcggtagaagaaatgagaacccttttggcttccatgtaaagagtaagagtgaatttataaacataatgtttatacttccttttcttatagtttaatttattagacaaattttgcggactagtcattgagtttgaagattgaactaggcaaccccatgtatcatgccacagtatata

SEQ ID NO: 219163 - DNA, 5390 bp, Cannabis indica
tttatttttttgaaaaagaaaaaaggctaaaatcaaaataaacccgcctgattcagttcagagtctcttcttcgttaataatcgacattaattcaaatttattctttcatttcgttctatccaactttcttcttcttcttcttctttaaaactctcactttctctctctaaactctcacaaactcatactgagctttctctctctataatatatatatatatatgtatatgtatatgtgtacatctcatttctctctggttttcatttaaactagttttaattcagacgttgagcagttggatcctccattaaatgctctattcgttaagccctaatttctatatataaataaagttgtggttttgttgatttcatctgagagagaaatggctacctcggcgtttaaatcgacctcgaagcgaatgtcgattggatcatcgtcgtcggcttcagttgaagactcggcttcctcgaatcggagctcggttcatcgccgttctcggagcctcagtcgattctcgcaccggttgcagacgcctgcgagcgatgatttcgatgaaactccagctccaagagggaagtttgttaacacagtccgaggttcgggttttccggagatcagccttgatgaccttgctgttgagttctttgactcgggagatagaggtcgctcggcttcgcgtaagtctgaggttactccggtgagtgcctctagtgtgtcgcagagacgaggaaggtccgtggcgaggcagagctcgaggttgactgggggtagttgtattggtgaggtgaaagggagtactggtagcaattctggtagtggtggaggaaggttgacttcggataacagtgctctttccagaagacggcgttcggtttctgtggttcggtatcaaattagcgattctgaggtaatctcgtttgagttttactatcgttttgtagagtctattcatgtgtaccattgtaatttgatgaagccaagaacgttttaatttttctaaaaaaaaaataaaatttgtaaatattagagaattgaaattatactgaatattatttattgtaagggcatgttgactagaatacgttgttgaaaaaaagaaaagtgctgagggaaagggtttagcgtggaatgaggaaaattctacaattgatttagttatagggggaaatgcaatcacaaatggtgtaaatgtgtaagtttacagatggatcggtgtgaaaaatgaacactctttctagctttctatcaaagtcgattacggactagtaaacataggctgacatgacagcattgtgattacctttccagtccttgaagagtttactaatcgaaagaagattgctgggcatatttgatattgagccccaatgccccattgtcttacttttatttgaactgatccatttgataggtcctataggaggctagttgtataagatgcggttgggtaatttcatgtagctaatttggtatcgtttttcaaatgacagagtgatttagatcattcccagaaacgtaacaatgctaatcctaagagcttaggaagtggaaatgaacagttacgctcctcacataagccgaaagcttctaatcaaagacaaggactgagaaggtctttcagccagaaggatttgaggtcctgcgatggctattctgtaagttttatttcttgttgcttattgaaattttctagcatattttgatggtaaaattttgaattctaattttgtaaaaaaggatgggacaattttcagtgttgagctggggatgatcctaccattgtattattttgcttattgaagaatatctactgtacctagttggggaaatttttttagtatattttttttcttttaagaaaaaaacaatgtaaaaggaacaactttgaccattgagtttgggatcagtggtattttctttctttctactaaatttaattataattaatgtcttagattcctcaagttgaaaatgtctttgacctttcagagccaatcttcagttttaaccgacgatgaagggagggatgctcattctggtaaaaatggaattgagcggacaattcgaacagtttatgcacagaagaaggtttgccacttattaagaaattatcatttgtgagtttggccttagctttatgcttttcacatcaatttgtctttcttatcttttaggcacaacatccaactggggatgatgtgaatggtagtatttatgaggcaatgcggacagagcttagacatgctgtgaaagaaattagaacagagtttgaacaagtgagtatcctagatttttcagtttgtttgccaatactttattttttttttcttgagcaagtcaaagtgttattttttaagaaactttcctgaaattcactggtttaacatgtgatctgttcaggcaatggggaaaacaaaacctacagcctctgcaccaggcgattgcttgctgtcaaacggttctgatgtacttcaagctgtttcttcaataaggtggaattactcaacccaattggaagaggtactagtaattaaatcttgttttgactaagcaaaagattattcataaaatgaaataccccgcttttttcatagttgtttgatttaagtcgcacttatttccagtttttatatatagattgcccttcacttgtgtgctagcagacttagtaagattttattcaggaagagaaaaagagaaaaaattgcatatgatgggtcacggttatttatattcatttagcttgaatgttttgtcgagtacttgtttctaatatttggagtgtcttacctacaagggaataatttcttaccttgcagtctgagaagcgtaaacaagatttactatctgaaattgtgttagaggaacaacgtagcagagagctctctaagatagtgaaggaattgattccagaacccaagatcagtgctgttgtagataaaccatcacgagcaggaacaagaagggtatttttgtttccttcgttctgctaattacaaatacttggttgtgattttcttgattccctacagctagtttgtttaactgctttcataatattctgttctcggccaaagggaaatgatcttagtattgagtgactgtattttattcaacagaggagtaccgacaaaggtaggatgtcaaaaagactgtcagaggaggcagagaaatacattgaggacttcatttcaaatgttgaagatacagatatatcatcactcgacggagaaagaagcgacacaagttcaagtattggaggaggaatatcaattgcaaagacacgaatttctcaaaatcctgcaatgtcaacacctcttcctattgactcggatggagttatacttccttggttgaagtgggagactagtaatgatgcctcacccattttaggcatgaataaaatggagtccccaataactccaaataatacttcattcaaaactgttcaggtaataacagaactgcttatgcaaattcttgtgacaattaagtcacacatgcattcttatcgaataagatcattgtttttcgcttctaaaagattggtgacttgttcttgcaggaggtaattaatgaacaggatccacctagtcagtcagccagtagccgagggagctggagtccagcgattatggattcacttcctatgaaagtagtagaaggcaatggaaattgtcgacgatcatcatatccagatggatcaaaaacaaatcagtttgacatggaagattatctgaagcttcaaagagatgaagatcttctctttgagagatttagacaacaacatagagttaattcaggtggcatgtttatatgtaatcgaatgtatttttagaattaggaaagaagtccttgtaaagacttcattttgttgcaaactacactattatttgtatagtcaatttatcttttcctatcgagtagtaaataattagttctaggtaaagggtttttttcttagtagttactttatttggtgtattcccagttttgtttatcttgaaaatttaattggttgaataatcaattaataaaatgacatctaaattaaataaagaaaacccaaaaattcccatcttggacttagtctgctttattttgcttgcacaatgaacttggaatgagtttaccttattattgagcttgatttatctttcaccttttataataaaatttgttctataacatattattattataattattagattttaatatagagtttgaatagatatattattagaatttaatgtggtatttgaatagacaaatttatattttgttttagattagatagtaaaatgagaaataaaaaaaaaattggaaaggttgagaaatgaaattattagtaagtaagctccattagagtgttacaacttacatcaccgggttatgattttgttttatacatagatataaacagtacagtaggattgtaaagttttaagtgcttatatagcaaattaaatgagttgttataatataattggttaagacatatattgggaatttggctcctataagtataaccaaattaagttaggacattcttcacacgcagtatactgtacttaataaaaactggtcatcatcatggtggagaccgagactattagcaataacatactaaggaattagaacaagaagaaaatagagtaataataataaaaaatggtagtgatgatctatccacatggcttccaatcacaagctctcgctatgggaagtggttggtattcggccttgaacagctgatggtcgaggttggagtgaacatcgtgtacatgatcacaggaggcaactgcaagcctatcaagaccactttcttgatcatgatgtttggctctatccacttcatcctatctcaccaccttcccaacttcaattccatcacaatcatctcccttatagcggctgtcacatccttgattgagctactcaacctggtcagcctctctcgccaaaggagtcgccccagatgtcacctatgctctaccactagattgggagatgtggcttttgcctttgcaggccataatgtggtgttggagatccaagaaaccatcccttccaccccggataagccttccaagaagcccatgtgtaaaggggttttagttattggattttcggtgatagcgtggatgacaacatccttgtctctttggagaaaccttggtgacttgttttcatggccaacatgtttgttgtgtttcatgtcattggtagttaccaggtacaattacaattcttataggaaattttgattttatatgcttaaataattaaaaaattttattattataccaaaaacttaaaccataaaaaaactatacttttttttcaaaatcccaaaaatacccccctcacaattctctctct

SEQ ID NO: 219164 - DNA, 2874 bp, Cannabis indica
gcagcttaatgcgctaaactgagaattaatgagtcaaagaaaaaccatgaaatttaataagcaaatatacataaatccatcgtacatggaaatagaagtagtaaggtagcgataattggagaccaaagcagaaggttggcctcttgggaagaagcttcaaatagacaagtacttcagtgtgcatagaatatgatgatttaatactagttattctaatgccatacagaccataatcctctccctttcttgactcacgacaaaatcaaagaagctatcatggccaatgatatcactataaaagagaaaattattattataaagaaatttgataaaataactcctcaaatctagtcctataaaactagccaactctccacctgcaaatcattctacctcatatgttaaaataattgtaaacacattcattttagccacttacctagtataaataagggccaaaatttctttaagacgggcccttttaaattgtgtttttaattagaagtcttgatagatataataacaaattttctggagaattgtttgctactaatagactactagtctcctactagatcaacaaattatcctggaatgaacattcgcaacagactcaacacggattaaatccaatgtacaaaataaaaaggtccattacaacaaaggaaagactcagaatccttacccacagtggcaatctctaccgcacactgaagactctgatgacgaaccgcatgaacagaatatgccatcatcttctggtcgtcttttaatcttctttttcttggtgagatatatatcttaaatttttcacacgcaataaaggaaacagcaaaagcagagaaaagaaaacgacagcacgatggatctcctaatactaattggcctgagcagatgatagtaatgctctcgggtaaaagtccaaacacaacagtagattaatagaggttagttcatattcatatgaaatgtgctggtgacagtagagcaaaagatcaagtaccatagtagcttaacaaaaacataataaaaaaagggggcaaagaatacaacattactaaactcaaaaactaacagaaaagtataaccaaaacacccaaagtaaagaagatttcagccatcaatgaaagaagaaacctttcctctccttcctaccaattactaaaacttttaccaacaaaaggatactgcgctttataaaagtataggttggaaatagccttgttttgtataagtaatctgggagtctaaaatcaacagggcttcctatgtccttgagcaatttgttgaacacattctcaatgtgattgccttcagaattctgataacaaacgtataaaagacttagaagaagaaagaaagaaagaaaacccacacaataaatggcgcgaatagaaagaagctacaaaatttaaattaaacaacaaccttcatcatagcaggcatggagtaagatccacaattgggtacttacgcagataaacaaaatgtgttcaccgaaacatggttacctgccaaaaagaaaaggcacaatttcatgaccgttgactcatttctgaactacatagggagtgagttctgagaaagtgaaagaattccgacattcaaattcaaataataaagaagatggaagcagtacccgatggagatctatgagagagagagtgaaacccaatcagagagagagagttccctcccaaactctgtttactagacaagtaactgaaatttggatcagatttacccaaaccctaaaatccgccacttgccctttccccttcccccagccatatgggccaaaatatggttccttgtgggctaccaaatccgctttctacgcttgattttgggccagtttggcacagttgtgctgtgagaaaaagcagctgtagttgtgctgtgaaaaaaagctgctgagtgtttagtaaatataattttaaaataactgtgagttgaaaaaattgtatataagtatttgataagctagatgattgaatagctattaaatatacaattaccaaaataagtatgatatttgttatctaatttatttaaataaattcatacatattaatatatttataattattttttattttattacaaattacaataatttttttcttataatatttttaaaaatatgtatatataataaaataattagttagacttgtactaataataataataataaataaattacataaatatcatctattacataaaaatgatagagaaagatatattggagagaagagaatcttaaaataaaatggtaaaaaaggaattttataattagaatgagagtaattttgtcaagtgaaatattcattaaaccaacaaaatagcttcccgtataagctaatttcccaaagtgggtgttggccaacttttacaaaaagctaaattttttttttaaattcttaaaaaagctagttttctaattctaccaaacacattttgaatgatagttttttaaaaaagtgcttctagctttcttaaaagctatcccaaacgcaccttttatgaaaaataccacttttattaatcaattaatcaaacttacctctaattttatatttaattgaaacatacttctttttatatgtattatacccaaaataccctgacataagagagtcacatggaaagcatcttgaagtgacaaggataaaattggtacaatatttaaaagataggtaaaaatgatagactttaagaaagagggtaaaaataaaagaggacaataaaaaagggtatagagcgtaattttctaccgaaatctgtaagcttgattttattctggggaaattttataaatatgtgaattgagagtatagttaattttttttatgacataaataaataaca

SEQ ID NO: 219165 - DNA, 4271 bp, Cannabis indica
gttactcaacctgactttctcgcttcagcaagagctgctcctgtgtaaggagcgaggtattgtaatatggccggagaatccaccgtttcagctatcacaatagtgtatttcatagttcccctttcctgtaaagcagtcaccaccagaatcataaaaaatgctttttgagtaattgtattgttttcattaatcaaaaagtagaacttagattataatgtatagagctaagctcatacaaggaaagaagagagagttgggattttgttacaactatgtaagagaactcactaagagaaaggacacgtgtcaaactaactaaaagctttaaagtttgaacaatggccgcgtaaagcttatcttcatcttcttcttttttatttatttagttgtgattttacaaaatcatgctaagtctttttccaacatccacataacatacttccaaacataatcaatttatgattttcacatgttaaaaagaatttctagaagaagaaaacttctatatacctaacacgaacacaaaaacaaacaaatacacaataaaaaataataataaataaaataaataaaaaaacctaattcaactcaaccacccatctcatcccattatcgattctcttctcttctagcgtttcatcttttacacatcaagtggtaccatggtacttttatttcacatgtgaaaaatattcttgaagaaaaataatatacgtacctcgccagaatacaaaatcaaacaaatacacatatatttaacaaaatatatatctttatctattaaactcaaccattaatcctttataatcttatccctatctgttattcttattcatctgcattttcaactttttctccttcagtttctgaattggtagtaatacttactctaataatggcggaaccaacatgggaagaactccttggacacaacaactgggaaggcattctcaaccctctaaacctcaaactccggcaactcctcctccgctgcggcgacttctgccaagtcacttacgactccttcaacagcgaccaaaactccaagtactgcggtgcttgccgctacggcaagtcctctctgttcagcaaagtatttctccaaaacggcaccgactacgacgtcgtttcctacctctacgccacagctagaattagagtccctgaggccatcttactccgttcccgctcccgcgaatcatgggaccgagagtccaattggatgggctacgtggcagtaacgacagacacggtcagcaaagccctcggccgcagagaaatctacgtggcatggcgtggcacaatcagagactacgagtggatcaacgtgttgggagctgatccagagtctgccaagactttgttgagtagtgaagatgaagatgatgaaaagaatcaagctcgggtcatgagaggttggcttaccatatatacatcggacaatccaaattccccattcgtgaaaacaagcgcacgagttcaactttcgaccataatcaagagcttgataaacaagtacagagacgagaaactgagcgtagttatagccgggcatagtctgggggccagtctggctgttataagcgcatttgatatagttgaaaacggcgtcgttccaaaggaaattccagtctctgcttttgtcttcggatgccctcaagtggggaacagagagtttagagaaagggtggaaagtcatcaaaatcttaagattctccacacaaggaacaccattgacctcataacattgtatccagggccactgcttgggtacgtggatattgggaccgagctgcggattgattctagaaagtcagagtatttgaaggcgtcgatggtgccaggagactggcacaacttgcaggggattttgcatgtggtggccggttggaatgggaaagatgaggagtttgagctgagagtggagaggagcttggctcttgtgaacaaatcttctgggtttctcaaggatgattacttgattccagattcctggtgggttgagaagaataaagggatggtacttgatcaagctactggggactgggttttaacttcacctgatgatgaagatttgcctgtgcctgagttttgacccttaactagtagtaacgccatctacctttatttttgtttgttcccaaaatcttttattaatttctaaatctctgccccccacgagaaaagtcatgccccatgtcagatacaaatgttaatgttgcttaagaagctcttggattgtttgaatgcgttttattagtaaataaattattctatttgtgcttttgatcatgaaaaggaatttgtaaaatagacaagcaaactataaatatagttgtgttaatgagagcattgataggcactataacaattctagtgttgttcattagagtgcttttactacatgtacaatgtgatctaatttgtaagaccaaataatcttatgtgaagtgttacctaaaaaatcattaatttataaccaaaaaaaatgtaacaaaatcttatgttaactaagaaaaaaatataaaatatatattttaagatgatataccgaaaattctaagttgggcgtggtatgactcatagttcacttcatcatctttcacgtaatgttttgttacactttattgtattttatgagattgttaaatgccttgccttgtattaatttagaaggctcatttttttcgtccaggatagatagaaggacgtttacgggttcttacaccaactctcagaccaagagatctaatttttttattatctcttttcttgtaatatcataaaagtaaaatagaaagctatacctttttgaatctaaaagaacgtgaaacaaacgcctggtataaaagtcaaaggtgagacatgcatatgcggtccacaactgatatactatattgccaacacaatgcataatgctcttgttcttgatggaaagaggaaagcattagaaagactgaagattttccaactaagagtcatcacaccagaaaatttagagaaccattcttgcaaaacataggtttctgcacataaagtcttgtcttcggaagattagctattacagattcatgcgtaaaacttcaaccaaacacagcataggtgaagctttcctccattgttaattttcaaagagtgctttatttctttccccgtaatttcacaccaagagctctctctagctttgttatgatctgctgatttggtattgctttaccagattcgtactcctggatgatttggggcttctcattgataatctgccaaagaaaatgaaaaattatagacgatatcaataatatttatacatatatataatgcactaatgagtagcattttggtactagaataagagggagagagggtggtctacctgagcgagctgggactgggtgagcttcttgtccatcctagcttgcattatagcttttttcagctccgtgggtacacgatcatctgtacttgaaatgataaacatgttatgcaaggaaatcccaacccaacagatacaaacatgactcaaaaccatatcatttagccaaatagcatatagctatacaaattcattcaactcaacatctaaacacaaagaacatagcaacatgatttaataaaaaaaaagcaattgaattagaatgagaaagtaaaattggaatgggtttattgattgaacaacaccatgaaaaaaccactgattcgttagacatccttagtcgtatagtaaggaaaccagcacattactaagcagacaatgaaaggaacgctggtcaatgaaaaccatactgcactttaagaaagccaatggtaccttcttcaagctccatcatattaccaaaaggtaaaataataagcatacacaattgaatactacaaatgagccggcagactagtacctgctctgagaaatcattttctagttgaactgtgaaagtaatgatatatttcccctttgaaagaataactaaaacaacttttttatagtcttccacttttgtcagtaattgatgaaacatactatttcctcaaccaaaaccacatgccgtgcttatccttgttgcagtagataaatatcaatgatgactaattatcatgcaccaaatttattataaacgcaagagaagaataaaaaaaaaactgtgacgtgtttaacaatataatactaagagcataaaagagaagcacagagagacactgagaataaacaaattgattagtaaaagggaaatattttacattcacaccgccatgcaaattccaaccagaacatctaa

SEQ ID NO: 219166 - DNA, 2406 bp, Cannabis indica
gatgttgtttgaccaaaaagtacggattgaatcagataaacagtcatacaactaccgaaataatttttttatttttctactaaataatcatgagggatctttgaacccttttctcaatgtcattagtttagatatatatattattattattccaatggtccaatttgggatctaggaaggaagagatcggcgcatacccattagctataagctcaatttgacggcgccttgctgcccaaaactaccaactcatataatgggaacaaagcaaaaaacaaattgagcaatagctaaagaaagatgaacttaattggtcaacttcttaactactaagactaactagtgtctagctaatggatctaacacccaaaccaaaaaaaaaaaaccaatcaagaaacatgtgaattgaattgaagcatccataatttcttaatgtctcccactaaagaaaatcatgacgtggaagtgcacttctctttagactaaattgccatatatatccagccttggtaggaattctctgaaataaagcacctaaattattcttttggggtggggttgtgtggtgtggtgccttatagtttaattgtccatttcttcaacaaaccattactaattttctatggggtcttctccactagccacagtaatcagatagatatatataatatgtatgcatgttcgagacgccacgtctggggcaacctattataaatatttgtcaaacttatgcatattacttgattattttggacttaaaataaagtaatgataacaaagatcaacaaaggtatataaatatatatgtagcttgattagtacaccgcaattatttaatagtgttgtcataatccacatatgaggtatcaaacaccatataaatgcgagtcaacatattttatgtttacaaaattaattaaattataagatgagcccgtttgatttatagttgtatgttattcaaccatgaatattaattgagtagggaaacaaagtggatcaactacgaaattaattggtgtgcgtcggtaagtggtaattatgaactaaaaatattatgcgtttcaaattaattgggctccgggaggctttgagttggatcaaagatcattcgtggctcagtgtgattttagaaacggattgtctttctgtggtacaagctagctatgtggttatgcttttcttgtttgacaaagttgttagtgattgcaaaaatttattaagtactttgcgtaatgtttctttttattttgtaaaacgattagcccggctcattcctttgcaaggatctctatatctcaccctaatcgccttttcaatttggacactgttacggttgagctgttaccgagaggtggaaaggaaattatacgtttaataaagtagatgacttaaaaatgttttttttttttttttttgtaatatatgcgttgcaatatatgtagaaaatcgaatactgtatacttcaattatcctatgaggagaaattgatgagttgcaccacttttagattttaagtttactaatagtatacaattaaatatgacgagttattatatacttttaagaggtggaatcgaaacttagagcaacatgaccaacctagcatcaaatttgatgcagctctttcacttctcatctccaaccgtggcaccatttacacgttatattagctacatttcacactatagtgtcaactaaaacatattattattcatttttattttatattattttttaataatgtttaaatttataatatattaggaaaattttatggtgcacctacaaaaaaacatgcatcaatatttaagatatcttataaaattttgacaaattaaaaaataatagtaataaaataacacacaaaaattatggtttaaataatctgttgtgcgcatgccttttttattttatataaatatgaaataaattgttttaacattctttttatatagtaaattattttaaaattttcaaattaaattttgtagaaaatttataatatatacgactgtaaaaaaaaaatagacaaaatgttggatgtcgacacggttggggcatcaatgtaactttcttttaggtgatgtattgttccttatatattattattatttatatgtttatatgtatatatatatattaaattttgtttaaaatataatataataataatatatatttttacaaattttggttgttatgattagaatgaaaatattaaataatattatatttagtgttggtgcaacactatatttagtaattaatatggttggagacctttattattgtaagtattaaactacacctatcactataatatgaattgttgtttgtctatgcttaataatttttttgaaaggtaatgttagtctttctaaaaaaaattccaatagaaggtct

SEQ ID NO: 219167 - DNA, 2783 bp, Cannabis indica
aaataaataaataaaataattatgtattctcatatgaatagcatattcatctggcatcttctccattatatacattgcatataaaatttttcgatctacatatacttttacaatgtatttccatgcatggaccatgcatgctgatgcataaagtactgttgggtaagtttggtcaaatatgtatcaaatcatgtggtcgataggtgtgtcaatatatatatatactattggaaaacaccctattatatatataaataaaataatgagtgagccataaattttacaaaattaattaagagagtgattccatgagaagtagaattaattgaataaggaacatgagatgagaatagaatctaatagaagcagtaataagaagacatcatgaacccgagaaataggagtatatataattgatttgataaccccataataaaaataaaatccatccaccgaacaagacaagaatattatctaatttagaattcctacaatttgggaagccagagaatcatatattacgtatgcattaggctgttgttgttgttgttggattccatttaattgtgtatgtattacttcttagccttgtgtttcatacactacaaactctagtgcggagtctactatacgcccactctcacacgtgcttctctctcgtacacccaattaatctatgttagggcctcaattttatttttttatatatctggggtaaataaataccttttagttaaaccaataatatagtacttaagtataattactaaaactacgatatgcataattaatgatatatataaatatattacattttatatatatttgaattctctatataaaacgaaagaaaaaactagatttgtttaatggaaaattaagaaattataatcaactgtgttatcatgtgatgtgcgaaatactgaggaattgaataatcatcatatatagacattgaaagaaattctaaatttattaggtaatgttctataaaaaaaatatatatttggtaatgagctagtgtgccgcagccttgcaagaacattcccatttttaggaatattaaataataaaaaaaaatctttgttatattttaaatgattgaaatgtagatgattatttcatttaaaaataagaggaaaaactatttaaaatttaaggttaaaaagagaaaaaattaataaattttttaagcatgttagttttttttttaggaaatattcctcttaactaaacatacttcaagagagctggccaaccaaagttatttaattagatctagactagagctgtagttttcattatttaataagaaaatatattgcaacgtaagtccactatatatagtataaggattaatggtgtagccatttcggtaacaaaacttgcttttctccaacgaggtccactgagacccactagccacgctttaaattcctagttccttatcgaatagatatatatcatattcgggccattagttaagtgaaattgggtatcagtgtgtctagcactctcctacatatcaatatcgttataagtccaactaagtatcgggtcccatataatttaatataatataccttttagggagtatcgttaaccaatcacaacgtgacatattgaggcaccactgatacctcatagcaatgctcattagttaattacacacacgcacgaacacaaaacacattaatatttatatatataataatgacgttattgtattattttgttacgattgttatataccagagccagaaataatgaattgcacctgtaaatgtaattagagaatttaacagcccttacaaccaaatatataaatgaggatgatttattggtctgttttcatgggcgaaacattattaataaatattctgtgcaggtaagggcggcaacagtgacggagggagtcattgagttagggctgtagccctcctagctcaaacaaaatttactactttatatatgttcggtaaaattaatacgtaagtatacgtaataaaatatagtatcgttctcacaataattaattattaattactaattgattaattttttatttttatttgattaataaaagtattagagaatattaagtaacacaaaataaataattaatatttaaaaataacaataataaaaataaggattattatgatcccaactatcctttattttattttttgaatgtaattacttaatttttttcttcctattcaattgaaaagttgaattatattgttttataattctagtttaagacttacaaactcaacctatatgaaaactctcaggattactatggtaaaatttaatcaaaagaaaatattaggcaaagtaattcataaaatcatacaaataatttagatactttcgtcctaagtcaatttgcatccataaatcaaatcatattcaaatctcactttttcaaattttgattcaaattcatagataacaattaaaggtgatcagtcaataattgtaaagttaaattagattgcatggaatttaaataagataagaagatgaaattgaataaggacattaatccataaaaaaaactcaagtgcttcacatgataattcttaaaaaaattagctattaaaagtattctaaaacaatagaaattatattaaaaacataaaagataaaaatagagaaaatagaacaatgtttggagtccttcaatggtgtcttctgctccaagttgtccttctatgttccaaattggtctctaaactcgaatgataaagaaaacctagctccaactcgtttta

SEQ ID NO: 219168 - DNA, 3062 bp, Cannabis indica
aaatgctaaagggcaccagtggttcatagcaccctcttatgggttaatataatagcttttaagaagtatctctagctaatcgcaacgcgacatgtcgagaaggtgctagacaccattagtgcctaatagtaaatgctgtttcccattattgacaaactatgatatttaatacaagtcacacagtcaattatttggtgatatgttcaatttcttgagaatttgtaccttagtgtattgtagtttcttgaaaagggatttcatttgtagcacaaaacagtatcagcatattttgtataaattgttatattttaccaccacttggagaactaaattttcaccaaaatacataaactattttatcataagaaataaataaacataataatcccattcacaatcttcatttttttccccaaataattgtaactttataatatgattgatactagttgattcccaaatgatctaagtcacctttatgtcaccaccccttgatgacggttgttgctttatgaaattaataagtaagacatgtaacacaacacaaatttatagtttaagaacacatatccatactagttatgtattataataaatttaattttatttataaattattaaatcatattatattttattttatgaatgtactagtgaagaaatagaataaacaaattttttttcttgaattatcatccgagttttgtctcaaatttttttattgcaaaaattgtctttgaattatacaaatcatatgaggtatggtggcagtacaaaggtctacttagcaattttaagcgacatgaaattcagtttaatgatattaaatatacaaacattaattctaaaaatgcatatgtatattctcataatttattattagattgttattttatgcatttattttttgtttgaactcttgaactgagctagattaatgactcattaaacttgaggctacattaatcgctcaagcactgaaagtgagtttcgtgcattagccaatgctgcagcagaactgtaatggattcgatcattactagctgagcttcaagtcaccttaattcaatctcttgtcatctgggttgacaaccagagtgtaactgcattagcggccaaccttgtgtttcacgccaggtctaagcacattgagatagacttgcattttgtgtgtgatcagatcttagacaagtaactatatgtccagggccggccctgaaatgtagtgggctatagggtaaaaattattttttgggcccttatttagaaaaaaaaatggtatttttcaaaatcagcaaaaaaattgtgtaattttaaaagggcaaaatttttttttgggcccctggactaggtgggccctaggcacaggcctagcccgcttatgcccagggctggccctgtatatgtcagatacgttcctaccattgatcaacctgctgatctcttaacaaagtctcttcctactgatcgattcttgtacttaaaatccaaactaaaaatggtatccacaccatttagtttgaggggatgttagtattgttaattaaagtacaagttggtaagttgttaggattcctaactgttttactaactctcatttagttagtttgttaaagttgttttcaactcaaatgactttgtataaataccatttcaataaatgaaatcagtgaacttttgttgcattgttcttctctttctcgcttcattctgtttcgttctagatttcttcttgaaatcttacacaacacttaggtgccgtttggttggaggtaatgaaacagaatgaaaatgaaataatttttattccattcctttgtttggttgcatattaaagtatcggaatgtcatttcaatggaatgacttttccactattttggtagaatgactattccatttataatagaaagaaagaccacttcaatgtatgacgagataatttttataatttttttctcaatttttttatgcattttaaattttattcaattctattattattactattctgatatttgtattccttccaactaaatgccaatgtcaatgatcgtgtggctgatagttcgcaaagagaaaatgatatacttagtgtgcttcgaccttatacaagcttggagcatcttgtgattcaaaactacagatgtacaatgttctcagaatggattggagaccctgaattttctactttagtatcaataaagctattcaattgtgaaaattgctatatgttaccaccacttggacaactaatgtttctcaaagatctctccatctatagatgtcttagtatgatctcaattggtgatgagattgctggttacaggggtcctctattcagttctctagaagagctatatatttcttatatgttggagtggaaagattggtcatttagtggtgaagctgtgcaacaaggtcaagtattcactcctcttaaaattcttgagctgcaaaattgtccaaagcttaacagattgtcacaacccctccttctattgttacactaaacttaagaaagtgtccagtgttggaatcgcttttagactggggatcacactcgaaagtaaagaatctttcaatagggagtttcaaaacactgcttcagaatcacaagcaatggaatctccgcaaactctcttgtttagaatacttgatgggaagatgattcattcccaaccactcttgtttttcttgacattaagggttgtacgaacctcgaaaccataaattgcaaggcctttcacagggccggccttaggctaaggcgggctacacccgcgactaggcccactcttattagggccccgaataaaaaaaacttttaataaatatacatatttttttttaataatttttaaaattatcatttattgttatgaaaatggcccaaaagaattatttttctaggacctaaattaacttagccttggccttttagaaacttacctcccttacatccaggcccggccctgggcataggcgggctaggcctgtgcctagggcccacccagttcaggggctcaaaatttttttttcctcttttaaaattatacatttt

SEQ ID NO: 219169 - DNA, 1934 bp, Cannabis indica
ttttttttttttgtaaaattgaaaactacattttgatgttttctgttttctagttttttattgctaacaaaaaaaaaaaaaaaaactactatttttaaaaaatttagccaaacggcctttattagtttttaaaaactgaaaataatttttaagttatgaagtaaaacagaccctaatcatttaataatgtttttacattagttcatagaatcctataaatagatatgtaatctcgttattttgtaccaagtcaaaaatcacacaagttaaaatataaaatataatttcttccatttaagtattctctctaaaattcttcttattatccaacaaaataagatcgatcaaagtatatatatatataccttgcgagctcggacattatgggaagcatggactaagacttgttcgagttcattcaattcgcccaaagtcaatgaactcaaatcctctccagtgtagcgttgtaaactcagttgaagattttgagtttcgcttatgattcttctcatttcaccgtggagttgttcctacaaaattatacatttaaaattataattttcttgttaattattaaccaaatatagtttgtggagataatggtgtactaatacaataatgtgccttactgtgtcattttgctccacaattcgagttcctgttgtgagttgatacttctgtattatattctgcatactgtaataaaaaaaataataaatatacttagtaaaaactaataatatcaaaattttataattatacatatttgagtgcccattaaatttaatttattattataaataataatgaccaaaactgcgattcagagaatttcatcattatttaatttttgacatgtagctatatatagtgtgatacgtatataataatacattattcttggtttgaaaatgatattaattaattggaccacttccacaaatattcgtaagacagaagagaaatttctacattgtttaaatacaactcaagtatataataataattaagtaattaataaattaatttaattaataccttaaagggtcactacagaagtcatataattttccattggcagagaaaatgatgagaccgatctgagcatcgcatagcacagcaagctcatgagttttctttaaaagcccagctcgacgttttgcaaaggttacttgtcttgtgattttgttctctattcttgaaatcttaatctttccacgtcccataattctgtgcctagctctaattctcctatcaaacacaacaaaagtaatatatataatagagatatgatataaggaattagagaaaggaagaagggttcacacttacagatatgatattgcaggtatatatgatcctcttgtttggctagagcactatactattttgtaatatttggctgagtaagaaaaataccccattgttctatacatgaatcgagggcatgttgtattgagcaataatgagatggtatgtggtcccatatatattccttagttggtatatcaaatgtgatatattatgaattttgctacaataaaaaagattaccaaataaggaatgtttctatgagcactagctacacctattaatggagaaatggacagtgaagtatacgaaacgcatgtgatcgttttgactcatttcatcagatcaactctctttttcaactacactaagcttcaatattaagtttgctgaataattataatttattcaattcacttaattaaaattatatattatatatagtatgtatcccaccttgagtgaccatcactaatatatattatagaatgtttaagctaaatatttaattatatataaaaaatatgggtgattattcaatggttacatttttattgtaaccatatggttacatttttttttaaccttgtaatagcaggttactaataggtagactttccttt

SEQ ID NO: 219170 - DNA, 3007 bp, Cannabis indica
tcaaatctaagagaaattctagaaatgttacctgaaattgagaaaaaaagattaagtaaaagaaaatgccatttaaattaccaaattgtttttattttgattattatatttatttgaaaaaataatgaagaaaatcaaaagagcattattaactctaacaaaacataaaatggaattgattcaaactcaagagtaaggtgtgaaaatgatcttaaattgattctatagattctccaattatcagtgatgaagtttcttaacattattagactaagtaagatccatgtcttaagcttatctaaacatataataataacaataatatatgaagttactacagagacagagtttccatattattagcctaatatactattgtattatgtaaaatattttaaaaatagaaatgaaattttgctcactcattaactcaagagctcattctttgtcttgagaagcatacaagtctcttccacaacggtcgcatgtgttcaaagaagcattcgaagaggtatctttcggctttggctttggctttgtctttttcatgtctggtaaatccagttctagaacatcatgaagggcatttaacccttcttggagctcatccaaactattgtaataaacaaaatatatgtcacaaaataacagcatagattccatcataatcatattcatcaagtgtgttgagaatttcattctggatttcctatgaattatgcataagtttatttcgatgcagctagatattgttagattgtttcgaaaagagaaacttgttgattggtgattcaagccttctcaaggaaaacaaagcaactgagtgaaatgaaggtccgaacgagtcgaaaatggggctgaagaagtatgatggggtaagattaattcttggtggctacatggttatttaagtggaaaagatttgaggaattgtcttttctagacctgatcagggaatgaaattgatagagcgtagtagtgttgtaaatatggggcggactttttaacacggcacgagccggcattaaaaaatatgtgctccagcacaacacgacacgagaaaatatgaattttggcacgacacgacaagcccgaaagtacgaatagattaggtcgaaagcatgacacattaaaaagttcaataatttgataataataacaatgataaatatttaattgtcaattaaaatggtaatagtattcaaattataataattataattattttttatatgattgtgtgtaactattattgaaaaaatacataaaagtaattaaaattataaaatacacatattttattatttagctcatcaattataataaaaatgcaaaaatataggacacgaatttgagcccgtataagaaaacaggttggtccatttaagaaaaatgagatgacatgtataaaacacgacataaatctgagcatggcatgaattactggacttgtgagttgtgtcgggcctaactataaaattgttgcacggcatagtacgacccgtatttttttatggcacagcacggcatgacccatatctttttatgacacggcacgacacgacacatgttttatattttattatagtccggcatggcacaacccatattttaaaaagcacgaaaatatgggccaaattagcatgacacgcacgtatttacagctatggagcaaagaatagtcagaggggggctcgattagagtgtggctggggtctaggctaagagaataaatagaggaagggatttcatttgtaagggtgtgaagaaattggttagggttgtaacccaaataggagagaatctgtctctcgaatacaaactactattcggttttcctatttctcttactgttcttgctgttcatagccaattgataggaaattcctatcaaagatctcatcttactctaagttaaccttagccagctgtaattttaattcatgcttgtaaactatttctctttataggtgtattgttcgacagctacagttagcttgtaaccacggtattcctttgccataagcgaggcataagcgaggctaccctaataaatttgggaggaggtcagtctaagacacatgacctcaaatgaaaatccataaaggcaagaaagaacccttaagattatggtcaagagtagcgttaaggattggcacgaaattttaacttaaaatgtcaatgtcaatgtcaaatgataaaaagataaagataatatgcatgtgttgtatttcatcatgatgtcaatgggaaattcataagcatggttacttaccttattgtcaatggaggagttaatctgataatagtatcatgtgtaggctttgcaagaactcctctttccttcaacttaagacagatatcataagccgaaacagggtgcaagttcttactgttaagctccatggcactgaacaagcctcttcctcgaactttcttaatgtagtcggggaatttctgttgaattttaagtagttttttcataagttcctgtcctagttgtgcagatctgtaagaagaataaaagcatggaaattgtgaaaattctgggaaaagacttcataaaaaataaatttccatgtcatattgaagacacggcggtatgcaatgaaattatttacctctcggaaagtttctcatctttgattacatcaagcgacgcaatggcaattgcactagccaatgggttcccgccaaaggtactaaatcaataacaaatcaaagcaaggtgagctcttgcctggtaagtgtcaattggaaagaaaagaaattataaagacgacatttttctttggggggcgatatggttctttctctatttacacacaataaaatccattgagacaaagccttagctagtgatgattagaatcaatattagcaagtaagcataagtgcaaaccttccatgctctccaggtctgatacagagcatcacatctttgtctgcaagaactgcacttaccgggattactccaccgcctaaggcttttcctaaaatctgaaga

SEQ ID NO: 219171 - DNA, 2258 bp, Cannabis indica
gcacaaattgattaccattacaattcccatttctataaaccaaacatacccttattgtgtgttattatttttcttttctagttttttttttttttatgtaatatttttatttgtattttgagtatttttattgtaaacttcttactctttcttgtaatgacaccatttcctaataatatctaaaatcatatttttttttatgacgtattgtgtcatatattaatacatattttttttcatgtcaggtactcacccatacatatcaatagttgaaaggagaaaaaatacacaatagcaatatattggttaataatttccagagaacgtatttcaccaaacaaacacacacacaaaggattcgattctgaattgaaaagcaataagaaaaggccatacaaacaaataacaaaaatgtgaaccgcagcaattatgaccgagtcaggaacgagttgtagaaagttggggcgagtgagtgactcggtgttgaaagccgtagatattggcaccattgtctttttcactgtgaaaaggttgaaagcgatggaaaaaagagccaaggaaaaaaaaaataataataatatatacttttcttttttataactaagaaaataaaaataatattaatcttacaagacaacaaccgcacatatagaccagatcctttttcctcattttcaagctttattaaattaaaataaataaataaatagatgaagaaaaatcttccttactcagcaataaaagtagaattagagagagaaaaagaaatggctaaaatacaataaataaataaataaataaaagtaagtgatttgacgtgttcttttgttgcttccttctgtgtctacttttaccaactcttttcagttgctttttttatactgtaccaaacaatgtcttctcagacaggtctgcctcagccaacgagcttcgatccaacattattttagatcttttttagcatccattattaatttttttataattatttagacttgtgtcaaggtttagctttagatatattttttaaaaataaactagactctttttttggatggaaaaataaagttgagatttatagctgggagacatacactaatatcatgttacaaaaatgtgtgtgagacttttacaaaatctagtatgtctgtcgtacatttttgtcagtgtgtatggtggtgtcattttttatttttttcttcattaaaatatataaatcgtagaaattttgataattatattttaagtatattttaaatactattgtcactttttagggataattgcaactacataagactagagtataggattagttctccaaaccaaaatcttatctaagcctaataaaccttttgctaaattatgtgtcataatattttcattccttggtacatgatagaaacattaggaaataaaaattagggctcaacaaccttggacactagattagtaagtgaggaacggtctttctatttatgtttgatcttcgtaactaattgaatactctccaactctattagaaattgggaattacactgcaaaacaccaaatcaaagcttgatacagagcttgagattttgcataaagaagaaaaactgcttctgaatctcaagctctatatcaacaaattacttcatcaaagataggagcagtttttctgcagaatctcaataaccaatgccaaaagagaaaccataccttctagacatggcttacaactatctaaggagcagtgtcctagtgatccccaagagatagacatataagaaagtttctttatgcttcagcagttggaaacctgatgtatgctatgctatgcactaatcctgacatttgttatgcagtgggaattgtgcgcaggtataagtcaaacctaggaaaggaacattggacgcctgttaagcatattctgataacttaaagaagacaagggattatgtgttaggctacaagggtggtgctttaaatcccttaggctatactgacttagatttctaggcttgtcttgatgacaagaagtctacatctgagatggtattcactcttaggggtggagtagttgttcagagaagtgtcaagcaatctgcaatatctaactctactatggatactatatacataactgccactgaggctgttaaggaactggactggctaagaaagttcttcacatagcttggtattattccaggcatggaaaaactaccagtgttactttatgacaacactggtgctatcaccaacagtaaagagcc

SEQ ID NO: 219172 - DNA, 3195 bp, Cannabis indica
tggacgagtctttggaaatcattttttgtctccttcgaacaattatcgatatattttacgtactcaggattatctttcagttccaaactgggtttattgccccttcttctagagtattaggtgaattagttgatgatccttttgctattgctaaaagatacttgttaacctacttcattgttgatattctctctgttcttccactgcctcaggtatgaatctgctcaattctaactcttcttctttaatccattttactttcactaccttacacacgtatgaatgttgtttcatcagcttatagttcttgctttcatgaaacgctcaatttcaactatggagatgttgaaaatcgtaattttatgtcagtatgttccgaggttcgtgcgaattgtgccactattcagagaagtaacaagtaattctggagtattaactgctactgcttcggctggagttgttattaacattttcctatacatatatgcaagtcatgtaagttatataaccgtttttgaattcttacaacactcaaaatgccatgaaatgaggacttctgaccaccaaccacacttgaatgttttgtactagttactaggagctttatggtacttattctcttttgagagactctatacatgctggcgaatcgtatttatgatccagaactgggatcctagatatatgtattgtactcaaaagtctggtgacaatcatgatcatgtaaaagccctcctgaacgtctcttgctcttccatcggttctgataaggatgtatttgagtttggaatgtacactgatgctatcaagtctggtgtggttgaaagcacacattttcactccaaaattttatactgcttttggtggggactacggaatttcaggttggtcttatacaccttctctttatcatatgaataatgtactttgttttaagttgtttatttacctcaattaaaaactctttctttgttgtttgcttttggcagttctcttggccaaagtctcaagacgagcatatttattggagagatattttttgcagtcttcggattgatattcttctcattactcattggcaatatacaggtaaccaaaacaaaagcacatttggtcaaacaaatacattattaacttttagtttagtactgagttgagatatctaattcactcttgtttttctttacagaaatatttgcagtccacaactgtgagagtcgaaaaaatgagaatgaaaaggcaagaagtagagatttggatgtcccaccggatgattcaggagcccttgagggaacgtattagaaaatatgaacaatataaatggcaagaaacaagaggtgttgaagaagacactctgctccaaacccttcctaaagacctcaggagagacataaagcgccacctttgtttggaacttctgaggagagtgagtgctttccttagacatattatttcatcattttttctgatctggtttttgctactctttccaccaacttagttttcaactttgaaaaggtgccaatgtttgagaaaatggatcaacaccttttggacacactatgtgatcgtttaaagtcagcactctacacaaataagagtttaattgttcaagagggtgatccagttgatgaaatgctcttcatcttgagaggaagccttgcaaccatgaccaagaatggtttcttcaacactgctgatctcaaggctggtgacttctttggagaagagctcctcacatgggctttggatcccaactctgcctcaaaacaccccacctcaacaaggacggtggaagctaaaacagaggtagaggcatttgttctcatggctgacgatttgaagttggttgcctcccagttttgcaggctccatagtaagcaactccaggtcattttcaggcaaggctttaaacgatgaatctcccattaatcctaataacatgcttgttactttagcaagagtttagagaaattaaattagtttagaacagactaaccagctaactatgagatacagctgtaataagctacttgtaacagaaaattaattgtcaactaactcttttatagaaagaaaatactaaaactgaaatagggtgatttttgccgttttggtatacttttcaggttctactcttctcaatggagaatatgggcggcttgttacatacaagcgttgtggcggagacattggaagagtaagtttgacgagtgtttaagacaaagcggtgtgtgcagctctagacccccgcagagattggctcctttgctaccttggaaaccagctcagcctgatttcacttctgagcattcctagctactctctgaattttagtacgaggcatatgcataagctatttaatttgctaatgtataatctgtctttgcataatttatgtataatatcggcctatacatagggtgatttcacaaattagaaatgttattactttgataattacttatattttttaaggggataatttcattgtctctgatcttcaagattaatagacaataatgtctgctaattgccaaattcaaatttcaataagattttcccctttgatagtattgacgagtaaacgggccatataccaaaaatacctatctataatcactaatacaagatatgattattttaagaagggtttgataaatcatacgaattgaggaattgcaattagactttctaccagaatacgtcctgttgctacttgttattaattgttactaattttctgttcattggactaacttattcatatcgtgaatacgaatgactacttctagcaatattacatagatagagatgattattgtacaagtgtatactatatatgcttttgattttataattatatcataatcataattctcttgatcaactaactgctttcagttgtcttcattaatttatatcttgtttgtcatattttcagttctacgaaaataaataaacaacctcgcaataaaaaaatttcccatcgttttatgcaaataatataagaagtgaatttctaccgcatcccatcaattttcaaaattcattttcacaaaagataagattaaaatgacttcgagatcatattccctctttatcaaccgattattttggaggctttgagaatcacttaccccaagtcccaacgtataattatatagctatgtatatttagagagagagagagag

SEQ ID NO: 219173 - DNA, 2530 bp, Cannabis indica
catgattaactgctaatttctaaattaaactaagcggtctttacagtgtgagtcctcacccatgcgcaattctcaaatgcactacttatacacttttaataaagtgttcttatctcatgtgggactccaattattaacattttttattattatacaatttcacaaaagttccaacaagaattataattgattaattaaaattaattaattaaatctaaaagcagtatcatctcaattaccaaagagaccatataagtcaatatatatataactgagttttcaataagttttaaaacaaccaatttaggaggatggcattattcttatatagaatagaatataatagtaagtcttaaagtaatattaaaataggttttacttcaataataaggacatcatcaatcaaactccattggcagaagggaaaccattatatggatcagtaaaggttgccacattgccaggacgagaaaaaacaatctgcaataaaatataatcattttaagtttaatatgaaaggctaagcctaacaatatgtattcggtcaatatcaagaagatttatggtgaaaaatcatcttatttaatagtttagattagatatatatttatataacaaggtagttgatcatgtaaagtattataaacctggtaatcaccgatagtgcgtgatttgaaacctgaagcacaataatcaaaatagtactcccaagtcctaataaacttgtcattgaatccaagggcctggattttactgtcaaaacacacataaattaatgattagctagattgataattttaatacacattttattacatggttattaatttactaacctttggttttctaggaaattctttctccaaatcttcagtgtttggtagtaatgaattccaatgttttcaatgtgctccacactacacttggattattataaggatatataattagtacaatcagtataaagtgaccaaaaaccaattatataatattgatgatgtaaatgtaatctatacagatagatataccagaatctggatgaagcagtcatggcagatgttactctagttaatgaaggtagacatcccccagggaaaatgtactctctcataaagtctgatcttcttctatgatcctcgtatcgttttaaaaccaccattattattacttttactaatgttatattccgaactatatatgttcggaagttaaattttgatgtgtaaaaaaaataagaaaaatgtacgagagaataaaaaaaattaatttttagattgatacaatttttcattccatttcaaatattttattattattattttctacatttttccttacttctttattacgttactaaaatccaactttcaaacaagatagatttatgaaatgttattcatgaacttggaaattaaatgtgggggacacacttagagtgagttttgatatgatgattgagagatcttgtgggggtggactcgggctagctgacattataaccaccttgtgtgaagcacatggagtaccacaatacttctatgatacaaaggcagcgtcacaacgcagtatctccatggccacggtgattcgatttaaaccaccgcacccccatggtcaaccgccagctcagagaaatcctcctgcggaagaacgagaggagcatgaagacattgtaacgccacgtattgttgggcctctcgacccagccatgcagtacacgcatgatcagctgaattatcttattcaacagaatatgcacattcagaattacatggcccaaaggagcgtttttgacgagcaacaggtggcccaattgaacacgctaatcacaagaatgaatgtcggtgtggaagaacccaactactttgccatgccgccccgcttcaatccttatgatcagccacctccaccaaaccccttctgatggggctcaggtaagtctctctggaccacaattttattttcacacattggggacaatgtgcatctttagtttggggggacagatttaattttttttttttttttcagtttatctcagttttttcgtttcgtttatagttagtctttggtatctttagtgtcgtgtgttgatatctgagctggaaaaaattgattgaattactgttgtttacttgtgcaatggattgaaatcttaaccgtgtgcttgagtcataactctttgaattgaattggatgttgtgttagaaggttgttcatttggatgcaaaacatttatttttgacgtgtatcacttttattctacttggattgtggaatgtttgcttgacatggaatagaacttgtttgacatactctcttgaagcgaaatccttgatgatttttgtttggaaaataatttaggcgagttttctttggatcgattgatcctttcaagctcacctaaaaagttttatccttagtatacccaaagtttagccttaacctgttttaaaattttcaccacttaactaagcttaattcgttatctttaactagtttcatcatcaacgtaccttattatgccata

SEQ ID NO: 219174 - DNA, 2609 bp, Cannabis indica
tccattgaatttattgtatgacacatctaactctttcagatttgtaatcctaccaaaatctatagggacaaattgtcctgttagattattatgaggcaaattcagaatttctaaagagttgctattgcaatcaatgaggcttttcaagatatcagtgatggtacttgaattgaatgtattgtaattcaagactaattcttgaagcttacaaagattccctatagattttggtacttccccaacaaatccactcaaatgtaaatgccttaaagatttcaagcttcccaaagtatgtggaataatatgatcataattatcaagaaatagagagagatcaacaagattattgctcaaattaagcaaacgagaaactgttgtagatccaaaactactcaaagagactacttcaagagttgtgatagaattggtagaagaatttgtagtagtgtgagaaaaagtggaatcataatcaagcattggaaattcacaatcatttagcaggtgtaagtttaataaggagggagctgttctaaatgaatcaaaccagtctatggctttggtgaaacaagaattaagctttaagattctcaaattggagagtctagaaagccatgtaaaactattagtactcaaactatgataaacggaactaagatcaagaatatccaacttggtgagatttcctagttctggaggaataattccaataagaggactccctgaaaaattgagatatttgagatttgtgaaagctcctataaagagggactaagatccaaatactccaaatattgaagttgaaccaaagatggactcatttcactggaaataggatcataggtacagttaggacgaagattaagcatgataatatgattagttaaattatgacacctgattcggttccatgtgcaacaatctttttatgttatttgtccaagacgataagaggtctcgacgatcatccaggcctcgcttgaaggtaagaagagcttgtctctcagtttcaatacacttgtaggagtgagatgaaagtagtttaggagtttggaggattttaccgtcaaaatttgagcttagagagttaagtgcaagtacaatgatagtacttgagaggagttagccgcaaaaaacactatttttatatataaaatatgactatttttaattgtttaaacgcaattacacaatgacttgaatatatggactttgtaagagtatatatctttgagtaccaagtgattaactttcctacaaggaaaaacacaatagcatgatatgatgaagttgacatatttaaaaagataaaatcaagaaagaaagaaaaagtcccaataatattatatacaaatattatcaacattagattctctccttaatttaaaaattctaatgcacagaaagccaatctccaaatttattcaagcaccccagaaataagcaagactctaacaagtatgagtttcggtacaaagctccacaaaccccaataaaaccaagagcaattccaacttcgagtccaatgtaaaaccatgacatgtcaaaccattcttgatcatcatcatcatcatcatcatctgagtttgaatgaggattgaaagttgcatgatttccagaggagcattcaatcaaaagaggaagtccacacaattcaccatttcccacatatgaagaagcattgaagctttgcaattgtgtactaattggaatttttcctgaaaaatgattatatgacagatccaagtactgcaagaaagataattcccccaagccaattggaatttctccactaaaattattgtgggacaaatcaagtgcttctagtttactcaagttgccaatattccaaggtatgactccactcaaattattccttgacaagtttaattgaagtagttccacaagatttgtgagctccattggaatctctccaatcaatttattacttgaaaagtcaatgattctcaacaatcccaaaatctcttggtactcatattcctttcctttccaagttacttttgtcttgatgtcaaatccagtagcagagaaatggccgaaagcatagacaacagtaagtgatgaactactctcatatgtgaaattgttaatacatgatgggataagtccagatattttgttatgggaaatatctaatatacgaataccattaagatggcagagacttgttggtattgttccataaaaatgattagaatttagtctaaggaaaaccaattgttttagcatttcaccaatccacattggtatatttcctctcatgttgttttctccaatatctagaaatagcaattgggtgcaattcttcatagaagatggtaaaattcctgacaaattatttttgctcaaatcaagcatttgaatttgatatagagatgcaatcgagctcgggatcaatccaaacaatctgttgttgaacaagttgaggaatttcaaattttgaagatggaacaaacaatgaggaatgtttccaaataattgattattggaaagatcaagaatttgtagattatgatgacttgataataatatagagcaaaagagaggatggaatgttgtgagagtgttattagaaagatataaggcatttg

SEQ ID NO: 219175 - DNA, 4812 bp, Cannabis indica
aaaaaaaaaagttcttatgataattgtgatgatgaaatgtctttgttaactaggcattttcaaataattatgaaaaagatggagaataaaaaaagttcacttaattgtcaaaggaaaatgcatcatttaagccttcagtaactaacaataaaaaaaagaattcagtagaagtagaagtagtgtgaaggttttgggcatattcaaacaaaaaggaaaaaaaacgtaacaaaaaaaaataagaaaagttttaatatcacttagagtgatgaataaaatttaaaaaatgttgcactaatctatgtttatcctaatttgtgttgtgattaacaagtgtaagaaaggatggtatgcttgaatagtactatagaaaaaaaaaaaaaatactaattcagatgaatataaaattattgaagagtccctcgtataaaaaattacttcatattactttattttcttagctttgtgcctcatcatcaatagaatcattcattttcttcaaaataataataataataataataataataaccttgagaacgtgttttctttctctctctagaaaaatattaatgtcataaatatcttacttttaatatttgctgtaacttgttaatttttaatgaaaaatattagcagcataattatctaaatttatgaaactattgttcttaaatacttaactactagtttttgaagcataaaattaagtgaaaaacaaggttgcagcaaaaactgaaaagtaagtatttatacagccaaaattaaaatttgatatttaagtacaattcataaaccatttatgctactaatatctcttattttaatactatgaaatgggaactcatgtggcttcgatacaaattattcagagttgctgtaatatgcaaatgcagtggctatggctatggctacaaagaagttgaaataaagaagtttaaaggatgaaaggccaaaaaatagaaacaagcatcagcggtttttatatagctttgctatcacacaataataatcataaacattgtcattttggattcagttcctgctatctacaagattacaaggtatgagccatgaatcaaaagccttcatcaaatcattttttaaaaaaaaaggaaagaaaaaaaaaaaagaacaatctctcctcacattatccacaacaagacataacacatgcttccacttttaccttttcgatcgcgctcactttgatgttgcagcaaacttttcttgaacagcaacaggaaaaagaatgtaaattccgataataatatttgaaacctccatcaacgaaaagaaagaaagaattgcttcacactgaatcgaccccctcaacttgttgtcgtgccaggtatctttcccttcgctctttctgtaaagcaaaaacagaaaaaccaaattgagcagaaattagactatgcatggttaaatctacaaaagcacaacattgaagaaagacgaaatatattcaatgcattacccattcatctatgacaagtccttccccaacaattctggggcctgtgtcttctggaggctttttacgtgcttcaagtgcagcctcagcatccgctaattgtctcttaagcttctctagagccttaacagaaaaacaaaattggaagctcttttcaatctcgatgaaaataatacgatacaaccattatattattactaaagaaaaaaaaaaaactcagcaacatttcccactcaccgggcttggtcgttcagggtcgaggaatataactcgcaaaatttgctcaacagccacttggtccttttgttcatcaaactgcataaaattttcataggatagatttggtaaacaactttatagtaaattggtctctcttttggttttgccaaaaagaaaagaaacataaatatcacagatagaagacaaacaaaaatatttaaaacccattacaagagtctccacagcaattaacactaatccagaagccagttttcttagaagcagaacataaccaccacactatcttgcataatgtatgaaggtatgcaagtgaaatacaagactcagtgggcaaaaccaacaaaagatcgtaaaaagatttcgaatggaaaaacatttataaatagtgattctggaatctggatatatggtgtttcaaataatagtatcttcagaaaatgaaaaaataacaggatatttgaactcaacagaatcggtccctagcatagacattagtcgtaaagcaggatagaatacatataaaaagaaataccagttctggaacgtagtccatttcccctttcacttttagactcatgatcttgaacttgactctgctcttctggtctactggtttttcatggttctccggaggttccacaaacttgaatactgtttgccatgttaaataataaaagagaatattactatctaatatttcatgtttcggcatatcaataataaaaaaagagaggttgcatgatagaaactcaaagcagagagcataggaagtagaatgagcacaagaaaataagataaaagagaagcagaaggaaggccgagaaaagtgaatttaccggttgcaataagactttcaccgggagcaagtatacccccaggaggtcgcatataacagctcttcggtgctgttgtttggaactgaaaaaagtagccatgttattagttcgatcacaacaacatcaagacccaatgaaatctattcgaaaaaaaggggggagataatttcaaatctaacgacataaaaaagtttttaagacattacagttatctctttctagaataaaataatgtcctacttaactaaggccttttatgctagccaaaattaaaaagaagttagaattaatttccccaacttctgattaaaatacaaatatacacagattgacaagaacattaatgtacattttaccaacaaaaaaaaaaagtttttactagtttgtaactatttacgtacatttccaacattaagaaaacgaacaccaatttcttgtccactgttaggccttaaaatagtctcactattactcagggagtttaccaagtttctcgaataacttgggattttgtaattgttcttgctcttatcaataaactacatttctttcaagaactgaattgtgacacattgttttgacaaaaatgtaataagataaaataatgagttgataacatcagctaagaaacaaggaaagagaaacctaattaccttgaaagctacatgagacttgcatgtgttttttatcccaatggcactcctaacctgcttaccaggttcatctagagataaaagagatgaaagaaatcagtcaataattagaattaacaaattatagctttcaattatctatcagcataaatttgacaaaaatgcatctaattatattctagatattatataatggaaccttgcagaagagataatggcaacttgtgggcctattgacaaatgaaacttaaatgcatccgcccaagtattaggtgatgagataattcaagagcgtaattaagaaacaaggacgaatatgttccagttttaatatctttaaaagattagaatcttttatcataaccaaagtaaataataaaaaagtgaagttattacttaattaaattccaactaaattagtttttaataacgtgagcaaaatcatgcaattaacaggaaaaacaatttcatggtgatggtggttatgatcaaccaaaacattaaaaacatagaattgtcgttcctgaacccaaatgtgagataaatttttggtttttatacaacgaaagtggccaagaaaaacaccgaaccatattccagatcgattatatcagccaagacacaaatacctgcttaagggaaatgcaaaagagaaaaagaaatatcagatgaagaagccatgaacaaaaaagcttgttcttacatggaaagaagagcttgctgggaggatcaagacggagcctcctcctagttggaaggaaggatttagccacagaggagaccgtagtaggagattgaaggctcaaacgctccacagattgatggtggctctgagctgctgctgatgatgatgatgggcatgaatattatgcattgaagacaatgaagaagacgaggacgaagacccatttctcccttgccaaaacggcattctacaaaagctccaaactttcccatcagacccagatttctcagtttcaacagccatttttccccctttcccttcccttcccaccagaccaaaaatataaatataaaaataaaaagtaaaaagaaaacccacttcactatcgccaaatgggcctctcaggagctttttcctttcctcaaaagacagattttgttttgtgctcgaaatcaagatagataatagttggggtttcttcttttcctatccccgaaagtgttttttgtatgatatttttgtgtgtgtgtgtgtgtgtccttgtttatgaaagcatatatatttgcaaatgtagctgaatgtgacctttcacaatatatattttttggttttacctcaaactttttggattgtcggaaacggcggtggtttgatttggtttcgcccttaactctggatttgattggaaaagattgaagcttgggttgagttgagttgcaccactgctcggatctcaaagtttatgggattttttttgcccctatactgtatttttgtctgcctcatgagattgatttctgttttgggttcccgggctttacagttgcttctttcctttctttctatctcctcctacctaaataaaacaatattttattaaaacaactaaaaaaacttttaataataccatttatttctaaagta

SEQ ID NO: 219176 - DNA, 2429 bp, Cannabis indica
cccaataacaaccaccagagcatctcaaaataaaaaaaaattaaaaactagtaaaggatgattctaagaaaaaatatatattttagtattttttttaaggtatattttagtgttatttctactagggataaatatgtaattaattttgaggaaacattctagccagaaaaaaaaaaaggaatttcaccaaaaactgggtattactgtttaatttcctcaaacttgacacggataggagccaaaaggaggagggaaaggtagctactagctagtaccgtggcagacatctcagtcgggtctgcgacaagcgacgagtttctgtgttgccaaagatctagtagaaacttaaatctcaaatttgtctaaaatctcactacttcttcaacaaaagtcttctttcaacatcaatgggttctcttccaatacaaaccatcctatttatctttgtctttatcattcccctcactcactctgttcctttcattgttttgcatggtaagtgaaattctcacctttctaattaatcatactatttttctcaattctagtcaataccctttattccaattctacagttagattgaattcagaatcttacctcttttatttatttattttactcaacgttttgactctttgttttgtttttgtttttcattaattgttgcctacttcttctttgtttgttggcttctgttgtaatggaaaacatgtttggaacaagctttccaggataatatatgccaaagtgacatagttgttaacttgcataatcttgttttaaactttaaaactagttttctaatatgctggggcgctttccccatgcccttttctttaatttgtagattgggattagaatatttgtgtcagtacatgtatgaaagttgtgcttgatttattgagattcttttcatacatgtctttataggcattggggataaatgcagcaataaaggaattacacatttcactgagctccttagcaactggtccagttctcaaggatactgcttgtaagccttttcagtattaaacttttgtttatataacaaccctattcctctttatatgatttaatgaagagaatcggtactatgcctgcagagaaattggagatggctcttgggattcctggacaatgccgctgtttgaacaagtgaatcttaaatttgattatacaaaattggatgtttttgtttgtcattttcaatcttataaactaacaatggataattgtccttctctttgcagacgtctattgtttgtgagaaggtggtaaaatggtttgctgatacattgttttttttttcctttttccactctaagaattaatgtatattttcttacctcccaaattttgatttcattttacaggtgaagaacatgagtgaattgagtgatggatacaacatagttggactttcacaggtgatttaaaattgttgtaaacatatggttttgccacttcacattaactccttcatcttatgcagcaatgttgttaatattatcctgtatcagtctaattcgttattctggagtatatagcatgagctcttgcattcatctgtgttgatgttttcattaaacgtcttttacacatgctagtatgtaaatataatgtgcatttattatgtttctcagggaaatttgattggtcgaggtgtaattgaagtttgtgatggaggacctcctgtaagagcttgatttaacaatccatatatatttgctttgttttgccttgtcaatatttgaaattccattctcttcttggctacttgtatcttttcttttaaatggatgtgctacctttgttcaagcattactagacggggcttagctatgcagatgtaaagataattcattgccatttgccacataccgtgctaaagttgtgaagccaaaatttttcttgaacttgcccttcagattgtccttactttcctttttcttacttgtattgttgacacttatttccaccaattcatgttgaaacttagttcatgcttattttctgggattttaagtatgatctattgttcattatatatttttcaggtgaaaaattttgtatccattggaggtcctcatgctggtaccgcttctattccattctgtggagtatgcttcttttacttgcgttgcaatttttctgattttttattggttcttttcgtgcgtaatattcataagatgttgaatttacaaatatttgtaatggatatgttcttatgtttatgttaatttagcatggctaaacatggatagagaatcaaaggatagttatcacaaaatggtttgacaggctctgcattttgcagtctgggtggttttgcattcttattgacactttaatcaagtcggagatctacagcgactatgtccaggtttatttctttctaaaatttcaagtttttttttttttt

SEQ ID NO: 219177 - DNA, 6110 bp, Cannabis indica
tgtaatttgtagcactgacatagctagattcacattaaacaattttgtacatcatatacttcaccccaaatagtaaatagaaatgactcatttgatcaacacttgttctcttttctgtcttttcctaacttcaaatctcatcactgccctttatttgagaagaatttaaaatcaacttcaacattaataatatttgtgaatcacaaacaataattgctgcaaaaacgaaggcactgttactttctttgatagtgctcagctttcatttccctgatctttaactggtatactaattcaagtggataaatataactaaattagttggaatttttttaaaaaaatcataactacaaattagaagggtttatctaaactctcaaggcaaaggactacaaaatgtgttctctaagccaaatgacttgagtgaaacaataacttctacatggaaaaatgagcttcagatacacactttccaaaacttcatgtttaaggtactaaaactaaaactaaacactttcctataaagagattttagagagagagagagagattactcatttgagttctgtttacatatatgtcttattgatacttataatcaatgtttctgtctatgccaacttcaaaacacattagcctttatttgacatcacttatatgtatcactaaaatcaataattgctgaccaaatgaggcactgattttactgaaaccaaactacagactttgaaagtcattaacaggcataattgaacattttataataaatttgaagtgccaaattcatagtactattaatttgtagattagtaaggataattaaggacgagaattctagatctcaacacaaatataacaattcattgaagaaaaagttaagtagtaattcatttgtatcattcttagagagcatttccatttcagtccccaagaaaaaaatatttacatggtgttggcatctttgccatacaaaattgtaacaattaatcatttttgtcagtagttagcatcaatctatactcatcatcagacatttaagcttgaaacaaggttaatgaaagtatcttcactgcatggaattgttagagcacccattggatgatcaaatccgaattcttcttcgacttgacatagcaattcttggaatgaagaatggttcaagtatgatacaggaatcacaaatcttgtcattttgctcttcccaacataaactgccaaatacccttttggaacatcttttgcactagaaaaaggcctctgaattagttgcttggcatgaactacaccgggaaaacgaaaacccataattgttggtctctaaaggtagaagaaggaagaaatttgtaatcaaagagagttctacaaattttgcaaaagaaagctctattacttgagaatgtgaggagttgagtggagaatgtgaggattttatgttactatatataatgttgaaaaatattgtgtggaaatgaatggtgaagtttgaagagtcaattaatgagcaatcacatggttgtgtcttcctactcctacatcatacttgattcaaagttgacaaccaacttattggacagccacaaagataaactttggtagttgaaggattcattaggagatcaaatatgttccaaaatggtttatctttgctgcatatattttgtatcaagtggggtacccttgtagtttgttcacctgatgatgtctatacatatgtcacagttacaataatcaagtattcatatgtgagtcacaagacaaatccatgtgaagactcaaatacttgtgtttctttgaaaatacctaaccaacccaattcatctatatatatacatgcacattaccacaaaactcaatcatcaagttaccacattctctactctaataatgaaatcatgtgtgttgaggtcactttccaatgttgaagaagcaactttgaagactacaaacattccaataggctactttgctctctaatctatgttggagaagatcaaaagaatagttatgtgtacctttgtctcaagagtatggaagaagaagaagaagaatgacatattcattgatttgtctatactcataatttggcattcaaatgagaaataagattaagatggatcaatgtgtttatgttatttaatttgcaagggaaagaagagatctaagagaaatactaaggaaacccaattacgtttttctaaaatcaatgtttttggtatgatatgatttggtatatatagattttcctttatccaaatgaatagtgagaactagagataagtagaatagtccttaaacagtcacatggtattatctttctacataatttgcttgctcttattggttgaactaaagagaagggtgatcgagctgtctttttgagaaagaccggtttttcattgttacaaatcttatagcacaatattgttgtttgttattggtaatagacatgtataaatatctcaattacatttacaactaaactttcatatatgacttaagacagaaattgtgaactttaaatgcttataatgtctgttgcaaatttgtctagaaatactaagggaaccaaataacacggtgatatattgctattttagtacaattcaacattaggttacatgtatttttatttaataaataatataaaaaattattaaccactcataatacacccctttaaggtacctaatagtaggcccggctaggcgggctaggcctgtgactagggttcacctagcctaagggctcaattttttttttccttcttataaaattatatatttttattactaattttcaaaaatactatatttttttttaatataagggtctaaaaataattttttaatgctgaaatttgtcaaaccttatcaaatgtcttgagaaccacttatgttataagcattaaatagctatgcattatatactactaaatatttttgacaactctaaatattttatatatcaacccaatggaggaacatcttattcactattcataatacatacaatacaatacaagtaaccaaagaaaaaaaaacaataaattaattactataataatgtaatatataactatatatcatatacacatcatgtataccaagaatcaattaatcaaaaaagaaatgaaaaaaaaaacatatggtattattaattaatgcttttgtgtggtcttttgatacttatttttgatccaatgaaatccaagtgatgtgccttctttaactttcttcaccccactcgaagcaaccgccttcgttttgacgaacccttctccaaccttttgcttgtagttagcccccgatccggacccggatcctcgggtcttcttgggttcatgaatcgggtctgggttgtagtcccactgatccgcccatgaggtttctgatgacttttccataattatgaatattttctgtaatacaaatgctttggttttatggtgattctttgtaatgttaagtgatgaaagccttatatatatatatagcattttagaacaaacacgtttagaaggtttaattttttggttgacaagaatgcccttttgactttttaagttttcttctttttcttagtctagaagattggaattgtcgaaatagataatctcaaataaaaaaactgtaattattaaagtaatataacgccgtgtggaggaggagatgtaatttggttgggttctagaattgtcgagtagctaactagatttgaccaaaattcattgatggctttttcttggaaaggaaaaggaatattttttgactagttaaaatgaaatgaaagataaaactaaacactctctcttaaacagattttgtttttgaaagtaggaaagttggaaaacaacagctctatataatataaatgagaattgatattagtcccagaggttcctgacatatcgcgttgcgattggctagcaataatctttaaaagttttatattaaattatataagacatgatacttaattgtaccaatagcgatattgacatataagatagtgcaaggcaccactactaatgtcctttaacattacttaatataaatatatataatgggtattaccaatgattggataaaattagaaaattttgagtttttatacttgattttctatctaactaaaaaaatctcacatttttatagttccatcggttaaaaaaaaaaatttcagcaagaaaaataagaaaagaaaaagttaagtttgagttaaatatttttgtatgaacatatttttgatatagtgtaaaaagagatattttttgatttttttttaattaagtagttaaattaagcatataaattcaaatttgtgattttattattcgatattagatcaaaattcgatagtttgatatttttaaaattaatatttatagttaaatttgtttagcaatcgtttaatgaattttctttacattttaattacaatttttcgtaaaaataatacgaaaataacaaaaaaattacataaaagtaacatgaaaataacatctaaattatatgaaaacaacaacaaaaaatcaacaacaaattaatatgaatataacataaaaagaccttattttttgtaaacaaaatcaaaattaaaatttcatgaaacctcagttttgtaatttttttttttgttgtttttatatatttgtgaaattatccctaaataaaaattagtattatagccctttcaaaaaaaaaaaaaaatcattagtacattttcacatgacatcattgtccattgagatgtgctccctccctcctttccttttctcaaaccccccaaatcaaatatttgaagaaccgccaattcgacgatccgcgtgaagacagtaaattgaatctccaccgttgattgagaatacatcaacgctcaaaattcattctcataactcgcaaagcggattacaacactcccgcttctcatttcacgcctactataaataccaactcaaatccaatattcccttcaaaccattttccatcattttcccgagaagcaaacaacaaaaacaactacatttactttctcaatggctcgtaccaagcagacagcaagaaagtccaccggaggaaaggctccaaggaagcaactggcgaccaaggcagcaaggaagtcggctcccgccaccggaggagtgaagaagccacatcgtttcaggcccggaactgtggcccttagggagatcagaaagtaccagaagagcactgagcttttgatccgaaagcttccgttccagagattggtgagggaaatcgctcaggacttcaagaccgatcttcgattccagtcgagcgccgtttctgctcttcaagaggctgcggaggcttacttggtgggtctgttcgaagacaccaatctgtgcgccattcacgctaagagggttaccatcatgcctaaggatattcagttggctcgtaggatcagaggcgagagagcttagggtttcaacacattttactcattcctcttttcttctgtaaacattttatattatgactaattgggttgttagcttctcttcttactgtttgatctaattaatgaaatattagtcatttcaagaatttgtgattttatttacacaaagcaatctttttgctaccattttattttataaaaattcaatctttaaaaatcttggatataccaaaagtttgaaattcttgcaatattattaaaattatagctatttgcgcatgaaaaaagaaaagaaatagagcacattagctttgtttacaatcatttgttctaataaaagagtgaactataaaactcaaatgcagtttcattttataaatgtattgagcataatttgttagttgaatgttacaatacaacttaataaagacactttaatatggagctggtttcaattggttatagtagggtgggacatgtagtttctataaaatcaatgttgctaagctatgatttcgtgtaagtatatataggtatgtatttctttatccaaatgaatagtgaaaactaaagagtctagtagttggttgggacttggatggggtctagtaagaagcatagttcttcagcaatcacatggatgataagctagttaattatttatgtttcctaatggtttatctttg

SEQ ID NO: 219178 - DNA, 1703 bp, Cannabis indica
ataacttcttagttattctttatttttagttccacatgtgtacaataggtcccccaaagataatacacaggaaaaggtctataatacttggtgaattgcaagtgactaagagaccacatgtctgcttgattacatggggggcattgatcaagcacaactgaacttaagtaaaatttaaagctttgtataagaaaaaaattgaaagctaataagttctgaaaggcatacttcagagtagagataaaagaaatctggatacttgcatatctaacaaaaagaagataaaagccatgattaaaaacaacatggccgatcatgtgtccaaaataaaaaagaccctaagtacatatacaagtattgtttaaaagtaaaaggcccacaggacatacaagaacatgatagtaatgcaaaataaaagcatgaacaactaacaaaaagtgtctaatcatgtgcaagtgtaggtgggctttaattgtctggaccttggactacagcatcgacgtggtctcctaaaggctggccaaccatatcctcagcagattggctggccatggcctcaacaacctagcctaccactaactccatatgcttgctagccacaacctctttaggctggccagacagtgctcccttagcctacctagtaacttggtctgtcccttagcaggtctgattttccaacaacctactctgatagaattccatcccctgacaagtgatctctcgcggaagggagaccttatgtaccctagatcgacaatggggttgtgcagataaacctcatataggacctcagaggataaacccagatatttgtccttgatggcttactacccatcaagggccaattacttctcctgacgctccttctcaagctctttctccaacctggaggtctcggcagcaagccttatcacctcttggttttgaagaccaagcagttagtttgggccatcatttaggtcctaggagtctctcaggcaagtagacagctcagcctgtatctgagcgcgcacatccttctttaccttaagctcgacctccttggcctccaacttcttctggtgaacaccaacagagccctaggcccttgcatgggtgaggctaagtttcagcatggcatgaaaacaaaagaaaaatcaagttagaagtggagccaaccaggccgaccaagggagtctactggtcgaccaacttcataaaaggtgttgccttggctggccaaaagattcgataggctaaccagccgctagcgatttagtctttcaagtaaaattatatataaaacatacaaatgagaaatccctaagggcgttggatgtcaagcactccaactgctaggcctctagctcctagagctcccagtcaatgcttggcaagattctgccaatgtaattttgagcaacctcttctgtcctcctctcacccatggatgagaaaactctccaaataggcctttgggccccctttcctaaaggtctacaaggggatggagttctcctttgcggaagattcataatcactggctagttggccagaacaggccctggaggaggaggaggcaatgtaaactatgtagcattggaagatttggtggtccaggccaccttggtgtgaggacgacctgaggaagcgccactagaaggctctcttgctaaatcccttatcctagaagccatgtctgcaaaaagaaagtaacaaag

SEQ ID NO: 219179 - DNA, 2225 bp, Cannabis indica
aaaactgttgcctctttgtcgtcattccaatgatgaatacctaaacaatgagggaaaaaaagcccattcaatgaaaaaatacatataaatctgtgtgtgtgtgtgtgtgtgaccccatacagggtaccatacctacctctgggcaactgaagataactatcaagttgacgcctgtgtgatgttcggaaattaggaaaatcagaacctataaaggaaacagtttgtaaaaagttgagcaaagagcataaaaaaaatatgaataacaaattgtgacatgcatacttaggagtatgaaaaagatcttatagaatcaaaatgacgataaacatacaataacttgagcgtgagttacacagtatggcaaaaacatgacaaatatattaccataattataagagaaaatacaaaaataagatcatctttaatgcaaaaattttactatgaagcattattgcaatgataaggaaatttcaccaaaattatacaaatcagaataaaagatatagcgataggaaccaaagacagagaaacagtaagctaaaatagggaatattattactgaaatcaaaagaaaaaaaataaaaactaaccaggttattcgagaaacctgaaaacctcccaagagctcaaagttcaccacactcactcccacatttcttacctcagatttatatattattctaaccacccaaacacccctgctaacaaaccagccatttccatcatgacagctgtcctagtagtactacaactcattccatagcaaccaaacatgaaggaaagtaaaataaaaatgaccaaataacttagataaaggattgaaaacagctagtgatacatccttttttattattcaacatgtcagaaactaaggtcacaaaaacaaactaaattatgaaaaagcaaaagaatattgagaaatatattaattaattaaaagaatctattgtagttcattgaatacaaaaggacctgaacccaaccctaccatagattaatggatgtcatcaagaatgcaaaataaatataactataacagagattaggagagttgatctcgaatagagattttatgattcaatatataccatatgaatcttccagtcttcgtataaatgccaactgaaacaaagcacctgcaattccatatgagagaaaaagaaaattaatacacttgaaatccctaaagtttgtggtttattagtctattaaattgtattagaaacatagatgtttgtaatgccaacatgaaggaataaaagacaaagtatgaaggacgaaaccattcaatgtcagataaataattgcagataagtttttcagctatctggaaattccaactccccttaaaaggtactccctctagaaatggactgttgttaagaacattacttatcccggacaaagaacattacttatccattcagcacttaaaacttggacttaactaattaatatcaaccttaatagaaaggaaaaaataatctgacaaaagcaaaatgaaaggcaatataaaaaaaggaacacttgtgtttatgacactagcataagagcagagaactttggtataacataacccaatatagggaactcaagtttgaaacttcgacaatgctaaaaaccttataatatggattggtgacttgaactagacatacagctacaaaattcatatagtcagatcaactaatcatcgaaacatctaaatacccttaaaccttttcaatcatgatctagcatagcctaaattgtttacctcagtacaacagctataaacagcagtgccaaatgaatacaataacaatcatatatcctatagcatttatccaaaattactactccaaaaagaataggattttattattacttatattttttttggaaggatcaaagagagcatatgattttacaggaataatataatatgagtaaaatgtaatcattagccaaaacattgcgccaatatagttaatttctcattgacatagaacttaattggctatttttcttattcctcgctaagccaagttatcagaaaatagctcgacgatctcatcgtcactctgatactaattcaacaatacaaatcattgatcgatttaagaaccatatacaaaactcaacatttagagctcttacacgttagcttccgtacatttcctcgggaaaaatggagaaaacttttaaaaatatatatatatacaaacaatttgatttttcaactt

SEQ ID NO: 219180 - DNA, 3252 bp, Cannabis indica
tatttaggatgttaatcaacatgcttgttggtaaatctagatcctggtaaaatattcccaacactttgataacccgccacacctgattaagaaaccatatagtatggagctcaaagcggtgctgagaaggagacaacatacgatcggagcgagatggctcaggcaaggtttaatggcaagaggtgaaagctccggtggctggtctgatggggattctatcgtgaaaggaacaacatcaggtggaattattggtggacacaatcaaggaaaggatcaatttgtgccccgatcagtgggattggaaggagccattagaggagttgacttgggcatcaatgctagcaaatctccatttaattctatgggatcaccagccaattatggcacaagagatattggcatgaatgatgatatcaatgatgatcttgatggggatttaattgtcctatagtcaaagaggaaaagaatagctgagaatttgactagtgggccaaatgaaggtaatggagaaagtacaaccattaataatgcagtagatacaaaaaactttgttggggcgggttctgtgtcacaggcccgccaagaatcatgaatgtgctaagttagaattatcgtgggcttgggaaccaacagacttttcaattccttaaagagattgttactcaaaagcaacccaattttatttttctgtgtgagacaaaaagtaataaagctagaatagattatgtgggccgaatgttgggttttgaaggggtgtttacagtaaaggcccaaggaaggagtggtggtcttgctttattttggaaaaataccaaagatggtagagttgttggtttctcccaacatcatattgatttctttgttgaagttgatggaagctcaaactggaggcttacaggggtgtatggggaaccgcaaagaggccaacaggaggatatctggaatctaattaagttccttgtgaattcttcaagtgatcattggtgtgttattggggatttaaacaatgtgttaagtcaaagtgataagaggggaggccttccgtacccgagttggttaatttctggatttgaacaagctcttattgattgtgatttggttgatatggacttggttggatacccgtacacttgggaaaaagggagaggaacatcaagatggatagaagtaagacttgaccatgcacttgtctcatctgtttggtttcaacattttcctcaatctcggctcttaaaccttgacacttcccctttagatcataatcatatttttcttgagttcatggtgcctgagaagttcattcctaaccgtcgtttccgtttcgaaaatgcttggctcaaggagccagtgtgcttggagatggattgctggacagtctctagccgaatgtctacggtagagaaaattactctttgcgttgataagttgtctaaatggggatcaaatgtgactggaaattttaagcttcgaatcaacaaatgccaaaacgaattgaagaagttgaagaataatagagatgccctttctgtccaacgttatagtgaagtaaagaaggaactctttataatttggatcaaaaggaagcgttttggaaacaacaggctaagcaattttggttaaaagaaggtgatcaaaacaataaatatttccactgtgctgctagtaaccgccgaagcttcaaccaaatttcgaaacttaaagattctagtggtaattggaaggattgggaaaatggccttgctgacgtagtggtggattacttctcttctttattcagtgcttcaagtttgggtagtgatgttgtggtccagtgcattcaaaggaaggttacatctcagattaatgaagaccttcaccaacttgtggttgccgaggaagtgagaagagctgtatttagtatgcatttcgataagagtccaggtccggatggtatgacgcccactttttatcaaaaatgttgggatattattcagactgatgttactgctgtggttcagaattttttcaatactggtgagtttgatcaaggttatggtgatgctaatgttgttttgattctgaaaaataaaatgcctgaaagtatggttaatttaaggccaattgctttatgtaatgtgttgtataaaatcattactaaactaatggctaatcggatgaagccttctatggatcaaattgtatcagaatctgagagtgcttttattcctgggagactcataactgacaatattttagtctctttggaagtgcttcattacttgaaaaggaaaagaaagggcaaggatgggtttatggcactaaaactcgatcttagcaaagcatatgatcgcattgaatggaacttcttggattaagttcttagaaaaatcagtttttcagacaattggattttgttggtgatgaagtgtctcatatgttattcgcagacgacagctacttgtattgcaaagctactcttcaagaagctacttgagtcagagaactcctccaccagtttgaatgtgcttcggctcagaaagtaaacctggggaagtcatctattttctatagtactaatactgtgagccatgttagggaggatatcaacagattgttacaaatgccacaagaagatgataagagtatgtatctgggtctccctagtactatgggatgcaataagtcagctgtgttgggctttttaaaggatcgagtcaggaaaaaacttcaaggttgggactcaaaagtcttatctcgagctggtaaagaagtgttaatcaaattagtagcgcaagctcttcctagtaacgctatgaatgtgttcttacttcccttggagattagtagagatattgaaagtactatggcaagattttggtggaagagttcctcgaaggacaataaaggaattccttagatgtcttgggagcgtatgtgccacagtacaaacaatgggggccttggttttcataatcttcgtgattttaacttggctcttttgggaaagcaaggttggcatttccttacaagacccgaatctttggtttcccgtatttttaaggcacgatactttcctaatgggacctatctctcggctcctattggtaataacccaagcttcgtgtggcgtagtgtttgggaagcccaatctttagtctgtgcggggattcgttggaatttggtaatggctcttcaattaacgttttgaaagagcgttggctgccagaccagaactgtaacaccctaactgactcaggcgtattacgtgatttt

SEQ ID NO: 219181 - DNA, 7638 bp, Cannabis indica
ggttatgataataataattctatttttgtatgtttgagattatcttactaatttattttggttatttgtttatatttatatgatacttttctatattagaaatttttttaattatataataatattttttcaaaatttggtggacaacaaattttatttgtattcacaatttattgttaaaggattttatgattgtataaatgctttccttactttagtagaatgcttgttgttcttggtgtttggtggttgaaaatttttcttaaaaaaaaattattcatttttattgatgtataatttcatttttaggagaaatttatagatttatatagtaatgaaaatgtcttcttgaaaccctttctctctaaagttaggtaaaaagaattgcttttaaaaaggttgaaaattaaaattaatttcagctattcaaaatttagtcattattaattattaaatccaaaataattggtaaataagtatatgaataactgaattaaaagatcaatataaattcaaaattaatgggtagggtaaagattcggcactaaattttagtagtatttaaaaaaagaacactacgagcaagaaaatgagctaattcattaaaggaccccttacaacgagaaaggaaattgagaacagtttctaataaaatattgttattggacactagttgtgcctaacactttttataagtgtcaccttacaattggtcagcaatattccttaaaagttattttcttaagttatataggacccgataattaattacaccaatttcagtataacatattaagttccaataatacgttttagcaattctccttctaatgttgttaatattggctaatccctttcgaaacgcaaagtattatttacagggttaggatttgggaatcaaatgatttgagtttgggaaattgggctttccactttggtaattgggcttcaaatatgaaacccaagcccactacaccctttccaatttggtctttttcttgttcttgatgacaccctaagcccactaagctcatacgtaaggtttttttactttcattatcaattttaaactttcaacattttaccaaaaaataaaaaaaataaataaatcaacacaaaaaacaacttaaaacctttttttattattaaatttaagtttgaatattattaaattatatatatattttatcattagcacacttgatggttaattcaaactaaaaatcttaatacgaatttcaaaaatctaaatatgaaaagaaaaaaaaaattctaacttgtgactgtccatcacacaaatattacaaaataataaaaaaagtttattagtatcaaatatttaataaatatcatcacacataattttatgatgtaaaaattaagacttatatgtgcttgcctctattgttaaaagtgtctccaatatatctgatattttatttaaatcatactgatcttacataaccaaaactaactatacaaaattacaattaagaaaaacaaaaactaaccaacctaactgtacaaaattgaaaacagacggtataagtcaaataaaacccttaaacaaccctttgaaagcaatgtgccaataaattaagggattatttcaaaaatatcaaacacaacaaaaaatttacgtatatatatttatttctttaagcctttttgtatttaactttctaaacttaaattttaacggtaaaactttctaaattactaatatatctacaaatttagtatgtcatctatttatctcaattaaatactaacataaactacaaatgtatataatattgcgctaacataaaaataatattattttcccactaaaaaacacaaactcataaaaatcataaaaatatagaaaaaatataatttcaagtactttgtaagtaacaaattctttcaaaaaataaaaaatacttaaataataaaaaaaaaatgttgcacgtgcataaattaaggcacacgtgcacccaaaacttctcaacctaatcttatttctttattttttatattttttcttaaaacaaaaaaaagacagaaacacaaacagtaatttttttgtcggctagtgaaacttgaaagtgtagttaataaccgtttaacggccaaaaagggaaacgaagtaaaatcaagtgccacgtggcaaataaatagcctcagctaacgtgttacacacagcagtaaatgaaatcaatttccaagtgggacccaaaatgaaagaatatattttttttattcccaaaatacccttcgtcgtgttctttagtctaataagcgtttttttctcttgtctcgaatatcaatgaaattctttctctttatatatgtgtgtctgattctgtatcttcttccttacgattcgattacgaaatttccgagctttgttttcgttacccaaaagggtcaaaaccatagagagaagaaaagagaggaaaggaaaatgttttgactcattcaaaggaatccattaaagtttgaactcaagtgaaaatgggtgcctctgttgatgccttgtgggctaacaacttgtgcttttctttttggaaaaacaaaaggtcagtgctttttgattatctgtatatatatatttataatttatgttgtatatatatgtgtgttttggtgttggaattgtcggttgttcttgttgttttttaaggtgttttaaatgattgatatttggggtgaaattttggccaattgttattttataaggcgtggctttggaattggttggatttctgacatgggttttttgttttgatggaagaattgtgagtttggattggatttaggttttggggttgaggatttttttagagaaatttggatgttttttctttttgtttggtttttgaagtgtttgagaatttgtaattgtgatcatggttttgagaattattagagttaattatttagtgggattttgctttagcttcttgttgaaaagggttctgttttaattttggtgtttgtttgttgtggttaagattttggggcttagtgaaacaacatgaagaagaagagtagagtcaccagagttaagagaggtgagtttaagaagggctttggaaattttttgaagtgcctttgttcaggggaccaattgagaactgaagataaaatggtgccttcatttgaatccctttcgattgaggattatggtaatgagataatttccagagctcgcgagattgctaagcaaccggatactggtaatattgaagaagctgaattatctcttcgcaagaatggtgtcttgaactatgaggtttgtagcttttttactctcttattcgtaatttatttgcaaattaaattgttgctgatccagcttagaagccacacaaatttattatgtttattatgaattgagttgatgtagtctttgcttcatggaccttactttgaccacttttcttttattgaaagatgtaacatttttcactcataccatgttgttcatttacttggtattttcttatgtaattcaataacagattttagaatcctatttttcagtgtcatcttagtaaatcgtttgtaacatcattgtggttgattttcgttgttggttgatagttcaaatctgcctgataaacttttgtttttgcatctgagaagtcttttccttttgtctttgttgaatttccgagtttctttttaatttgggcaagatcatttttagcttacttgaagatctatacaagtttgcgtggattctcatgataatctgtgtgttcaatctgcaggaagcaagagcagtgttaggaagatatgaatatcagaaaggaaatgttgaagctgctttacgtgtatttgaaggaatagatatatcaatggtggctcccaatattaaatcaaccctttctagaagagtggaacgtcgtaggagaagctcccaaaatgttgaaaccccacaaatgtcgattcctgctgttagcttaattttggaagcaatctttctcaaatcgaaatcattgcaggctcttgggaggtttaaaggtaccttttcagatatttggaattgtttgatgtaattgcacattttataactttttcagtcatttctgttctattggttgtgtttccttttctttaactcgaaaactgtatgttatattggtaaattctgttacattacgcaataacttgaatcccattactttggatgggagataacgatttgataggagaatttggagtgcattaaccacataagtgaggattaattgtgaccttttcaagctaatgcatattttcaatcattcttgcagaagctgctcaatctagcaaatttgtcgtggacatagttgaatcttcattaccagaaggcttgcctgaaaactttggtgctgaatgtaaattgcaggagactattatacaggctgttgagctgcttcccgaactatggaagctcgctgattgtccaagtgaagcaatcttgtcataccgacaggctttactccatccttggaatcttgacagtgaaaccgctgctaggattcagaaagagtttgctatttatcttctttacagtggagttgaagcagctcctcctaacctccgtttccaaatggatggctcatttgtgccgaaaaataatttagaagaggctatacttttgcttatgattctgcttagaaaaatttctctcaagagaatcgaatgggatcagtcaatcttggaccacctttcatttgctctatctatttcgggggataccaggtctctggctcatcaagtagaagaactgcttccggggataattagacgaaatgaacggtattacattcttgctctttgttattatggagccggtgattgctcggttgccttggacctattgaagaaattaattagtagcggagatgatcccaatcatatcccagctttacttatggcctcaaagatatgcgaggaaatcccaaatttcgaacaaggagttcattttgctcgtagagccctcgaaattttggacagtagatgtgatcagttgaaaagcactgccaattatctcttgggcgcttctctttccttacaggctaaatcagctgttaccgattctgaaagggtatcgagacaatctgaagcacttcgggttttggaaactgctgggaaattgacaagaatggaagatcctataatcctttaccgacttagcctcggaaacgctgagcaaaggaaattaaacgatgcacttcattacgcaaaaaacacacttaaactagaaggtggatccaacataaaaacatggcttttgctagctcgaatattatcagctcaaaagaggtttgtggatgctgaagtaatcatagaaactgcattggagcaaaccgggaaatgggatcaaggagaactgttgcgaacaaaagctaaacttcacactgcgcagggtcatataagaaacgccattgagacatatactcaaattcttgcaattcttcaagttcagaagaaaagcattggttctgaaatgaagttacataaggtatatgatcttcatcatagtacagttatttaatctttgattcgtaacagtttatcggtgattgactggtgtgttttcctgatgacagagtggtagtagaagatcacctagaagtttggaattagaaatatggcatgatctaacttatatctatataagattgtcacaatggcgcgatgctgaggtttgtctttctaaatccaagtccctttgttcttactccgccaccagatggcacgccacaggtaatttaaaaataccctttagctctttttttgttcttttgactagaattattgccacatgatttgatctgtaaatgctttttcatattaatagctggaaagtgaagagtaaacatgtttgttggtttattgttttttttaacaggtgtgctttatgaagctaaaggcgaacacaaagaagctttaaaagctttcttggttgctttgaataccgatcccactcatgtcccaagcttgatttccacagctgagattctcaggcaactaaacaacgaatcggtggctattgttcgaagctttctgatggaggctttacggcttgacagaatgaaccattctgcgtggtacaatcttggtatgttctataaatcaaagggtaataataataataataatggttcatcatcatcattagaagctgcagagtgttttgaggctgcaattagtcttgaagaaactgcacctgttgaacctttcagatgactatatttttacttgaccaaactttcttttgtaaatctcagatgattgattgttaattctcatcatagctttggaaaaataataaagcttgtgtttttcttctttctttttctttttaaagcaagttatatagctttgttaggaatcattaccagacaaaaacaccttttgatgtatttcaacaaaaggaaaagttaaagtatatatttactctcttctttcagctttcttccacaagggtcaaacttggcttttatatttatgtatatatatatatatatatatgaattatctattgtaagctaatttttttttttaaatttatatttttttatgaaaataaatattaatcttactataaattaataattctcataatatattagatataaacataccaattcttgtcgatttcgtgtttgacactattttttataaaatatttacatttttacggttttccaaaaaataatacgaaaacaacataaaattaacaaaaaaaataacataaaattaacatcaaaataacaataaaaaaacaacaaaaaataacatacatataacaaaaaataaacaacaaataaacaaaatttcaacataaaaagaccgtattttatgtaaataaaatcaaaaaaatcgtaaaaatatttaaaatttcgtgaacgtatttttattatttttgtgcatttgtgaaattaacccataaataattgtgtcatttgaattcggcccaatttcaacccacaattatttaatgaccctaatctataataattcatataaagtttgccactcctaaaacatatatcttggataagacttcaaaagctaatattaacaaacaagtccttcaatcccacatcaatatataaaattgaaattgtatccaaatcttcttatattactattgggattgttatacaacaaacctatcaacatatcactgttaggtgactaaaattcctaataatgataatgaaaattaaataagttaatttaatcatgtaggtgcaacatgtccatccttaataacaaaaaaaataataataataatcaaaaaaccacaaatcatttaatttattttgtttatagaggtaaactaaagatatagagtaatttcatggctactgatagtgatattaccaaacagcttttcaatttcaacacgaagactattccaaacaatagtgccataccaaatttcagtatatattgcaaaaacacctagggctgttattaatataataattgattgagtgagaatattaaaatactttggggattactagagtcttgtcctatgatatgtgtttgtgtgttttctctctaaaagttattctttgtcttttttggcacgtttactatacaataatcacaatcgaaataaattaatggagaaatgtaacggaa

SEQ ID NO: 219182 - DNA, 6429 bp, Cannabis indica
attaattattaagtaaattatcatgtaataatctttgatttaaaaaaattaaatatatcaataaaaaatgacacgagataatgacttaaaatttaacaactaattatttacaaagttctaaaaaatataacttagtcaaaaaattaaaattaagtatttattttcaactgaaattaaacataaatatttatatcacaaattactcatttcaatattaataatctacaaattactctattttctaatatttttttttgaagaatctattttctaatatgtatagccaaaaaaaaattgcaataaataaataaaagatttaagagatttgttaaagatgggatttttctcgccgttcccggcgtatcttccctgagctacggcccattgcaatggccgattatacccacaatcttcttcctccgaggaataaacaaaaccccttaaacctccattgtcacaacacttcaaagctttgacctttgaccaaacatgaccattccccaatcactcttcatcgtccttcgccacttctccacatccacttccgccatacccaagggtctctccagatacccaaaccttcctcaaatccactcaaagtacaaacccaaagtcgtagaagaagctcagaaagctttagttgaatatcttcatgccacaagatcattgccctttacttatgccgaacacattggtagaaactcgattgtttctcttgctaatttgatcaggaagatcgatttctcagccccaactttctccagaagcttcaggaagctgttaaggtaccaacccattaatgaatttgagtttttctttgaaagtattgggattgatcatagtgaagttaatgggtttttgcctttgaataaattcttcttttctgaagatgggtctgttcttaatgttgcttttgctctttctggatttgggtttccttggaataagttagggaagttgtatagagacgaagttttgatttttagtagaagttgttatgagattaaggatagacttaatgggtttaaggagttagggtttgggaatttatctgttgttggtatttgtttagcttttccttatttgttgaggttggaaagtgatgaattagggggtgaaattgaggccttgttttgtgatttgaaaagggtttttgttgaatttaatatgggaatttctgttgaaggaaatgttgatgcttggtttgaggtttgttgtaaggttaaggtgttttatgatttgggttgtgagaaaggaaaagttggtgaacttatgtgtagaaagaaagggctttttcttgattgccctaaagaggttttggttcaaaaagtgaagtatttttgtaaattgggtgttggaacagattgtgttgggttgtttcttcttcagagtcccgaaatgttgagttttgattttgaaacgcctgcgatttcggtttcgggattgttgaaacattttggattgagctctgaggaattgcagggtgttagtgaaaagtatcatcatgtgttgggaaggaataaaatggctaatttgcctagggtgatgagggctttggatcttcatgaatggtttttcaataagatcgagagctcgaatggtcggttattggcatcttacaccattgcttcacctgatgaagatgtagacacagagtttgttagtgcattgaaaaagatggaatcttcgaggacaccgattcataccatgtgtaaactcgagtttttgaaaggaatcgggtttggagaaaatgctttgacaataaaggttttgaaaaacttacatggaactagcaatgagttgcaaaagcgtttcgattgccttcttggcaaaggtattgaatactcaaagctgtgttttcacataaggattgccccaaagattctcggtcaaagccccgaaatgttagaacagaaggtagattttttgtgccaggatatgggatcatcactgcaataccttgacaaattcccagcctttttgtgtttcgatttagaaaaccgaattaaacgcagatacgggttttatgtttggctcgatgagaacggtttgtgtacaagaaactactccattgctagcttgatagctacgagcgaaaagcaattccttgctcggttgtttggaattcatccggccgcgccaaaacaatatttagagtgttgttcatacaaagtgcccttcaataattcccagagaaatctcttgagttaaatcttagaagtttaacccttaacatttgaccctttatgaaagttttgctgatttctgttcaatatttctgataaatgatcatcaattttcttcccttgtggtcttaagccttgtacatatgatatggaaattgtcattatgttgtattattattttggcatcaagaattttgctttagaaataaatatataattttttgccacttgaagatcttgtcttgctatttttttctcataattgaataaaaaagaaatagtacaaatttattcaaatgaaatacacctgtgagcagagttgagcatttgattcaatccaacattattcttgtaattcaattcaatcaaattattcacatctaatcaaattcaattattagtggctatcaaactttttgtaattaaattgaattagtttgatataattagattggtttgttataaagttatgagaaatgcaaaagggcaccactggtgcctagcaccctcctacgtgtcaatatcgctattggtgcaattaagtatcgggtcccatatagtttaatataataatttttatagagtatcgctagccaattgcaagtcgacacatttagaaggtgctaggcaccactggtacccaatagttattgtacatgccttttagtgggtttgtgaaataaatttctcttaaaatcttcattgaaaagcacaatgtaaattgatatcttataacaaagtagtttaagttacgatggactttattgattttgattaaccaatctctaatgaatatctttgaatagaagaaaatattagtattattggaatatccacaatacaaaaatccttatataattatacaccatcattttatcaaattatactacatatttttttgttgagtaaattatataatacatatttcacattagttttttctcaatacaacaaaatcacctctaaaatttctcctcccaaactaaaccccttttaaatgtaggctctaagtgctgctgctccccactttgatgggagccaaaatgaaacaaaaaaattgtagtaatttctcccaccccaagtggtttctccaacctctacaaactaacacgacctgagttcttcgttactctgtggatgtggaactaagcgtaaccgccttttgcttatcttctaaggccataggtaaaccggtttcttcaatgtttctgacaaatgttctaagacatccgttgattattcgaggagctgctccatcgcagaatcgtttagcaagatccacagcctttggaatagcaatcacacattaatttacataaaatcatttagctaaatcctataagaggttgagaatgaaaatgtacctcattaatgacaatctggtgtcgggtttcgagcactgttatttcagacatggctaaatgaagaatacatagctccaagattttccccgcgggctcatcctaaagaagatgcgaaatgatcatgcttagtgaattattcttagtaactgaaaaagatgattataagtttgcactaaggcagcttaagaaatgtcatgctttgcagaaaatgatcagttttatgaatacccaactttctcagagatctaccttatccatggttctatctatgcgtgttcgatttgtcactcgtaagcaggaattgaaaaactatgatcttaacttttagttaattgctagtctaggttcttggtctgttgaccgagttagtttgttagttgcctaaggaacggtcagcttgactgactggtttttctgttataagtattcattcactttctgtccaagaattctgagttcgttttatgtccgagggtgattcggtttctggccaactcagtgaggtggatcaaagctttgagactcaacattaacagctactgtttatatgcattgaagcaaaataatatgtcataaagaagtatgaaaggaaaccttataaaatgaaactcaagtacaatttcagtggtatcagattcagaccttccaatttggggggacaacttggtcaataacaagtacatgactatcccactgatccatgactgcaactaaaagtttccttgttaaactgtcaacataagatcaacactaaactattaggccttcattgcaatggacatttttcactcatatcattacaagtcacaatttcggtcatacacttaccgcaagatcagtttgctgtataccaactttggaggagctgaaaggacctcagcttctgaagttgaaaaaaaagcaagagaaaattaacatggataaacaagcattatctgaaaattgaagggtatgtgagtaagtgtaaagtaataatcggtagtgaatgagatgagatggaatataggtagtaagaatgggaggatcatgagaattgtattgtaacttaactttggctcttgggagagctgagatctctcaaattccttactgttctctagtgtgttattatcactttctttcttcactcaatatcaaatatcggttcttcctagtcatttccattgtttcctatatcagtagcctatcattactctatattggttggttattaccctggtaccaatcaaccaccaatagtttcctagcttctacgattcacaagatcaaaattattcactcatacctagtgcattctagctaaatgagctcaatgtcaaagagggaaaaataagtataaacttaagagcttcttcaaagcaccaggtctttccacttcaaacatccaaactactttagtaagtaatggcaagttagttttgagacaaactaaccaatcgcagattccttgtcatcgtttcttgttagctcgtctgcttcttcgatagtctctaccgtgacaggaggccctccaaagctcatatgattatactgcaataatgatgccttgtcgaactcataacctggttctgaaaacacacatacactacttcaaaaaacagcatgaacaaaaaaccaaatgtgcatatctcaatgtgataatgtgatattctaatatatactaatcttaaatcaaatctctaacaactcaaaattaattgccaataattagagaatacattcttttgaaatactaagatgcatatgttttcagcaactaagaacatatcttacaataacgaatcattgattcaactgaataactaaataaaactaataggcatctttgtatcgacggcgataatacaaattccagttcaccgactaattctaattgttttaattccaaagcaaagatatccacataacagttccatctattcagatattttcgtgagtcctaccaattttaattattattattgtagtaaaccgctaactcaacacactcttacatttacttacaagcaaagtaagaaaaatttaaaatttacctctacgagcattgattctcttctcaaacaaccgaactggatcagacccttctaaacaagaagcataaataatcgacctgccaaaaaattaaaattaaattacttccaccaatgatacaaatcaaagaaagaaagaaagaaaaaggttcaatttttagaaaaacttacagagcgagttctctagcagctcttgggctacaaaatctgccacttttatcagtcttgggcaaaggttcagtcgaatggttggtgggtatttgaggagcttggtcaactgtgaaggccgaggttcgaaaagaactggttttggggcaggaaagagagagagaaagagagtggaatggtgatgggatgtgagagaaagtgggtgagaaagtttgaggaggagagagagagatggagaaggagaaatgggttttggttatgaaggttggaagagatgaagatgtggtgagaagtgagcttccctccattgttggaagcttaagaagaagaagaagaaaggtttttggataaagctcagagataaaagaaatatcttataagctgagattttgagggggttttgtttagggaaaacgacaggaatttttgtgtcgtttttggttgttgtgttaaacgcttgtcgtttgttttggttgaataaataaactgcatgtcgtttgtagtggtaaacgacatgtctcgaaataagagtttctacctttcaagtcctaagacgacataataaattatttatgtgatcaaatgcaaatgtgttgtgtggtttttttttttaaaagaaaaattgaaataaattatgttttaaaattaacgaaattaatgtgtaatggtgcccccataatt

SEQ ID NO: 219183 - DNA, 5843 bp, Cannabis indica
  modified_base (111)..(111): a, c, t, g, unknown or other
aacataaaaatatatcaaaaaaatcacattttatagtaaataaaagttagaaagttagtaaagtaattaaaactccgtaacagagtagtttagtatattttttttagttgngtgagttttttttttaaataatccccaaaataaaaagccattatggttatacaagatcagtcacgattatcgcaccccatacaatattagcttgcatcccatagcattctcatgatcataataatacttatactagtattagtttcaacaaatgacactaacaacaatattagcaatggtgacagacaccacatatcaactataatatacaaactacactataaaaattcaaaaaaaaaaagaacctatactctaaattatgttatcatatatttaatgatttgggcaacttactccactgcactcactcagtcactttctctataataaaaaaaaaatagaaaggaaagcttttttattgatttttttccctgtgcacatgcataccatgaaaccaaataagggaaaaaggaagggtttagtttagtggcaatgatagaaatctctctatcaagaaaaataaatgctattcaactaggctgagttacagaactgaaaagcagcacgttacatggtgttatttgctacaagcataatataaaatatataataaaaataaaaactattactatacaccgtgaattcctattttgggtcatcaaatatttggggtctgattctacacagtagtaccttttctttttcatttttccactcctcaaagcgaatcatgtctaattaataaataagctatagctcattattatcatttttctttttcaaaagacaaactcagctatattatacccaaacttttatgattctctctgtacacacatatcacataaccaaagtcacttccagggcttttgctgttattgctgatgcttgtttgaacacgtacacttggcacgatcatcagaaagtgtctgaagatcataaccaaaaacaatgaacaatgtttaagaaaaaaaaaatcaatagatcgataaaaaaattagcatttaatacacaataattatacttatacatatattttagatttttcctttttttacctgtacttggctctggagatctttaatgtactcaactgccaaatctaacatgtcggctgtgtttgtttgctgttaaaagattatagtggaagtattcaatttttcaccatgaccatcaagctctacaaatgataaaagaaggtggtgatgaaggtcttaatcttaattaatagtaccttttccatgttggggacaagctcttgtagttttctcattcgttcactgattttagttcttcttacctgaaaatgaactcaatgtacgtgcattttatgtcattatacatacacaaacatatatatatttgaaaatatgtatgtatatatatatataataaagtaccctctcagctatgcttctagggtgagtggcgcagcctcgcttagctcgaatcttacaaggcacagagtcttgaaactgcaagaacttttcaatggctgccatttctgatgatgttttaggcaaactcaagtgatgagctagcatagtgggaggtcgagttccagcttccacgctctgattaatatcacatcttttaaatttagtggcaaagcaaagcatttaaaatacttaagaaaactattctatccttatacagatatacctgagtttctgatagactcttgttcaacccagaaaatggtttctcatcttcatctctcagccgtttcaagccactgatattatcagatattaaagcagagtcatcccaagaacccaacggaaagtttgggacgaaattactattgctatgaccttcaccaaatgcttcagtactactgtcttgaatggcagccaccaatgttttgtcatcgatgatttcatctaaaggactcatcaaacctgctccagatgagaaattctttaacttgtttagcgaagaaaaagttgtatcttcattagtactggtagtggcaccataactccccatacctctcattgcagtcaagcctgaaaaaagaccaaaatatcacgttattgttcgttcagacaaaagatcaaacacacaacgaacaaaaagttgcatactttcgatattgatacttgcaaaaagtccagcaggggagctgctatgtctgataagattggagttatttacacccccagttctcatcgtcgggaactgattcacatacgaagacccttcgttactagaagccatgttctgagttggtaaaggtggctttgactggctctggtaaaagctcggggaagcagaagaatagctattcaaatttgtcggttgttgcggcggcggttgtggtggaagaacccctccagctggttcgttactcatcgtcgctggagttacgaactgggtattctcagacgacaacttctgagctgccgtatcggctaaattaacatcctcgtcaccaactcctccgccgccgccatcgctgttcataaaccgagcgaaaattcgctctgtttcagggctggatggccgattaaagaactgttgacagaattctctgtcgactatattcgtgaaatatgagctcggtgcggaccgataacgcatcaagccagatgaagaccccatttgttgttgagggtgttgaagatcagactccattgtttcctttttcaacttttcttcttttttctctcgaattttctcactcttttctttctgggttttatcttctccttcctcttctacctataccaaccagaacagaacaaaacgaaaagtggaaaacaaattcagaagtggacgccaattgtgttcaggtgatatttgtagatcttgtacaaccaaaccaaaaccccaataggtatttttatttttatttttacttggctgaaaatagctctagactcgtggaaatggaaacagaggcttaaacagactcaacttttacagggaaatttttccgggaaaatcacagaaattgtaaaaaaggaaaatcttacaacaacccttttgtctaatgcaaaaactgaatcggccaacttatcaatattcggcagtactaaaccagaaaccatgtacagaacataactaaaaaccaaagagcctatctttctttctctctctctagactttctccctcctctacaatcagaaattctctctagttgcagagggaggtggtggtagtggtggtggcactagtggcagtggtgtggtgttcttcaagctttttgatgacagacacagtgatgaaagagaaggtattcgtgaaaaataataataaaattacaatttttatttgcaattccgaaacatcagttgagctaattgggaagtaaagaaagaagccagaaatctagtcacccagatttggtatgttttttttctttaaaaattagtatgaccatattacccttattagaactctcttataacgaaaataactttctaaaagaaaataaatggttgagttcaattgagacacatgtccactaatttgtgaagaataataagttctagagttttttttttaagaaaaaaactattttagttttctgatgtaaaaaataatagtgtaagtttacagtatacttttaaatggagtttgtcctgtttgtttcggtatgtaagaagttttttaatttaatttgtatatactttcatatgttgtaattatttaattttattaataaatttttattttttttatatgtaaataagatttacatattttttgacactcattatttttcctatatacattaaagttgagttggagcagttttagttttagttgtagcttctcttaaaattcttaaaaaaaaaactattttttaactgtttaccaaacacatttttatcacaattttttcaaatagcagtttttagtttttttaaaaactgtgccaaacgggcctatagtaagtaacactttaaattttattttcagtacaataaattatttagaattttttaaaaatttatatataattttaaataactaagtcttttacgatcatcaaaagaaatcaaactaaaaaattcttagagatacgaaactggtagagctctaacaaaataaccctttatgtggtacacaaatttcccaaagtataaacatattaagttgttttcactttctcaaatttgaccacactctctttgttagcaccacttcaatgtcatcaaattatataaactataatcgaaaaaatataattgaatttatatatttatataattcattctaattaataatattggacatactccaaataataataataaaagaaatttgcaacaaaagtcttcgaaaaatttgtgttgatgcatattagtctccaacctttaaaaatagcgtaataatctccaagatcgatttttgtatacgtctgttaatcctaaacttaacccatccgttaacttattcaaaatttccactagttaaaatagtattggcccaaataataatttaattaaaaataattttaaattaaaaaatatatatttaaaattttttttttctttttcattttttttctttttttttctccattaacttataccttcagctacaccacacccacttcatcttctacctccagccacaccgcccccacccccacttcatcttcttcctccagccgcaccatataataatattagatttgaggagaatttctatggtgtacccaaaaaggtttcatcgatgtattcgcctcgtattttatatgcgtgtaaaataatttttttaaaccctattttttatcagtgcactgaatttacgttgacgtgataatcaccgataagatttacttacacctagttgagtggaatgtcttttcaaagtattagtaaagtaaaccagattggatgttgttatccatatttttggcaagagatacatggaatctaaatagaagcttaaagcccattagtggcccaaaataaaataaattgggccaagcccaattaacatctgactttttgagagaacaatcgcacgactaagcctagtcagcatacggaggagtgttaactcagtgtacctataagtggttctcagcgtgtattcgaaagccaatcctagtttttcatttactactctgcatagaataaggaatactttcctaaaatttttgtatagagaatattatcatgcctaaaaagggaaaactgaataaattaaagattaagtaattaatatcacattaattacccagaattataagacacgacatgaatagttattaccatgattaaatctccacatcagtgtacacacattgccttgtggattggacttcacttgataaaccaaaatctatgtattatttgtaaattccccattagaggaaaatagcaactaagtatgacctctattactctataaatacacattaaatctttcatgtaaagggttagaaattcttgacttatttgcttaagaagagaatagagtgctggtattcattgtaatcccttaggcttttttagcaaatctcataatattattcactcatggactaaggtgttgggctttgtgccctaaataaaactctatttcaatgtaatctcttctattcatatcaataaagaaacagatttaatttcattacttgtttaatgtgttatttagttcatgtgatcatatatttacttatttgattaataaattcatccaaacccttatcacactgatattcttgtttattgtgttgtcaacacagtagaaagtaaacaagattgtgtgattatatgtattgatttatcagtacacagggtttacctgatatgataatctacaacggagt

SEQ ID NO: 219184 - DNA, 3946 bp, Cannabis indica
aatgatactgaaatcctaacagattatgtttatcagaatttatagaacagatacattttcacccaagtgtcaaaagtcttaacttgtttcagaaacagtttggtaataagatgaaagcattatagttagtttactttccactagcttttcatatagactatattaggaaaggaagatcaatacagaacgaaaggcctgggaaatagatgctgcaaaggaactgcttgcagctttgttagagctcaccaaagaagagaaaaagcccatgtttttttgcttagatgaagaattttatgttcacttttataggccataaaatttagtaacaagattgaggccctatgtctccgaggtaaaatgcagtagtttataggactcaagcctagtaacgacattcgaaaatgcccggcatatttgaatcctgatttcttctaatgcctgctcaaatatttcacagtaaatttgcctctgtggctattacgagctttgatcctcgtctggaagtagcttctttactttcgcctctaaagccttttcaaaattactacgcgatagtgacaatagctggttaagtagtaatgtcaccccacattccttcataagtgcatacctgggcttgatcctttcctccaagctgtaaccaaaatattgagggaatttgacaagctctgattttggatactccatggtcaagtaaaacttccactttggtatcaagttctcgttcaagctaaaagtgtataatgctccatatcttgatatcatggtcccaacttcatccttggtgtatccattctccaagaaaaactctgtgattggcttcaaatttgcctcaatacttagaccaaaagtttgtggagctcgaagaataaggacagaaacatcaacacctaacgagcgaaaatacttggcagtaggctgtaacttatcctccacgctataacttgttatatttggccaacgtgttagaaccttacctatgttctctttggataggccaatgtcgtaaagaaaatctacagcggtctgcatcttctgcctgctataagtgagcaaagctggaaaacggtatatcacttttgcccattgtgtcttgtccacccccaaaccctctaagaacttcatggtgggtctaatattttcatggagactgattccacacaactgaggtctcttgtgaaggatgttgggaatatctgattttgacacaccaagatcaagaagaaactcaactactggctttatttttccttccaagctgtagtatgcgaaagagggaaatcttcgtgtaattcctttaatctgatcgagatccaagccaagttcttggaggtataggatgttaggccgaagattcccatctatgtctatctcactcactcgagatatggctttcagcttcttactattggcagatgtaacgggtgtaacaggtgtatcgggtgtatcagatggagaaacagatgaaactggtttttctttaacaggtgggtttggaaagctttcaaccacatctattataagatccccattctcctcatgaagagtttcaaggtagggaataagagcctccctgatctcaagggttgttaactcccttcctacaatgtcaacaatgagagtttgttttataagcaaggagccccataatggataacaatttaaatttatttaagagttaaaagaagtagtaacatgttgaaacccgaacctactagatagcgagatttgtgaacaacatgaagccttgagattaggtgctcaataaaggagtctgacttattgatggttcttgcagcaacaacattactcaaaccttgttttttcaagaacaaggttaagacagccttggcttcttctttttctgctgctaaaagagttggagataccatttttaaactaaccgtaccctctatcccagaatctgctgtaagaaagaaaccaatgacttggtcaacattgtccaaagagagtgctaaaaaattccagtgaactgactttaatggagagggtaaaataacaagtaaaagtgttgttgttaaattaattgctcaccaaacttggcatgacagaagaagatttttctactgaaagctactcgagccctgagagaaaaagagaaaaagaaaatgagagaccataaattttcaaacttagaaaagacaaatgaagaaaaaacagaactgtcccagctagtcttcactggtactggtgggaggagtttggcactgaagccagccagctttcctatttcagcctattaatccttcctaggctttgaaaaattggattcttaaacactagaatccctactcccatcaatctgttccacttcaacataatatgaacacaaggaataaacataatcccttgtaatatgatatgtaactacatactatactatccttataaacaataatccacttccaaaacatgtaccaagcagccaacttcctattcaagcttacaaaactccatgctttgacaaatgggatactacaattcaagcaacccctatacctttcaattaccattctattcaactccaccacaacacaataaataatccctggtaacatgaaaagtggtgagcttaaaccaaaattctcaactatcattaaagacccagaaaaatttcttctaattttctattctaacaatcacaacacattctatattaataaatttgggagtatgaaatggaaaaaaacaggagagaaaggcataaaaggggtaccttgaagagctgaaacttccaccgggtaaaggtactaagggggcagatcgaactgcacagaaatatctcattgtcatctttgaattgagaccaagaacacagtttgaaactgtgttgagagcttgagactatggatatggtggtgtggtttctggtcactgcctcagatactaagcccatatagatatttcaaaatcagacaatatagccacgtgtaaaaatttctgtttttgttttttaaggaaatattaaatccataataacgtgtcatttttctacagcacattgaggcggttctactaaaatctagaaatatagaccccacctgattagagtgggatttgggctttggcccaaccataaagcccaggtttaaggcccaactgctgaaccctccttccctgtcagatccgagcagggtttattggaaatgtaaaaccctaaatattgattttcagtgaaatgaaaccattgaagatcggacaaccatggcgatctctcttagacgcgcgttctcaattagaaacgtccttctcattcggagctccgctcttcacagtcgagaattctcgcatttgatcagctccgactatggcgtgtgcaactccgaagcacgtagggttctcactcttccggctattgatttcatcagagaaagtcgcagaggattcgccaaaggccgcaagtcaagtaattttctaagcactgattggttaggggaataaggttagggaaagttgtggactttctttttagggtatattatatatgtgattttccgattgtgtagaggatgactctgctgcgagctcagttgaagtattaccagatatgggaccaactattaagtccaatgcaacctcacagatggaagcggccattgctgcattatcaggggagttgaccaaactccgaactggaagagcatccgcaggtgcattttcaaattcatttcttggttcatttttctgtatacaattctcggttagtttgaaatttcgtttggatcatttgcataatggcaatgcaggaatgctcgaccacattatagtggacactggtgatgtgaagttgcctttgaatcagatagctgttgtttcagttttagactctaaaaccttgtcgataaatccttttgatcccactgtaagaaactaagctcttttgaatatgtttgagcatgtgggggactcgatacttaattgcacc

SEQ ID NO: 219185 - DNA, 4819 bp, Cannabis indica
tttttttaaaaaaaattattgagatttttaaattctaataacttttgtctaataatattcaattttaataatagtgtggttgtggatgtattcacatccagtgaacatttatgggacaaaaatctttaaatcaaaaatttttaatcttctaaaatttcagaagcaaatttaaaataacaaaaatccttaatagaatttaaaatatataatattattgtatgaatattatggattgtggtgaatattctcagctcctccaagagaatttgtttgtactaatacttatttagcataataaaactctgtccctctctcaatttccatggctggatcaacaacaagcaaatccttaacaaactggttgttgtgcactaacaactcaaagaacctctttgtgaaaatagtacaccccggcggtcacgtagagttacatgacagaccaatacaagcttcagaaatcatgtttcggagtccacgatgttacgtggctcaaccccacgtgtttcgccaaccgtgggcaaccctctcccccgagaccatgttaagcctcggccacaaatactacgtcgtacccattgccaccgttcgaaagctccaacgtttatctctcagacaatctcctgttcccctgcttcttcatcaaaccacttcttcgagatcagaccaggaattcaatgtcgttgacccaatttctagttctgactatgacaagaaaaaagagagagaaaatgggtggcgtttttttaactgtttttgcttgtttcgagtgtttaagacgaaacgaaacggtggcgtttcgagaagtagtagaaacaggaatattgatcgtactaattggctacccaggttgggcagcattaatgaggaatgataatgaagtaaggccacgtttggtatcccttatatataaataaattaatgttgttattttgataagtattttttttacatgattgcttttaagtgaagaaaaatcccatagaatagaaatagaataataatatgttaataatatttactgaaaatgaacaaataatatttatatagaggattgagctgaagtcaaaaatagagaattatcattgaaaaagaatgatgaaataaaaaaagtaaaatctatgcaaagtagcagaattattcctaaaattctccaactttgaatgaattaaatgcctagagcaatcaatcaatcaaacttagttggattattctcaactctttgcaattttcctatatataaaagccatataagaaaataaaaaaagagtgaaagcacactacacttccatagtttcattcaagtttatgtttcttttctctctttctctcttaataatttgtttaccaaaaaaaaaaaacataaacacaaagctctcaaacggtataatgttgttgaattgtctctatgtcaagtcctttgagcttgacaactgattcaacatgccctttaagtgtatgaagctccctaagcctgaaaagtgataaccccaccatcaaaaacagtatatataagctaagtatacacaaatacatacacataatgtataaggattctcaatatgtaccttgcaacttcagctctctttttagcttgttcagctatttcagacagttccctgtaattgtttttactgtcatttaatatatcagccgtttgtggactctgtagaccatgaagtgtacgttgagccaatgcccattgagcttccctttctcctcttccataatctctcttattggtaaaagcagtctgcatatcacaacagagttcaaacaaagtaaaaatgagaccttttgtttgattattccttaatagtcgcatcaaaatgaaacctttatttaattgtatacattaccttgttctgaagtaaattgtcccaagccttgccactgagtgcataacgaataatgaacttaagaatgtctaatgggatgtagaagatgatgctgtaaagccatataacaccagcccatccccaaccaatccccttcattcgagcaaaagtccagtttgcatacactgatattaaagtagccacctttggacaggaaaaaaaacaaaataggtaaataacactaaacttatatgaactgaactgaagttaagtttagtgtttgttttcataccagttgagctatcagaaaggcaatcatgaggaagaaaccaggtctttcaacaaaagaccagcttctagaccttgtcacaaagataagtgcttgactcacaatactaacttgaaggtaaacagctgcagtgagctcatcttcattgtttcttagaggtactaacccaaaagtgttctgcaattgttaatggtgaacaagtagataaaatttttgtatgtaattatgtaactaagtttcatgattcaaaataatgattgggttttggtttttaccgtgaaaaagtcagaactttgagcaagccagaagaaaacaactgtcatgacagccaagtatgtcccaagaacagtgccagtggcgaaaatctccttaagcttccatgagtcaggaacaggagatggtttaactctgtctttagatatagtcatgatggtaccatcgtttagtatggctatgatcaacaccatgaaaggtgagaaatcaaacttccatataagagctaagagcatgaatccaagcacgatacgaatagttatagcaactgcataaatggtgtagtttttcatcctttggaagatggctctgcttgtcaaaaccgcgcttataatcacactcaaccccggctcagtcaagactatgtccgaagcaccacgagcagcatctgttgcatcagccacagcaattccaatatctgctttctttaatgctggggcatcattcacaccatctccagtcattccacatatgtgtttcttgtcttgaagctttttcacaatttcatatttgtgttctgaaattgcaaagtgagtgagtgaaactcattaatacttatatcacaatcaatacaagctgagagagagtgtttttagtaatagattaccagggaagacaccagcaaagccatcagctttctcaatgagctcatcaatagggattccagcaatggattcatctttactttcaccaaggagagaagaagaaggatacatgttggttcccatgccaagtctcctaccagtctccttcccaatagctagctgatcaccagtgatcatcttcacattgacaccgagattaagagctcggcgaatagtctctgcactgtcatgccttggtggatcaaatagaggcagcaaaccaacaaactcccatggttcacctgcactttccttggtcttttctggcacagcctgatcaaaaaatcaaaagggtatgcctaatttttaaagaacacaacaaacagaaagacagaaggctaaggaaagagctctcacttgtctaccaacagcaagagaacgaagacctcgttctgcgaatttatctataatggcatgagctttcctcttcacatcttctctaaggttgcagagctcaatgatctgtatcatggaatcaaatgaggacagcatattgaaaagtgaatataacaagcataagtagtattaatgaccaacctgctctggtgcacctttgctaacccggtgccaattgccttcagtgtcaatataagttatggctgtacgcttatccactggattaaagggcaagaagtgaacctcagtgataccttctctggcctgcaacacaaattttcatgataagtttaaaccttattacattgatgataatcaatcacaaataacagttctagtttgtgttattatacctccttgggatcacccaacattccaactatacaagcatcaatagcatcttggttctcaactctagaagctcttgccccaagcaagatcaagttgtccttgtccacatctttcacaaacacctataaaaaggtaaacttcgtgatgaaaattagccattcgctacttttataacactttattggagatgctcttataatttaagatcactaacctcgaccatggtcttgtctacagtaagcttgtttagagtaagagttccggttttgtcactgcagagaacatccattccagccatctcctcaattgctgtcattctcttagtgatggcaccctgctgtgacagccggtgtgaaccaatagccattgtcacagacaaaactgtaggcatggcaattggaatgcctccaatgagaagcaccaaaagattatcaattccatctctatacctcctgtgctgaattgggtacattactactatctctatcaccattccaagagcaattgagcaaatgcagaagtttccaatagcagtcaaaacctttacaaaacacccatcatatcagactctcaaaacatcatttgaaaacaaatgtataaagtttcttattcttattcttttttggtaccttttggaagtgtcctacttgattggtgctgtcaaccaaatgtgcagccttaccgaaaaaggtatgaacaccagtggctataacaattgcctcaatctcaccttgcttaactgtagagccagagaaaacttcatcacctgcataccttgtaactggtaaagactcaccagtgagtgcagactgatcaatctttaaagggtctccttccaatagcctagcatctgctgggacaatatctcccaacttaatactaatcacatctcctggaaccaagattgcagcctcttgctcaccccatctaccatctcttagaaacctaaaaaaacccaaacaacaaaaaaaaattgttcagttcagttggaacaaacatcaatcgatcaaacaaaactaaaagtcaattga

SEQ ID NO: 219186 - DNA, 3098 bp, Cannabis indica
aataatttagaatgtattttctttatttttggtatcatcagagacactacttgcagattacattatcttggtgtatttattattatattatttttttaaaactcaaatgacgtttaccatagaattaacaatcttgcagtgcaacaactaaaagtctgtggggtatgcttcttgggaggttattagttggagctggaatgggcattgggccagcggttgtagctctctatgtagcagaagtatgagagataatctttaatagatgattcaactattgccaagtttcccttttttaacattttatatttcatcaaacagatttcaccagcctttataaggggtaggtacagttgcttcacacaaatcgcaacatgtcttggaattatgggggctctttttatcggactcccagccaaggaaagagagggttggtaagtaactaagtttgttaaacatatatgccaattatataacatatttatttgttcaactattgaaacttttccaacatatatgatgatgtgctaggtggcgggtttgtttttgggtatccattgtgcctgctgcaacactttctgttctcatggagttttgtgcagagagccctcattggctttttaaggtcatatactatcatgtgctaattttttttttttttatttaaattgacatgtcccttgaataatcagagttatttgcataatcaacttaccatcagatgcataaataagattcatgagattcatttgtttttcaccctgttaaggttgttttttcaattgagatactgatagatgtttctgacttgatttagaaaggaaaaagtactgaagctgaagctgaatgcgaaaagcttttaggagcagtatatgttaaatctgcaatggcagagttgtccaagtctgatagaggggaggaatcagattcagttaaattctcagagctactatatggccgtcatttcaaaggtattaactcttcgattataattgttaaacctatgacatttgtttttccctctacatggttaccttatcatttccacattttgcagtggttttcatggggtctaccctttttgcttttcaacagctatctggcataaacgctgtattttatttctcttcaactgtatttaagagctttggggtaccatcggaggctgctaacatatgtgtaggaatcgcaaatcttctgggtatagctttactctcttattgtgtacacacacatgaatttatatttggtagaagttgcactagttttatttgagtaatatattagtttatttttattatcttttattatgccttttatataattatacatatgtgtagtatttagttttagcatatttttctacttcaggatcagttattgcaatgatattgatggataaacttggaagaaaggtgcttcttctcgggagtttttctggcatggtaaactctcaaacaaaataaaactgtctgaaatatgaatgttgacctgcaaatgacatgtacttcattataggtagtgtcattgattcttcaagtgattgcagcaaattctttagcatcaggatctgggacattatatctatctgttggtggcatgcttctgtaagtgatcatcaatcaattgtaacgtagacttgctagatcatgtcatctgaatggtggcatctttataagctctattgccttcgctatggttactactgtatggctaatcaaaaaatggaaaatgcagatttgtcttcatgttttccctcggtgctggtccagtcccaagtctcctcctttctgaaatattcccaggtcggatcagggctaaggctatggcaatttgcatggctgtgcattgggtaatttttctgaattgatcattcctagtatgatattttgaatcctagcccttacttcattttgtgcctgtttggtccaatgattacatacttgggtaagctcaagtgaaaggttgaagtatattgatcatggttgatgagtttaatgttttattgtttgttatttgttattctgacaagactgtacttttaacaggtggtaaatttctttgttggtctattgttcttacgcttgctggaacaaattggggcaaaatttctgtattcagtctttgccaccttttgttttgtggctgtgatttttgtgaagagaaatgtggtggaaacgaaaggaaaaacgctccaagaaatcgaaatagcacttattccacctgagtgaaagggtacaatcattttgggaactctacacggccatttacacaagtttacttatcaatttatggtagatatgatattaaaccttaaatttacgtttgctctgccctataagttacaaggttctcgcaacacgaagttttctcaggaaaatttggagtaaaatcatcatcagaggctcacattgaaaggcctatatatgtatatcttttctttttgctttcttaagaacataaatgttatatatagatatatttttttgcaagcttctgcagtacccgaagcttgcttaaacatgtacgagtgtagtttatcttgtgcccttcagtttgaagaaatattttttgatattgaaataatttcaatgatacaaacattgcattgcagtgaaaacacaggattcattgaggtgcgaaaaagacaaattgtcgtagcaacctaaaaacacaaaaacgacagtcctattcattttttttatatatataatgttcaatactactcataatattattgtgtaccttgttataagctcaccaaattatatccaccacaacaattgatgcataaggaaaagctcataatacatgctcatgactcctacctcctatagttttttcttttaaagtaattaaatatgtccttaaaatacacaaaaaaaaaaaattagacatatactaacaattcatgtctagtcatattggccaaatattgcatgcgttttagaaaaattagttttgtgtatttttttttttgacgtggtgatcacacatgattatcaatgcagcataccacaatcggcggtggagcccttcgaaccaagatagctcattgtctaaccgaagggcatgttttgccaaaccatgagctgcggaaa

SEQ ID NO: 219187 - DNA, 7675 bp, Cannabis indica
aaaagaaaaaaaaaagaagaaattgctgattacttttaaaattctcttgcgcctaatttttaatgatgaatctatttaatttggttttattattgatgtaattaaccccaatattattctttttgatgttttagagaaatgattaatcctgttattcatggctcattaatttcagtgaatgtatgtacgtaattgactttaaggattatacagtcttacacgcgtcgatccagcctctttctcttaatcaaagggaggagatcgagtattagagtctagctttggatatctcttggacattttcttaacaatcatgattttatattaagtaattcaatttttaactaaagataagtaatataacagggtttatgccattttaaacctcttaattgtcgctaaatatcatatatatatttatagttcaatttttacatatttctcaagagaattgtgatttttaaaacgaatatatatatttaccattgaatctaatattagcaacttttttttttattattatatctgattttttactaaaaagtcaaataattattaattattaggtcaaaaaaatgatgttgtatgcatttatatttaaaattcttcgaattttttaattatttcaaagattttcttataatttattaattaaaggatttgctataataaaatcatatatgatatatatttagcaaaaactttgggtgtgtaaagttgtatttatacattgttactaattaatatttaagaattctatttagttttcttaaaaaattattacatttgtctactgagtttactcatgaagttttaatggagttttttttttttttactttttttttaaaaaaaaaaaattaaactattacttttatgtgttttttggaaattaattaattaatatagatctatatgaaaataatcacagtttagaagtcgaactttttataagcatggaagaagaaaaaaaaaattgaaactacagactgaagtataacactgccttatcttcactagtgatgaggacattaaaatgaattatcctataaaattatcttattttgtgttctttgaactaacactgccatatcttcactaatgccgtaagtttttttttacatatataatcttaaaatctctgcatttgttagatttttctttttatatatatatatgtgccactttcgatccttttttactttgttagaaatttttcattcctatttcttctcctatatgttaacagttcacgacttcatgcatatatatatatatgttttgaattaaaagatttttttatataaaaattcatatgttcatcacacattggtacgtaaaccatgtaaaggacaatatatattttggtaaattggtgtcttttagacatgttgttgtaataatgatgcatgtgtccattatgtacaattagtatggttccaacgaatgcctgtagagtaatttaaaaatatgagtaaggtataaaaatttgatattgtagtgaaagattttggtataagggcagtgaagattttggtatataagagtaagtaagcaatgatggtaagagctaagtaactagctgtttctgtttggtcatttgtcctatatatgttaatcatatgacatgctagctttatcttataagttttaacttaatgcaaattaatcatcactgaacattttttatgttattggtggggcatgtctgtctaccatgatcactaaggaagctcgtccgtaccctataaaaaggcatatcttttcttgtttgatttgaaatcacattcttgtttgtggatacatatacaaaacccatttgtgtctttgtgattatgtggcgattaatagtagtcatgttataaaatttagtgattgctaaaatcaagatctatagtatatatgaattccaaatatataaatgcttttgattgatactgagatacatataaatatatatgttaaatatttatttaaatgtatagtctgattagaggcatccaggttaggatcataaggttataccttttagtttttgctgctactatatattatatactaacttatatacatatatgtatgtatgtgtagaagttactcttgctggttttatgggtgtacttaaattctattcttttttgcggaaggaaaacttttatggagtacgtactttcatttatcataaaactgtatttctaaaagaaaaaatggtagtgtacatgtctatatagttagtatatataatgttgtgaccccttgatagaatcatagttgttatagcgactttcagaaagatcatgtactctttcagctacttttttgcatatatgtagatcctgatttttttcatatatatatatatatatatataatatagcaactgttaatataattataaaatagcccttgttaattaataggaaaaaaaaagtgaaattctttgtagtatttgtcatcaatagtactactcagggtaggggtacatacaacaatatccccccaattaacttagaattaagttccttgtttaatatgagaacttaatgaactttgtcactattgtaaaaaaaaaaaaaaaattgtgactatattttagttttccaccattttcttttggtcactgcatataagtttcttgcatatgcagctaaataagaatcttataggtgtgtgggcattacaaagtgatagtgtaatacaggtttgattacgcggttacaactaattaatatgacaccatgttattaattatttattaagctaaaattcatccgttaaaataagtgtttgaatttcatgaactgatcaaaggctaataaatattttatagacctaaagatataattttatgtttcatttacatgattaaattctatggaatcaattaattcataatgttgcattgtttaaacaattctaataacgctaaaaaaatttacttacagcatggagaagatattggaacggtatgagagatactcttatgcagagagacagttggtgtcaatggattctgaaacacaattacaggttccctttccctcaatttaattaattcactcatataatttatatatatatatatatatatatttatatattgttgtttgctctatgcattatttcaatttttaatttcaatgcacagtactgctaattagctagctagctagctagaaatttttttatatgctcatggctggctatttttttttttttcttcaggcgttggctaagtacctagctagatatataattatatcaaatgtttcttataattacccttaattcttttcagctcatttctttttctaaatatttcaaagcataaaggtgacaaagtgttattagtgcaattcaatataagtattatgtgactaataacaatactcttcattcataactaataattttcttacccctttatatttatttgtgcaaaataattctaatgaataatctacaaataaaataaaatttataaataaatccccatacttttatgttggtttcaaataggagcaattaagcagaccacatcaaattagaactgtttgtggtttattgatttgtactgtcatagattatgcagggaaactggaccgtggagtactctagactcacggctaaaatcgagcttttgcagaggaaccgtaggtacgtatatatttaaaactcttgtttttttttttggtgggaacttttgtttttttctttttaacttgcataatctttcattttagtgttttaatccaagtattttatgttaaaatacttaaatgtacgtatgttcttttggattttatatccttattttattacgttgttctttaaacccttgcaggcactacttaggtgaagatttagactcgttgactctaaaggatctcacgggtttagagcaacaaattgatatttctcttaaacaaattcgagcaagaagagtatgttaaccaattctagagtttgctatatatatatgtatagcactatattaatgaatgatcagatcaagtagttcgggttaactatttaataattttcatgtaaactgtcattgtgttaatgattttatttaatgtgattactcttgaaaaaattataatcgtacaaaaaatacaaggatgtaactattaataattattccggcaatctttttcagctaaatttatgacacacgtaacatagcataatacacttatataagattacttacactaaaactaatcttctcccctttttgcagaaccaactcatgaacgagacaatctctgatcttcagaagagggtaaaggaaattgccactgtctactttattatatcaattctacttttcttcttttaacaagtcaatggttaagaatattcatatatttagggggagtttttttttatattttttattttaatttgaaaaaaaaaaataaaaaagttcattttttaatgactctaaatcattgtagaagacgattgttacagctccatcatatataagaaacaataaaagtacatatttcgcagcacaatgatgaacatctgaaatatgccacattggaatacgtatttggaacttcagagttttgtcgtttttagtttctgatgtatatatacatacgtggcaggagaaggcagcgcgggaggagaacaacttgctggaaaagaaggtacatatatatatatatacatatagtgaatattacagacacatctgcactactcatacatataaatattaagtttatcaaactgcgcgcacatacacaagaaaggcattaatttgttagacatataaagtaataaattaacataaaatatagatataagtgaccatttaattaaaaattagatagaaaaattgggtgattaactagatgcctgttgtgatttggaaatgattaataatatataataataaagatcaaggaaagggggaaaatggtggcagtggagcagcaacaacagcagcaggagatgcagtgggagcagcaaaaccatggccctgctagtacatcatcatacctgcttcaacaaccacttccctgcttaaacattgggtatataatcattacaaatattcctcggactcagtatatatatatatatttcatttcaaatttctatatatgctttaactgtgtagtagtgtatatataccccaaaaacaacagtcatctcttacttccgtacgtttataggcatgccaatatgtatgtatatgcatctgttacttccgttcatatgcatgcgatatatatatacatatatgtgcttttatgtggagctagttatttagtacatcattggagatacaaattagtgtgtatatatagggtgcttcagcactctcaaaagataggtgtgtattgatgcaccttttcatttgttgtccttgagacaattccaattctagcttttatttcttttcttttagatgttggtgcttataatatagctattaagatatatattctacaaatattttaagaaatttggaaatgcaaaagataatgtttaaattaataatattgttagaaagtcttaaattgataatgtgtaaagaatactatatattttattagcaattaaatttgagatagaacctgatgtatcatattctacacacctcattcttacaaatttattagtggtttaaattttatgtagaattttcctgtatcatatgtcaacatgtagaatattttgcatccatgcatgcaccacatagcacatatataataatagtatattaattagttaccagttgtagccccttctatgtaatgatatgtacatatagatagatagttctatactcaagagaaaatgctacgtttgttcacaattaataaatctatcgatctctgcaagtgaataaggaaaaaagaagaagtgttaagtgtgcattcctgatttaagcaagtgcatcaaaattaatgctttaattttaaattgtgcaggggaggttacgaggatggaacacaagaaattagaaggaacgatctggaccttactcttgagccattatattcatgccaccttggatgctttgctgcatgaattaatatataaatatatatttcaaagagaggtctcccatctcttctaatttggaattaaatttttggatttttatttgggacatggactaataatttcaagtcccacatgatctatatataaacttatatatattatcaaccaacagcaacaccctttgtgataaagtatcagcgtattactagctatatatatatgtatgatcgtgcatgaggggacctctcatattttaatgtgtactattacggacgttgttaatccctgacttggatctgtgatatataattagactgaattaacttgggataaacgaattttaactagaaatatatatttatatagttaaactgtattttctatatgcttgatcgctgtacatggttttgaaatgcatataatccacctgattactggattttatgttctcctttatttttccatggtccatgaatattatatatacatgaggcatgtagaacacatacaaatgagatcgaccatataatatatattttacatattttaaataatattttggcgttgacactacacatccatctaatctcgaacaagttccaatatattatatatatttatatatatgtacactacttagcatcacatacacatagctaggtgtgttagggaaatatctatgtcaattgtcatgtatgtggctcaaagttggatgcaaaagtatatacaattttaatataaaatataattataacatcgttatatcttgtcatcatattcaataggtttctgtttgaattgttgtatgtttgagtactaaatagaaaattaaatatatagacctgagctagctatagaggtaaagtagtactggcaagaattttaaactttaataaacagtgttctatagtactatttccatgtagcaaaatgtatgtagtacgttcaatgaataaatatgtttatactactagctttgaaagagaggtgtttacacacacatatatatatatatataatattaatgtatgtgcatcttactggtacttaacagttgtatatagcttcacatttttcatcatgatttgtataattataaaaactttagccaggtagctagggaggaataagtactagctagtgcatgtacgatgtatggtgtactagtacagtaggtgagtgaattggccttttataggtgtgccttccaaccaatacatgttgtatattaatttataataagcctcttcaagatgagagactagctggtaactgcgcgcgcattgtgaattttgtgatacagctggtttttactttccaagcttatctattttgtgattctcttactgtctttctgcattgcagtacctgcttgggcatgtacatataaccatcattttattatatatacatatatttaatttatgtttgcttctttagttaggttgaagtgtatatatgtgtggataacatttcattgagcgattcaatccaatctaattataatggattaattagataaatagtaaaagttggaatattctaattagattttgttattggttattagatgttaacattaaattctatgttaactttcctaaggaattcattaagctgataatgaattgtattacaactcc

SEQ ID NO: 219188 - DNA, 7168 bp, Cannabis indica
aaagaaagaaagactaagtagagttgtagcgtatttgcggtaatctttttcatttagctgttttctcacaaagagtaacatgaccctctctttatcttccgacggaaggggcggcatgcctcgatactgagatcaactgcagctgcaagagccataaagattgcagcatcctcaacacatgttacatgacgcatggcaagctgtaccaatggtttgctagtctttccctctccttgcaccttacatctcatgacaaagcctccaacaactgggctgagtcctgcaaagtctccgctgctttgcgggcttgggattggagttgctgccgttgcaagcgcctgcctatccgtgtctatgaaaaaactcccctcccctttcggcattgatataaatctcagacatgagaagctcccctgcctcctgatgaccttcagacatgagacgaaatctacagcaaacggagtccctcataccacgttcacgccaagcttcgagtttaccccatggctgccagctctctggcctgcaagcatcaggccgaacaatcaaccaagctcctgggttggacttggcaacccaatcacaacctgtggaaggcacaaacggagttgtcatgaacgctgcggcaacagctgagccagaaagatcatgtatcttcaccttccatcccttcctctctcttctctcgcactcaggatcggtattattgtcactagaacctgaccagtagttgctcagagggtctgtctggcccaccctgttgattcaaagcactatgaatttctttatgatgcaaatacataaaacaataataaataaaatcaaaacaaagcagcaattccaataagaaattattatcattgaatgaagatgatcacttggtttcctgcttttagtaagagcctgagacagacaaagatgacagaaaaacaaactagaagacaaaagcaaatttagtctataaatgaatgagttgtggcagcagaagcagtttaattgagcatcatggtctcaaaacaataatttagctgcaatcagcattgaaaatggattgctttgattctttgccattttactttgttttgcatactgacacagtatatggaagttaatgaggctataacttatagaaatgtagtaaatatgagaagcatatcacctgtctcggctaaatttgcaactaaaaattggctgcttgatagagccttgaagctgatttatttgaggactcagtctggttgcatcttcaaactggaacacgtatctaggatcaggatctactttgactcttaaatgaagctctgcacctggttttccggtgtctgtcttgttttttccaagacctatccaaccattgaaaagaatcactggcttcccttcaccccattcaggagcaacctcaagcttaaaagtcccaagttgctgccttttgatggtgaccccacaatgggttcccttcctccccgtgaaaacagctatttccaggcaagcatgtgtgctatagaagcagccaggtgctaataaagctttcagatcagatttttcgagataaaaacttgaggcaatgctatgaggatcaggtgtggtttgaggagaagatattaaaggaacagaagtagtctgcaccgggaaaccttgaagacgaatttcacatgaacacggggaagagaacgcgtgaatatcagacttagtggagttcaaagctgttcttggaatccttagtcccagtgaatctattgacaacctaataaaagtctgaggatccatcctggtcaaagattttgcctcattatgccaacatttatagtcttggacaagtcaagaatcctgccacacaccagacaaacagcaattagattataaaagcaaaacggatattcatgctcattgactaaatagttaagggtaagatattctctaagatatatcttttcacagaattagatctagtttcagatggtcaaacaaaatcaaaacattgacaaaaatcagtgtcttaaataggagaaacaaacagataacaatgttgttttggagaaaggtgaagaaaacacaaaaattactgctatctgtgatcctttctatgataactccagtttcaaaacaagctcacctaatttacagccaagaaaagccagaaacaaacagtggtgagtataattcgcacacttagcattccagcgaacaaaaaaaaaacagtagtagttttcattttttacagtgtataatggcttgccaataaagtctgttctgtacataatctaaaaccagaatgaaaattaaacctttacccctttagtttttctcaacctgataaatctcatcttaacagctatacccttagtcaggccaccccatcagtacaaggtatgaccttgcatcttatatgaacaattaaattaagtactgatggttcttcttttactcaatcacttgaactactttacagtctattacaatcactcttattgtttcattatatattatctattgtgttttctcttgtgattttggggtagtctttgtgttagccactataaaagttcctaaagcagttaaaattagttggtcatatcgttgatttgagtccaacctttgtgtatgaaaggactaaatttaacttaatggagctaattctaaaaaagtactttctgttgaaaacacagttaagtcccaataaccaaatataattctaacaaaagtgtgacgccattaaccaaccaattgaattccactttttatgatgtaactaagaatttatatttagtaatcctaactcaacacaacatcaaactccaagttttatgctttactgatgggtaatcatccatttaactatcacataaaatggtatcgaaacatagttacattaaaaagaagatagttagttaattagcgcaaccaaaaacccagaaagaacaagtaacaaaagaaaagataaaagcataccttgattgagaagtagaagccataggaggaaaggtaaggaaagagagggaaaagggcagatcttgtatgtgttggtactaatactaatagtaataatatatgggattatgggtttagtttggatttttcgtgtggtcaggtgaggggatgagtattgatcataaattgtataaaaagaaaagaaagatagatatggggttggggagaaagccaagggtttgagtttgagtggataattatatcattatatcaaactcaaaaggacaaggagagcgtgcacgcatcacgaggaagaggaggtcagtgactcagtgccattctcagtcgttccatatagttttatcttaacacaaaatataattgccaaattagtttatgagctgtattctattcttttctctggtcattgagattgacaaacaaagagggttcaatttcattcttcctttctatgactatagaccataataataatgctattattattatttattatttatggtgctatcattcattattggatattggtctttggacttaaaaagaattaattaattaaataaataaaaagtaggaaggagttcgtgaatacagctgtaaccaacgcttatagtctttcctctatctttttccttagcatctctttgacttcagctcatttattatacaaacttaattatatactaatcataattatatagtatcatttcatttcattatgttactaataacattttcctttggaaaaacaaaactaatgtaaagtttcataataatgcattgctaaatttgcaaagcaatctaaaaggtaaacaataaccctttggggataaggcagcggcctttaaattaggaaagcttttgtgtccaaacccaaaaggaatcttctttttatggtaaaaatgaagaaaaaaagaagtggttacttttttttcatggcatgggattacaaccaccgtgaagcgtgcggtgccactagaaaaatgggcacactagtctttgtttttaggaacaccacaacaaattcagcatccaatgtggacaaacaatggtctttttaagacttttgggcttacaactacaaagtcaaataagatagcattactttactactactaataagactactacaccaaccgtttaatctctgaattgaattcatttgggaaattttatttaatatgcttaaaatttcacccaatatctaataaatttcttcaaataattttatactaatttatattagtttactttaatgtatccattctatcttgtcaattcaaaaagcatttctctctctttctcttttgatctaaatagaacaccctaagttcctgaacttcgagaaatcgccaccaccagaagccctctcgaagccctaagttcttctgtcgtctttgccacctcgtcttccccctccctctcacatcaaaagcccaaaaggccccacaccattgaaaacccaaattccctgacgataaaagctttactcaccgtcgacgacccaacaacgaccttcgccgtcacctccatatctgatgactacaatgttagatttgttagatttattatgtgattttaggtttaggttcaattgtgatagttttagtgaaattagggttctgccgagtagatcaacatttgtttggatgtgcaatgtgataattttgttgagatttgtgtagtcttttggattttgtgggtttatgcctcagcttatgattgttaatccgaaaaacttttcctggtgatgtggacatcaatgtttgacatgtgacaagaaggatgatgtcatggagttgagtagacccgagtcatagcagtcaacttgggaggggaccctagccctacgcccaagttgactccaggattttcgggataaaagttcaaacttcaataacttgaatccaactcactatctttcagtattctgcaccatgaagacatgaagcaacctaatctaagtcccgagagctgtaattacacgaacctgcaacccggaagccaacctgggcacctagggtttcacctggccaccaggttgacatccttaactagggtttcagtttccaggacctgcttagtgcaaaatggtcaaaacttgcattgagacatcaactagacatgccacaaacatatttgaggcatcagaatcgaagcaagttgatttttgagcacttgaggccccgaggaaccagcgcccaggttgataacttgtcaatctgggtgccttccaagtgtccagtcggaaattcaacttttgcatcgtattcttcttcatcaaaaatggggaaataggtcctttaggaggaaaaacaacaattcttgggcacaaaaaaagggcccaacgcccaggttgacacttgaaagggcccaacgcccaagttgacattttgtcagcccgggccatttaaaatagagttttttaggaattctttcgagcatcttctctgtcttcagaaaatattgagattcaactatttctagggaccaaatagaatttctaaaggggaaaaactgggacccaacacccaagttgacacctggggttgggcccagcgcccaggttaacacttggggtcgagctcagtgcctaggtcaacatattgtcaacctgggctatttccaatcaagttcagcaaaaagtgttctgggcatttttttcatcattagaaataacgaagattcaagtaaactcaaagagaaaaccacaatctcgagtccctagaaacaaggtccagcgcccaggttgacctagggctaggcccagcgcccaagttgacaatcaacctgggttgttgccttcaattgctccaatgccaaatctgatgcgaccatagaatccagaatggtcaaaaatagggtaggcgacctcttcctcaagttcagaagacttagaagtatcaaaaacaaaatctcaggagcttgggaaaaagggcccatcacccaggttgacaaaaggcctggtgcgttgggttctgcttatccgagtctaatgtcgttttgaccgtccgtctatttttttagaatgacgatgatctatgaagtcagataaattaaattcacaactttgcatttttcatttccagcacactcagaaatgaagagtttcgagtttctcatttatgcaaaatagtaacatctctgagaactggtgaccagcttcgccaaaacatataaatggactaagtggtgtaaggtatcacttaggcatcttaaaggaaattccttggacgtttttgcacttacccagcgtccaagttgacgtcatatgtcaacctagggactgggatgtcaacattttaatttgattaacgcaattcaacttgtatttagaagctaattcaatgctatatcaagtcatgtctcacactccaattgcaattctgaacctatcatcgtcaaaattcattccaagggagttacgaaaataagctcggggttacctgcaacgggacccaccgggcaccaaaaattggtcatcaccaccagaagctaattttcaccgttagatcatcatcaacgataaaaatagactttctctctctagagtttggagttcctgatacttcgtctattgttgtaattaccatctcgtgagaaataaagactcaaagtagacgtagcctcattactatcgcggtatagggctgaactactataaatttattgtgtttctcttacaaatactcagctacattaatcattctctccaatctagcgagcgggtgtggcttagaagtctagtctagatttttgagtcaaaattttcgtactttcattgagagccatagctcaaaaagttactaaacaagatggttgcaacacgttctacaagtgttgacagacagactccagcaactggccgaacaactaggggcacatcagttgatggggttggaattgggactacttttgagcctcaggcgccaaaagcaggcctcgaaaccagctcttcaattcttcctccaaggccactaccaacttctcccaagactagcaccaacaaccaggtcccacctaggagcctcagctggagatagatgaccctaaggaggccaatcctcaggtcattcagctcagccaaattgtggctgacttgcaacaacaattacgagactcttgttgtgctaaaattagatttatacgcaagtgcatgtagtcacaaacaagtaatacaatgatatgtaaaataatatcgtctccacaggaattgatt

SEQ ID NO: 219189 - DNA, 11378 bp, Cannabis indica
aggttggttatattaaaaaaaatctgtcaaattaagtttttttttttttaccattttagaaaatacatgatttattttgtcatttaagaaaatagagagtctaaattagtaacttttgcaaaatactagatctaaaatggtatttactgttttttttaaggtgcaaatataatgtagacacttttatttcatttttttatttgttttttgaaaggggaatattagatgatgttgagaggattaaatttaaaacttaaaacaaaataatcagtgaaatattagattaattattttgtcgtttaccctagtatctcaatatgaaacgacaatataaactgtaaattttcaaaacggcttgtcgtttaagtgcactttatacggaagaaaaagagaagaaaggattgttaaaaaaaaaaaaaggtttaaaatataagaaaagtaaattaattccaatttggggttattatttgtgaaattgggggtggaggaagtgaattcaattgtttcttttgcaaaagagattaatagtgaaattaagggcgaagacgaagactaaccagaaaaacaatggcgttgaagttcttgaacaagaaaggatggcacacggggagtctcaggaacattgagaacgtctggaaggctgagcagaagcacgacgccgagcagaagaagttggaggagcttcgcaaacagattcacgaggagagagagagatccgagtttcgacaacttcaggaacaggccggcctcgttccgtatgttttcatctttctctccattacaatttattagggttatttctcaattttgttttatttgacttgttcatcttcattcatgaattttatttcagtaagcaggagagattggagtttctttacgattcgggtttagccgtagggaaagctagcgcctctgatggttttaaagcccttgaagccttccctaagcccgacgatggaccttcttcttctactgctgcagcctctaaggtatttctttttctatttttatgtttttaattcttctgtagtttcaagtttatgagtctgagattgatgtttttgggtatggaactagcaagcggattcttcttcagctgtgccgggagctttgttcgaagacaagcctcagtctgctaatgatgcttggagaaagctacactccgatcctttacttatgattcgacagcgtgagcaagaggccttggctcgaattaagaacaaccctgttcagatggccatgattcgcaaatcagtaagctttttcttttcttgccttatatgaaaatttcagcagttttttttattattatttttgtgatgccaatttgtacttgtttgtagcctgtaaatgtgttagttcatactgaatggaataggccttgtaatttgggcataggagagtagtgaagaaagttgcgtgcggctggtagcgttaggtagccatggagttggcatatagttcttcttttgttggaggaggaattttctgcatctttagcatataattatctgaaatttccttccgccgactaaaagaaaaaacataagcctactcatataagtattgaagagttttgctacataaacgaaagttgaaagcttgggagtaattaagttttatcaaatatgagtgtttagttgtttaagggcaattgagtttttcttagtttatgaggatcatcattccaaagaggcagtgagggcaactgagtttctacagtatatgattttcatcattctaaagaagcgttaactgtaatgtgctaataaatggtggttcaaaattttgtttgttgatttggagttggttcgtgtggcacaaacgaaactaaatgaatgaatcgtaacagtttttggttgcaattgagtccttaagtatcagaatttgaacatgtgtcatgttttggttattcacagcctcagagagatcttaggaacgagacgtatgtgtgtgtgttctcttttttctcccccccagtatttgtagtatttgtggtgactttaaatcaagttcaatatttgaaagcagaatttatggcagaaactgattcctcttctttaccattctgagtcttgaaatgagttatttagattttttaaattgtatacgccatgtttagagtatatggcaaacaacgagtactgtttccaatttttactgttcttgagcttgtagtaagtggattgagcataatgctttaggtcaaacaaagttctacataaaactatatttatttgttttaatttcttttccatattttaaaagtctcatttcaaaccttaaatctttgtaggagcaaactacatgcctgattatttgagctacttttatcttattgggttggcttcgtctgtgcctcttcatctagataatttagaaactgaaagtgtgactggaagtaaacatctgtctctaatgaactctactttatacttatttatttatttgcatgcttcatccttgatgaataatcaattgaaattgttagaacatttctaatgtgaaaacacaatggagaagctgcaagtagttgttactattttttacttgacattgtcactatttgtttgatgtattcactaaattgtctgtattataagtttgtaactgtttctcctgcttatcatttttctttaggttgaaggaaagcacaagaaaaagtctcatgaagaaaaggaagatagaaagaagcagcgacatagtagctcaaagcatcggcattcatcctcctccaagtctgaagaggaaaagacaaagaatagtcataggaagagttcaaattacgataaatactcagattctgaagatgaaccacataagaaagcaagtcataggaagagttcaaattatgataagtattcagattcagaagatgaatcacgtaggaaagcaagtcataagaagagttcaaattatgataagtattcagaatcagaagatgaattacataggaaatcaagtcataagaagagttcaaatcatgataagtattctggtttagatgacaaatcacgtagggaagcaagtcatagtgagaagaatagctatcggagttctaagtacagagagcagtcacctgatggccaatccagacgagaaactgttagagatgatcaaaatgctgccgagagaaatcatgaaaagtcagataaggaaagatatgtagctaaagatcgacaggagtcacaccataagcgacgcaatgctgctcctaaaatgtcggaagaagaacgagctgccaggctgcgtgaaatgcaaatggatgccgagttacatgaagagcaaagatggaaacggttaaagaaggctgacgacgacgacgctcaggaagctactcgggctgccataattaagggcaaaaatttcttggatgaggctcaaaaaagcgtatatggtactgagaaagggggtagcaaatcgattgcggaaagtgttcgtcgtcgaacacattatactcagggtaggtccttagaaggcaatgctttcaggcgctgataactgtattcccaacttttaagttcaggattttctcagtggtacctatttctggcattcttggaccagtttatgtttagttgtattattggtcatatgtacacttttatgaaacgaccttaaggtggagttttaccttattactacatgtgaattatttatataaaagaacaagaattgtaaaacatattgtatctcatatgtaagttgttaactcttcatgatcatagaatctattgttgaatagtcatcaacgccatgctctgtcacgttcgtgtcatgactaaaggacatagaccgataacctttataattagactattcgtgacagctataattactagtcagttgtgatggtctttaattatttttgcttttctgttaaatgcttgttacggtaaaccgtgagcaaatctattagaaccatacaatgacagtgtttgttggggccataatccattatgctatgctatgcacagaaattctaaactcatggttagattcaacgtttcaagtcatcacacgattttgacctttttaccatcttagttaataagtgcaaaatagtggtatcacatcattatataaacatagttttgattttccttaacagagctgaagaggatggttaattctcatacttttaattattgcattagtaccatacagcacactagtgtagttacgttgatggatttggcttattgaatcaagagggaaccagagcagtcttattcatttcatgaatggcctagtcggccaatgggcaatgaacaaaaagagaaaatgaatataattaggaattgaatgaatgcgaagggactatataacgagctgtcaactccttatctctttttcaccaactaattaaaattgaataattggaatctcaaactatatatatagtactttaatatttgtagtaaaacataataaccttcactctttttttctcaagtatatatatactgttgctgccgacaataatcacacaaattacactaatatagtcaggccttaacatgtatgatgtgattaatatttttagttttaaatggcaaaacatttaattatataatcttcgaaaggcaatgatggatgcacaacttgggctatatatataatcttcttttactgttagttttcttgaattgaattcacacacagaaatgctaaattcaccttcattacaactgttttcttcttgcatgttttagtaatcccatttcattattttcatcaaatgtttaaactaatccctctacttttctatgagcaattaattagcatcacttcatgttctgcattatattcccaacgattgtggttagagagtggctatcagtatataattttcaaatgagtcattatttgatggggtctctctctttaaatgacacgttagattagaagactaatgctcatctattccaaaatcacaggcccactgccttttgcatggtttactatctagtggtggcaccaaaatttaggggaaaacaaaagcattgcaataaatgaactaactaataaaagtaacataacttcatttttttatcgttagaaccccaaaactttgattaaacaagtcttttcgaaggtgtcaaagcctctaggctcataatgctccttttgcccttttctgattccaagttcaaattctcttatatatacataagttaaataagtattagggagagaacacactctgcctagtttctttcagctccaacaaagagtgtcagaaatggggtcattatggtttctgggtttattacttctgcttgtgttggtatccagctcaacggcccatgtatttcaaggtatatatatctatatatctttataattctcctcccaatttttgtcttttagctggtttttatactaaactataaaatattaaccatcttaatatatgacttcttttatgcagagaaagactcgttggaactgactatatatcatgtgaaaaccaataacaattcatctctaaacccaaagtcccattttgaagatatagtaacaaacgacaatgaacgcctcaaaacgctctactatactctatcacaaaacgacacaagctctacaacttcttcttcattctctacctattcttctcatcataagccaacagatctcaaatccattaacataccactgaactcgggtatgtcaatcgggtcgggtaattactatgtaaaagtgggccttggaagcccaccaaaatactactccatgatcatcgacacaggtagctcattctcatggcttcaatgccaaccttgtaaaatttactgccataaccaagtagaccctgttttcgacccaaaaacatcaaaaacttacaaacacctaacgtgtggtagccccgaatgctcgtcggtaaaacaggcgacactcaacgaccccttttgcgccgccggttcagacaactgtatctacacagccagctacggagactcgtcgttctcaattgggattctcagtcaagaccgcctcaccataacccagacccagattcttcccagcttcgtatatggatgtgggcaagacaatcaaggcctgttcggaagagccgccgggattttgggtcttgcccgggacaaactctcgttgctttcccaggcttccgctaagtacggatacgctttctcgtactgtcttccttcggcagaattcggccaaggtggagtcttttcgattggaacatcttcagtttcatcaccggcttttaagtacacccctatgatgaccgatgctaagaatcccagtttgtattttctaagattaacgactataacggtcggaatgaagccattaggagtagctcctacgagttacagagtgccctgtattatagactctggtactgttattactcgtttgcctaatcctttatactctgctttaagtcaagcttttgctaagatagtatcgaccaagttcgccaaggctccagctgtttcgattttggatacttgtttcaaggggagccccagcgccgtttcggctgcggtgccacatattcagcttctgtttcaaggcggcgccggtcttaatctggggcctaaaaatttgatcttggaagccgaaaagggtgtcacttgtttggctttcgcagcaagtaacgagtatgccattattggaaatcgtcagcagcaaacttataaggtggcctatgatatttccaaatcccgaattgggttcgctcccggcggctgtcgttgaatattgacagattattagtcgttgacttggtcatttttagttggattaaggatccagatgacatagatactcctatacatacatatatgtgcattatgcgtggtgtatatgttcatatcgtatgtctattaagaagatagtgattaaataaatgtgtatacgtatacatatgtttctacgaatacgtatgtcaaatatgtttatataatagctaaaattaagaaagatgcaaaattttagctcaactcatctttattttacttaacaagttttttagctaaaattttctccacatttagctagaggaatagggagtctttaaatgttttctaatattaatttaacttttctaattacatcacacacatcagctatatatataatattttatttataaatatattatttaaacaaaataaagtagaaaaataaagaaaataatatatagtgtattgtaaaagtttgtagtaaaataaaattttggttatatatttaaaagataagagtaaagaagttggtgtaagtgctagtgtgtaagagtaaaaaaaaagttggctgagttgttgggcttgcttttatcaatgtacttataaaatcaaatacataaaacctatccagttctgcctttaatatagtattaattgacatctttgaagcttcgttcattattcgcaagtacttggaaaataactttgttactacctgataatacatataaactttgtttagagttatagctaaacatttaatatatattactttaaataaaaagagatccaaatttatataattcaacaaattttgtttttcctacgtctacaatagtaaggagtcactactactttatcaatatgagagattataacgatcaagagcaaatagtgtctattttgtacaacatgatcaatcttgggtacaagtgataacctagatcaagttagtttttagtagataaatatatatttgatggtataattgtgtgagaaaattaaaaggatgtgaataaaggagcttatgattcatggacaagcttggtaaactgtgaaggtggtgtgagtagtttggtatgtctggtatttatagaaccttataaagttactcatgtggtgaaggtggtgtgaagagcttattatttatagaagcttgtgaatgttaccgatgtagtgtgaacaacctgatatttatagaagcttgtaaaagttactatgtgatgaaagtggtacgaacaacctagtatttatagaagcttgtgaagtagataacctggtatttatatagaagcttgtgaaataagcaacttgatatttataaaagcttgtgtaataggataactaactagtaagggcgtgaattaattaaaaactactggagatgtgataattgtgtgtaagagagaattgatgagatatgatatttacttgtgcttaaaataaaaataggggaacaataataaaatgagagctaattttttttaaaaaaaactcttctgagcttttaattagttgtgtgttgtgagttctgtcatccctcctttaatagaagaaaattcttgcactagaagtattaacctaccgtaccctacataaaacctctccaacaagttgcacctattctaacttctcatcaacttgtcgactaacttatatagtcttacatctgtattaaagttgtttcaccaaggtattattttaataaaattgcactgaattagagtaataaatgtgtaaggacaacgtgcatccaaatattacaagaacatttttcaaaaaagtcaaaaattacacactaacaacatctttctaaaacatgcgagtagctcgaagattatgtgtagatgtagaattttaaatatctgcttaacttgtccatagacatattgtttggttgcttgtgttaaaataactttttaaagctacaagctgaaattccctagatacccaaagtgcaacaaaagtgcttttgaagttttaaaaatccaaaaataacggaccaacgagaatttaagtgacctcttaatcaataagattcaattaattatttaataatgttgaaatattccaaaactaatcgaactcttgatttgcaaattttgtacggatggaaggctacaaaaacacataaaagccctccaattcatcataaccagctcaaatattaatcgtgtaacagaaaatcaaatgtcgccttgaatatcataacttaaaaaacctttagttttttttaactttaatttggatccaagcaatagacgagtaagatcgtatcaaaccaaatggagaaaaaaaaatgaggcaaaatctctataaataacgaaactagctgttttcatataaaataagtaaataacataaaataaaataacacaaattcataatggtttcagtttccttaccgattgcactaaaatgcaggtttacatgctctcctttattttacagataaacctattcttcccagcttctaatattgacaatcaccattatttcacagcaaacaatatcaataatcacatcagagcaatgtatccaccagacgcaaacagatgctggatccactatgttttgggatattagaaaattggacatagcgagacaattgtacaaacttactagtagtaattgagtgttcttaattcacaagagagtgtcgagatatgtatagttcctgctgcggttgtactgaaggagactaccatatgtgcggtcccagacaccgatgaagagagcttctgtgtcagggctgaaggacacaccagagatctccccaaaaaaatcaatctcttgctccttctcaaatccattctttgcatcatagacatgaacaaagtccgctggctcagccattgccataaactgaccatctgatgtgaaacgaatcgaacgaatggctccaagattgcctttgagcacagcaacagactttgataaattccgagcatcccatatacgacaagttttgtcttggttccccgtggcaaatgtatggccattgggatgccatgcagatgcaaatgagaaatccaaatgtccacataaaggcattatagtctacgaaagaaaattatcaaattagcctagtttttgagattttatatatctatctttagaaaaaaaaaaaagaataagaaatctacctttcctgtttgtgagtcaactagcattccatcaggattgtcaccaacaatgactagaagcttgccatcaggactcaatgaggtatgctgcaaaataggacatggaatctatatattatacctatacaaggaactatatttaataatctcatttaactcaatcaagtcagcactctgctataaacttttccctagtgaagagggaccggaggagctcaatattcaaatatcaaattcccctaccatattgatcctctcaaataaaacctgacccctttcctaagccaaaacaaagaggcctcagcttagagaagcctggccttgtctctaatcagttaagagatgaaacacgaaaagatatcaaaacgaaattttagtccacggatttaagttgcaaaacaacataacagactttgacaaatttgaatgggaagtgttaatacagactggacaagacaaaatcaagttatatgcagtacaacagatgtaaggtacttacatttacaggccaaggataagaaaattgcttggaaagctgaaatctctccatatcaaagtccctcactccacaatcattatttgaagccatgaaatgaacagcaccactggtaaaagccaactttaggtaagcctcatgcaacgaatcaataaagctagtgcaataaacaaatttgtatgaaagacaacatgagaaagataaaaacctggggctatcataaatctcaattgcatttgtgattgcattttcatcatatgttgtcctggaacaaaagcttacaccaggtctatccagatactgcagatcaacaggaaaacaactgagttcccttgagttaatccatcatcaagggcaaatcaaacccaaagtttagattattacaaataaaccactattgtaaccacttgatggcttgaccaaatacggaaacgttattctccatttaaggaatcttgcacactttcttatcaaatctataagtaaaaaaaatattataaatgcagacaaaatctaaatattcgtataacggtgaatagtgaaaccagtgatgagaacaaacacaaggtgtaacagtgaaatcgttaccttacaaataagttcaccctgaaaccctccagcaattaacaacttatcccttacagctagtgtactaacttgggtctgagtgaatccttccagaagacttccaggatgtttctacagatattaaaaaaataaagaaagaggaactttagaaaccccatttccaagtacataactggcgtagtttaccgagaaaatgaattattctagacaaagatatggcacctcatgggggggctacgtgcccagaaacatcaagaacttcctttttcttcgtgctcaaagaggaccagtgaataactgagaagtttgacataagatatacatcatgctttgaagtagaccaaaccaagttcctcaactgcagttgcaaataatagtacataaatgaataacttcaaacatataaagtgagccaagtctgcaatgatg

SEQ ID NO: 219190 - DNA, 4298 bp, Cannabis indica
tttgagttggtttgtgtaaatattctattattatacaacaaccacaaatgttttcagttacaaaaaaaaaaaaaaaaccagataaaacatttttacaatttacaatgcgtttttggaatggactcgacaatttttttgaattgataactcacagagaagaaggtacctgctaaactcacagagcattgttctgctaccatgaccctcttaacctacactccaccatttatcgtgcgccaaccccccttcctccgtacctccgccgtcgaattccttcgtaccccgccttttcccgccctcctctcgctggagccttcgtccccacttcgcctccagtttctctaccgtgctccgaatgttccccgacacgcttccttccccgtgtgtcgcggcctaccgattgttgccggcgctgatttgacgcaggacgccgtagctgtggctgcagtactcgccggtgcgtacggactcgtatctacctttgacagtctaactgggcgaaatctcattcaacaggtctttctctctctctctctctctctgattgattggttctgttaacagaactctgtatgagatgatatctggcaaggttcttttttgttttatgtatttagatttttagctcataaatgttcaattattagtacgaaaagctttgaagattccatgagctgtgatgatgacttgtgagtatggatgttgctaaagtccattttttaaagctatatattagtaatgatgatgatgatgaaatatagtttcagtcatggacatttggcaaaattttatattaaattcaactcttttgttatcttgcaaaatcaaagtgaaacagactaaaattgaaacaattgattaaaagttagtatgaactgtttatttttaaggtttatttcgatactgtattgtacagtcattttggactttctcaatgaacagtttaaataacaatactagtaagtggtagacggtaaaaccttgccggtgcttatgggaaactatctattggttgttattatttttcataaccaattaaccatgtaaaactcaatttgcacttattaaatttacataggcaggcatacaatttttcttctctaattcacacatatataaaaccttctgtgttttaaaagggataattagagctgaaaaaagctaatagtgagtgacagcgggtgggaagccaaaagactagcttatgagaggagggtgctcaagtggttatcaagcactaactgaactaatctcatacagtcaattagtcacacttagtttaggtgagatcctaacaatacaccccctttagagggacatcgctagagagtgctgatttgctccaaccacttgagtagaacactcttacatgactaaccgatgagaacaggatgcctaactaagttataaaccatcaactaatgtcatacatattggatgtgtgatcctaacacatacttggtataaatagggtgaaaaatcttaattaatgcttgttggtgtgatctgatgtatttttcttataacatgaatgtgttaggtattcaaaaataagttactgatcatgcaactgcaattgttataatattaaagttttaaatgatgtgtacattagttcatgtttaactgtttctgacaatgctttttatgtctcaataattgtggcagagtttaagcagaaaactagttcacatattgtccgggttgatgttcatggtttcatggccaatttttaggtaccccttttcttcttgttcaaagattctgatatcattgaacttttcttttgtgctctaataatttatatatcagatgccctaactacttcagttgatggctttgatggtagaatagcacttcaaccagtgctcgatactttgcttcattggttcctatggtgaattgcttaaggcttcttgtccatggcttttcgttggttgaagatgatggactcataaaatctgtgactcgacatggaaaccccgagtaaactttcctatgctcatcattgttttcttcatatcgaagacattgttaggggcttagcttcaagtttttcacacttgcagggagttgcttcgaggtcctttgtactatgttattgtgttgatcttatgtgctcttgtcttttggcgagagtctccagtagccgtgatcgcattatcaatgatgtgtggtggggatggtaactgttctagccttcttccaattcactctattccttttgcactatgtacttggtctttttctatataaataactttgtggtttcaggtgttgctgatataatgggcagaaggtttgggtctgcaaagattccttacaacccagacaagagtttggtgggtagcatatcaatgttcgtctttggattcctggtttctgtcgggtgcacttctaaactttattactaatatcattccttagtagttaaaatacttgagggattagctgagaggccagtcctgtggtttgctcccagatggtctgaaactcaggccctgttaagtggaaaaggaaaggaatccatttcctttattttccttagtttggttagaactttattccattgcattcttccttaagaaaatcttgtaccattgctgattatacgagtttggtaaaagatctaatactgcatatcttataagtgcaattctttttttcttttgtaggatgctgtactatttctcagctctggggtatttcaatttggattggccctcaacacttcaaagagtggctctggtgtctatggtggcaacagtggttgagtctcttccaatttcgaatgtagtggatgacaatctatctgttccattaacgaccatggtagcagcgtatttaagtttcaatatttagctgtgtttactgttaatactgcttgtatttaagtttcatgtacatatatagattttcacctcttcatcatggatgggatgggccttgtctataaaccacaaacaaaccatatgtatcccttcatgaattagtcaaacaaattaagatgctggccttaaaacatgaaattgatcggttgatttcatagctgtaactacgtgcgtgtcgtgctagctcgatttatatttttcaagttttttaaagtacaggtcgtaccgtactgggtcataaaaaatatgggccttgttgtaacgtgttataaaatggaataattacataagacactattttttgtaaaatatttacatttttacgttcaaagaatgtttttttacatatttacggttttttaaaaataacacgaaaataacataaaattaacaagaaaactatataaaagtaacataaaaataacatcaaataaagattacaacataaaaagaccgtattttctgtaaataaaattaaaaaaatcgtaaaaatatttaaaattccgtaaagccgtatttttgtaatttttttgttatttttatgtttttgtgaaataatcccttataaaaaaatatgagtcatgttgtgtcatgcaacaattaagctcagtagtttcggtttcgtgctgtgattgaatttgtgtcgtgttttatgagagaaggtttcaacaacttaaattaatcaattgtgccttttgtttaacattttctccaatccagcaaagtcggtagtttttacatattggtagtctcaatagtacagcaactacctcaccttcgttaatgtttgagctgaagctgactttttcgacagtctcattaattgatatctcattttggttgccacatatttctgttcttagttttaatttgtactattttccttcataaattccaatagtattattaattacagaagttcacttatttttccagatttgaagctatcgtttgttactttgtttcataaagtagcaaagattcctgaccataagtttaaacaaatttggggtcacacgggcccaacagttaaagtggcacctactctaataaatactatgtcttgtggtacatgtggatttcatgactacatgaaaagtagtttttgaatatttttgttctagaaaggggaagtggtgttgaaaagtaagtattatcaagattgaaaaatcaaatcccttacaaaaccaaattctaagacatccatattaggctaattagtattattggcccctcaatttttaatatttaccaaatgtaataatttttttttttgaattattaagaatatttgatttaatgattttagtctaattttattaacgaaagttaacggtgaataaatgttcaaggagtataattttatatatattaaaatttggaaaatacaattttgtagatattaaa

SEQ ID NO: 219191 - DNA, 4251 bp, Cannabis indica
aaaaagtaaaaaaaaaaaaagaagccctaaatctcccctactaaaaatacattgtacctctcttttcagaagtggcttgacaaaatcctgtctcccatggaaacaccaccagaagttaaaagaatatcgatatcagcagaaactgcaccattgacaactctctctagtcaccttcatcatctcttgcaatattcaggcaaattaatttgcactgcgactcttttacaactatcaatatcatttagcccgattttgaattcctaatctgtacaagagttgaattaatttcacagcaaaattgtccagaccacgtaggaagaaaaaaagaaccttgagcaaatcccaatattgctcagaaggatttggtaaatatgacagtgaaagatagtccaacattaaacgaacatgtagaatttttgtagaaaatttattattgaaaatcaataatatattcatttccatattatttgggtatcttgatacacaaaaaactagtattaaacgacacaataaaaacagaaagtaaatacagagaggagcaaagaaaaaaccttccaattaagagaaaagaaaatataaacaaaactttctcatagattctcaaaagtatctcaagctacacgtttaccttcatgtggaagcgttaggaggttcgactgtgtacataatttgcaaacacttgaaattctttataatttttacaatgtgaaattttcccctttgtgatcatttttctaccctataaagcaagtcagaaattaagcccaagaagataaataaagtaaatatacaattatcttgaattatgaaagtaattaacaagcaaaaaccaaactacaaatttaattaacagaatcaagaaactagactacagacaaatcatatgtcgtatctaaatatcctaaagcattaaaattaccacaaaatagattcactgatagaaaacaaaattaaaaaataaataaataaattttaaaagaaaagagagaaagagatatcagggaaaaaagaaagacgggaagtgctcttgaaaatatacatatatcccccattaaattatatattcatctaaataatataattgtgaaaagtaaagaaagtattgaaacttacatttatctcactagaaagagagacaagagaccatgaaaaaggaaggggctccatgaagatggttgctgagagaaggtagttttgttccgttcactaaggctcgcaaagagagagagagcaaaatctgaaggcagtacccttggcatcgttcagggacgaaggttaaatctttaagaattatttagctagggttggtaaaatggagaggcgaaagtgaaagaggaattgaggaaataaagacgaaaacatactagggggaatattagacaaaaaaaaaaggaaagaaagaacgaaagaaataaactggggggaaaactaaaacgaaagaacaaataattcatttggcgctcattttttcccggtcttttgtccactttaaaattcattatcattgtccagccgcattggacttaaatcatgggttatatttagcatccccacttttttttctagtctaacatttatggacatgattatcttttttttctagtccatcaatattggactagaaatcttctcaattttttttcatgtccaacacattttttgttagacataaaaaaaggacataaaaagaataatttgtagtagtggcctcacttcttatgaatcacttcaaaacactgctcatcattatgatcacttaagaaactttggtgtttagcatatggctccattctcttttccaaaagacataaatttacactaagaagtagagcctctattttcattggctatccacatggcatgaaggcttatatgcttatggatattgagaccaaacaggtttacttttctagggttgttgttttttatgaaaaaattttcccttttttttttccaacatctccatctggggtcaacaacttgtttccccaaactgtgcttcccattgtcacgccagtgcagcagattaacaggccaatggccaccaacatcatacccacaccaataccaaaatcagtccaaaatggttctcatatcggttagtccactgatgctaagccaccacaggctcatgtacctgcatctgaaccctaggacaagcagcttcatgctgcaccagcaaccattggccgcactagtaagaaaaccagcatacttacaagactacgtgtgccgtacaacctctactatccatcctattgaacccttcttatcttacattaaactacattccccatttcgagctgttgttcttgcagcatactcacattgaaccaaaaaactatgctgaagcttctctattttagcattggttacaagctatggacaatgaaacctaagctttagaaaaaaaaataagacttgggttatcactaaacttcctcttggccacaaagccattggctgtaaataggtttacaaagtaaaatacaaccaacatggggatgttgacaggtttaaagcttgtcctgttgccaaaggtttcaaccaaaggcaaggcatagatgtctcccaaacctatgctccagttgccaagttcaatacactaaaaatcttcttggcacttgcagcaatttataattggcgtatccaccaattagacattaataacatctttctccatgtggacctccatgaagaggtttacatgaaaatacccctggatataaggccccttccaactctgtttgcaagctaaacaagagcatatatgacctgaaataggcctccagatagtggtactcaaagctcagtaccactctcattcaagatggcttccgacaatccaaatctattaactcattgtttatcaaacagacaacatcaaatttcttagccatccttatttacggggatgatatcattattgccagcaacaatgtttccaacatcacacaattaaacaattcacttgaccaaaaattcaaactcaaagatcttggaaaacttcgtttctttcttggccttgaaattggtcgaactaaaggaggcatttctctctcccaatgacctttcaccatacaatttattcactgatacatgatacataggtgccaagccaacttctgcacctatggacacaaacctgaactcagttgagacaaaggtacaacactcacagacccgactgcctatcgtagcctcattggcaaactaatttacctaacaattacaaggcccgatatcacatatgcagtcaatcatctcagtcaatttctatcttgtccatgagttccccatcttcaagccgcctatagagtcttacaatatctcaagaagactccaggccaagacattttctttccttcaaacagtgtccctaatatcactacttatgcagaagcaaacctctcatcagctaatgttcaactttctttctttgctgatgctgattggggcagccgttaagacataaggagatcggttttagggtattgcattttccttggtaatccctttatctcatgaaaatcaaagaaataaaaaagttgtatctcaatcctctgttgaagctgaataccgtgctatggaaaacgtacgcaacatctgaattgacttggatccttgccattctcaaagattttggtgttcccttttccacaccacctaagatgtactgtgacaatacaactgcaatccacataagtgagaatcctgtctaccatgaacgcacaaaatatgtagaaatcgactgtcacttcatctgagaaaaggtccaacaaggctctctccaactgatgcatgtctcctctcacaacaaccgagctgacatcttcacaaaggctctactcccttcctagttcaacaacattgtatccaagatggatttcatcaacatttacactcaatcttgagggggctattagagttagttatgattgttaagtctggtaattagttgttaagagtaaatgttaattagttaagttagttaaaaattgcttactgcctatatatattcagctcatgtattccatttcaatcataaagataatattcaaagtcttttgctctcttttctctcatatatatgatgttagacttttatttgggcttacattaaattttattggttttattaaaacttgggttgattagatagttctttgctgtgttagcccatgttgttggtgatcaattgttaatgggattagcatctgtgtgtaaagtctaggtgaagcagaagtgtgg

SEQ ID NO: 219192 - DNA, 3004 bp, Cannabis indica
tgacttctcctctgtgtttgctggtcttaatcatttgttgtgcataacaattatatttcacttatctatttttacttaacatatacattcagcttaacatacactttttttttttttatttttctgatatatttgaaaaacaagaagctaaaggaagaagcaaacaagagtactacaatgtgtgagtttattacatcacttggtacatcagctgtgtatgacctatgcaaaaacacatttcttggttgcctacgacatgtgaatcgattgtgtcactatgcaacttacaaaaggaatgtgaaaatactcattgaacaactagacatcttggagaaacacagaggagaagtcatagctatggttgatgaaaaagtggatgatgaaattcatcatagtgttatagaatggctcaatgaaacaaaaaatgctttatctgaaaatcgtgcaatggcaaagcatgccagccaaaactttagtgatttcatgttccatccacgagtaatgattgatgaaattaccttatcaaggataacaactaccataaacgaaatgatcaaacggtacatagagtttaatggtaggatttcttatccttctcgtttttatgataaggattatatttccttcaagggaagaagatcagttttggaaggagtcattgatgcactaaaaaatcgtaatgtaaagatgattgggctgcatggaatgggtggtattggcaaaaccacacttgcgaaagaaatagctcgacaagcgaagaaggaggcgaatttatttgataaggtgatcatgggcagtgccatttctcaaactcccaattatgaaaatatccaatgtgaaatagcaaaggatcttggtgttgaatttggttatcatgaaaccaaattaactaaggcaataaaacttcgtgaagagttaagtaaacaagagaaggttctgattattcttgatgatatttggcagaaaatcgatttgtttgatataggaatacacttcaacgatgaccaaataggatgtaagattctatttacttcgagatgtcaaggtttatacagtcctgtggttgagtttgctcttgattctttacaagaggatgaatcaacaaagttatttacaaaaattgtggacaaaacacttgatgaaaatcctgattgcagaccccttttgagtgaattggttaaggaatgtgggggtgttccaattgtcatcaatacagtggcagctgcattgaaagatgctccttcatccaaatggaggactttcttacacgaaatgagaaacactgcctcagagaatattgatggtatggactcaaaagtgtttcagtctataaagatgagttactattatttggaaagtgaagaggccaaatcattattattgctttgcagtacatattcagaagatgaactcatatctgataatgatttattgatgtatggtgtggggtggccgttgttaatgaatgccaatacattagaagctgcaagagacaagttgcatactctaatagatatgttgagaaagaattgtttattgttgccaagtgatgaaagcaattccaacatttattatcattgggttaggctgcatgatgtaatccgtgatgttctcaaaccaattgcctcagaaaagggttggttttcagtatctgagtatgcaaaactgcctgaagaaatgaacaaaggtctacttgtagagtcattgcttattgatattaggactgagttgcctaacatattgccatgcccgaagcttgtttcattgattgacacaacttttcatgaaaagcgtctttcagaattcttcttcgaagaaacaagaaaactaaaagttctgaagttatatcgtgttgatctacgctcaccaccttcatccttttgttgtttatttgagagtctccaaactctttgtctaaacaattgtgacttagaagacacaacatttcttggaggtttcaagaacttgaaatgtctaaatctttcaaagtctaaatttgaaatattgtcaaaacaggtgggacaactaactctcttgaagttgctaaatttagacttttgtgaaaagcttagggtaattgaacctaatgttatctcaagtctgataaatttagaagaattgtacatgagaaatgtgtgtaaagtatgggaggttgaaaaagtcagaaaccaaagaagtaaagctagtctcgcagagctaaagaatttgccccggctgaacacattgtatttagaaatcgataatgataatcttttgccaaaagacttcattactagcaagatgaagaggtatcaaataatggtaggtccatcctttaatttcatgcaaaaggagaacatatcacattcaagagtcttgaagttggagcttcacaacgccaatttgatgaatgaaaatggtcttaataagcttatgaaagaatgccaagcattgcagctcaagggatgtgaagataccaccattgacatttgtatatcaagtgctgatggttttcccgaattagagattttcgacttacatgatgctcctaatgttgaatcctgttagctcagccttgatgtactgtaatcgccctgtctttcgaaacttggagaatatggttctcactaaattggagaagctgcgaaagatatgtgatggagaattggtagcagattcatttggtaagttgaaaaacgtcgcagtaagtgaatgtcacacactgaaaagtatgtttccagcctcaaatattgttggacagcttgaagaaatgaaagtagagtattgtgatatgatggagaacattgttttccatagaagaaaaaatggcacctcacagaagattgagtttctcaaattacaaaaattgtatctgtgtgagttaccaaaattaattcaattctctacagttcagtgggagccaaatttcactacttcatcatcaatggattccttaccaaatagcaatgcattgtcattttttatggaggaggtatgcataagctttttttcttttatcaattaa

SEQ ID NO: 219193 - DNA, 6822 bp, Cannabis indica
aaaacaagatgcaccttgttgataaaggtagtatacatcaatccattaaaattatcttcatctgtgtagtcctatacctacagtctcataataattacacttgacatttctaaaatgatgtaggattgcacaacttacatagtattttctcatataaatcacgttgttaacactattaactaatcctagttagttttctgttagcttagattagttaagtatgtttagttagttaaggtagttagtgagtttgtacaaagcttattgtactctttttttcataaactcatatataaatacaatggtttacactggttaagtcaacttttgctaagctgattaattcagtgcttttctttcttgcttttctctctgctttctttctctacatggtatcagaagtcttgaccaacgaccatgtcttcgtctacttccgatcctcaagctacttaggctcctgccatgactcctacaactcaaggtacttaggcccctgccatgtatcctgctgccactggatcttggaatcctttctccaattctttgtccatctcttacaatcatcctggatcgtgtgaacttcctttcttggaagtcacaagtaattcctactgtcatttgacatgatttcgatgagatctagttcacaggggttcctcctcccaggaatcttcttgttggtgtttctaatctagagtaccttcaagggcaacacaaggatcaattacttctctcatggctgcgatcatccccgtctgaaagcattctcacttctgttgccaactacaaaacttctttctctatttggcgcactcttgaacaaaaatttgcctttcagaccaaagctcatcatcttcagctcaaggcctgttctcacatgttcaaaaaggtggtctgtccatctctgaattcattgataaagttcaagccattgcagactctctggccatagtaggttcccctgttgatgatcaagatctggtgttacaaattccctatggcctttgacccaagtttgatcctgtcgtctcagggatcacctcaagaagtgatgccttgactatcaaagaagtataggctctacttttgtctcatgaaagtcaaattgaatatcaccttgccatgagtgatctcacagtcaaaatgtaagctaatgtggcctttagaaatggtagatttgaaggtgtttgaccttttgccaataataatttcaccaattctaattatcagcaagctccaccaacaggctgaggtagtggttttccaagatttcccaatcatagggtggcgtgtaaagtgtgtattagattggacacactgcaactgtgtgtcattatcgttttgacaaaaactagacaacccccaaaccaggtaaccctactaattgtgcctttttcactgacttagaatgtgactgtgatcctcaggcatacaccactaatatggtgcaagactttggataagaagttcttggtattttgactcaggaactacaacacatgttacatttgaccataccaatttcgatgaaggaaagcccttcaatggtactgagacattggccattggtgatggtaagaaactttttatttctcacgtaggatctatcactgttccctctttcaatcagccttgtcctctgcatatgcaatctgtcttaaaatgttcctttcattacgaaaaaatcttgttagtgtctccaaactaactcaagatatgatatttttcttgaattttataaaaaattgttactttgtcaaggacaagacaacaaggtctatgctactcaaagggaaagttaaagatgggctctatgttattggtgatgcttctagtcattcaagccccacactacaatatcacattgctacctctgttagctctaattctgcttctagttgtaccacaacttctaattgtacaaatgagtgagttctgacaccaaacttttgtaatacaacttcaatgaataaaaatgttgtttcttatccttctgagcattctatttttcatgtttcaaaaccatcagatatcaatttatggcattgtaaactaggtcaccctgccctttccacacttcaaaagttactgcctttcttacctcatgttggctctctgaagaatgttcagttttacaatacttgccaacaagaaaaaagtcacagacttcccttcttagcatcttaaaatcgtgctagtcaacctctagaactcattcacatagacctttattgtccctctcatgaaccttcaaatgatggttttaggtattacattcatttcttggatgactatagtaaatcacttggatatatccacttacattaaaatcacgggcttttgatatgtttattcaattcaaaagtatggtggaaaaaaatttggactgcctattaaaagtgtgcaagcaaatggtggtggtgagtacaaaccttttactaggtctctaactgatcaagaaatcttgttttctcttccttgtccccatactcaccaacaaaatggtagagcagaaagaaagcatagacatatcactgagatagatcttaattaccttgcttgctcaagctaatttggatcttaaatactagtggcatgccttccaatgtgccacatttactatcaacatgcttcctacacctgttctaagcaatatcagtccatatgggtgcctgtttagtgctaaacctgattgttctatcttgaaaccctttatatgtgcttgtttctctcatttaagaccttataactctcacaatctagatttcaggtctcaacaatgcttattttgagattacagtgtagtgatgttcattgctagaaatgtcatcttcaatgaacatcactacattgtaatctctcacagtagcccaacatatcaggtaaatcctaaacataattctcagtttgttcccactactagtttctcaactaaaccatgctctaatacttggcttgttaatattactcccaatgctgttattgagataatgttttccctaccaacatctaaaaccagccctaacttacctgtggcacaacctttactccatataccttcaccccacaacgtgtccccacaccaatctatacctagtgcttctcccaatatagtgtctgcaccccaactaacttctgttcctcagtctcacatcggccaatctactgttgtgtctgaaccttaacctatcacacaaacaactattaccccttccaacccaccaactaataccattacagatgttatcccatccaaccctaatgaggaaaatcttgtctctacctcctctctggcccaaccattgtcttagataatacatgctcaactattgttaaaaggtcacatcccatggtaactaggtccaagaatggcataattaagccaaagcatatttggcaaccaaacaccctttaccagaatcactattgccttttaagccaagatctctttaaaatcctcttaaacatccacaatggtttaactctatgcaaacaaaagttcatgccttaaaaagagcaggcacatggacactggttcctaaggaacctggtatgcatatcattagaaacaagtgggtccattgggtaaaactaaatgcagatggttcattgaacaagtttaaatcaagactgggtgcaagagctaaggcttgctccaatcctatcagcaataccacaaaactatccttaagtgatggagaaccatttagagatcctactctctacgaaagaaccattagggctctctaatatcttactctaactagacttgatgttacccttgccatcaataaactcagccaatttcttaaagctctaactgtgtcacattgggaagcacgcaagaggttactgagatatcttaaaggcattatatttgatggtttattcctcacacctgatgctataatgaccttagaaatctactcagatggtttgtgttgatgatcgaagatcaataagaggttatgtgatctatttaggtgataatctaatctcttagtctgcaaagaggcaacaaattattgcttgctcaagcactgaaagtgaattttgtgctttagcaaacacaacagttgaaataaaatggattatttcttacttattgaattacatgttactttacctcattgttctgttatttgggtcgacaacctgagtgcaactgctctagcagccaaccctattttatatgcccgatcgaaacacatcgagattgatttatattttttcagagattaaattctaaaaaagaagttgtcagttcgttatgttccaagccttgatcaagtggctgacatgctcaccaaacattatttaagaatcgattcacctaccttaaatccaaactgaaaatggcttaaaccccttttcgtttgagggggatgttaaaactattaactaatcctagttagttttctgttagcttagattagttaagtgtgtttagttagttaaggtagttagtaagtttgttacaaagcttattgtactctggtttttataaactcatatataaatacagtggtttatactggttaagacaacttttgctaagttgattaattcagtacttttgtttctttcttttctctctgctttctttctctacacacatgactatttactgtaacaagagtgttgttcatatggattcagtgatcttcttaggacaactagtaaccttgttaatgcttttagagacttgcacactgactgaaactaattagaaatagtagaaaataatgttatgcacaagaatatcctcctcctgccagtatccatctcattaattgcaaatataattgaaacaaattaaaacagtactaaaactaaattcatctaatctaacctcatgaaatgtaaaaatatttgcctcttccattgtgagattagaagcattattgctagtctccactgccattgtctccatcattttgtttccaaataattcctctagtcaaatcatgtaatcctccatctcaagaggaatgaaatagtcagcttcttcatcaacctcatttgaatccacctcatttgaattctcactactcatgtcataaacatcttttgaggaaaaatgaattgaagcctctaaatcagatgatgaactaatggcaattggttcatgtaattcttcttaaataacaaccccttttgtaactacaaccataaactcatcctacttaacaaagaaattgtaaaatttatcatccacattaacatgccttggaggatacacaacaacattaggaaaaattgtgcagtttgtaggcaactcctcacatttacatttctccagtttagaagcttcttttgatttctgcatcttaacagcttcaggatcctccttccactccactaataaatatggatctggtggcaccaaatacagaaaagcatctgtatatttttacctattaaatcaagacaaacataatgagaacaaaaacataaatcatctcaagctcaaatataacaactaacaactaacttaggtaaatattatcaaatattatacctgccaatcctccaacttaaattcaatttcagccttatcaactaccataactcccatgttcaagtacttcccataaagcttgaataaaaaactaaaagaaaaactatattgaagcccacttgccatatccttcaaatcatgccttctaaaattttttaccttgcagtggtcaaaatagtcacaggtccctcccttatgtctcctgttttcacatggggaaaaccatctacccccatgtatgagtttcactgtaaattcaccatcttcaatccctataagagtaaatacaatatatattgatattgaaaataggcaaagctcaaactttatttgagacctaggcaaaaccccctaaataattaacccctcatgaaatagaaaaaaaaaacccccagccattaccatgtgcaaactaactttttaatgttaacaagcatgtgaagtaacaaaagcatgtatcccactgaacaagacaatagccctcgacaatcaatgagtaaaaattccttttttcataaatttattttttactcaatattcaaacaatatttaatactcatctaaccatttcaccaaacacacttaaacccattataaaaactcattcttcctgctctaagccctaggcgaactaaaaccctaaaaatcaccatttaaaaaaaaaaaataaaaaaacctagaaatttccacaatttcgcactgtttagaaagctttgcaagtggggggtcgtcggaacctcgcctccaatattgcattgcactcgtacacactctactcctcaatagtagcagaaatagttgttcctcctcactcacgtctgtgtttcaaagtgtccactctcttttatcaatcaaaggaaatggagaagatgtttggattttttctggttttatgtttcgaaaagattttaatacccttttttatttattttggagtttttattttttttaaagcattttgtttttattttattttcaagttttcttttaattaattttgtgattttaattatttatttggtgggttttagtttacacatggcatgcaacaactgacatgaatacccatttgatttgccacgtagaatgatttggcacttaaatggaagagaggtcacataatagtggagagcaaaacaaaattgaggttcaaatggttttatcacgaaaaattgggtttgtgggggttacgtaggggtgagcataaaatcgagaaaattaaaaaaaatgttcaaactgacttaccgaacaccgttggaaccgaaactgagggaaccgaaaaccaaaaaaattgctaacgg

SEQ ID NO: 219194 - DNA, 2807 bp, Cannabis indica
gatgattctttcaaaaattactgttttctaagagacataattgtaggaatacaacaagataatgttgcataccaatgtagtgcatctcttcgtacaagtgaaaccgcaagaacacaagcaaataaaaggaatgggcaagcaatattaaaatctcaaaaagcatctatttccaaatgcaaatatcaaatcataaattctaaactagagtttggtaccccccatattcagatatattcaaattgtataaaaacatattcagatatatctatttaagcaagaactaaactcaccatgcagccactgtaaagctggagatgacgatgtagtaataatagtgaaagtgtaaattatctcccctgcagaaaagcatgcaataaatgtattagcaccaagaactgacaatacttctcttaattgtattgactcaattaaagtttttctctgtacatttctttctattctcctttttttagaggaaagggatacaagtaagttggctatgaaaagggaggaggtgtggggaagcaagaagaaagtaccttcagagttttcccaggaatcataaagagcagcaaaaacaagaggctggccatccttgaaatgaatgtaatagggctgctttttggacccatcttttttccattcatagaatctgaagggaaaaatgatgtaaaattatgaatggaagactgaaggtgacaatcatgtaaacttagacaaattaaaaactaaaataaaacaatccataaacttttccttaacttctggccacatatgaactcaactaagaaagaaaatcggccacaagataaaatatggtaaaactatgtttgtatccacacgtattacacataatatgtaaagtaaaaggagattaagacaaccgataaactacatcgaataaaagcttcacaagaaccaagcagaagctatgagtcgatccaagaaatgaaatgtgttataatgcagaacctaaggctaaggcagtcttgaaaaaaccaacttttcattcaatcttaagaactataaaggtgtatgaagtttaataaaaccacatcaaattggcacctttgaatttgtagagtaacaacaactgataataagtcaaaaaacagtcagtaatcataatatcatatttgtctatagcacattccaaattcatagaacagctaggaaattaggagaagcacagcagcaaccatttcaatgaatcatcaactaaattaggagaatctaacatacccttcaactgaaacaaggcaccgacttttaggaattagacgacggaaagaagccttttcactaatagactcagatcgagcattaaactgaaatttttcaaaacagaacaagaaattataatatctataaataaataaaaaccatattgaacaaagtgaaagttaaggtttttaccatcttataatgatcaggtttgtcagttttcttagtgaaactgggaataagtccccatttcatacattggaggacaaccccaccatcagaaccgtcttctctgcgaataacaggtatgtttgacccaggcgaaacattgtacgaaggacgatacctgtatgtacttaaagccaagaatgtaagaaacccttgttttgatttaggttgatagaccaaaaggaggttgctttacttaacttaccggtctatgtgaagagtacgaacaggaccatcgttacgacgacaagccctggggatgtcgtcggctctcatggtacaacgggctctaccacacatttcgagtactctatttggcgcgctttccacactctacacttagattctattgaatgggactcaaaccgaatatgggcgggatgggaatgatgccactgccctaaccgttggattttcaacaatatttgtctttgagataccactttcccatttcatctggtctcttcttttgtcttatttttttttttaggctaattagtatttttgccgtgaactttaactttgacatgtatcaaattacgcccctgaacttataaggtcattgaaaatgcctctgaagagattgtttgatttaaggacttttgtctaattttattcaattttactatttcaatgattgtttatgtactaaatcatgttctcagactttgatatctaccaaatcatgcccttcgaactttgacatgtactaaattatgtcccctaaactttcatccatgttagacttttttactaaaattagaaaaaagtccttaaatctaacaatctcaatagttcaggggtattttcaatgaccttaaaagttcaaggggcatgatttggtacatgtcaaagtttaggggcaaaaatcctaattagcttttttttttttatgtttttatcttctatttaatttaattgtcaccccttaaaaaaaaagtactaatctacatgtttagatattcagactgatttttttttacgttataattatataaggtattttataaaattttaagaaatttaaaataatttataacataaaaaacagtattcaaacaatttattttgcacgcgtataaaataaattaatcatatattcaacacaatgtatgtatcttattttcgacgtgttaaatttttttcgaatttttaaaaattttacagaatatcttaaataactatagtatacatgactactaaaaaaaaattaactaataaattatgttcaatactaaaacagataaaaaagtataggtgcatcgagtacattataaaattttctattgtattattaagaataattgtagcttaattttttttccttttgtttagtagagaaaattgtgattaaa

SEQ ID NO: 219195 - DNA, 8843 bp, Cannabis indica
tacagcaatcggtcgtgcaccactgaaaaaccagcaatagttttaccttgctccaaattagcttttatctttgacaaaaaggcatcttaagcaacttccctttgaaccaactcccaatccaaccatgttgttgaagataagagagaacattcgacttggccaacccgagacaaggcatcaaccgctttgtttgtctttcccagacaaaattggatatcaaaatcataacccaaaagcttcactaaccatttttggtgctccggagtaaccagccgctgttcaagcaagtatttaagattcttttgatccgtacgaaccacaaaacgtcttcccaagagataaggccgccacttgagtattgcaaaaacaatagccattaattccttctcatatatcgacttcaacctagctttaggcttcaaaacctgactgaaataagctagtggacgatcatcttgcatgaggacagcacctaatccaaacctggaagcatctgtttccactatgaaaggcttgtgaaaatcgggtagagccaaaacaggaacagtcgttatggctgtcttcaatgtctcaaatgcttttgtagcctcttctatccacccatattgctcttttttaagctggtccgtgactggcctcgcaatggtaccataatccttgacaaacttcctataataacccgcgagactaagaaatccccttaactctttatttgatttcggtagtggccactcaagcatagcttggatcttagaaggatcaaccgcaactcactgaccagaaatgatatgtcccaagtactctacttgatgctggccgaaacaacatttcttcaagttggcaaaaaactgatgctccgaaagggtttgcaacaagatttcgagatctttgacatgagtagtctcgtcggggttgtaaacaaggatatcgtcaaagaacactaacacccgcttgcgaagatgaggcttgaaaatctcgttcatctgagattggaaggtagcaggtgcgttagtcaacccgaagggcatgacgaaaaactcatagtgaccttcatgagtacggaaggccgtcttgtgaatgtcttcgggttggacacgaatttgatgatagctcgagcgtaagtccaacttggagaacacttgtgccccgtgcaactcatcaatcaactcttcaatcacgggaatgggatatttgtcgggtaccgtagctcgattcaaggcccgataatcaacacagaaacgccaaccaccatctttcttcttgactaggagaatcgggctagaataagggctagtacttggttgaataatgcctaccgttaacattcccttcactaatttttcaacttcatctttaatactataaggataacgatagggtcgaacactcaccggagatgcatctggccgaagaggaatggcatgatcatggcttcttggcggaggaagagatgccgttgtattgaacacccttgaatatcgttgtaatactttgttgacagccgcaaaatgtttcgcttccacatgacaaactgacacacaacccaattccacccatactccttgtttctcatgttgtagcaaacgaatcatacttttcagcgaaacccgggccttatggagtagaggatcgcccctcaagatgattggttgacccccacctttagcttcatggtatggtccttccaatggtgagtagtctcccctaaggtcttaagccattgcacaccaagtataacatccgtactaacaacctgcagtggaagaaagtcttcaacaatttccaactcctgtagcatcagtgatactgctcgacaaatcccttcccctctgactgcttgcccacttcccatttgtaccccatacgcctctgtggtggaaaggggaagctccaacttccaagccaattcggtagtgataaagttgtgggtggcaccactatcgacaagaaccacaacttcttggccatgaatggaacccaaaatcttcatagttttgggagaagtaaggtcgaccaaagcattcaaagagacttcaaccatttgagcttcggctgcttccgataattcggcgaacccaagagcttcggcgactgggtccgataattgttcctccattagttcttcctgttgaagaagtatttgtctgcttgagaacactcatgaccacgaatccatcgaccgtcacatttgaagcatagtcccttacgtttcttttcttgtatttccgactctgtataccggcggtacaccggagatgtcgcttgagaagatgattgtttggagctagcccctggtgaaagctgagtagagtgtgatgaagaagtcggtgatgtcacataggtgcctttgctggagtcgggtaagagaagagtggataatggaggtcttggacttgacctcatgggcccattcagcccatttctgtgtagtcttgttagggcctgatttgcttccacttgttcagccaagtccatcatgtgcacaagtccattgggctccagaattctcaatggggcttggatctctatcttcaaacctttgaggaaagctgtctgaagagcttggtctcccatcggtccgattgtcgatgctagcgcttcaaatcttcgtctgtaatcttgcacagttgtgacctgatgatgaacaaaaaatctatcaaaaacagtaccctcagccttctgacaaaatctccggagaagaagcgatttgagctcctcccacgaattaatggcgtgccgctggttttcccagcgaaaccagttcagcgccgctccttcgaggcacaacaccgctgcctccaactgttcaggtggtgatagtcgctgcaacccaaagtagcgttcagctcggtaagcccatttatccgggttgtcgccggagaagagtggtagttcaattttctgagcatgaaattcgttccgaggctcccctaacaccgtgtctctccccgtgaacccgatgccaacatttcttccattagaccctgcacctccggtcgccgttgacctttcgccttgaagacgtcgtcccgaaccatggttgccatttgagttttctctgagagatgctaactcatcaacaattctgccgttcgatataaccaatttatttaaaacttccttcagagattgaagctccaccccgtgagtcttcagtagaactccatggtcattgagttgattattaacacccgacacagccgactgaactcccgtcaccgccacttcgacttctttaacacgagattccattctcgttatcaccggcatccgccaagaacgtcaagctctgataccaattgataagcacttggtaattgattaacaactatagcagtaaatgtaacaacaaagatgaagaagaattcttggaagctttattgaattgtaaggaaaaaaggagactatagtctcatacaacaaagagaagagttctcatgatgcagagaacttctcagtacttgcataaccgaaaaatatagcttccccgggcactaaaaggccaacaacaacccccacaattcccaaactaccctgtaacaaactcacccagccaaaagactcaacctacccttgacccaatggtccaaacttccttctagcataggtgaatcggataggaggcttagcattcctatcaatagtattctttgtcatacccgggagtgctgtcatcttggccatttactttgtactcactgttctttttgcaatcctgcctttcttggtagtgtactatgcttaccccactataaagaggctggtaagtgaaataacttcatgagacatcattcgcttgtcactttcatagaccttggagacttgtgcgtgctgtttcaaattctcaccgcattgagacattgatcataactcatccatatataaacataatgaagtttgaaagcttatgatcctgttatgtggttcatcttgtaaaggaggtttgagtgtatcattgcttgtgagaatctcatttacatatttgagcggcacaagatactgctcaactagtttcggtcatcatgctgagatgttattaatgttgcggaaaatgtttagaagagcgtaagtattatgatgagtttaacttattagcagtcaagggatttttgggatacatggccctttgaatttcagattcttttatttaaatggttgcatgttttattggcctctatgatttgtttctggttgcaattattgtatctatggatcatgttctattctatgtttctgcttgtaattgttggtatggtctacaaaggaaaaatgaatgagttggaaaacttttttggttattgttgatagttttattttttctttcaaacttttttgaagttagttcacaggcacagaaattttcgtcacttctatggtggttaccattgttttttgtgtaagaaattgtttacagccacaaacttttgttacagaaagataaatcacacaacaagtttgtcatctcactgttgtttcatttcgagtaaagtgatgtaaggaaatatctacattgtttatttttgatgcttgaaagtattccaggttacataatgaagtgctcctgttcttctgattatatcagctttttccttcacctttaattggtccttcctcttttttcttctgcctttgcccttgctccccctgcaacttgatctatatattccatctccgtgcggtacttttttaaagcttttgctcttttttcctccaattttccctgcaactcaagtaagtctagcattagtatcttatcattggtgcaaccaaaatttgaaaagaatatgttgatacctctgattttactgcgtggcgtttggctttctccttccttttctgctcccagtcaagtatagtcgccatttgcttatcatacctgaaaatgtgtctgttaataaaattctacaattacattttgtttccctggcaaatcttgaattagtatctcaatttagttgtcaatttaactgaaggcttgtgtttcaaggtgtctatagatgcctcaagagtttgatgttaaaacaatgtagcatctgtagataaatacctttcttggactctcgccatctcagcttcttcccaagcatctgcttgagctttcctcattccaggccctgttgagctttgtctctttggttgaggcggtggtttcactgtggtgggcaaatcagattttgatgttgaagttccagtgtcatatctgtggctcggctgcttatcatgtagtggtttggcagctacctctgtttttgatgctgtccttccaactttagaactgccgctaagttccatctcaagcgttgatccagtctttctaaatgaaggggccgggagcaaggttttttctggtttttttgtatgggtagcagcagttgctggcaccatgctgtctgggttttctgaacttttcattgtacctttacctattgggaagaacatggatatcttagtactagttcatgaaagaatatattacaatatagaatttttaatagccagaaatatgttctgtatatttcaccagagaaactttttgaagctctaccaggttcctggatcgaaagtgttgactctttcttgcctttgcttgatatcttagatgtttcaggttgttctctttgatatgggagacctaagtctttgagtgagctaatggcatatgcagcagctgccacagcagttgcacggtcaatatcgttagaatcattatcttgattcatttgcttactgaattgtctcctgaaccagttctgatctttctttctatctgcaaacgtaaaatagttttatgtaattgttcgatactcagcaaactttgaagtttctgttttccaaccttggatatgggaattttagtttgatttctgagattgagcattcgcatatgattgatacaggctacctcaaaagaagaaaaaataaaataaaattgtagtacctttaaaagttacagttttctggactggtatagttaggtctttgctgctactagacccttcgttcttgtcctgcccgaatcctgaaaatcttactctaaaacaattgtgggtaagctgtagaatgtttatgcttaaaagattacatatttaagagttagaaacaatgaactaccttgtttgcctaaacaaattatccattcttgaaacaaagcttggtgaacttctttcttatgtacatggcatcatccataagcaggtgtttaatatttatctgaaatgagaactatggttaggttgatatagcaggtaataggctattattatactagtgtggcggtagagggaaagagccaagtttgggtaatgcgttgcatgcaagtcctgacttgcagcttaagcttctgtggtgaagaaaagtatacattcttttcctttgtgttcagctttttccatgaatatataattatatttatatacaataataattgtatataaacacatattattagcttgcgtattagaaaatatctcagaatatattaacgcagccgttatagtgcttcaacagcaaaaaggtacaacaatcttttgttgcttcgttgaaactctattctctttttgaaagccatataatttcttgattgaaatcgtgttaaaactttaagccctttaacagggaatcttttggtttttacaagttgactagaagaaaaatcttccaagatcatcttcatatctactatgggtataactttatgagcaagtaagtataagatgaatagtaagtgatgaaaatcttgacaaaataaaagatcatcaactaaaggatcttctatacacacgcgaaggcccttttgtccttgaaaactacaaagacaaacgaatcaggtgcaacacagacaggcgagtaagaatcaacaagaattggctccattaaaggaatatcagatgaatttgtcagctgtaatggagttccgttcagaagcacctcatcactttgaatataaccattttttgcggtcaaatggtactcttctctttgtgatcttctctcagataacttttgaaaaggatatacagagatgacgacatggaagaatgtagaatttgagaagttaatcaagagaagagtaattccaggctgcaaaaaaaaaaaaaaaaagttaagttgatttgagtacaaacaaagaatgacccacaagacgagcatacattggatttgactaaccttactctttgaacaatgggagtaagcacgtaattttggagatccatcatgactggcggcaagtacttcctttcccattagtcggtgccataaaagtgcactgcttaaggaaaaatgcaccaaatggattagatttgaaaccactaagtaattaatgctttgcttaaaatatacttaatgctgtagattctaacccatagtagtctggattgggaacaaaggtggttgtattgagaagaccgtagaaccctccaatcaaggcttgtctgcaatagaccttatgatctaagcttgatgccatgcccagttgatccaaatacctgtttttctctcccctcgagaaaaaatgtcaattgctatttttcaaaacggactttactgtccaaatcattcactatacaaatcaaaagaaagagatggggttttctaaccagaagccatcaacaaatctatcttgaacatttttgcctccactgttataagctccaccagcttctccaacccaagctccggctttaggggaatactttttcacaatccttgagacatttctgtaagtgtgagcaaccttgtctaggtaaactgggtcctgaatccggttaataacaccaggatcaacccctgaaaaattatgggttttgtttgaaccgaatagaaaataagaattatcctcaaattgcaaatacatatgatacatttcctaaaaggtacttggccaaatcatgcaagaaaacaaaagaacaaacttcattatgtcctacatttttattacctgcaccaagattatagatgtggtgagttactccatctactattcctggtccagtggtctctaggaatgtactaaaccatttttcatcatagaaaccagcaggacctaatacttttggccttgttgacgcaattgggtacaattctcttaacaaattttttagcacaattatgtctataccatattgaacactatttactcttgcagctactccagacccacataactcgtttcctaataacaaatcaaattataaaaagatcaatgctgacccacctcacatctaaattaaaacaatataacttcgacaaaactatctatatatatacctagttcatacgagtcaattttgtaccctttttccagggtgtactccatgagttgtcgagcattttcagggttccattcacctatccataatttgtcttctcgagatgcaatttttccatagagggcattcaaactaaatgtcaccaaagctctacaacaacgagaaaaaaggtgtttctgtttaggtaaacaagtaattgaattcattcatagcttaaaaaaaaaaaacaaggtatgtagtatgtcatgtcagtacaccttgtttggttaaacaaatagttgagctcatcccatctcgtttgggaaaggcaaccattgctgaatccaaacagaccattcttttggagcctaaacttggggcattctttaactgcatttccaacatcgtacactaccagatcttctaacgagcctcccaatcttatcctcagaggattgaatgctgtaatttaagttcaagttagcagagaaatgtgtcagtacaatattatggattagcaaattatttaattatcttgaatttcacctgtaatagcattaacaaatatcttgttctttatatcctgaaaaaaaa

SEQ ID NO: 219196 - DNA, 5331 bp, Cannabis indica
aatggtatttaccctaatttataagattaagggcatttttggtatttcctaattgttgattatgtacatgcctagttgaccgtagcactcttatttgaagatatgtaagtttctttttagaaaatgaatacagtattttgatgtgaagcaaatgaataccgttagtaagaaggagaaaaagacaaaatggaaataatgtgagcaaagttatgggtcgatactaggcacacatggcgcgaagttaaatcaataatctgtagaccaaacgtcagttctccaccccatcgcttgttcctcccaacttccttggtcgacccctcacgcccgccaatcttcctttgttttcgcttataatatatttcatttccacaatcttctttctttccaatttacttggtattttatgtaaatatttgtttaaggctttggctcaacaaagtgttgcaggagactgctgagtccgactgtgacccgtcgtggctgatacaacgccagacaaaatctccgtatgtattggggtttttaagttttaaccattcgatttcatttcatgcttttaatgggaggttttcttactcttgtttcgtatgggttttgttcatttcttaccatgataatttcagtttctcactttatttatttacttttcttcaatatcatatatttgggtttgtgacggtgaatggtgatgtgtattttctcttttcttttttttttcaattcagctttctttatcagtcataatgttatcaatgctgacccacagtgattttccagtcaattattgaaaaaggattatgaatctaaactttaattatttctaaaatgaagattgttgatttgttattttgtttggtacatttgtgttcgggtcacatttctgaattacatgtattgctgaaagtgaaagctgggttcttgtctctcccttacctcggtgcttaattttttttttaacaactgtacagaaaggttgcaaatgacaattaccatacctgttggaagtggcaaacttcattgcagagcgactaattacaagggacagttgggttgtggaagagcttccttggtttccagcctgccatttaaacgatgcttacataatgacctttcatggtatttgacaagaatttgcttcaagttttcagttttaagtaaatgacattataatgctgtttatctcagtgcttttaacagtatgacatagtgttcattgtatgtatttctcttctccctatttttaggagttttatttaaatttgttttggtttttccattataattgtaaatataactacatgttcttgtatgattattcaggtcaagtgggttttctaagctcttgaatctccagcgatacaacatttcccactctccaatcaatgagaattggagaatcatcagaacaattacatcatcatgcttgagagatgattccacaaagcattttgatttttctattattggtagtggggttgccggccttaggtatgcgcttgaagttgcaaaacaaggatctgttgccgtgattaccaaggctgagcctcatgagagtaacacaaactatgctcaaggtggtgttagcgctgtactgtgtgcttcagattcagtggagagccacatgcatgataccattgtagcaggggcgtatctctgtgatgaggagactgttagagtacgttatataggcagttgtttatcttggcattatggttaatttcaaagttcttagttccccaaagagacatttctgtgaagagtgttaccagtccatgtgaactggaaatgacttaatatttcaatggatagatgttacacttttgttcatttctcaggtttgtttatgctgttcaggttgtttgtacagaaggaccagaaagaatcagggaattaattgccatgggagcatcttttgatcatggtgaggatggaaacttgcatctagcaagggaaggaggccactctcatcacagaatcgttcatgctgctgacatgactggaagagagattgagcgggctctgttggaagctgtggacaaggaccctaacatctttgtgtttgaacaccattttgcaattgatttgctaacttctcaggtctgtttaactgcaggttttgcttttgtgaaatgcccttttcacattttctttacagattggtgcttttcacccgcctttttttgcttccaatgtgtttgctgtatgtgttcttgacccaattttcagacacttcacacatctaaaaacaagtgaaacctttttcgataacactgattgctttattcatgtgattttgagtttgtaatgatcgattgactgaaactatgaatgctttcttggtatttgctaatatatttttatgtcattggcactttaggatggttctgacataatttgtcttggtgttgacactttaaatactgaaacattagaggtaaaagaatcttttgttgcctatactctcttactgtgctgtatttttctgaacaaacactatgtttaagtcctcaatttctcgaactctttcctttcaggtaacacgatttatttcaaaggtgacattgcttgcatcagggggggctggacatatatatccttcaaccacaaatcctctggtatttgaattgtttttccccaaatttctgtttccattttacatccgcaaaataacattggctaaatatgtttgtatattatactgacaggtagctactggagatggaattgccatggctcatcgagctcaagctgtaatttcaaacatggagtgagtaaaaatcaactaactgtatcttagtagtacttggttttatcaattatccagtttattattgctactttcatagcctgaaattaatcattacccaagacaatcccgggaagctcaataaatgttacacaaaaaattgattccatgttctattcactaaaatgtgcaagtggttaaaatttgaaaaatatgttcccaaacatgtagattgtattgaagtgcatttcttttctatttttcttcctttgggtggggtttggaggtttgatttggaatatgatcatagttttcttgcggcagatttgtgcagttccatccaacagctttagcagatgaaggtcttccagtcaaaccaaccaagacccgtgaaaatgcatttctcataactgaagctgtcaggggagatggaggcattctatacaatcttgacatggagaggtttatgcccttgtatgatgagagagcagagcttgctcccagggatgtggtggcaagaagcatagatgaccagcttaaaaagcgtaatgagaagtatgtgcttcttgatataagtcacaaacccagggaaaaaattatgtcccacttccctaacatagcagcagagtgtcttcgatatggattagacataacccgccacccgattccagttgttcctgctgctcattacatgtgtggaggagttcgagctgggctccagggagagaccaatgttaggggcttgtatgtggcaggtgaagttgcctgcacaggtatgcatggagcaaaccgacttgccagtaactcattgcttgaagcactggtttttgcaaggagagcagtccagccctccattgagcatatgaagagctctattattgacttcaatgcttccaattggtggccaagaccagttgttcctatgtcacttggaagcagtactgacaaaattgttacaatgacaagggatgtgagaaaagaattgcaagcattaatgtggaaatatgttggaattgtccgctctacgaataggcttaatactgcagagaggaagattggtaagttggaggctaagtgggaggagtacttgtttgagcatggttgggagccaactatggtggggctcgaggcttgtgaaatgaggaatctgttttgttgtgcaaagctggtggtaagcagtgccctttctaggcaagagagtcgcgggcttcactacacgactgattttccagatttggaggaaagtaagaggctgccaacaataatcttcccttcatcgcctataaagagtacatggagttcaagacaggtacacaaacaagcccatgtgttaggaagtttggatccttccaatacttgaaatgattggtactcttgataattctaatgaaagtatttacctaggaggatttcaatcttccttcagaaagttggagcagcccttaaatttcatttggtcacggtgtttctacggtaataattctattctttacttcaaaagaaagaaaacatctttaagaaaatcacaggaataagatattgcaattcattttattagtcgcaaatgtgacaaccatgtcaaattgtatattttacaataccaattactatttagctgcggtgaatgctgtctatacttttcttatggaaattaggaatgaggctgatgtagagcatcttttccccaaggcatcagaaaataaattgtaaaactcaatagctaaggttatttcttagatatgttgaaaatcaatttggtattatctttttctccttttagtttagtaaatatatgacattcttttgcaattgataaataatcttacgtgtttttaaaagtgatatccggaaagaaatcatcaagttctgctaaagtccaaagtgataaagtatagctagtcttttctgttttaagccgttggtagtttttacccttaatattgttgtacctgtcacctgagactaatttaatctgtccacttcttgaagttgaagagtcactgttatcccttattttgtgccaattgaaaaacccagaacttgatttgcaccagaagagcagattgtataatcagtttgggaaatttaacactaggtgagtagtagtggggttcaagaatcatggcatggaaagtgtttttattgtgttctggggttgctagttttggcatcagcaatggggaaaaagagtgacggtagtgcgtgatgatagacataattaatttttagcctaaatcacattctagcagtgaactgagcctatgcactacactactgcgaggcagccaacgagttgattgcgggtcgcatagtggtttttttttcttctctttctgatttttgccttaaaaaagacagttcagtttgaagccaaatgacttttcaaacaacaaatacatgatggtatatagagtatatacctcgaagccaaaaggagttttaagtggcatagagtgagcgtgagaaagggaccagaagtaagaaactgtggtttccttttatactagaattcaatatgtcggtcaactaatttttcttttttgtggagtcgacatgtttacacaaaagaacaaaataattggacc

SEQ ID NO: 219197 - DNA, 2522 bp, Cannabis indica
tggaaactgatagcttagtttgtgttcaagccgtgcaaaactaaattactttgtcatcctcttttggtattttagttcacgatgttcgtacttttctcttatctttaaataatgttgagttgtgttttgtcaaacgatctgcaaacaagttgactcatgttttagccagagattcttgtttctctataggtcgtgtgcttcagttagaagattgttccaacgaagtgcgttctattgttattaacgattgctagttaataaagttgctaagtttattcaaaaaagaataattgggataattattgcacctccaagtgtagggataaatttgaaggtttactgatttctcatcttgataatacgcctaatgatattttactctcatttagagcattagatcctttttatctcatactcctaatgtattggtaaagcatgtttatagggaagctaatgtaaaaacacacaatatatgcattaggactaaatacagagaaagtttggaatgctaacattccagaaagtttggaatgctaacattccaaattaattatcattctaactagaactttattgcaattcaatggatgttacaagtacccaaatgattaaaaattataaattactaaatttatattttaataaagcagagtttatttactcaatatatttaccaaaacttattctttttgaaatattgacttttacaatatactaaatttgatcacttttgatttgcggctgtatttcagtaaagaaaatatataaaggtaatatgttaaaaaaccaagaaacaagttttccaaaggaacctttttttttggccattagggggtcaagctaatatgtccttgcaaattgtttcttgatgtacatcttcaaatagaatttgtcaattttagttctttgcaactaaactcatttattcagaatcaaccaaggcttttctgctaagatctctacaaatttatttaaagcatggccaatctaaaccttatcgccattgtagcaactccagagcttgctggtgaatctgtttatccccagctgcaactacattaaaatctgtaacaatgtgattaaagtcgaattagaaaacggtacaatagttgataaagtcaattagaataaaataaagttgaccctcaagaatacatacttgttgcatgtgaatttggggaagcttcccaactaagttcttctcctttccaaccagttatgacacctccggcgccttctatcaccggtatgagtgcaagaatatcgtacggctgataagaagaaaaataccatttggttggttatacaatgaagctctcttctacatatgactaacacccaaaactagagagtattttgttattttgaaactaatatctgcaaaccacatgtctgaccatttgagaaaattcaaggttctatttttgctgtttatatttgaagcaaatctaccaattagtaagaaaacataccatccaattcagtaaaaaaaaaaatacatgcaaaactgaaaattaagtcatgcatgttatgttgatcattcctgttgtgtggaagttagtttaataaggcaaacatatataggagtaagtgtttgacatatcatgaaagcaatagaattacaccagcttacatggagaccggattcaacaacaagatccacatgaccggatgacagaagagcataagcatagcagtcgcatccatatagaggtactttcacctgtaacagcagtatgttagattaccaattcgttcatatgtagttacgagacaggtagtggaaatgttagcttttgggcttggtgagtatgatataaggcagggtggtggtgagtgtgaggggatgtgtggtttgttgtgtattgagttatgctcttatatggagagaccctatcttcttaatatcggtgttataatgtatgcactcacaaattataaagaaatctctcagctttgtgtttcacccttaccaaattcgtgctcttctagcttagtttctatcacagtaattacaagaaagattgagagcagaaaattcagcttagaaaacacagaccttgtttctcacacgaacaaatgcttcttttgcctcttctttgaatagatgaggacttgtagtgtacctataatcaacgcagaaaacaagttcgcgatatgaagtatgaacaaggaatcaaatgatttattttctgcaatacagcctctagtttaaaggggaagataattagagtgaaaaagagcaaaacatacatatatgcttgtgaaatattcgcacaagagcgtgtggatacttcttctccatttagtgtagttttccttccatttatcccaatccatctttctcttaaaataggctggtcaattacgccaagaatctggagtggaaagacaagttatagctacagtgaaaagaaaggaaaagtgaactacttaatcgtaactgatagcacaaacacacacacgaaatagacaccaccaactgactaaagttgtactgaagaaatctttccatttacttt

SEQ ID NO: 219198 - DNA, 3084 bp, Cannabis indica
aatgaaaataaattttcactaattgtatatctaaatttaattaatttatgatgcatatattttataataaaattaattaatatataaaatattataatttttctaaattagaatatacaagttatattaaattatataattattgtaacttggtagaagagatcgtaaataaagtcgttatatatgtcattgccaaaatgaagtgggtcctacttgagaggagagtgtgggtgggagacaaggggataagataagatatcatttctgactgaccaattcgatacatttaataaacaggatgccgcctcgcctcatgctcttccttttaatttttcacaaataaaaggacattcgtaataataataataataataataataacaaagaaatattaaaaggtatagtataatattattattggtataatttaatattaaattttaaatattttattttatagatattataaagatgataagacaatatttcatcgtgtggcatgagggttttttatggtaatgctctaataataatactcgttatcaccattcaaataacgttcagtatcaaatgttattatatttaatttaataattattattataaaaaaattattaactattgacaaaaaatcatttttttttagtatgtccaacaatttttataaatttgagtgttataacatgaattacggaactacccaatgaacattcaaaccatttatgccaaatagagaatatatggacacaatgagtgcatttgtttgtagaattagagaccagattgtcaaaaattaccgcataatatatggtcaattcaatattattcattagagtgagatatcaaataatcaaaaacaaaaacaaaataaacttgatctctctctctctccccattaattgacttgatgaattagagaaatttaattagccatcttcgtatgaatcataaaacccagccaataagacagcttctgaaaagttttatttaaaggtatgattgggcaggccactctctgtcgtgcaatgctagctaaccaccagtctaatgtggtggctactggctacgagatatgaaaatgaaatatcaacttatatattcttcaatatataataataatataaatcctccttttatatagcttataacacatttttaggaaaattcaatctatatttgataggaaatatattgaaccagtgtatgtgtatgtttatataatagtgacatttttgaaaagagtagtggatttagagaattaatgcatggttgggttgggaatgtgcagttgttttatggtgagactatattatgttccactcgagaaatctcttcaaatatttcttattaattaattaaactaattcaaaagcagttcaacgattgttatgtgggtcatacatacatattacagtctaaactgttgaagctaaccttaactactctactgcctggctaactcaattaatatttgactaattagtaccaatcaccgtggtttgagtagttggtattgggtgttcaaacatcacacttcgggcggtgtcaattttgattattttgttttttccaaatcaaatcgctatatgtagtttttgtaaaccgcaatcacactataagatcttaaaatcacattgtaaaaaatacagtacaatttaagcggtttacagtgttattattatcaaccattatattaaaaaatttaaaattaatttaactaagttttaacaataaaaaatcaaatcatattgtaaaattagtatttttgtattatatagtgtggtgaagtttaaagcgcgattattaaatttaaaattacaaatcataccgcactgcacggtttgacgaaaatacaaactgcaatcataccgcaaatgattttaaactgtatttttttatgtagtgtagtgtggtgcaaactgtttgtacaatgtaaacgatttaatgtacacccctagttggtactttcaattaagcttaagcttaaggtcaggggttcgagtcactttgtacttctcttgttggtggtggtagtgtctccctcagatggtggtggaatccaatttgctttctttaaggttgttcttggatagcaggcaagccatcacagatataatctaagacttgtcgacttgtagttgttttattttaatttttttttttcatttgaagaccttcagtgtccattaattttgttccagattttattcacattatcggtgtagcattgtcaagcacaattgtaaataagcattgctataaagagatgcacccaccaatggtgttcagcactatccagagtattttagaaatttttaagaatttagtaatgtaataaaattacataatcgttaatgtataattttgaggtttaaaagaattatgtttttatcaatgtataatcatgtttaaatataaatattttactaaacaaaaattactctaataatttaataaaattagatttagatatagatttggatatatttattaaacaatttataaaaatttaaggtttgatatttttattttaacaatctgcatgaaacattgaagtattctgtaaagatttcaaaatttatacttgatgataataaaccattaaattaaatccacgtaatttcatgggataaattaagagaatttaatttaatatattattttaattaattatagacataataaaattcttgtcaggtaaaattattatattcacataattaattacaattcatgtctattatgtaatcctaattaacttaatatatataattttatataattaaaaatgttgtggctactcctaattatttaaaattatataattcactagacactagtataaacatactggagatgaaaattttactaaacctaaaattgtctgtgggctagaatttaatttaataaaatcagatgaactttataatagatttaatcaaatatttagtagatttaatcaaatatttagtttagaaaaaactaagatttgttgtctatcttgattaaatttttgataacgctattaaattaattttcatgactcttgtgaggtatactaaaagaatttaatttaacatatta

SEQ ID NO: 219199 - DNA, 2626 bp, Cannabis indica
atgatagactttaaaaaagaaggtaaaaataaaagaggagagcagacgaataggagagaaacacgtgtatgcatgctgtagacaagaaaaagacgctgactgggtgctgatggggctggcatgtcccactggattgtgggctcaaggtgagtgaaatgggctgggccttgattctcttgggctaaaatgcccatctctgctctttcttcacaactattttttttttttctatttttccagatttgcttacttttatttctttctttgttcattttcttttctttcttttcctcaacaacaatacacttcaattcttacaaaaataacaacaaattaaattcaaatcaaatatatcttcaatataaatatatatccttaatttcataaaaatattaatttaaactttaagattaataacagagacaccatattacacattcaattgtaaagccacatgatcttaatttccttagcaataagcaagtgtatgatgattttcaattgattgttttttcatttttgatgaaactgttggttctaacatttagtgatgttctggatgtttattaattgatttatcttcatgatagtattttttttttttttataattatgcaagattgattctaaaataatggcaaggcaataaaaggtgtttggttgctcaatatggttaagaatgtataatgaataaatcttaaaattgtaattttttacacttaagcagtgcataataacattttttataggtggcgtcctacgaattttattgatattgcaaattaaacaacaaaactatatcttatacaaaattcaaattggagaccacacaattcaagtacttgaaataagggacattcattaattatataataaaccaactatatatatagctagctggttatacagagaattaattaaagcaaatatataaggcagtaattttataattattattattattattataacaatattatcacttaaatgtttcgaaacgaagtacgctgaagccacctactttgaattccgaaacttgtttatttttatttttatgcgtggaagcagaagtagaagcactagtgatcatggcttgttgattattcttagacgatgaagaagatgatttatgttcatgatgatgtttggagctcgaatgattgatcgactttggtggatcatgatgatgttgtgtactatttttggaggagtagtgattttgtgaacttattgctatagctttttgtttcacaatttgttgttgttgatgatgatggtgctgtacaccgctactaaaagccctagtagcaccactactactacttacacttattgccttattattattataagacgacaaattatgatgatgtgatgacgatgatcgtgatgtaaaagaatgattactaggtcgtgaagtagaagaagaagaagaagaagatgatgatgatattttataccgatcttcaacgacagtttgaacttgtatggttcgacgatgaatcacttccacaactttgtggtctgatgatgatgatgatttcttttgatcacgatgatgatgatcgataacagcactactacttcttctcgaagtaagtcttctatcagccattattatttgctgtatgtagtattaaaatatgatttgtatggataaatccttgctcaatatatgatatattgatatgtatgtatttatatatatatatatatatattgattagatcataaatgtggttagaagtgagtttcatgaacactttcattccacaccataagtagtagaagtagttgtcttgggaagtttctacgttagctcttaaagtctttgattaatatgttggttcttaaagtctttcgtcaatttaatatatatttacattcttatctagctagtagccaatagttgttgactcttgttttgtatccttataatctataatatcttttaatttaagcttaattattaccaaaaaaaaattaataataaaaaaaaatatgagccaggcaaaagtaagggttactgtagtcgctcctctaaaaaaaaaatggaaaaaaatatatacacattttaattaattaaaatatatatttgtaataaaaaaattatatttataactataatattaatttggttgcaataattaagctacattaattttcttttaaactttacttttgctccttgcttaaaaatatatcatatcactttaattagaataacaacatgggctacttattaattagacaaatttgtttaataaataataacgacctaattaatcagatatataactacttctctaaaaaattaattaatataattaatatgacgtatgtcattatacttttatattataattaatttaataaacagatgttatctaattataaaatcgtcaccattgaaacaataattaattattaattaagattagtgggtatttgctggtgaacgatagccaccaaaacctttattaattagcttggaactaacctaaaaatttccaagcattttacttaacaaaaacaagtatattatagctaatgaattaatgaattaaataataatataacaacaacctaataccttataattttgagcaatattgacataatgtat

SEQ ID NO: 219200 - DNA, 4219 bp, Cannabis indica
aaaaaaaaaaaaaaactagctcttatccttattgtactaacagatgaagaagatgatttaaattaatcatcaaaggaagaatatataacagtagaaacaaacaaatgtataatcaggaacaatttaaagaaccaaccatttcaattaagtggtaatttacaaattctttcttttccaaacatgttgggaatattaattcatcagattcttcttccttacaccaaaaacttccaaagccaaactctcccttgttagacaactcttccattaccttctcaacttcattcatacaaccccaacaatgattattataaactccctcaaaagataacatactttgatgatgatcaatagtttggatctttatggactctccaataattcccacaacttcattatttttgtactttctcattagctctcttccaaccatgttcatcaacaccttctcttctgatctctttctctgttgaagcttctttttagcgaaattcctcgtctttcgaatcaacttgtaaggcagcttgagcaaaacaaagatgatgatttgcaaaaccaagcattggcagcagcatgatatgacaacacaatctccagcaagtgtgttaacatcttccatgggtggttttttccaagattggtttttgaggaaaaagagatcgaagaggaaaatatcaaggtgtaatgaataattataatagcaacacaagagatgaaattatagtaagccatgttgtttgtgaaggaatatgtttcttcttgttgtatagaaagtgtgttaggaagggtgtgaagcaaaaacagaatgagtcatttgtgccttcatatcaattattgtgtgatcttaaatttaagtactatatggcgtctaagtagaggttaccaattatgatatataatagtactagtaaaggaagcaaaaccaatatagtttaaaaaaaaaaaaaagaaaagggaagcaaaaccaaaccaaaccattatataatcgacaactgtcctataatttttttgattatatatacttgttaatttattctagcttggggtgtaaggtattgcaaattctgttaaacatttctttctgagtttttgtgggggatgagtattttggaagtaacaggtctttactactactactactactactattattattattattattattattaatattattattattatttagacattggtagagtgttcgttgctaattaaaaaaaaaattggtgtatcatttcccaaaacaattttactattgcttattatctagtcttttttttcccaaaccactgcagttattataatatttccaatatttagggtccatgtattttaggaggtcaagatttataatattatggttttgatattttgcatcttaatgttttacaatgttacaagataaaaattaattaatggctagcaatagcatacggtcaaccatatctcaatcattgttaaatacataagaggaaattggaaccaacttaagggtttttagataaggagcagggctactagattttctcattattattattatgtcccagcaaaagaatactattttgacgtcaattcacaagtacaattacaagtgtgtgtgtattaaattaagaatagtaatgattaatgaggcaagtggaagtgtcatattggtgtaatagagaagctgaaacgcacattcaatggatagagtccaagtcaatcataataaacaaagtaaatgtagccgtgtggaccactatatgtataggctgagttgagacgttttaagtagaagctacaaattcctggaattataaggcacctgctctgatctcaccacaatttcccatttctttatggagtgtggacccacatgcacacgagacctgtcaagatgaaaaactctcatgcagtcacattacatattgtcttcttttttttttcctgtcgaatatgaagtgaaaaaagaaaagagggaaacaaataaaaaagagaagcatggcattgcttcttctgtacagataattatgtgacgaaaaaaaaaacaaaattccagtaattacaggacaaaaaatatgagcttctcttctctgtatgacacaactacaagaatgatggctgggattttggcctctacctttgatgttctggttacaggcagaatagtttgtgagggctggctgagctgagagagatctatgaaagaaaaaagaaaaagaaaaaaactgtggactaaaaagtgaaagttttctcatgcctcatttactctgttctctctactattcatgctgttttgggtgaacaaatctgtactgtaatcttgactgccaaatgccattctccgaaaccatcttatttcttcagactgctgcgttgagttaaatgcctcactttctcctactctcattccattggttagatctgaagcagctaaattatcgaaagctctaacaacctgagaaacagaatctatgataagtatctttatttcatgaatgccatgccatgtataaaaagaaatcattccctactcgaatttccgtgttatccattttgactacctgtcccattcgaggtctcttggccgatgaatgtcgcacacaagcagcggcaatctcaatcatctgtaacatttcactctcaacatagttcctctcaagccttggatccaccagatgatcgacttccccattctcaagtgcattacttaacaatggtcgagcctgagaattgaaatgcatttatgagtatttagtcagaaaaattatcgtttcatatgattagctatagttccaccagaaaggctacaaattattcttcacaccaaacagctctctataatgatagaaaatgttcaatttgtttccaaataaaagaaagatgacactaaaacatcttttttattttttattttcccctaataactaagaaggtttacaacactaacgattcttcagtcgagaaattttattcttctacataatgttttttaggataacttatgctttagtggcaataggaaagtttatgctgggctcaagaagtttacccattcaactagactctcatcacccaagggttgcgatgcatccacaggcttccgtccggtaatcagctccagaagcacaaccccaaaagagtatacatcagatttctcagtcaattttccacttgatgcatattcaggagccacatatctgaaaatcaaccatagagtcaatattgttctgggtgtaatctttgaaacttcagaactaagtaggtgtctcaaaagattcatgtaagtcctagttgttagaggatatgagtaactcgccaacatacccaaaggtccccataacacgtgtacttatatgtgtatctacgtcgagagctagttttgctagcccaaaatctgaaacctgtaaagtataagaaatagctcatgtgaaaattgggctcccttaacaaaagaaagggttgaactaaatgtttgagagaacattgggaatacccgagcttcaaaattgctgtctaagagaatgttcgaagacttaatatccctgtgaataatccgaggatggcctggtataattggaaaagacagaaaatagtaattaaataaactaattgaaataaagaaataaataataaactcagagcatacttcactttgtactatttgacaccttaaaaaatatcaaatgattctaggatattattaaaatgagcttggttctattctagtagaagtacacatgaagagaactcttatcagttttcttgtcttgcttatctttcgaaacaagagacaacagttggcttggaacaatcctcaaagctagaccagaatttgaaaaaaaaggacaagtaaaagtatagttattttccagttaatctatacaatggaagaataatgcttatctcttcctgggacttttatgttaatacaggaaaagagagattagaaagaagagctaagtaacaacatctgcggtatcactttcatggatacaatatcaaggtaaaatatcgttccatatacaatgcaagtgaaaattagttcagagtctacaaacttacagtcttcatgaagatacgcaattccacgagccgcaccagcagcaaccctcactcgtactggccactctaaaacaggcctatctggacctaaaaagacaagcgagaattatgttaaattatccattttcacaaacttaatcctaaaaaaattcattagcagctttac

SEQ ID NO: 219201 - DNA, 2330 bp, Cannabis indica
gaactttataatccattttatatattttttttttcacgtttattcattcatagtgtaaatatatagaatatatagttttgactgctgcagcatttaatttgcatttaaaaatttcttggttttgtccataaatatattataaatttataatataagtcaacaagcaaattatttaaacctttaatcatgaacaggttcctagatatatctagtaatattatttgattctgtttacagctacctttcacacacattaaaattttatttttcgatccttctcacaaagtattcaactaattataaattgatatattcacatggactagctctagatttgcattttgaatagtactgaggagcttattataattagccattaataacttgtacatgaaacaatatctggttgcagatgttgagctcaatcaccatggagaattcatacatctcgattgaaaatatataataaagataaaataaaaattttctaaataaatttcaaaaaatatgtgcatttacattgtttttacttagtatatatacatatgtcagatataataaggagaagaaattatattgtattctctaaaatgtaatatgaaccgtaaatgtttatataaacccacaaagggcgacacatagaacacatgttgtaacgtcctatccataaggacatcacgtgtgtatttttataaactagtttgtgataataaactaacggcttaaataaatatgcgagttaattaaaaactttactaattattgaaaatattaaattcttggcattataaacttttaaggttaggaatcccctttaaagttttacaaaagaatgccattacaatattacctcgaaatatacatataagtcaaaaagtccataaaatagaatctcgacaactctgcactacaagctggatgagtcaatatgtacatttatcggagaaaatttctaattcatggttgacctagcttgccctttacctgtaccacaaagtactcatgagtcacaaaaactcaacaagaaaagtaataacacaaatattattattcataacaatatacaaatataatcagatatcacatttaaacataatcaagtatttacatgcttaattccaggaaaatctcatgataacacaatgcaatcagtcactaatattttgtctaataagacaaactaaaattgttactttataaaataactattatctttcgttgtctaataagacaaccaactctaatattgttgcctaatgagacaacaaacactagtattgttgtccaatcaaacaaccttatccaatatcgttgtctaataagataattgatatataagaaacctaacaaaaatttaaaatcagagtaataactctttcttataaacaataattatcgtatcacattttgacatgctatgtggtaccattgtacttttcttacctcaagtctaaattcaagtgtaccagccaacttgagtagaaaatacccgatgatctgagatcctatgtcacaacagcagtaaaccggtaaataacttgttaaaatctattctaagacttaaactcaaaatcaaaagtttccttatcgataaatagtgtggcaataccctaaatatcgaaaaaaaaaaatacgaaaatttaagcccaaaaaaaaccccaaatggttaaactggatccccaaacaggtaatcgaataactggggattctggataactaagtaaacgattaaccatttctgagcaaagttaaaaaaattgagatttcacactccaaacctaccctaaagttagggcatgtggtgaataaagacggtatcttggtggacccgtggaagattgaagcagtttgggattggcctcgacccaagtctgccaccgaggttagaagtttcttgggattagcaggatactacagaagatttgttgaggggtttgctaagacttctacgcccttaacggaattgacccaaaagaactgtaagtttgtttcgactgacaagtgcgagagtagcttccagaaaataaagcagaggctaattactgcactggtgttaacttttctagttagtaatgaaaagtttgtgatttattgtaacacttccaaacatgggttaggttgtgttcttatgcagtctggaaaagttatttcttatgcatctaggcaattgaaggaatatgcgcagcggtatctgttgggctttgtgccctaattaaaactctatttcaatgtaatctttatcattcaattatcaataaagagacagaagtattttcatcacttatttagtgtgtcatttggttcatgttatcatttatatgtttatttaa

SEQ ID NO: 219202 - DNA, 4977 bp, Cannabis indica
gttttcgttttacgtttacggtccgttaccgtaggaggttacgtacaaaagtagtaaggaaggactaaggttggttgtatacataactaacaaaacgagagtaagttagactcagctctagttggaagttgagagagatgattgaatgtacctgaagatcttgtcttccacgttgtttttgttccttcagagagagccgttttagaacgagagtttaaggacgtaaaggaaaacgaaagtctggttgagaagatgaatgatgatacttatgctgtaatttctagagttctgggattctcggcggttccaaggacaattatcacagatgatgtatcttctggtgaggagattttgtatgattctatatctgggtttgtattgtatatttccaaagatgtggatggaatgttagtggttaacagagttcgttctgaaaaagtagatatcaaaaggaacaaaattgttgtacatgtaatggatggggttatcatggatgctgaatttgaagaatcagttcagcctgatgatgaggatgaagaaaagtgaatgaaaagggctaatacaaaatatgcagttcttgtctgaatcattatagattcggaagttgaacttttgtttttcttttagttaagaatttggatatagatgacagaaattataaaatagattgtttctaatacattttgtcaattgtttatattcaatagtttggttcagtatcaataccaatggttgccatttggatgagtacaattataaatgtagaaagaacatttttgttttaacaatttggcaaaatccaatgacatatatgaaagaatatcacatgttctaggagaggaaatcatagagttaaaatcaaacaaatatgccccatctctgtaaccatccatccaattcagactgcaaaaattataacctattacactactgggaagatcaaatcattgtaaaactgcagtctgatgaagagttcttcaataaaatcctttggcattaaaatctagcttcctgctgcagatggcacagcgacaggtttcgagtcttcagctttttcatgctccttgttaagcatctgaaatttgccaaaattttgttatgaatgagtagagggctttgctacaataacgacaacagcataaaatacccctttagattgtcaaaatagtgtaacatactaataaaaatttaattgtttagctggacacctaaatagtacaaaaccaagcctgaaacactaaatggaatcccaaaattctatatcagttccaatacatctagtttagtctagttatctggcaggtttaatgatgaactaaaacagtttcctaccaattctctttaaatatttttaattttgattttgagatctaaactttttgggcttaaataaattcggttaacaggttttagtatttatcagaattatgtcagcctaggctaatactgaacccacctaagacctcaactgaaataagaattcaagttagcaaagtagtttttgttttattggaataattatcaacaaaatgttaactggataaaagaatacattatatttaatgttttatttattggtttccatgaaagtgcatcaccttgttgttgatcaagttgtggagagcaatcacactccggatgagggaagaaagataaataaccaacatcatgtcattagttttcactgcatcaagtcaagaacatgagatatcagaatactaagacaaaactaataaacaaatattaccagcacagccaatcaacaaaaactatgtcatagacaaaattacctgcaaaggacttaatcaactctgaaacgttgagatttggaagaagattaaacacatcctgccaggatttaatcaaggagaaaagtcactacaaaagggaaaaatattcctagcaacaaaaaaagggaaatgacaaggtagtttccatgtataatgaaatatgacacatataacaagatggaaaattacgcataagagaatgacagtcaaaaatttctcaacaggccacctgaccaattttcatatgttatcttacttttatttcactaaaatatatgaagcatgtataggcatgtagtaggtcaatgttctgaatatgagaatcacaactcccacactttagtctattgtacaatacaatttctaaaatgcagtttgaaaaacaagatgtctctttaacaactttgattagccaccttataatggcatgcctgtatgctcaatcatttacatgaagccagttctcaattgaaataaatcaataatctctctcacctagccttgtaatatttgagcaacaaaaactataacaatttctatgtaagtacctaagagagacttgaacctcctcaaaccacgtaggaccaaacctcaaaccatttgagctactccactagagtgagctagccctcaatttttatggaaggtgataaaattataatgtaccagacaaagaaaaagaaaaaagaaagaaaaaaagcagttgtacctgtaggtgatacaaaatttcatggtttaatgggagtttctcctcaattacaaggtcaagataacctcgtatctcccgaagtcgtgaatccagacctttcaaggcagtaagttttccagtaacctgcacaagacaaaagaagcctaagttttgagctgtggacaataatagtaagtcagaaatagagcaaaaaacaggtgacagaaaaaaggccaagaaaaaagtactgcacaggaaatgaaaacaaaaaccaaacctccgtagcaagggtgctgatagttgtatcctttacatctcttagcaagtgttccacccctgtcaaagggaaaataatatgtaaacaaagagaccataataacaaactcatattaagacacgctttgccactgcaccaacatgaatccatgaaataaaagtcactttcacaagaagaaatgaacgttaatggaagcaaattttgactactaagaagtcaacagcataccaatttcctcgacttcatgggcagcaatttctgaaagcacgtggacgaacaccttctggcttttctgggtggcattctgtaactctaaaaagttagtctccttgttgtagcatctatgatttaaggaataaggtgtgctctataatacaaaaaagattagctgaaagaacttgttcacctacctctttaacctcttcaacagcgcagtaagcttttgtgggaattcccagttccttaggttgtacatcaattatgacaagaacaggattaggaacatagctgtaacatcaaagtgaacaataatataattgattagcgccaagaaaacatactctatgtactggaataaaagttatcatcttattttcttactcgttaaataatccatgaatatctagatcgttttcccgcaattttggaccagtgctgtaccacccaacaacatgctccttagctgaagatacaaataaagaaggcattgatcaattttatcaaaaaaaaaaaacaaggatatgttggaatgacatattatcgaacaaataccatttatccgcttgaacatggaaaacattgcctcatggtagttatgatcaagaaaccatatgcttgggtccttatcatcttcttcaaaaggaactgttaatcaaagtttcgtaagtccaaataaattcatgaaagcaaaagctaacacttacaatttttattcacatagcccagacacattctagagcttgatcaatcaaacaacttcgttagcaaaacatacttatacatgatcacttatgttgccattttggtgcacatttataaagagtcctaggtactaatttgtgaagatggaaatattgataagaaaaaaagcatacgattgtaaaacaaatcacattaaatatatgtacctgagttgaagagaaaaacataaacacacagaggtatgcaaattttttggtttaaaagtatgataaacacaaatacttaacattaaaatcatttcttctttctcattttgagagtaatgccactcattcttttaaatcactagactgtaaagtagaaaaacgtttagttctaatactttctaagcatacccggatctctaatactaaaattttcaacacacattactcttcgaacgttcttatttttatgaagtgaagctcagcactttaaaattctcacatgttaaacctaataacaagaacgcatacactgtaattgaaaccctagaaaagtaaaataagcagaattcgaatcttcatagccccaaaatctatgaacacagaaattcagatccaaaaaagagagcacggaaagtgtaaatacgaactggcatagctgttggtaacatcgacggtgcctttgaaggaacttccgagcaaaacaccgacaacgcgcttgcgggtgtccctggcgaccctgttgtagttgtcgacgatgctaagcaacactagaggatgaacgatcaccttctcgatcggtcgagctgaaatttgctgcgtctttatcacatccattttcttttccttcctttcactagaaaaaatcccaaaattttcctaaaaaaccaaaaaaaaaaaaggaagtaattcagttgatcctgggtctgaggttttcgctttgttcaactttgcttcttctccaggaaacctcagggagagagagtgtgaaaaccaaccaaggaacttaaacgccgtatttttcgtcgttttattattatcatcagtccttattctgtcgttttattatttattttcaaaaaaaaaaaaatcagtccttattctgtcgtttttgagtattgatgtcgttcaactttttttttctttcctagttaatttcggatgccattttttttttgaattaatcaggagttttattaattaaactcaatcaaaacaatagaacgcacttcagaggaacaatcctccaactgaagcacacaacctatagagaaacaagagtctcttgccaagcaatgagccaacttgtttgcagat

SEQ ID NO: 219203 - DNA, 3804 bp, Cannabis indica
acttttttttggaaaaaattttatatataagagcaactttagatagaatattaatattgagtttatattgttataataataataattttttattattatttatgtattataaacttattaaaagtgaaaaaaaaaataccgaaaaaataaataattattgtaaaaaaaattaatacaattatgaaatatggtttggttttaaatttttaaaaaaactataatattagtttagtttaaaaaaattaaaaattccaaccaaaccaattggtaaacaccctattccaagttccaagcctctcatcatgtgcaaggcttgaataataacgttattttatctgaaaaatagtgtgtatgtgtacattattgttattaaataaataataatataagaaacaatgggaaagagactcgtgttttgtggtatatataatatagtttaagtgcatataaaaaaaaattctcaaaaaaaaaagtgcatataaagttttaattgtgagactttacttgtcaaatattacattaaaaaaatcatgaaaagaagaattgcattgtaaaccaagtatatgtttaattaagctacgtaaatgattatataacaataatttcgacatgatatagattattgtattttttatttaaaattgctattgagccgaaatagttggggataaaatgcacttaattcttttttattttttttttaaaaaaaaaagttatcaaatcccttttaaagaaaaatttattaaaaaacattgaattaattttattttttattgttatgacttatgaagtgtttttcatttcggccaaacaattctgtttttcactacaaaattcctccatatttatatttttataaatatttggtagcaaagcaaccagaattcattataataaaagtaaatgtattaagagttgttttttttaagagtattaagaattgttttgaatataaatgttttacttattttattaatatgaaatatttcgtaagatcacttgaaaataagattataaggctcgagattagacgaaagtagataatatcatactaatttcaatgttaaagtaaaagtagcggtgtaacaaagtaaaaaaacagagtgcctaacaaatatatactttaaattgtactaattgatgtaatttttctttaagaaaataaatcaaaactacctagttatactactatcacctaacttttatatacatatatgatttaaaaatatacccaccttctcaaattataatttgaaaaaaaaaatgggtgtctctatccttaattcttaatgataagaaaacatatcacaatataaaaaattcaatgaaatatataatgacaattcgtgacatatatatgtagctagcccaaaaagaataatttctcttaataatcataactaagttaatgatataaaagaataaaaatgatgatatatatatgatatgacatatgttataataaagaattaattggaaaaattaataataatttaatggggaaaaatatagttggtggtggtcactagttactaggattaaatttgatatatgaaatagtggaattgtgacatatgaaatagaaataataatgggcacctcttccactattaatttgaatttatagatgccgtgaccaattgtaatcacgtgaactataatatttttcaaacactataaatatttaattgaccaatttagactttggcatcattgaatttgaaacattagctaatattttattattaatatgagatatccatgtcatttgatgttaacaattattcatataaaatctattgtgtatattgggtttggtttaattataattactttcttttctttccataatgatctagtaatttgagtggagtgattattattttattgggtttggcctcaaagtttagttatgaattattaggttttttttgttacttaataataatcctactagtctatttggtagaagggaaaaattggtagctaatagctaattatatatagctatggctaagaataatgaatgtggtaattttaatgagcaaaccataatgaataatccaccttcaattgtttggtttagtgagataagattggtaaaaagtgagatagagaaaatatttacttttatttatctatgaaattagtgtataattatttaactattattaattgtttgatgtaaaagaggaacgaagctgcaaaccctatacattatttagataataggtccaactttataataacttgtttgggtttctaatcaaaaattgaggcaagagattgaatataattatattagctccataatttggagatcctgttaatatccttagctatttgggaatttaaatttttaattattattttaatcaaacttttaacatttagctaccttatcttgaacttgaggagagcattgttattgggtatcaatggtgcccaacaacttctatagatggtgtcccacgattggttagcgatattttttaaaaattattttcttaagttatatggtacacaatacttaattacacaaatagcgatatgataccaaggaagatattaggcaccaataatactttttagcaattctcacttgaggaagatcttgattaaaagcacattttactcttgaacacatattcttttcatgtagactcacaacctcaaaataaataaaattaaatactacaattgaatctatataataaaaaatgcaattcatcctaattgaattgagcctctcaagtaatgtgacgtcttcagctaattgggaggattacaaaagttattgctcgacgactttacaaatttctcaactagttcgaatatgtcatgttgctcgagatgaatagtaacacttttataaggaagtactagttttttcaaatgaaaaggtcttcaatatcattcttgaaaagttgttcctgaaaagttaggtgttccccggatgttgtttctagacaactaacttgtccatcccagaaagagtcttgcggaatgatagttgagtccagaaaagagttttcggatgattatcatgtccaccgcaggtcctgtcttcaggaaagctagcctcacttcgggatggagttctagttagctagttgtccctcctggaatggtagtttcggatagtcgactccaacaggctctatcctatccagaagcatcatcagcgagtgtccttaatttgtgagtctggaagctcgtatatgttcctgaaggatttgatcttaagctgatgtggagcttcgctcaaagaggacttggttaagatagttatttctaactaacttaacagcctcgtttcttgcagccaccgactttaggatcttgatcctaagcctataaataccaccttggcttgttattttgagatatgagattaagaactcaattcatatgagattgagagtaagagagagaaaagattgagaagtgcagagaaaagagagagattgaagtttgggtttgggttttgtaagaataatcttctgtagatgaagaagattcttaggtgtaagtgtgagagttgaaacacttagtgagaacttatcagagaatctcgtcctgatattgtagtgtacctattcttgctcgaaaaaataaaaaaggaattcaatggtgttctaggagtagagccatagattacattgatctatcagacttgaaccagtatatatcttggttgttgaattaacttatattttcctacattttattgtttctagctttatatactctgtttgcccaatgttttcattcgattgttgttcttgattgataatcttatca

SEQ ID NO: 219204 - DNA, 2928 bp, Cannabis indica
cccgaagaccgtatgatacaaatagtgtgtgtgtgtgtttgtattcatatatatataattatgtcaaatttggagcttttttaatattattttctcaacttgaaaatagaaaggaggtggaactccttttacgttgtactgaatgactagtcaaatttggagcctaaaaataaaatataagtgatttgagtaaagtgttaaatggaaataaaatgaaatgacgaaaatgcccctgtgtacgtaatatttgtcgtcggtgtaagtaactgtttcgccgtgcaagcaaggagtgatgggttgctttatgcttcctagtaatgggacaataagaaaaatcgactttacgtgcatggtaagtgatatgaagttccttttaattttactaaccaaacctctaagcatggtaataatgtacgtggggtcacccattaattaagtcatcacaaccaatctaatcatgccacgtggattgacgatatacacatatagctacttacagcttttactcctttgtgtagcacaagaattttcttgctatatatgtgatacattttgttttcttttgctatgcaagtgataaggttatcaagatgtggagtgggtggagcacataaattgatgaagagactataattttatttttccacctgtaattgatatttgaagaggatttttttttcttttgtacttcatctatatttaattatataatttttaagagatgagagttaacataagcaaactaataagaatagttgcaaaattgaaggaaaatgtctagagccgccgcatgcatggaactcatatacatcccatatttttttaattttgatgttgaaagatatatatattattgattacaaatgttgagtgattggtttgacttaatgtggatataattaagagatgtatatataaatatataagactataaatttttgttcatatatggaccaaaagaggggaggaaaaaatagtataagagggcaaaactaagtaaagaggtggggatttcatgtttaattttattttgattccaaaaattggcattattaagctatgtagagattcttactttgataaactttcacattaagatcaatatgtgggtaccactatactccaacgaaaagtgaaaaatactgaaaaacagctataagagttgtacttttcctttgtaatgttgatacttgagaaggtacttattacatattggaaaatacttttctagcccaacgggttgagctagctagcatctatatgcatgtgtaaataataagctcattaattaaattgattaatttacaattattttatttttctgtccacaaaaatcttaccacttcaatttgcaggttggagaatgaagaattaaataattttaattttaaggctccaacctgaattaaatttttgaatatgaaaacccctaatatgtccactcatatataatagagtatatctattagcatccttatagtttctcatattattatatgtcgaattcaattttaaaatacaccaatcatatattatactgatttttataatacttgataacattaggtctccttttatatttccctatatattatcaataccctccgtatgtttatttcattttttctttttgaaaaaaggtttattgatggtcaccctcatagatatatatcatctaattatacatgatttaattgttatagtaatattacttgtgtttgattcaaattattagtttgtacattaatgaaatattagttatatagtgattgattgatgggttacaattatctaaaatgatgaaaataattaattgagggaggtgactaactctatctaacttataaatatggatcgatcacaataagagaggagcgtattaatagactaatagtaacccttaaattaaggcaaatgacacaccaatattatgacaatatgcaagccaccgtcctaaccactgttgtctgattgttcacgtttttattctcttcaatcctaagtacatttctaattaagaaaactatataccaatatttttcaatttatatatatatatatcaactctttcctcaatttaattattattattatatatattattccctaaacccctattttttttttattaaaatacatcaactttcacgttacatatatcttcttgacccgaaagaacaacattaaataatgcaggcaatattcacggcttcggaaaaagatacataactgaaattccaatgatggacttaaccaaaataatattaataatagtgcaataaatgtgcgtggttaattgatttaattattattattatttatttatttttttcgagggaaattggtttcattatttaaacattattgtgtttttatcagaaatgtcctcatcaagtttttctgttgccatttagtccttatgaaattggttttaattggtattcacgtccttgaagatgaagtttaaaaataaatagcatttctcgaaaattacataaaagaattattacttttttttttgttgataaaaattactataataagatacaattatttattttctaaaacattttcgccaacgtgcttaattctttatttaaattagaaaaccattttgtttattttttagtttatcagtagtttacttatattataagtattttatttaaattaatttagaaaagtattattaaatattattttataatttttatccaagcttttgggcacgatgatgtgtagaatttataaactcaaatatcagccaaggccaacccaaacctgagctcactctaatttattattcgcataaacgactaagtcgatgctggacatgggcctaactcgctaacctgccaagacaggatctcccttattcgaaaaagatcatttggcccagaagtgaagagtctgccaagacaagtccga

SEQ ID NO: 219205 - DNA, 4461 bp, Cannabis indica
tcttaaaattttacaggatgttttaaataattataacgtacataaatatgaaaaaaaaataatatctgttttaagaagtgcatggtagaatttccaaaaaaattatttgtacattgttgtgtttgtgagacaagtcacgctaaactcagccaaattttattttattttttttttttaaaaaaataaaattaaaagtgaacccgccattttttttgaaaagagaatttggtttcttgggaaacaaaaatggctgaatttccatctcctcgtgaacgagttgtagcttcagctctcctcctcctctctactatgcctcccctaccttcttcctcttcaaattcttcaatgtcaaccaccgtcatcttcacattttcatttcatttacatttccatttacgatgttgttattcgcatcgtcacgctctgtttttgttcattttgattgtgcaggtacgtattcgagttcaacgatgaagaatcgaatcaatcgagcgatgtgcgtaatagcaagatcaagaactggcgcgggagcttattttcgagtgactctaaatcctgtgattcctctatctctactgatcggtcgactgaggagatttcaacacgttcggcgatgatcgttcctgttgcatctggccggaatgagttgaggtttacggtaatataatcttcctctctgtttttttgaattactgtttgatcgaatattgacgcaagaacttgaatctggttttgaactctggattttagtgaatcttcggacgatcattgttgttgttattagaatttcttgaattgtgttttgctatttgagttctcattcttgttctgatttctgatcaattttctgtttctagttcgtatattactcgaaattcaaactctgcaattaactttgtagaaatcgaattctccgtttcaaattaattttctagttcattatttttagctctgtaattcgttccagattttcttcgatttctcaacagattcttttcttttgttttaatattaaattgatgttcggatatttttctccttgatctgattcaatatcaaatgagtttcgagtatatctcatttgaattggagctctgtacaaaatttgattccaagatttctcgtaggccttacgcaagaatcggtcgaaaatccacaagagctcaaatagatggaaattcagctcaggcgagagctcgaagatgactacgtcattcggatctggatccagggatgtttcctgccagtccagtagcacaatttctatttgtagcgccgattcgagcacgaacagccgctacacgaccgtcggcaagggaaggctatcatctatggttcgtgcggagccgagaagattgcacctcggctcggctcacattcgtcgtcgagccgaaggaattctgaatttgctttcctatggttcttactccgaagtaagcatacgccaagttctcggcgacagtccagacaccagcaaagcccttcgaatgtgagaaatctgccttacacgtttctgattaaattatctcaactgtttgatcaaactaggtacggaccactatgacaattgggtctatattttgtgggtctgaatacccacttgagtaaattatatagaaatatatcaattatatgtgattatattattgtatgtatggttcaaaatcaataactattttgcttgtactcaactcaacaggctgttaaagcttgaggaggttaaaagatcaggcataggagggcgtcaggacccttacatttacaaggtatataaatatatatatatatatatatttatattctcttttcatcctcatttgcttaggccttttacagaagtataccacttgaattatatatgcttgctgcttactattgaagtctagaaaattactgattttttagcagaagaagttgtggtgagtgagaagagaatatatgtttccaatatgtgttgtttattcattttattttgcagattgcatcacattgtaggaaatagagatgatctgatcatttacgtacagctgaggttttaattcttcattacccattaattggggaaattttgttcctacggattgctatatgtggaaaatatatatatagctcctgaatatgccaaataagattaatttctgtaagactatatatagtctatagtgatgattagagttaagcttgtatagtaaggccctatttttcttttaaaatacatatgtcccagatgtgaagaatagaccctgatattgaaaattaacaaatatagcatgcatattgggaattgtcagtctatatatatataagagcttcagagagctatacaattaattgatatcattctatgtaaggatttcaatctcaaacatactactgcatatacacatagagtgcttagatggtaaatatttattaatttagattaacttgactaacttattttgaaagaattagatagcatggaattattttacctacggtgctatatatctcacgtgattcattgacaatacttatttaattattggtgaattcatcttgttaaatggccatttggtatttgaatagccaaaaattccaagaaaaatcctaggccatgaccatatggcaatcgacctttggaccaaaccttaccttttgtcattcttaagtgaaagcgactatatatgtctgaataatttgtgtttatttttattgttttctctttttcaataaactttgcttgcacccaatcaagtatttttggtaaaacattgaggcatattgtcactgacagctactgaaacaaaaatacataagattattattgagtattagttgtccttaatactatatgaaatttaatatttagtttaactaataataaataatattaacgtctagtatttctcaaaaaaaagaaatctaatttgactcgtgaatgtttcgaagattataatgtatctcatacgtttgtcaacttcaacttggtggttttaagcattcaacttgtaattgagaattaaaaacaatatattaatgaaatatttttaaaaattggaagctttatatggacgcaaaataaaatcatacatcttcattactcagtcattttatatatataaagaaaacaataggtataacaagttaccaaatatttgagtaccatatctctacttgttaaaacaattgttatatattagaactgagaaaaataatttaaaaacgatttggttacaagttacaactggccgcccttttccgtaccaaacattttttttaataaactatttttatatcataaattcgtatatataaacaaattaaaagtattaaatacattaacggataaaatgaaaactgcctattaaattaagtgtaataacaaagtcaactaaaataacaagaaattggggagactataaaaagtacttcaacccaattgcatttctcaacttcaattattttattttagtttgtttgcatacttttcatctttctatttcttctattgcagaaattcattatatatcatagatagacatacatagttattatttatatatgtgtatatatagacattagaagttataaagatcaagtttagctgagcagaaattatatatacaactagtcatatatgggaaagtttgtagaattattagatgtgggggtaagaatagctgcaagatttcactcccgttgtcctcaaactggacgcatctactatcatcctccttcaggtacacctgatcatattaatgctcaagacgatcatgagtactaccaccacccctactactacaaggctccgaaaaaggccggcgacaagagcagcgccgccactcatgttagcattgtttcggatgcaaatttgaaaactgacaccactatttgtggtgccaggaatgactctggtggttacgaaaccaccgagttcattattttttctgtttcatgaaaagaaaaatatattaatgttagacacatgtaacaataaataatacgtgcccttaaatatatagatgttaattattgtattattttgtttttgtattggttcttatttgtttgtatatagactgtcgctgatcattcaagaacttctctactttatataatatgctttatttgatttgtttttgtgttttccattttaagaacatttttagaagagtgggtccttgtcacaatttcattttaaaaacttcttatttgtgtttgaataataaataatttagaaattataaaattaaggaaattagtgaaaagagagcaaataaaacacttattagtattgccataacaaaaaaaatacttagaatgtgaaagaaactgtgtaattagtaaggtggtaattgcacaatctagtaattatactatattttaaatataatgtagatttgaatatgagtgataattacatatggaattttaatattttatttggcaaaaaagttaataattacatagaaaaataat

SEQ ID NO: 219206 - DNA, 5000 bp, Cannabis indica
tatatgagaattggtagcgaatacaattgaaatcgataatggtaggattcaactaccaaaaaaaactcgtatatatttatctcagaggtgttgttatttcaaagctcatttcacctttgcagtttgcaactgaattaaattttggagaaaagttagattaatgatgaatctttagacgccgtggctgactttccctcgttttcgttttcaaagtatattacgtatctttcatgtatgcatgtcattatatatatattcatataataattattgtgattaactcaattcacaatttatatatcatctcaggttattatttatgctttagccccattttgttactgtttttctacaagtatatacactatgcagattatgtgcaaagtcatagtcaaaatcaaaagtcaaaaagcaataaattttcaaaccaaacaaaagaaaatatgatcacctaaagaaaaagatgggaacaaaccgaaagtaaatttccattcttccttttattattttatgaccttttctccataggaaattaagatcagtcaattgaatttattgtgttatttaagagggttggttcaaatccgacctataaagatagatgatccaataccatgtaataaacatccaatacttattaggtgaaactaataatgatgggtttgtttccatggctccattctctcaccattcttcttctctttgttattacttcttcttctcctttgtgtcatcccaatgaaagctctgctttgctccacttcaaaaactctttcaccatcttcaactattgcacctctcattataaacttaaaacatatgtcaatccaaatgaaacaatttcatgggacataacaaccaatgattgctgcaaatggagtggagtcacgtgtgatgacatcacaggtcacgtgatacgtcttgacctcaaatgcagtgggcttcaaggcattcttcactccaacaacactcttttttctctatctcatctccaatctcttattctctccgggaatgatttttatggctccacaatttcatctcaatttggtaagttttcaagtatggttcaccttgacctttcttactctggcttcattggtcaacttcctattcaattgtcttacttgtccaaattagttacacttgatttgactgagaattatgatgtgaaactagagacatatagttggaaaaccattgttgcaaatctaacaaatcttagagaattgtttcttagttatgttgatatgtcttctacttcacctcattcctttatgaatctctcaacttctttaacatctcttgatcttagtttaagtcgtttgcaaggtaaatttccaaaaaatgttctcaatttgccaaatcttcagcgactcgatttgagtcaaaatatcaatctcaatggctcttttccacaatacaattggagcagcccacttagagtgttgaatctttctagctcaggaattgtgatagataatataccttatctttgtagaaagttgaagtacttacatgctttgtctcttagtgattacaaattcttaagactatctcccacattgcttgacaattgcacacaaatcacttccttagacttttcttctaatgattttgaaggttatattccatggtcatcaattttaaatctacaaaagctaacatatttagatctttcaaggaataatttcataggtcaaattccgaagttttgtagtaactatataaccgaaaattcatcattgtgtgtctctcctcccttgtttttaacaaccttggatttatctgtaaataagcttaatgggacaataccttcttggatatattcccttccttcattacaatatataggtctaagttccaataatttcagtggtaacattcaggagtttcaacataattcattggtaaatcttggtctaaattttaatagcttacaaggcctgtttccaaaatcaatttttcagcaagtaaatctcacttctttgaatcttttatcaaataacttgagtggtgtcttgcaattagaccagtttttaaggttgaaaaatctcaaagtcattcaaatttctaataataatttttcatttgtatctaataataataacaataataataacaatacttttcccaatactctttctagattgtatatgtcttcatgtggtatgagtgagtttccatacttcctaaaaagcttgaaaaatttagaacacttggacctatccaacaatcaaattgaaggtagtgttcctcaatggttatggaatatgggtaaggattcattgcttgtcttagatctttctcacaactctttgacccaaatagatcaaattccatggaagactctacaattcattgatcttcgcttcaaccaacttcaaggttatcttccaatcctcccacctcatacatcattcttttcaatttccaacaatttattcgtaggagaaatatcacccgtgatttgtgatctcagtagccttgatgtccttgatttttcgaataacaatttgagcgggaacattccttcatgcctaggaaattcaagttctctcagagtgttagatttgcaaaagaataagtttcaaggaatcattcctctagctttcgcaaagggaaacagcctaagggctttgaatcttaatgaaaatcaattagaagggtcattgccaaattctttgctcaattgtaaagagttggaacttttagatattggaaacaacaagataaatggatcctttccatggtggttggaatctcttccaaaacttcaagttcttaccttgagaaataatagatttcaaggtccaataggcaatcccaagataagaaatccctttcaaactttgagaattatagatctcagtggcaatgaattcactggccatttgccactaaaatattttgagaattttgtgggaatgattgatgctacttctgatggcttgaactacatggcaacaaattcctaccaaatgggctattatcaaatcagttcattgactataaaaggaaattatgttgggttactgaaaatccaaaccatgcttatagccattgacttctcaagaaacaacttcattggaatgatcccaaactcaattagtaaactcaattcactcaaaggtctcaatttttctcataacaagctaattggtaatatcccgtcatcattgggaaatttgagcaatctagaatggttggatctctcctcaaacgagctcagcgggaagattccatggcaactggctgcaaatctgaatcaactcggatttttgaatctttctgtgaacaaattggagggaccaatacctcatagccgacaattcgatacattcaatgaaaattcatataatgggaattcgggtttatgtggatttccactctctaaatcatgcaacgaggacaaaccatcatcaccaacctctcaagaagaagagaatgaggagcatgggaatggattatttaattggaaaagtgtgttgatgggatatggaagtggaatggttattggtatttctgtgggatacatggtccttacacataaaatcattgatgggattgtcgaaagagtaaaaggagaacaatggcttcaattggcaaaaagatcaaagcgaaatgctcgtcaaaattgtagaattggaagaagttagtttacattttctgcttttcagcgatataatacctcataaaggtgctagacaacatgagtataatgtcagcccacaacacttctttctctgctctttcttcttcttcttttattttgtttctattctataataaagtcttaaatgaaaacaaacaactctaatacaatctcaatattaatatatggtttgatgagatgcatgttttccaactgcaatacaattgtcttttttcatcttcaacattaacactttaaattaaatgagaaaagtaatatatcatgaagacatgaatttcatagataagaagaaaaataatgtaattatagctgtttgattcattcgaaatcattcaacaatgatacaaatattttttgaagacatgttttcttcttttagatatgtttaagtaaatgattatgtttatttgacaaaattagaaatacaatgaaagaccatagatctctttttattgaatgtatgatatgtaagaatcccaaatgacttatcaaaaaacaaggtttcttcatacatcattttattgatcatccaatttgtatcaccaagaaacaatttttctatctctttctaagaaaaaagctataccttgtgctgtattttcatctccatgatcatctcacgagcggtataagtaaatactcggcataaaataactgtaaagaaaaacaaacaaacaaatacaagtgaataaacgaactcgttattcatcaaataaatacgtgacaaactcgcttcatcaactgtaatttaaattcaagaaccttagttacttaccttccatatgaacatatagaaagatgttattgcagctttgctgctcaaatcaactgacttggcattagaccaaagtattgaagccaaaattgtgtgtcccaatacctaatcaagggaaaaaaatataataagcaggggtaaacatagtgtgggatgagcggtaaattgatgaaaaacttaaccaacccgcaaggtgtggttaagtgaaaatcttaactgcacggttaatttcatattctttaaccgtgcagtgcgaaatgatgtggttagccacaattaagttactagttttatatattaaagaaaaataggaaaaaactcaataaacatattcatagaagtttttaaggatcaaaagaaaagcatcgtcatcattgtcaacatgaaacatgtatcttttttacattaaacaacttttgttaatctaatatgtaaaatattaatattatatacatgtggtgcagtgcggatattgcggttttttaacatttgttttgctaaactgcatcgcaccgcaactgtagtaaaaaatttaaccatcaacacacc

SEQ ID NO: 219207 - DNA, 3664 bp, Cannabis indica
gaaacctcttccatatatatataaatattctcatacataacttaccctcaaaagagtgtcaagtttgggtgcttatatcctcctgcctgtgcctattgtatatgacaaattaggcaaaattcttacataaagagaaaacttcaaatgaaaaaccaaagaaattttgttattaagatgaacctgaatgagcatacacgttcatcgaggattcaatatatataaccaaacaatttaagaagcaaaagtcgaataacttacttgtagaaagaagcatacataatacaatttattttacctatgatcctcttcggcagcctaatgctcctttacttaaagagtgtttctgtctgttcatcattctcacaattgtacaaagttctagaacaaccagcaaactaatgagcagcagcggtatcgctcttctctttctctacaaagctttcggttttcctactgaacatctcataccctgatgatgtagtttgtggcggagtaaaggatgttcggagggagggggccacaccaccatcttggataaatcagtcaatgcccaaggtggaataaggttcgtagccaccctgacaatcagaaaattcaacccggaataactcctccgctttatttttcccaaaagtaaatgttaactttgtaaagatcaattaccatagctcccccacaccaaaatgactatagttaatatactattaagtaaaggattacatacagaatcagagtaatgagcagaggaaaaatcttagttataaaaaatattgaaattcacaagataataactcggcgtcttttatttacttttaagcattccattcttcaagttgaatgtacaaaagatttaaaaggcagccaaatatgatcaacaaatctactaataaaaaataaatttaattaatgaaacaattcacagttatcccccgctaatccaattttactgaaatatactactcacagaacagtcgtcatgaacacgccatatggtctctccaagaagatttgctactgacaaaatagtgagctgtggaaaatagttccgttctgacactggaatagtatttgttatgatcacctcttgaaataaaccacttgacaacctctctattgcaggagggctgcaaagaaagaaaataataaggaacgtaacagtaaacatttctcaggttttatcacattgcatttgataacagttcaggtagatgcactgtaatcctaacagtcatcttcaagccatctttcaaactataagtattctcataagtaactttaaactcaaaccttgtaactggacttgatttttattttatttttaattaacacccaccggtcagatgctgaagtatgtctaccctaaacaaacatttgaactttcagctccgaaatttgcaactacttgtctattcatataaaatgaacttcctcttagaagacattagagcttctcataaacttataataaaatattatcatattccacatccaaatagttagtgaagattgcattgctaggggtgatccacatacctaaacacagcatgtgtagtgcatgcatagacttccctggcgccttcttgatgtaacaaagctgcacctttggaaatagtccctacaacccacggaacaaacaattaaacactgccaaaccagaacattgcaagacaatatgcttgatgaagtcttttatcaaatcaaatatattcactattcagtatcttctaggtagcacagacagacggagaaggggttttcatagacattgtattcacaaaattatacaaaagactgcagatattgtctttgaactatctttttctttccctaccatgttatagtgccaggaactctgtgggccagaagtttaccatcataaacctatttaccatattggacttattccatttaattatgttaccccaacagactatccggacaatacctttacaccgaaaaaaatcgttcagaagttgaatcacaactttcctaaatggaaaatgtacactagagcccaaataactaaccagctgtgtcgatcatgtcatctaccatcactgctacttttcctttcacgtcacctatcaaattcataacctgcagttgaatataatttaataatatcaattaaaaataaatgatgaaatagttgtagaagaaagaacgggaaaggagaagaaaaagacagtagataaatcacaacattgctaaaaagcaaaaatatcttgcatcaatgcatattgtaaaatgaaatgaatagcagatcaatgtcatactattatgtatatcaaggttttgtaaagctatataggtactggtgcattttcttatgtgtttgtcttgaggtgcaggcctgacatttaaaaaatgaaaatcttacaactaagataaacattaaatttataaacataaacatgaaataatattcttctaaattatacttgtttaatagtcaaaaaatttattcttcagagctagataatagagtattggtatcttaaatcattcaggttgtcacaactagtcaagaagatatagcaaaactaaaagtacaatgaaaaacctttaataacctagcattaaccactacggagtcgattaaaatgagaaggaacatcaataatagtcagcctcgacttgcacacattgtacctcagcaacattgtgcccgtgacgccttttatccacgatggctagaggagcatcagataatttttttgcaaaagcacgtgccctagcaactcctccaacatccggtgagaccaccactaaatcatctgaacatatagtcttgcttgcaaggtagtcaagtattacaggctgattgtgcatagcaaaatattacaaattagtagactgtctataagaaaacacaaaaaatggagagtactgcttcacagagacacaagatgattgcagaatgaagcagagatgactcccaaccattgttcagtatattaaatcatcaaaacacatatattaagggtaaaacgtcaataatcttgacatccatataagtatggactcatcaatcacattgctgcgccaaatagaaagcaaaccttcttacaactataatgatttgcttgtagtctgacatataccaatgaatttactggcatgttaaatgcataattgaagaaattcttctagagtcttaattgactacactaagaaataccaaatacacgagtacttcccagtcctcaacatcctagtctatccaaaatcatatgtttattgtgttgcaggaataggattgacatttcatgttagtgccaaactgtcttcagtgaataatacgcaagagagcccacaagtacaacagttaatattttttttacctgaccatagacgtgatcaacgggaatatcaaaatagcccatggactgcccagaatgaagatcacaagcaagaacccgatttgcacctgcttctgttatcaaatttgcaacaagtttggcagcaatggattcccgcccttgggtctgcaacacactcaaatttagatatataatcagccaatgtcaaccacactcaactaaatattgatgaaagagttgtacttaatgagaagccagtgcacttctatctcctttttttttcccaacatattacgaaaatgcaaaaaacaaagaagaaagtgggagagagagagagagag

SEQ ID NO: 219208 - DNA, 3325 bp, Cannabis indica
ccctatggcgtcggttcctttataggaaccgacggcatagggtacacggtttgctgacacgtgtactctatgttgtcagttcctataaaggaaccgacgccatagggcttagcataaaaaaaataataaattactttccaaccgcctctaaatggtataatgcaattttatacctacgatctttatcaaaaattcgcctttaaatgtcaatttcgactttagcttctttttataaatgggggtgaaaaacagcttctaaaagccaacattgtagtagcgtaactaaaagaaatttattttagcaaatatgtaattacagtgtgtctaattaaaagtaaaggtaatctaaattttcaattacactttttaaaatttaatagtaaaatgaaaagaaaataattttcatttcattcatttgttggttattgaaatatcatttcaataaaagatttttctacaattttagtagaatgataaacatcgttttagtgcatgatgataaaaaatttaataatctttatatcaattttttatacattttaaattttatctaaatcattactataataaagtttgggtaattaaataaatattaggtgtgattgaaatttataaaatatatatatatatataaattattgtatttttaaaatatattctaattaactatgtaattactatactaccctagtaattatatagtaatttacaaacaaactttaaaatgtattggaaaaataacagtggaattaaatttggatataatgaattacacaatttgagacatttttatcatcatgcaattatacactttctcattcacatagcaccggaaaaattgagtgagtgaatacaaaatacattgtatagttatctctaattactccataattttccaaaaccccgtcaataaaatttgatataaatggagatacaccgtctagttgtttgtttctgaacaattctagctattcactaaccgcaattcttgatacacatcccttactcttctcttgacttggtgaagaagtggtttcctccccatctcaactgcatcaaattgggctgcaatgctcttgtgtggatggaagatatgtgtttagcgattgttaatcgtaaccaccttggtgaggtggttaggtaatgactaagagcttatatttcgctaaccccctttgtagcaaggtcgtagcttgttgtaattatgaaaagggactctactgtggttatcaatactcttaatagtgtttgtgttatataagagattgataactatgttaactatcgtaagacttttctcatattttattaattgtattttttttaagattgtaaaaacttataattttttgatccataatattgtaaagtgagcgtttacccacaaaaaaattggttaggagatatatcttctttaccgaaaaatattttatgtaatagctaaaaagtctaatttagttttatcaatacttttttttccttaaaaaaactgcaagtcttagaaacatgtcgaatttgagtttgaaataaatattaagataatgtcatttgaatatgttatagggaaattctataatgttcttcttaaaagggatatatcgatacatctctatttgttttagtatccaaaattattttttactcaaattttttctcataattatgtaaattattgttatttaagacatcctataaaactttaagaaattcgaaaaaaaaatttaacacactgaaaatggtgttcaaacagtgtattgcacacatgattattttattttggataaatagcggcataagtacccaaagttttaagtttgtaagtggcataatctcaatgtttatttttagcgacataagtatccaatatttgtaaaactataattttttttctaatttcgtccgtacaaacccggttatttttttaaacaggccacatataaaatctagattcttgatcattgagtctagataaaaatatgcagtatcagttacttccaaaaatttcgttaataaatttaaaacggagtctgtactgacaaaactgaaaaaaaaaattacatttttacaaacattaagtacttatactactaaaaataaatattaagtttatattgcttacaaatttaaaactttaagtacttataacgctatttacccttttattttatagttgtgtaaaatagaatattcgaatattgttttttttattataaattattctgaatttttcaaaattttgtaaaatatcttaaataattataaattatgttatgctaaaacaagtacatggtacatcctttaaaagggatatagtgtaaaaccacctaccttatgttatatactacgaattataaataaaacataacatatgatctggagttgttatatatatacaatacaatggttgacccaatgactttacaatttgaccaaaagcattatggaaattgctatgaccttaaacaaaacaaaatgtggttaccttttaacttaccacaaaaaaaaaaaaaagagtaagttttgtaacattttcaggcttttacttgagaaatcttaatgggtttgagaatgcttttaccacgcaaagaggaactgttttcagagtcttgtctttgcgacctcaactttctcaaggcttcatgacatggatcaaaaaattcatgtttaagagcttcttctgcagttattctgagtctagggttaactgtcaagcatttgtccaccaaatcataaagtgattttggaatttccttcaagaaacttggtctctttgaactcatttcacaccaatcctcaagctttacggatggcaacgactccaatttatacaagtcctgaaacaaaaacacttaaaagtttcaatcttctaactactaaaataagtaattaaaatgatgatgacagtgaatagggaatagggaatatacctctggaaatgaagattcacggttatgtagcttggcgacttcccatatttcttcactgcctcttaactttgctatgtccttcatgtttctgaccaagatagtgatatgataaataagtacaattagattaaaaaaaatatatacagtttatagaaacgatttggataaaaagctagtatacacatactgttccggatctccaaaaaatggtgttcttccaaccatgaggtagagtaaggtgaccccagctgaccatatatcgatcttagggcattgatagggagatctcaataaaacctgcaagaaacagaacccttgaaatgagacattataactgtttctaaccccaacatgaaatttgagttgaatgagaattatcttggggcaacaagatataa

SEQ ID NO: 219209 - DNA, 4777 bp, Cannabis indica
ttccctctcaaactttgtggtataggaactacaccaagtttgcttgttaacaggtgatgatgaccatgagcaagacttttagtgaggcaatctgcaatttgctcactggatggaatatatctaacctctaacactttttcaatgatcttgtcacgaacaaaatgtatatctatctcaatatgctttgtacgggcatgatacacgggattggatgctaaggcactagcacccatattatcacaccagattattggtgttgcaggcaagggaaactcaagttcttttaggaggctttgaacccaggtcatttcagcagccacctgagccaacgccctatattccgactctgtgctggaccgtgacacaacaggttgttttctagaggaccatgaaaccaaggtgtcaccaagatacacacatgtaccagccacagatcttctatcatctgggcaacaagcccaatccgcatcagaaaaaccagtgagaccaagcctgtctgagtatcttatgtgcaagccatgatgaagggttccctttagatacctaaggatgcgtttagctgcactccagtgcaccgttgtcggggctttgagaaactggctaagcttgttcacagcaaagcttatatctggccgtgtgtaagttaggtactgcaatgctccaattatacttctgtactcagtcgggttctttagagcatcaccatcttcaatagacaacaccttcccagtagccataggagttggacacgccttgagattcatcatattcattttcttcaatagttcctcaatgtatttaggctgactgagatacataccagtagcatcccgattgacttctattcccaagaaatagtggagagctccaagatccttcaaagcaaattgtcgatccaacttgttgataaacatttgaaggactgttgaattatttcctgttataattatatcatctacatatattaagacaaaaattatgtaagatgatgtcttgagaaaaaagagtgatgaatctgacttggagtttttgaatttccagctgactagagttgctttcaatttgtcgaaccatgctcttggagcttgtctcaatccatagatcgatttgattagtttgcacacatggttcggtttgcttttgtcttcaaaaccacggggttgcttcatgtaaatatcttcagtaatgtggccatttaggaaggcgttattgatgtcaagttgtctcacctcccattctttggctactgcaatggataaaacaattcggacagtggcagctttgatgacagggctgaatgtctcactgaagtctaccccaggtcgttgagtgaagcccttggcgaccaaccgagctttaagacgctgaaatgagccatcagcattccttttttccttgtaaacccatttattatcaatgatgtgcatatgaggcagccgaggaactaacttccaagtaccatttttgatcaaagcatagacttcagaactcatcgcattattccatcctttgtgttgtaaggcttcctcaatcgactgaggttcactgttgttgctgattttcttggtctgagctaggtaagttttcggcttgaagatgccggccttagctcttgtaatcatagggtgcattgaaacaacagctttggtgtcatgatcagcagctgaagtgttgacaggatcagctgtcgattcagaaatagttgcatctgtgtgttgctgagtttggacatcacttgacctgcccatattaccaagatctgcaataacatggtcagtatcaatcacctgaattgtgctaaggtctggaacagtttgcgaagcagttggagtgccatgatcaacttcatcagtttgattgttccctgcagcaagaggagagtcatttcgtgagggtgactggctgtttatgtgggaagaagctgtccaaaacgggacaagaacagacactgaagtttctggtttgcttgtatttaggaaaccagtcatgaaaggaaactcatcctcgttgaatataacatcacgagagatatacaaccgacctgtactggacagacacttgtaccctttgtgcttgtcactatatcccagattcacacacttagttgagtgaaactgaaatttgtgattttgataagcacggagacaaggaaaacatgacactccaaagactttcaagaacttgtagtctggttgttgtttaaacaagatctcaaagggtgttttaagtttgaggattggagtaggaagtctatttattaaatagacggctgtctggaaagcgtcccaccagtatttctgtggaacatgagcttgagccagcaacgtaagacccatttcaacaatgtggcgatgcttacgttcggcacggccattttggccagaagtatgaggacaagggtgttgaaaactgatcccatgatcacttccaaaccgaggaaaaccctggtactctcccccccagtcggtttggacacgtttaacacgacagctaaattggttttcaaccagtaacttgaactggacaaaagcttcaagagcttcagacttggcttttaaaggataaatccaagtgtatcgactaaagtcgtcgataaagtgaatatagtacctaaaattggtattggacatgacagggatggcccccaaatgtcagtgtgcacgagttcaagtggggcagccgccctctttggattatttttgaatgggagagagtgagactttcctaattgacaagcatcacaaaaattcagattggaattaatatttttaacattgatcttgtgtaaaacagtatccaagacacgattagatgggtggcctaacctcctatgccacctatctttgattgaacataaagactgactagccataggctttgttacatttgactcgacagaggacacaactaaaccagagaaaacagtaggacatgagacggatttgagtggtgatatagctgaagtaggtgcatcaaactgataaagtccatccttaagcctccccttgagaactacttgccctgtctccttgtccttcacaaagcacaaatcagagagaaattcaacacacacgttattgtcagatgtaagctttgaaatactcaacaaattcttggtaatgctaggaacatgcaaaatttcctttaatataagaggagaagcagatagagtttgtagtgagcctataccaatatgatgaatgggaagccgattcccattggccacagtgaccttttccttaccattatactcttctttgagattcattttgttgatttcagccgtgatgtggttactcgcaccactatcagcaaaccaagcatcatgatcgagagtttcagaggtggcagtgaaggcagctgaggtgttttgagacttattctgattgttaaacccaccaggtggattccccatgtagctttcatcataccggttgtagcaatgagctgcggagtgaccatacttgccacaaacttggcaagttggacgaggaccactagttctgcctcctcttcctctggatctattactcgagcctctattgttgttgtggccacctcgattgttgttgttgttattccctctgtttgctcctggatgtgcgcctttattggctaagctagcagagggattcattggtactccagtgagctttgaagagccagaaaaagagtggagtctctccattttactgtcaagacttaatagcatgtcttgaagttgttgccatgtcgtagagccgcgagcttcaatcagcagcaccatgggcagatattcaatgtcaagaccagacaaaacattggatataagttgattttctgggtatggttctccggcaagagcgagaacatcaggccactgacgcttttggcgcaaataatctgccatggataaagctcctttcctcgctgtttgtatctttgttcgatattcatccattttcgccttcgaatgtgctccaaataagttttcaagggctgtccacaaggaggctgaggagtcacaacccattacttcgcaggcgattccctctgtcattgatccataaagccagccaagtagaagttgatcgttcacgatccattgttcaaacgcagggttcacctgtccaacagaactaacactgccatctaggtcagttgaaggggaaagaaattcttgaggtttgggtaaagtacctttgagatagccatctagccgatgtcctcgaactatggcagagaccatcgttctccacaaggagaagttgtttcgatccagcttgagagcaaatggctggttgagtgtgcttccaaattgaggaacaatgatattcggagctgagttttgagctgaaatgttcgagacaggagtctgctggttccctgcaccctctgctctggtggcagagcttccttcgactggtgtattatccatggatcacggcacacaccgattatgctctgataccaacttaaaattataaaagaagcagtagaaagaaggaaaggaagaattatgaaaactcagctcaaatgagactgaggttgcagcttgaatttatagtgatcgattacattggagggaatattctagagtaaaatacaataccctgacagctcagagtttgttacaaaagataagatttgataaagatattttctaggttaaaggacaatcattgtaacggtctgaaatgcccaaacttcttggactgctgtagcagcatctttgcacttgggccatcatcactgggctacatttgttgggcctactggatctctgatatttctaaca

SEQ ID NO: 219210 - DNA, 10086 bp, Cannabis indica
tctcaatgtgcttagttcgctcgtggaacacaggatttgaggcaatatgaaaagcaaattaattatcacaccacaattttgctagaactgaagttttaaacccgaattcaatcaaaagctgataaatccatactatctcacacacgaattgtgtcatagctctatattctgattttgcactagatctagacacaacattttgcttcttactctccaagagatgagattgcccccaacaaatacacaataaccttaagtggatcgtctatctacatctttgtcaatactccttagataaagtcgaatcatcttattccactccaaataattcaaaccagtcaatttatggttcgtaattttaaacatcacgagaaccacattagaaaaaagtagtagttttgaatctaattccgtctctgccataacctcaaaaacaaatatcgaaagagaaaagaaagaatcaaacaacgaagaacaagtaatgaacacccaaatatgaagaagggagaaataccaaactacaacctgagatagatgcaagtaggcttagaagaactgaaaatagaaccggaaagaaaacgtcatcacacatgcccccacgcgtcggcacttaggatgtgtgcagaaacttcaggcggcatgtgagacccacgcgcagggattccgatgaccggacttcgagggttttgagatcgacgactgggtaagttttctgagtgggggtgagaatagaaaaacactccaaaggagttttccgagaaataaccccttaagaaaagaaaaataaaaactccaactataaatcctaattttgtgacagcccaaatttcgaatttcgaatccctaatctaaagtggctctaataccatgtaaaatatggtgaattcaattgtattttattcaatataatagctagtatttatttacaaaactagggagactaaataggaaactagaaagatattagaaactaaataatatatattaacactaaccatcagtacagaattactttataaaagtcaaatcttaccaaaagagtttactagactactacatagaagattgccttattgctgacaaaaaaaatcagaattcaaaacttgctataatatttaaaactaagaaaaattttcttttcaagaaaaaaaaaaagaagaaaatttctcagatcatgtgaagttaatttattatctacaagtttatatcgctgcctgtttttttttcatcatatgcagaaaatacaccataagtagccaggtctcattaaaataacaacatgtttaagttataacattgaattatgtgcctatgtaaaatttcatttgtaggcactcaccatcaaaggttttctaattgaaacttcacctagtacgtgaatttcaaaataatacattacattctatgggattataattttccttagagcacatatttgaaaaatgttgtgcaaatacaccggagaaactagatagcacaacgaaacaaaaacagtgaaaccatctttaacttaataaactgtaaatgacatccataccgctttaccagtaggcgttctcaagcgatctgagttgccaaaaatacaagagctgacagcaatatggcatctgctcatataatttgcatcatcttcagccaaatcaaatccagtacttgaggaccctttaggacctttaacaaagccacaatttattttttgatcacgtgccaagaatgaatcttccctttcttgcaaactctgatgccctgcaaattttggttcccagtgctccaacccatcaggtttgtcctcaaattcagtataatgcaagctaaacctagcgaattttcgactttctagaggctctataagatgtgcagtagagtttgcaaatttaatctcacaagatgaacctgaatatttgattataagaagttaggaatattacaaagaataagaattggagataatattaaaatcaccagcaaaagcccaaataaacatcctttccaacaaggcatgtccaaagtactggtcatgagacagccatttttcacattccagccagatcagtaacaagcaaaatcaacattggactgtaacatttattctcacatcaagggtatttattcctctgaatacttctagattgatataaaccaggctgtaattttcaaatcaattctaatgttttcaacatccacaaaaacaacacaaaaaatgttaattttatttttgtaatttcgcaagaacttaaccctctacatagtgaatgtatcaaagaaatggtttgcaacatgaataagaatatgaaagacgtattaaaaaagtcgagtcattcaaaaaaatactttcattttggtcattctaaaattatatataatacagctttatattaatttctcagatcggaaagattgtgaattgtcagttgacataacatctaatatcagctctgctttcatgagtactgctgacaagctttttctaatagcttcaggaccttaatccaatattaaggtgcccgagaagtaaaataaagacaaaaatgatagaagaaacatatatcactgcacaaagaattaaaaaaacatagagaagcataataggtaaattaacaaaccattagatggctacattgactgttacagtaccaaactactgatcacattaatgtacacatcactaattatcttgatgaagttttgtttgaaggtagtgactcagcaaagaagtaagatgttcgaatgaattaccaattgataggtccaagctactaatttagtgagccaagttgatgatgatgtttgataataaaaattacataatcattctatttacaaggtaatgtttgtttggaagttgaaacaatatttataaattaattgagcataatattaccggaaaactttcgtcgctttcctttcctttttaaatctgaccgtgacctttttgaagattgaccatcgctgacactgaaacctctggacttcttattagcttcaactgtattctgagagtgctcagaagaatcctgcccaagtgatttgccaaaagtgttctcagtcttatggccgttattctcattatgtgttttttctatgtcaaaaggatcccccttgtcatgtctagtatcatcatactcatctccatgagcctcatgataatctatcccatcatcatattcatcaaaagaatcaattagatcattttgcttttctgaatgtttgtcatccagctgctcatgttgactgacgtttttcactgattttcgtgaattttttaaggaggcctcatattcagcttcatacattttcaactcattacgcccagcttcgttgtacaatccaacccctttcccatctgaatccttaagagaaccaagaataacagacttcttttcaaggttctttaatttcaccgacgcaccactactatctataatttcatctctagcacctactctactgttctccacagtatcctcattgtaatcgctgtctcttctcctgtcatccctgtcccaatacctggaatctcggccatgaactactgaccccttaccaaacttgaggactttataagtcttcgtccgtgtcacgttggctaaaaaatcaaggtcagtccttaaatcatcatcctcaccatgaaaagtatttacttctgcatcagcaaaataagtaaataaataagcaacaattcaaatcagttgacttctagctaaattcacaactatactatttgtgaataaacatactagctcgtctctaataccagataaagcaaatattggtttctatttataactattaacctcataacttctccaattctaagcaaaaacaacataagcgacagagatcaaacattcccaacacaaaagaaagcacagataagataacgaaacgatttctctcagcaaccaaataatgtcatcagaaacacgaaatgcacaagaatcacaaccgagataaacctttcccttcagtatcaacctttgtaatcaaaatacacaaaagaaatctgaactggaaaccgaagcaataccttcattttctttggaaatgaagtagtagaagaagacagtgagaacgagaaccagcgaaagaacaacgatgacccagccgatcgagaccccaagtagtcctctactggatcgacccggtcggcgaattcgagcctgtttgtgcgaggcggagcggaccccgacggtcacgtgatccgagacgccattggagtggtggttgtggtggtggtggagatcgtggacacgtgagccgaacctctccgctcccgactgcctgtatggggccattgtagcattgtttcttccaccaccaaactcagatcacaacacaaatatttttctcagtcttgcattttccgatttatctattctattctcatttttaattaaataattattaatagtttataatataattttaagaagggtttttggtttgggtttggaggaagagttaaataataggaggaaattattatactatatatttctttttggctatttgaatgggttaatgctagcaaggcaagtctaaattttcgaccggcatctgccaatttgacttgtcaaggtatgaaagcgtataaggtttgtcctatttatctctagaataatgagactactattcatgttctttggctttttccttcgcttaagtctatctattttgattggatcctgaaagggctcgattctttaaaggatgcctcttacttttatgcattatttttgggttgtgtggatattttgagtaaacagggagggactggaggagttaattgcccttagttggcgcatttggcataggtgtaatacttttcttcatgattgtaagcttctccccgatagtatggttagttcttgggccattaattatctttggaggtaccaagatgctaatgttgggggtcttcacttattggtcagccttctcgtcaggggctgaatgaagtgtcttctacaaaatccaatctagctttaggcaaggtcaacttgtttgtggattctggggtttgtaatgaagaccgcaaaatggggatgggggatatggcgtccaatcttaatggtcatgtcttcttctctagtgcgtttccgagcgtgggatcttttgagcctcttgttgctaaagccaaagctttgcttcaaggactctccctttgcctgcaattggggtatacatctattactgctttctctgattgccagcggttagttcttgcaataaatagtaaggatcctcatcttaatgagtttggtattgttcttaatgatactgcttatgtttcgaaatcctttaattgtatatccttgactcattgtaaaaggtctaagaacacagttgctcatactttaacaaaacatgctctggatttagatgagtcacgtgtttggtggtgggatctccctatggatctagttgtctaattcttgagactcttttgtatcttgaaactttcaaggctttgctccttttaatggaattgttctgttttctttcaacaaaaaaaaaaagaataattaaaaaagacataaaaataacaaaacaaatgcacatatatgcaataaaaatattttctagaataaattgaaaatatacatgattaaaaatgtatataaactaaacaataacgattctgcaaaaaataaaataaaaaaataactaccatacaaatatagaacacctaaacaacaacataaaaataataataaaataataaaaatacaattataaatcaatagaaaattaacaagacttcaaccttgtttaaatatgcaaatcattcataaatcaactctaaataaactataaaatatccaaaaaaatgtactacttttactaatcatataaaagagaaaaaaatagaaggagtgctcttaatttttttgtaagaaagaaaaagagtgttaaaataaatatgagaaaatgatgaaagtaaaagaaatatattttagtaaaggttaaaagaaaattgattaagattttttttatataaaatgtgattaataaagaaaaatagtttgaactttgaaatagttagagtgagaatagtaaaaaaataaaaaagaaagaaaaaaaataaaataagtgtttgtattttatttttttagaaaattaataaaataaaatttgtgtgagagtgcaaaagtgttaaaaaaagaatataaaagtgtacacgtattatatatttgtatatataaaaatattttttaagttttaataagtaaaacatagtaaaaagaaagaataatttgtgacataaatacttaagtttaactctccgttataaataaatatttaagtttatttttttgaggtaataatacttaagttataattatgaaacttctttaaatacttagctgttaagtgttaagtaaattgtcacgacaattcatgattggtttaggtcatgaatttttattttttaaaagaaaattaatttaaatatacccataagaaaatgacatgtggataatgacttgacatttaatgactagatacccaccgagttttggaaatataacttatgtattattaccgcaaaaaactaaacttgattacttatttagagctaaaaattaaacttaaatatttatgccgtaaattattacaaaaaaaaaaacaaaaatcaagtagagaaagtatattaaaatataaatataatatttagagaaattaccccatatgttgtttttttaattttttttttttaaatttagggtttgggtttctaaagtggttgacgctagttgcaatagggtttttatacgattttttgttgcaatttaagttgcaaagctagttgctaataagagattttatgtaaaattctgtaaaaatacaaaataaataaataaataaagtgtaaaaatgtaaaaatgaaaaaaatcctaaaatttattaaaaaaatatatataaatataaaatttgaaaaaaaattaatctttcatttaaataccccataaataaattgattaattagaatttttttgaccactgaagagtatttggaatcatcggagaggctacatatccacaccaaccaaaatctctggattcgcaaatctcttttctcagttagctccttcctgggtctatgcacctcctttaggtactcatcttcacttgttttggcctctacttaacctaagctatgtatttatctgtaaaagtagaaattttgaagctctttcctgaatcctgcctcacctgcagttgttgttgtggtcaccaattttaatatttttgttttggttttttctttctgttatttcatgaatgaataagcacaatataaggatgctcgttgtctgtgaaaggtttagttatatatatatatatatgtatagttatatttgtgtgatttcttttcttgtgggattttctttaatgttaaggtgttgcaaatcttgtaattttaagacccacaaaatctacaattgaaatttccaattttcgaccacagaatggggttggaacattggagaaaggtgttcgaaatcctgtaaaagggttttaaatttttggctatataacttcattaacttcaacaaagctaaattatgatgcgtagttcttttataagaatgaaaattgcagggtttttttcttggtaatgtttttcgcaggcttaatagcatagagatctttgagcataaaaggagcatcattaagactgtactgtccactagtttaactctatttctgtattggattgctcacataattcttttaactttaagttcttatgtttataatgcatatgcgggttaagagttgttacttgtgggtttgtttgacactttacattatttcccttaaatattgaaaagaaagtgtcacaacgaatccaaatagtaacagtgaagaactttttttcttgcctttattaattgagaagggcaattaaagaaaggaggaaaaaataataaaatcaccaaaagaacaaaaagaaagctttacctagaacttgtaatttttttacttttcgacagaatcccagagagaagcttaatttatttttcttactttctcctactgagtaactgcagctaattcttttacttcaatgatctggctatttcttacttcttagcaaaatgacaactacatttcattttcccaaataaatagttttctcaatcattacatcttcatatctaacaagaaaaacagaatctgtttcttcttcatttaatgtgttgcggaccaaagagttcttgttaaaatataaagtattggtattttatagacagggttttaaatattcaattatgtatggtctagcatgtggaatgtcaattacttatgctctaccaattgtgtattcgcgttcagtttccagatagttacaataatcgagtcatgagtgccaatgtgcacatttttattttctaattctgtattcaaatattatactctttcatgagatatgccattgttttcatgtcattgcccttttgtttgatttacgagtatttacattataacagtgcagggatgctaggaaagtcacttgcttctcctttactgacctacaagtatgcaccacggacagtcttttcgacagtaagtaccaattttttttgtctgtacattatttggccattgtatcaaacttgagattttcgaatgtgtcgttgattttcaaaactataagaacttcgattgcaagctttaatatgtttctttgatataattgtatggttagtatgataactgtttcgtatataacacacctaaattatgttgagaccctcctgaaaggatgaataaacaaattgaagaatctggtggaagactttgaactatatatgtagtcttaaagcatactctggggaacttcttatgttgctacttatctcatagtatcttcaatgattcttacgtttattgtatgaacttccagcttgatctaatgtatccttatctgcttcagccattcggggttgcactatttaggatattttacacatattttctgtatctttacatctacttggtcttggtgaaatctggcattgttttttaagatctttttgcagactgatgttgtaacaggcacaaccacaggaaatattgcattgctcaatgtaaatagtcattgtcagaatggagtcaaagtctcttggacatcgtgttcttcaaagaaatgggtattgaagtcaactgcacaaattgagaatatgatcgtaactgaagaagataaaaagcagtgggaagcatgcagggaagctctgtgtacatataaattcagcaatgaggaagcagataaaattcttggaaaagcttttggccagatacactcgccttactggggtgaagaacgcaaaaaggttgttccgaaacttgaacttgtgaatgaaattttggactacttaagaaatttgaacctatcagaagatgatctcgcgaaggtgcttaaaaaatttcctgaagttcttggatgtgatctagaagatgaggtaaaagtcaatgtgcaggttttggagaaggaatgggaaatcaaaggaaaaactcttcgaaaccttcttcttcgaaatccaagactattgggttacaacattgactgcaagggagattgtgcagcacaatgcacgcgatgctgggctcgtttttaagctaaatctaaatctcttttgttgagggaagtttttgcaaccaataataaagcatcaacgtatgtatatttatgtaaaagtgactcccatgttcaaatcctacttagctggtatatggattaatttatttataccgatttattctattcaacattgtattttaatggttccaccataatacaagttgaattgctttgtaattgccactcaaacaatttaatgcgttaaaaaatattattgccagttttcaatactttcctttaccatgtttactaaacattgtgaattggtctcctcgaacctgactttcctccctgtgcaaattaaatatctgattaatatatgtcaataaatgttaagtgctaaattttcaattttaacccatgtatggtttagagtaggtaaaatccaattcaattaaactgaatcgattcaatttaatctaattataaaaaat

SEQ ID NO: 219211 - DNA, 3308 bp, Cannabis indica
tttatccttcttgatcttcactaaccatctttgccattcttgtaaaatcagttggccaactgtttttcccaagccatatgcatatctgagttgatacttgctgagacagacaacaagcaaagaagaggtggctgtttgactcaacttcagccctacaaactgggcataaaacactgtcaagggaaatttttgaattgagcaaaatatcccgagttaatagttggtcattggccgcttgccagaaaataaacctgtgttttggcatgttgtagttgttccatatgctgctgctgatcttaaagactgcttgttgtagcttgctgttgtacaacatctttgtgttgagtcggcccttagcatctccttcacttgtaaggtcatttggagtaaacttgtcccttaaatgacaaagttttctccaataccaactagaatcatttttaaggtcataggtccaaatggaattgttcttgagatatatattattgacccatttcacccaaagtatgtcactcttggttgaaatggcccaaatatatttggctaggatagcttgattccatttgaccccatctttgaatcctaaaccaccatagttcttaggaagacaaactttctcccacgatgccacatgaagcttgctcctgttaccattccaaccccaaagaaatcctctacaaagtttctcaatctcctttgtgatactatgaggcaatatgaatatactcatccagtagttgcgaagcccaagcaaaactgaatgaatgagaagagccctacctgcaaatgaaagatgtcttgttgcccaagtgtgaagtcactgtttgattttcttgataatcaccccgcaatcttctgctttccatttggttagtcttagaggcacccccaagtacttgaggggaaaaacaccctctgacatattcatttctctcaacattgcatgtctttcctctacttttacccctccaaaatagagttgggatttgttagcattgaaaaaccgaaaagaatagaaatataaaaattcagtagattgtgtaatttttttatggcaagaaataaaggtaaaattgtgatcttagctttattgttgattttgtctgagttgtcactatagagtaatataatttattttaggaaagtttcatacagctctaaaaacgtgttgtatatgtctttagggtttttgtctgttataaataggacttagagagcaaccaaataaattcatctcttatagttatattgttttatatttttatatttgtgagaagagagaatttcttgtgagaaaaccttagagtgatatactaggttttaatttctattttattgttcttagaatagggtgaagagctttgttaaacaagagaagaggtctttgggagaagacctgtccatgacttataactttaggagaaagtaagcatacgtatatcaaaagctgaagggagtggcgtttagaaatcatattggcaaagtgaattacaaaagattgcgagaattcattaaagggagtctaaattcacgtaggtcaattttattttttgtaatctttgatactttattactaatggattttattttttgggcgtggccccgtggactagtagtgtttgaaagaacaccaataccatgtataattctcttaagtcaagtttaaaattttgcacaatttatttttgtttttgctctgttacagcaagctatctgtgttctgcagtaacaaatttttaatatgttactgcaagtcgttatagtcgcattttaattaattttttttaaaaaaataaattattacatacaaaaacacaatttttcaagactaatgctaattgtattaattgtcacatacttagactaacgattctccaccttgacctctaatatagttttaaatgcaacattttagaaacacactagctactttggcaaaatcttgagtagattcaaacaatgtttgaattttgaagttggtagtgtctttgtaagcatatcagaaggattgtcttcaattaatactttcttcagctgaaccttgccttctgagatgatgtctctaataaaatgaagcctcacatcaatgtgcttagtcctctcatggaaggcttggttcttgctgagttgtagagaactttgactatcacagaaaatggttacctttgactgttctagactaatttctcttgttatacccttgagccataaaacctcttttacagcctctgtgcatgccatatattctgcatttgtagtagaaaggaccattattgattgtaggttagctttctagcaaatagtgtacccatttagctgaaacacatagcatgtttgtgatcttctcgagtccaggtcccctacataataagagtccacaaaaccaatgacatcaatgataactttggtgtctctatagatgagtcctaccctagttgtacccttgagatactttattgtctatttcactgcattccagtgttcaaaacttggattgctcatgtacctacttagaccatctccaatgggtggggtaaaatttgtgctaaatttggctcaaaaaatgagccaatattatatttgcccaaaatgttataattgtgctccaatgcttaggtgtaaattaattttatttttaatagaaaggtgtaaaaaggttaataaatgattaaaaatgtaaaaaatcttattaaatatataattaaaatgtaaaaaattattaaagtcatcaatgagtggcaaaagagtaaataaaaaagtaatatttattgtggtataaaatttagccaatgctataatttgtgccaaattcgacacaactttcggcttgtgccaaatttcaaccacattatacaatagtaaaagttcaattttatgaatatgagctaaaaaaatacatttaaaccatctttatagcactccattagagatgttgtcacaatgttaacccaataacataggtttggtctggtacagaccattagatacataatgctccataccacactagtataatgtattttttttttctgttatccaaattttttgctaggtgatgtggcacacaatagagaagacacatcatcacggagaagatttctgaaatgtactccgcaaaggaagcaaggccccaagacgcccaaggtggagcacttgggcaggattcaggtgccttttaggtcatctcacactgtaatcctccaattaagaattacccttcgcaagaaagtggtctgatacacctcgcacaaagaaaaagtgaattgtagaaggccccaggtgtggagtatatgttggaaatattttac

SEQ ID NO: 219212 - DNA, 3257 bp, Cannabis indica
tatccatagtccataaaaatctaaagtccatattatatatataaaaatagtaacaaaaaaaacatatatataatatatttaaaaattgggttggcgggcgggttcgcgggttcaacccgaaacccggtacccctaaaatctcaacccgccaacccacccgaagggtaccgggttgaacccaacccgcccgaaacttttttaaaaaaatttttttgcgggttcaccagttcgggttcgggtgggttgctcgggttcgggtcaaacccgctcaaaatgttcagccctagatataatcatgtaaaagctataaatagttaataatgtttatcagtgtcgagtttgaagagaaggaatgtttaatgatgtccaatttgaagagaaggaatgttgtttaaccatatcatgtcattgtaaaaaggcacttcgactatagtgtatgcgtgtcggatgggtcatgcttagtacctcatacaatggagacaagagggtttgttggtgggactccaccacatatgcaaacaaaagaaacaatttgttttcacatctttttagctcttttttattattatatgattcagaatcccatgcacacaattatatatttctcacgaacatgtgtttatgtctcaacaaaacacagaaattgtccttcttttgaataattgagcactactatagcaaatgagatatattactttttatgaagcttaaatcatacataatattatacatatttagactgtagagagagagtgagagagatgtgtgtgtagttttgtgtttaattgaagatggctttctctgtagtaataccctaaaaacaaattgtgagatgaatcatgactggctaaactgttacacataaccaaaacaaatgagaacagaattcacctaaacttttggtttaagaatgtggcgcaactgtgatttttggctttcaattgttgcttcagtaagtggaagtttggtcttcacaacattgttttggattgcttgtgattgtggccattcaatgcgccccttcatccctctagttatgtgtggattcaccaattttgctgagatccattgtgctcttcttttcggctcacccctagttggggatgaccgcagtttcgcacatggcattgtcccatttgaaactcttctatcaccctcatcaccagagacactcttgtgaatttgagctgatctcaaagtcttcgcaatagatgatgaatttcgcttcgatttctttcttgatactgaacttggagagcataatttcactgcatcttcattacttccaattctgctatggttaactcttgtaagggaggaattcaaagtttctagtgaatgagaagagcacttgtcctttgtgcaacttatggatgcacaagatctggttttaccttcatctataacgctgttgtagtcgctgaggcaattcatatacaattgaacaaggttcttgttacaaccattgatctcattaggactactgcagtgtccagctttttcctcattggcataacattcctgcaattcctccattatagagtatatatcatttgatttgggaggaacatatgagaattcctccaattgatcttgaatgctcaatgatctcactgctactttaaggatcctttctgcttctcttaactccatctcatttaaggatccacaagctgacctcaagaaactctcgaattctaagatcagtgagttcatcacctcaaacttttctccaagagcaagctttgcatcaaccagcttcatctgaactcgttcttctctccaaacatctgccaactgcaacatcttcctctcttcttccaaatcttcgcgacctttaacatattccatcttcaatttctcaacttcagctttgtcttcacctatcctttcagcaagtttatcacaaacttcttccgcaagttctctgtttctcctctcttcttcataatccccaatcaactggtccgcggacagcttgatttcggctagctgattcaccaacttggcattgacaatttccatcctctggcggcttttcctctccttcgccaattcactcattaagtctccaatgacagcacaagttttgtggtgttctactctttgccaagggattctttcttcttgaatcttactcaagagctgtttaactttcttctttaaggacaacttctttgcctcaagctccctaattcgggatctgcattgagatacctctgtttgcagggctgaaattattgacacaccactactttttttctgtttgtgatcattcttttggttgcttaaaatgtagtaaaccccactcgatgtttttgagcaacgaccattgctgccattttttgtcttcaacacacaattggaatatggcaaagaagattcaagctacaaaattttacacaaaacatgtaaaagacaagttagaatatcaaagtttaatgttaagatccatcagtaaatgggtttactaattgagttttttcaattttatattcagatgatttgaaaattttgaatcatcaattaggtgagaagtaaggtttacgtcactatggggttacattcgtatccataggaagcaatttaattatcaaacaataatatatagcgattattggacaaatgaacagagattgatccacacaccaggggaccagaagaacgacgatcacgagttggtggagtgaagagagacttatcagtaaatgcgccaaaagagaattctttaaagtggagatgccagaggctggcggcgagttttctggcggagaaacgaagaacagctttaggcggtggcgacgaagaagaagaaccgcggcggaagttccagggaatgagcggagtggagggagctgttctgagtatgcggcggcgtgaattggagtggttgttgcggcggtgaagtgattgcctggaagagggccaagccgagtggggatcgggctgggtcatgactcattgagaagccatggaagtgagaaagagaagaaaacagacccaaaacgcaataaaaggccatatagagatagctatatatataatgcctacgtatccaactggatttttccaattttcttttcttttttatttattattttcccaatcacagcacgtatttttcatgtgttattcttgtttgtttttatttttatttattttactcctaaatatagataatagatatctctttacatgaaaaagttgggtcaaaaaaaaaaacaattggacaatcttttttttttttttttttttac

SEQ ID NO: 219213 - DNA, 2438 bp, Cannabis indica
tttcttgacacgaaaaacaacgtggatctgagagtcatgttgtaattttggaagtaagctttgaccttccaggaaggaaggctgaagttgcataaaaattcaaccgtagacttcgcttgaagagatcaatgggttaaagagtcattgggagtaaagcagacttcaagcagtccttcccttctgggaaagagggttgaagacatgtgacacacccaatgatctttcactcattgagagcagtgcgcatacgtctcttgagccccaagaagctcaaggaggtgcatacttacgccctaggttctcctgggcagtttgtctcctctagtgaagtgtttgtacccatggacatcgagccaatgaggatagtatcattggcggccccagatgcagagttaggaggaggcgatcgggatgagacaggcgatccaacactaggggtgtgaatatcgacggtcgggcaagagctagtcctccaaaccttaccaggaggacccatgggagaggcattagagggggaaccctcctgttcctcgtaggtcgtttgtcgcaacaggctgcccatatctacaaaaacacacaaaaatgattagtaaaatataataacatgcaaaaaattgaagaaatggaataagaaagacaaatagcgattatcaccaagagagtcacactccctaattggccttttctttgaagactctggcatagtactttttgcttttgctatcattgctggcctcggagatcccaagggtcgcgggatttctagtactcagctagaaggggtaacaacaaagttaggatgtttatatgcttcttgaagttaggtagttcggctaacgtgcgagccctctcgtacatggcaaggctgggggaaggccaaccgaacttgcccacttgttggaatttggtgtgtttagtcccaatgtccttcatcaaaaaatagatacttttgaagtcatgttctttcatcaccttatctacgccatgaaggaatttaatattcctgtgtgcatgctgaaacccgtaatatcctgatcgatgctcgatgttgtactgtctcagatcaaagagatagtgtacctcatggcccgtcagccacttccatcttcaacttgtataaaacaaagatgtcgttaaggactcgcatggccataggggagaactgccccagacaaatggcaaaataatcaaccatatctctgaaaaaattatgaagggggagtgctccccataagtaatatggcgacgggaccatgtacacagtccctctacaggatcatgtgctaactgatctggggaacggagtatcaactagaaatccttaccgttcacagtcagatcttccacgtttttggaattgggtctcactaagaccactaggaggggccataacggggaccttggtggttttgcaatgaacagtgcgaacctccttaagcactgcactctcagagcaaactctttgactttgagagtggttggttttgaaccctcagctggttccttctcagggacggctttgtggagggtatgcttagcttcctcttccacctacttttcaaactctctgactatttcctccatgacttcatcgtcagaaccagtctcaagatcgtcagataccatccgcttggtgatgacctccgccatatgaagactgttggaagagccagcctgactcttctttttggtgcgagccatagcacgtaacatggcgggcagttttgcggtggttatagcagtgttggccagggggagctccccaaacaggccaataggaatccctactggaatattggcctcaccggaaggaagagtgtatgtccactttcagggcaaataagatcgtatcccttttccaagctcccagataagcctattgtatgcttcactgcctatcatctctcggtagaggtggttgggtgtctccgactcattactgaacccatcgtccccagacgagttgtacgagggcaacactggacaatcttcaaacaaaagttgaagaagatcctcgtctactcagtgctcacctccctaataatcgctataacgcatctgcaaaaaggaaaaagcgaggaggtgagtacactgagtaatgctagtaggctatccatgatggactcaccaactagtaaaacaataaaaggggaagagaaatatgcacaacaaaaatttacaacgaggtaatcatctatgtagctaaatgaagggagcaacaatgaccattacaacacttaatctttttactaagtgtaaaaatccaaaaacaacacatgaaagcatacatttaagaccccaagaattagaaaaacaacaagtgtctctaattcgcgaagttaccttacaatagttaagattcatcacacccccattggtggtctcgggtgttgggttttatgctctaaataaaactctttacaatctgattagttatc

SEQ ID NO: 219214 - DNA, 2836 bp, Cannabis indica
tgacagtatttttataaaagttacccaaaattctagtattttagtaaatttctctaaaataaacttgtcaccttactacaattattatttattgctacaaaaatattcaatcatgatagagagagtatttttttcattataaaaaagaaaaggaaaactttgataatggaacataaagtacgtaatgtacaatattattagagtagctagagcttgccatattgatttaaacataataaaaagaattgcctttttcagaaaagaaactagttgtagtatactttcgtttaatgggcctaatcataatgagtaatattcttattgttagttactaatgacaattgctctatttaaaagtgaataagtactgttaataatcatagttatttgaatcttgacccaattattcttttgcatctaaagcacaaatttgtggtcccttcatatgtccctatcttatatcttacatatattaattgaaactgaattttaagtatgatattttgattcattgagtgctgtattaaagtgcacattatcgaattttaattaatcatgattttaagttaagatatattataatcataattatatagtagtagatagtcttgtcataattaaacaatctaatcatcaagtggtaattgatgatatatctcataattaggggctacgtacttataatttctcgaactcaataattaataataataataattaataagtagtgctaattaaggaatcaattccatttaagaaaacaatgcagagtacaaaaaaacaaaaaacaaacaaacccttgatacataaaaaaaaaaaaacaacaaaaaactacatcatgacttttataatattatctaagaattatattataattaagatgccaggcacaataatataagagttgtagtccaaatattcatgttgataatctgatttttgcaccaccttaatagaaaagcctctctcttagcacctcaaataaataataatcatatttcatcaagtgaaaaacactcctaatatttcttctaccatatcatctctctctctctcattctctctctggagatcgcttggctcaagtgcctgcaatgtataaacaatatcatcaattttattaatcttaattaaataaaagcataatattgaatatttatataaattgtgtgtgcattaataataattattattacccaaaaactatatttaaatataagataatgtctagtatgagtcccgaggagcattgcatctaaaacactcaattctgcttgcaaagttgtgctcattgcatccagacctgttagatataagattaataacacaaaaaaataatattaataatacgttgtttttttaaaaacactgtcacgttttttaattcaacagtaccgtttttaaaaacggtcaaagaatttaaaataacgttgactaattataaacaaataaaaatgatgacctgttgcaaatccagtcaccagatttccagccgggtcggccaccaccaccaccgccgccgccagagccaaaaccagagccgcgagaacgaggcatgtcaatgcagtcgtaaccgccgccgccaccgcctccgatgacgtcatccttgaaagcaccgcacttgaagcagctagagcggctggcgaagttatgagctccgcagttggcggcggcgcagtaccagtcgccgggacgaacatcagagccggtagtagcgaaagcgaaggaattagaggatcctcttcctcctccgaaagctccaaagtctcctctgtctccagacctgggatcaccacatcgttggcatgattctctcctctgaaagttgaggtgttggcatgatctgcagttccaatctcctggtcggctcatatttctttcttgtgtttttttcttctacataaaatgaccacaaactgtttgattaaattactcaaaaataaaataatgataaaaatgtgacaatatgaagtgtaattatataattacctaactccttaagagtgagtgagtgagtgagagaagaagttagtgggtttagtagtagaattggtaattagtttgagttgggaagagaatgagaatgagagggaatttggtgatgaaatgcgagataagagtgtggttatatatatacatgtctgtctcaacactcaacactcaacactcaaagctcaaacaaagcaaaggcataaaagagagaataaatggagggccgtgaacattatactttttcgtgttcttcaatttcccaaccttgataaacgtaaacactacaacaaaaaaaatctaaaggcaaacaccaagaaaaagagaaaaaggaacattttttttttaataaaaacgattccaatgacaggatattttgaattttgaataactttaatttttcccttactactacttatacttagtacttgaatttgtatatatggaatggtttcttttcatttttattactattattagagatagaggaatttattcattataattagttcatttttagtgagatatatatttgttcaagccagctgtcaagcatgattttatttaatttatttgagtaaatatataaatacacatttatgttatggtcaaatttataaggatctatagttaggattgaactacttattgaactatatgcatatatgaaattgagctcttcttttggaaagtgggcgccagagtctataatagagggtgcaatcagcagctgccatacatatataaatatataatatttaacttttatgtaaagaagaaggtagtactaattatattattattattggaaaccgaaataacaaattataaataaataatataattt

SEQ ID NO: 219215 - DNA, 3305 bp, Cannabis indica
gaacaaccttcttaagtgattttagtttggaattttatatcattcattacttgttaaataaatagatataaaatttaagagtattattgtcaatgataagaataaaacccaaaaaccaagagaagcagtccaccaaaaaaaatcaaaatactcccactctaccagccccatgttgtaggctaccataagtagttcttaaacataaattaggtaaaataaatacagaacagcaataataatagcattaattataggttaaggccctcctatttaggtttcgaaagaagccttgataaactcttgttttcgagtccaatatcaaaaagagaattgaaaagcaaactttttcttattggcaacttgttactaattcattatcaaaaagtgaattgaaaatcagacaacttttcttattggcaaccttttactaatccattatcaaggcattgccctgagttcaccttaaggaattgaatccagtcaaataaaatgattataagtctattttcaaaggagcaaaattaacaatttggcccaaacatagaaatattgagtaaaaggggaagaggaaaaaaattgcttcaagagtcggtgctggtcttgacgatgaaattctgacgactgatagggttcatgaccactggtggaccggctgtacgaggccatgcctggaacttcttgtcagtttcctcccaccattccttgttagaaacggtacctggggtactccctgatcaaaaaagaacatgagaaaatcagataaatgaaacaaaacaactgccgaaatctttgaaacgacgccaatttcactcgcctccaaatatcttcttgtcggaaatgtagtagtcacagatccaagccactgcacacgttcctagagaagcagataagatgtacttggttgccatgtcaaaactgcaataacaaaaaaatgaagtatttgctaaatgaaataagaagaaattatactgaaacaaaaaatccttgagagacaatcaaactgctaaagattgttttatgaaatccaaggctggaatgtgcatatacaaataaatattctaacgtataagatggtgaaaaattaagagaaaacttgaattgtttaaatgtactactactaactagtaaatagagagaaatcagctaaattaaccccaccacttgcaagaaacgtaagatactatgtccatagtaaaaattatatatattgggaaagacacatggataagtggcaaacaaaaatagtgataaaaagagtgcatttttctgatgaacataaacacgaaaaaagaaaagtagttccagctcactatcgacaccccaaatgatatttcaagttggtgaattgtatttctcaatattgtaaagtagtagcagatttatgttatatatcaactcttcacatcatacaagtaacatcacaaaagccgagtgtgagtattatacaataaacattgaatcatatctttgaaggtaacgaatttcctcaatatacattcacgagtaattaactaaaaataaaaaatgtaagtataacacagaaacttcaatccacattcttttttaataatgagtgaaaagctacgagtataagcatataagaaatcacatatgaaaacaaaagcaaaacataactaagacataaaactccaatccttttcaagagtggaaaacacaataccatcaaaatcttataaagctactagccaaaagggcaactaaaatctttgcaaatcctcaagacctacacttaggatgtaacaagctaaaactaaaagaataagcaactacagttctttttgtccttttccgaaatcaacaatttttttgtcagtagcatctaaagcctacattatagaacaaaaacgaggaactacatgccaaaccaacatacaaaacatatggagagaaggctagcaatcacacttttttcttttctttttcattttttatgaaaaagagacaaaggtcaccagataaacagtgactttcttccaagtttatttcctcacttgtggcagaggaaaacaataaccaacataaatacagataaaaattatacaaaaagcaaacacaaaagtaatacaaaacaatcacaaagctggtagaaaaaatttccatcactgacaatgaaaggaggcgcacagaaaagagaaatactatgatttccttctatttgaagatcaatataggcacccaatgtttaactttatctacaaactccacatatcaagtctctagcctttcccaaaatcaaccaatttctatgtacattaactaaaacaattaatattaaaatattaaaaataatcagcaagagcttagaataattatcctataaaattttcttagagaactaatttttctttatcatatcatattagattttcttttaagaaactcgctatctgttcacaaagatttgatataataacacggcattctttatctactcgcattgtcaaatagtcatgcatgctatgaagaagagagaaattccacattggagtttgttgtatctagctcttgctccgttaaataatgaattgaagtatgatatatgttggatttgtagagcaagaaatgagggtgctaatgagttggttaagtgggctaggtttgatatctgggaggtgagtccctatgtgatcaccaatctacaaactctcaattttctcttataaatttccttaaccatagcaataaataaataaatatagcattcttttgttcatgcatagattaaagaattgatataacaatgtgtaacatttgatgatggatatatgatatgagaattagaagatgaaaataaaaattattttatcttcaagtaaaagacaagatagtaggaaaagtaatctgaaacatgcgcgacactatatataacgacggcagagacgaaaagcaaacagaaacaacaaaagatgaaacatatcttcttgtacaaatacaaacatattcaccaaaatcctaaaactacactcacatttatcccaatttcctgagaataaaatattcaccacaatttcaatctaaagacaaaggaatcttaaatgactctatgacatgagaatggaaacatatatctatatatagtttagattatgaaagtattgacttcaatattcacatactgatgccgtattgccttgaaaaagaataggaagagcatacatcatatcttatataaaaccaccaaattgacatttattgtaaaaatcaaaagcaaggggccatatgccatttagaacaaaatgatttgaaatatatatatatctaaaaaaaaggtgaatatacattgt

SEQ ID NO: 219216 - DNA, 2217 bp, Cannabis indica
aaaaatcgtccacaataaccataacataacgaaaaccagaatagctgggtactcttgttggccccattaaatctgaatgaaccagttgcaatgccacagtagctctgttcattgagtttggaaaaggaaggcggtgcgattttccatattgacaccaggacaaaccacatcgtggtgtatatccttaaagacaggaactccattaagaagtttcttcgtagagattttctgcagcaattgatagccaacatggcctaagcgagcatgccaaagtgctacactagaattttgacctgtcttttcaacatatgcatcacttgcagacaaaacatagagtgaatctttcctttttccagcaaataaaatatcagcctcaagatgttttatattggaaataattttcacatcatttggaccaaaaagaacatacctcccagagtcagcaatctgagaaactgaagcaagattcttctttaagcctggaacatgataaacatctctgagcgaaacatcaccagtattagagacatttttctcaccattaaaatgcccttcattcactacaggatgtaatgaattatcagccgtcgcaatgactctttttccatgatgggaacgaacatcagaaagaagagaaacatttccagttgcatgatgtgagcacccagagtcaacatccagtcatttcatagtctataaaagcattagcatgcacattagcaggtccatccatagcctcaattgataagcattgttcccatgtgtgttgttcagaattaatgctttcttgtgcaatatttgcttcggcttctttaagattcacacgacaatttggttgaatatgaccagattttccgcatcgattacacaccacttttacacgacaatcacgtttgatgtggcccaactttccgcatcgaaagcactctcttgagtttcctttggactgcctttcatttctggagtgcttgctgccttctgaaaaatgtcgttcagttttgttgtgcttatttccgttagatttgtcttttgtatagagtgcatcttccacctgggactgggtatgcttattgttgccaatcatttgtgtcaccaatgcttcctgacttttgagcagattctccaaatcaacaatagaaggttgatttacccacccttgtatcgaagagataaagggcataaattcctttcgcaatcctcgaatgagataacgacgcaagcgagcttcactaacaggttcctccgtatctaactctgaaatttcagcacacacagttttaattttcaaaaaaatattctgaaatagataggttaccttgagtcattacagcaagttcattctccaaaaactgcagccttgccgtgttcttttgagtaaataacctttcaagtgtgtcccacacttgcttaggtgactttacatcacgaacatgctcgatatactctttgctgaatgaagttcgcaaagcaaataaagccttgccacacttgatcttcctactttctcgtatgtcagcattctgtggtgtatcttctggattacgttgctttttattttcctaaatataaggacactaacaactgaatacatagaccaactcaaacataaaataaaataaatagacatcaaataaatttgacttattcaaatagctctgtaaactttgacagtaagttgcactaatttgcaacactcccccttagtcgcagacatactgtcaacaataccaagtgcacttctgaacattgtaaacttagccttgctaagtgctttggtaaatatatcagcaatttgttcttcagatggtactttctgcagcttaatgtcttgcatcagaaccttctcccgaacaaaatgaaaatgtgtttcaatgtgcttcgtgcgagcatgaaacactggatttccagcaagtttaattgcactttcattgtcacagtagatggaaattggatagtccaaaacagcaagaatttcttcaatcagcctcttaagccatatacactcttgagtggccagtgtagctgctacatactcagcttcacaacttgaaagagcaacagagacttgctttttactgcaccatgaaataactgctgaacctgtactaaaacaatacccagttgtggaacgcctatcatttacatcaccagcccagtctgcatctacaaaaccagtcagtataaatggtgcattatgtttatacaataaaccaaaat

SEQ ID NO: 219217 - DNA, 2698 bp, Cannabis indica
caacacactcaagctcaatttaaaaccctccaattctaagaaattacaatctaataagaatgaaaaggaaatgagatatttatacttgggtacagaactaactaacaagcaaaatattaaaaacagaaacttaactaattgctaactaaaagctgatttgtccattccaagatgcagaaccaatgaagctctgcaaccccatcaaatagtagtgatcaagtggctcgaaccacaaattaataaaaagacaaaacaaaaaacttgatagtaattttcaaacagacacaaatgcaaggaattctttgtcagtttcaaggttagccatgtcatttctgcttaagctgatataagcttctatcccatcacctgatttggtgtctaaaaatgtaaccacattgttgcaccacaagggagccaacccaacccaagtaggctttccccacccaaaatctgattcgtacagaggaaatctacaccaactgctaacactaagagcaactgttgtctctctttttaataaccctttaccacttttcttcataaattccaaatgttgggttccttcttgtagatttttaatgtacttatcatcaatatgactcaactcttctctcatctgttttatgatctgatcatcattcttttctgatccaacagctttaattattacaaatcgataaagatttccaaacgaggattcagagagtgaaggctcaaaccttgttcgaagattcactagctgaaccatagcataagatgttttggaataatccacttgcaattgagtaacagccacaaaacgattccatatgaatgtagacaaagcctcaacacgagaaacattactaatgttaacatatttttgtttaagattttgtatggttgcattgaaaacaaaccttttggagataaaattgttcttgttttcaacatcaactcgagggttgaacccggatatgttcttgggaggaaatagcgaagctgcttcgaattgtggcggtaggcatgcgaatgaggcatcgccacgagatatggcggcccatttgttgaggaacatgaaaaatgataagccatcagcaatgatatgagagatggatgatccaatagctatagagccacaactaaagatgttgatttggatgcctaggagtatttcggaaaccccatgatcggtttcgaatggaattaagttgttaagttgaattggatcaatggggttttgagataggaactcagatagattacaattgagtacttttgcttcaatgaaagggactcccatgtcattgcattctatgcaagaagcattctttttgagtcttcctgcaagtggataaaatagtgtaagtgcatgagacaaggatgtcttgagattgtgtaataatatttcaacaccaccaataatattaatgttattatagaacataacacaattggtgtaaactgaaggagataattgatcaagaaatgagagttggtaagtggcaaggtgatttggagttgggttattaggtttgatcatctctttggacactatatttacttccatcttcatcatatgtaatcttaactaattgagtttataaattgctttggtatttgcctcgtcgatctctttgcagcacacacatatatatatatacccttttaaaagagatgcattacccttatcttataaaaaacagatcgacctgtttatttcacatgcttataatataaaatagtgaaccgtgtaacataatataaaattatttcggatattaaagcaaataaaatacatattccttgtaaataagtgtattgtaaaatttttgtatattatatatgcccttgccttgtctcatttttcctcttttaaaatatatcccattatatccggcactgcatctgcatgatctcttatataattatagtttagtagaacagctattaaacattattacattattggtagttgaaaataggattatatatatagtatattactatcagcacgtttttagcacaatcatttgcccatgtattaagctttacatgtacaatatattatttgtaatttattcgaatgctgttagaaaattttatatcgttaaaacgtgaaaagataatagaatatataaaattgatgaattaagtaaatatgcagttctttattattattattattgtatgttgagtgagtaattggatttaaattatttaaaacaagcaaggtagtcacatggccaactcacataaatgtagcatttcttaatggctcatcaacattactcttgagttaatggcggattacattaaaccagagaaaagaaaagtaaacagagaatccaatatcacatggtagcagttcgatggtacaaaaggaaaaaagaagaaaaacaaacaacaaaacaagtgccatctaacctaattaaacagaaataaatcgaagaaggggaaaatccgtatcagccatctgccttctcatggagcagggagctgttgaaattggacgaattgaagtagctaaagttgttgtactgattcgcccattgagccatattatgggccacacagttgtaatttctaagaattattggacaatattattacacatggatcaaatgtaaaaatatcgggtcatatataagaacatggactagtccactcatcaccaattggttttgagatggaaactcataatttctgacatgctcat

SEQ ID NO: 219218 - DNA, 2784 bp, Cannabis indica
ttgaaaaatattacatttttttctaaatgagggcctaaatatatttttttttctcggcccactaaattttaagactggccctgtaactgagtatacgtgcattgcacgtaatattaatttagtttatttatacatacatataaaataaataaaatattaataaagtaagttttgaggaatcaactcttctcacatatgaagaaacactttccattactttaaaaataaatgtaaaatacattgtttgatgtatgacatattttaataattcttttttcaatttttaagtatatgccacttagaaaaagttaatatgagtgctttaattttgatctcaaattgattatatgcataatcatatgtatatatacaatattaaaaaagaaaagtcaaataaaaaaattcaaatgtaaagttgtccccctcatatcatataataactacacacaaaaaaggacatgacattacatcgttaaatttgtgttaattagtataaaatgttgaagatcacattaattaatattagcatattgctacatagtctatggtagttgttgtacttgttgatttttgtacaaaattacataattaaattcataatgttaactttttccaatttgtactttttgatatcacaacatgatatatcatcatcaaatttaccaaaattatacgacacgtatataatcccttaaaacatgatttagatatttattatataattctctcctgatttttattcaaatttatttatttatttatctttattactgaaagaaaaagatacttcgtatagtccatgagatgaatgttaattacaatctcttattataatctcttaatcaatcttcacgtcctaaattacatgccgaaatattttttttcaattttttttatagtggtattcgttatagttacagtatcataaatttttgaaaacttccaaatagtttacaactgaaaacagagttcctgatattccagtttaccacgcctgtttaaaaaatttcaaacgtattttttggtactgtaaactattcaaaaaaatttaaaaatttacagggatgatgttgtcagcataacgaacaaccccgtaaaaaaaaatgaaaaaaaatattccgatatgtgttttcgagtgtagaagtttactaagagattgtaacagaaggttgacggtagcacttctctaatacatgaatatatctagattcaatctcccatcattttctgtttaccaaaaagaaaaaaaaaagtttatatatataatccatccaaaacatgaatatgtacaaaaacagtcactaacatttcaagagagaaagtcttttatttttccttcttttatttttctgaggaaccaaacaatatataggaagagtttgagagatggggttgtgttgtaatgtcgttttaagggattagagggacaacaaaaatagatataatatttatttgaaaaggacacacaaatggggtatcaatcatgattatgttctttatatatatttatatatatatttatatatatatttatatgggaccatgaaaaagaggagcaaagtatggagagataagaacaatatataatgcagactcatccatacaaatttcattatcagatctatgtggagactgtacggtgtgtgttctatatattttaatttatttatcttattttttctctatttatatatattgtttaatattttaaataaataaatatatagatatgtatggccccatatggggaggatcaattgatccatcgtgttgggacaagtactaactaccatatattattggataattataaaaggaatatgagtcagctaatactcaatttggtctcaacttccctaatcaaaatagataaatattattattattaattaaaagaaatgtatatgcaaaatgcaatttaagttttaatttggctgtcaaatttgatggctggagatgttaacttatggttttcattcattaattacataaacactttataaagcaaaaacaaacacactttttgagaaaataagaaaaaatggtcaataagataggatagctataacacttgaattaatggtcaaattcccatatattttattattctaacataacattgcatttaaaaaaattagttaaaaaaaaaaaaaaaaagaagagaagtgtatcttgtctaaaaacgaatccattttattttaagtaggtttagtaagtttttaacaaagttatatcaacaactctgctactactactctgctgcactgttacatctgtttatattcagttagtgagtagtgttgtttttaatctgttagtatacatatgagtcagtccgttagttaatatgttagttaaagtcggtttaggtgtttagtctatatcggctactgatacatatatataccagtcttagtttgtaacttgtatcgattcaattcaattttcttttcaataagattttctttcctctttctgcaatatggtatcagagcagagaaagagaaactttctctgaccgatcttggttcttgtcggctttccgtgttcttctccggtgaaagtgtcgtgtttcctttcttctctccgacactatcttcatcgcgttcttaaattccttcatcaaacatgtctaatgacgatcaaaccccagttcaatcaggaactgaaggtaatcaagctccgaacattcatggctatcaaagttttcagacctctaatctgaaaaaccctcttgaggatcctgccaatccctactaccttcatcatggagacaatctaggt

SEQ ID NO: 219219 - DNA, 2771 bp, Cannabis indica
attgaaatatcatttcaatagaatgcccttttcactattttgttggaatgactatacattctattttgaaataaaaggaacgaccattctaatataacataagcaaaaaaaatttaataattttcttatcaacttttcttaatacattttaaattttattttatttaattcttattgttattctcattctcattcttattcttatatttatattctttccaaccaaacgcagcctaagatctcacaaatcatgtcaaatcctatcttgctacttcaaagtagttgtcaattaaaggtcgtctaataaaatttaaaagaaaatgttgtaatagttactgtcgcatgaaatttccacataatttcattttatctcttgtcaaagaccacatatacacgactcttgtaaattttgctatatatataagttattattttgtaaaagaattattgtgaattatgaagattagttgagacttttaagactgttaagactgaatcccccaaatcctttcaatttattttcttttttgcacggccttaaaagttgaggctgttaagtgttggatgaatttttctttttataaaattagttgtaacttatctcacataattccccccctttttttttattgacaattcctgatctttggccataataaattgaaatttctcatatatcttcattaagagagatgttttgaaaaatcaaacttatatattttgacgatgagatatcttaaggaaatagtaagacacactctgctacaatgttagcctttaaaggcatctatgtctaaatccccttctctatatagttttccaaaacgattgaaaacctcccgaaacacaccatttttttgatatcccaaacatttgtcgattcctcaaccactgttttaatttttctgctagaatctcaaattaaaagtactcatttggcttcttctaatctaaataaagttggcctgtgatgttctcatgaagatagcaaaaatagttttccataatcatgaatggagatagcaaaatctgatacccatacaaaatcaataaatttcaactcaatcaatagtactgcactaagaattttcattcatcataaactatcatacataaaaagaaattttcaaaaattttgagaaataaaaaatataatctttgaaatggagaataatcaatacaactctaaaatgaacaccatcgagggaacaccatcgagggaacaccaacatcgggagcttcctggtcacaaacggcgccagaaacttcagtttagggtgagttagatgctttcttcgtcggagatggtgtcgtctcggagacggcatgagctgctgtcgtcgaatcgagacgggctttatggtgactgacgtcggaggtcagagatgcaccttggctactttcagctagaagaggtagaaattttaggttaaaagttgaaaagagaaaagagaagagtttgaggatatggcgttggttcctcaaaaccctttagcgttgccctgatcagcatcggtagcgaatttcgcgaaaaccgacgctgaaagagcttaaaaaccgcctctaaagggggtttttgtagtagtgacatatcaaaaataaacatttgtcccatactagtatatacatacatatagatatagcttaacgtctatatatattgtagacattgtctcattcaaataaatagtagagtattgagccatatataaaaacatggcctactccactcatctccaattagttttgagatagaaatctaacatggcatcaaaatcatattcctagcggactttcgatctacacctatctagatggttgaccagtcgcacgagatccagatggtgcaaagacgcttgagatccgtacaaaaataagcgagcaaatagcttggcttgtgataaggtgattcaaaattggtgagcaaaaatagccaccattttgaagggaaatattgtggacattgtctcacgggaataaatggtagagtattgatccatatataagaacatgatctccacttatcgccaattaattttaagttggaaccataattctcaacaatatgaaattaattagagaccatatgacaatgttgtaatatctatctcaatctagttagctagtttgtcattttaattaaatagtggtatctatttatttagcgttcaagaatttgatcaatagggattatgacatttgttgaacaaatataatactatgtgctcatgttaattgtaattatatatgaaccatacttcgtttatgtattgcaaaaggaacaaacaggacatatatatatatatatatatgattacaacttcgattgaagaaaaagaaaaacaacatatatatgcacctaagcattggtgcttattaaaatccaaagaaacaacaccacaaataacaaaacaactacaacaagagaaagatacacaaagctatcatagagcataaaacgacttatcttctaatttcgcatgatgtacctgtgaggatttataaaacacttaagaaatatataaatcacagatccaaacatattcctaaaagtgctttaatatagaaaaccctaaatcataaatctataaagcctttgctaaattaaagaagaagaagatgataaaatatgagcggaagcactaacctgaagccattgttggagattgcagagaaggttttgatcttccaagaatacactattttctagagtattttctctgatggggaaggagagaatacagaaaccctagtgtttcttggggaccact

SEQ ID NO: 219220 - DNA, 2323 bp, Cannabis indica
atagtaattttttagtttttaaattaaaattttctgattttttgattacactacacgattatcaaattaaattattgttaaaaaaggaccttgtattatgatagcagttatggaattatgtaactgctagagatatattattatttaattgtattttattattattatttattatttcgttatattctctctaccaaaattaggtattaattttttttcttatatattttatctctaacctataatcttattaatttttgccaatctctctcttcatatagcactaattaataagctttttgcattatgcaggtgatatgtggtttgaggttgttactttggggtttaatatttggtaatggtatagcttagcttccactgctaaaagctacagccccaaaaattaagttataaaataatgagtgtgtgctgtgtagactagttgtagttatgagtgtgttagaaggattctacattgtggaaacttagtttgtaactttgaaaagattatgagttagagaattattactgtggtaacactggtaattaagaattgttatgaagaaaagaagataatggaagcaaacattgtaattatatatttattttgcaaataaaattagtaatgtttgaatttgctatttaataagttatgtttatatataaatataataaatttttcaaaaagaaagtgttagaatctttatgagcatcacacaataataaatttttcagaataatatgattttacatgaggatatttctactctaatgatataacataagtaagattaatcaattttattataaagagtgacattaataaaagtaaaataatcatactctaacaacaccttttgatagcatgataaatactaaaaaaaatagtttttcaactttaaaactaaaatatttatttttttaagacaagtaaaagggcattcgtgaagttctgagctagtaagagagatgtatgttcctacttcctattatgatttcatctttgttattggatcattgtttgaattaaccataatttgctacttattaaaaaagtagtattatttttataaaatatttttcaaatttgattaaaaacaaattgtcaatttttttctccacttttttaatcatcgtaatcttttgtttgaggtcgaagtcccacttcaagtttggttatagggttcaggatcaggctcgagttaagctattagtttgaggtttggtatcaggtcattggattcggggttaagtgccgggtcaagttcgaaatttaactttttttgaaataagcgttttatcattaattcaaatatatagacctcatggtcgttacataaaaggttctccagtaagatagagatcgggatagatccaaacatctgataagcaaacgcccatctagccacattgtgagcggcaaaattacaagatcgactaataaaagaaaattacagctaataaaagagggagaagacttagtacaaaaagagacgtagtttaccaatgcccaacgagactccttcccattgataacattgattaccaccctcgagtcattctccactataacacacttggacccgatatccaaggcaaccgacacagccaagcagcatgccacagcttctccgcaaagaacataagagaaatccacccgagccgtctgaattctaatcactctgccaagatgattcctagcaacaactgcaatacacatattgtcaaatcccacttttacatcacaatttagcttaatctgggggaggggaccaagcttccttaagatgaggagcaggactagggaataaagaagcatgcaaatcaacttaagaaatacaaatttcattaacacattttttcatgtcaacagggcaattattacggactttatcatttcgcaccctccaaattaggggcggagccaggacttgaatgctaggggggccaaattttaatttagtatcaaataaattttttatagtatatatttatattcaatactaaaatttaaaaccaaaattatctataataaaatgtgaaaataaaacaaaaagtattatattattgaaatttctattttatattatccaaattgagaatattactacaattttaattaagacatgcattaaattttaaatttggtaaatattttatagaacaaaaaaaattatatgaataaaataattttaacaaaatctaacaaattagaggagatcgtaaatctcaacttctattttagtgatgaaagttatcaattaatgagtgcttttgagttaaagtgtaaaaaatataactataataggtgtactcacttatt

SEQ ID NO: 219221 - DNA, 5193 bp, Cannabis indica
ctctctctctctctctctgataccaacgaactcaaaataaaatcccgtatctctcattcaacaatattcttcttgttaatgtgtacctgagtggcttggagtttcagcactggcaacagtggcttctcgaatgtggttgcgctacatcttacaagactggcctcaagttgaatcattaacctcttaactctgaatcgtcgtcgtttaaggtgggtatcaaggggtgacaatggaggtattgtctcgcttcgacattgaaatatataaacacaaacaaaaaaaaaatatttacaaaaatttaatttccacaacaatataaagttctgtatatatctcaagagagtaacaaacattaaataattttacatagctaacatgatatttaatgaatactaggcaattattcttaaatttatattgaacttactaaatgtcattgaccatgcaactaattttgctatcgtaactcttaaattactataaaaaactatatttagagacaacattttagtcacaacataaattttttgtgacttaatgtgagttttagtcacaataaaaagttacttatgactaaaaatagtatttaacaagttgtcactaatttaattttaatcacacatttgatcacaacaaattgtgatttttatgactaattatatttttagctacggaccttttagtcacaatgtaggaaagttaatttataattagtcgcaaagtaagatttttttgtagtgaattaaatagttttgtagtaaatgaaatcattcaaatcaatactaggtcatgaatttttagagactttttaagggaaatctcgatggttctatattttttcacccatattctcaactcataaaaatattcacaaattagtaatattttttttatgaaatgtgactaaaatacattaaccgtgacattttacaataaatgttattactaactaaaatgtaatctattcttattaatgttatatttttgacccaatgttattaaattatattgtgacatttttatataaatttcacccattaaattaaaatatcactaattctcacttttgcagtgttgtgacatgtcagtgaaaattgccctaatggcctctactcttgagtcatgacataattaaggtggcacctatctttaggtgtgcttgatgttggacatgaacaataacaatactcataatttaaatattaaaatatattagtaatttaatttggcaaagaaagatcttattaccataaataagtataaagaataatctaagtgaacttccgaatgtgatgttaaaaaaaaaaaaaaaagtaacatgccatctccccaagatatagtactgtatatactttattgtattaattatatcatatatatatatcactcattgttatttaacttgataatttaacgacgtgaaatattgagactagtcatatgtaaccatagatgtatagatcattaattaatataatagtacgtatttatactcgagaggccaatgacaaattaatcgtcaaaaacatgcatgtaacacgaatattattaatattatccatcgaagttagaaatatatatacataaatatatatagaagtagtatagttaattatatccacggtatatacatatagtatatacatagttgccaactagcaaaatttggacttatcaaacataaaaaaaaattgcacagctgcctttcttgctaggtttaccccatgttcacgtgatgttgcttagtgatcagtagtagtcctcattttcttgtttttttgttctctttcactcctcttcatcattctcattattatttctcatcactcacactactatttctatataagaccctctttgcacttcaaactctttacctctctttctctcactctcactctctttattaaaacccaaaaaaagagaaagagagaaaacacacacaatggattcctcaaagctttcagctttgcttctcatttccatgctcttcatttcctcagccactcccattttgggatgcaactactgtggcaaacccccttcaaaaggaggtaaaggaaaaggaggaggaaaaggtaccccagttaagccatctcccaagggtccaattttccctccggttaaagttcctccagtaactcccataatcacaccagttgtacccaaactccctctcccaccagtaaccactctcccaccagttgtgcccaaactccctctccctccagtgaccactctcccaccagttgtacccaaactccctctccctccagttaaggtccctccagttactccactactcccaccagtcacaccccttcttcctcccattccggttatcggtggtggcggcagccctccttcgagcccagggaaaggtgataagccttgtcctccacccaagtctagcagcagtgagacttgtcccattgatactttgaagcttggtgcgtgtgtggaccttttgggtgggcttgttcatattggattgggtgaccctgttgtgaaccagtgctgccctgttctacaagggcttgttgagcttgaggcagctgtttgtttgtgtaccactttgaaacttaaggttcttaacttgaatctatatgttcctcttgctcttcagctccttgtcacttgtggaaagactcctcctaaaggattcacttgcagtctctagattattacaatctaagtacgtacaactctctctctctatatatatatatatatatatctatatataatgtatatttatttctattaattatgtcatgtgaaaactcctttagattttgacaagcagtgatatgtactttataattgtaagagaattggctaattaatttatatagtgttgtgtgttgacttattctgaagtcaaactagttttaataattatgtgaagttggtagtacgaattagaaagaatattgttatatgctaacctatagctagctatacataaataaatatggttgattaatttttttgggataaagatggatatgttgaacaagaggttaattaattaagtcagtctagggaaagaagcattagttcttgataacaaaagtgcaagttgttttgtttttttgggatctaatgattattttaaagcttttgaaaatataattgcaagaaacggaaaatcaagcattatttatttatttttattttaatggaaaagtagtaagaaaataaaaacacaaaattaataaatgagtgtaatattgtttgtcactatatataatttgcatgaatatttgactcacagaaatgttttattgtagtgcaggtctgcaaatttgattggtacaggattggactcgtcatgagaggatgtcgagctgcctatctctctctcaaaagaagaaaaaaaaaagaaatctcttttttatttatttttgttaattattagtatttggtactgaggtattattgtttgtttggttaaatttaattaatcatcatgtgcaaagtaccattatttgcttctctttattattaatttattatcaaattgttgcatgtgtgttccttaatttgacaaggattttaatcaatcaaagatatgattatttctgtctcatccctttatatatgactaataaatgattattttattattcataatattaataagctggtcacgttatacatgcaacaaagcattaataatttttattttctttttaatttgaagaaattataattattattattgtaggatcactagtaaacaactcgcgaagaaattaatataattttttaaataatatgaaaaattagatgtataaattgtctcgccatgtatgatgtatttatcaaattggaagtccaatatggttcttatataacactcttctatatatcatgatcatttaaaattattcttatcattttatatcactcgttcatcatatttcactaactcgctatcattgtatctcactaaaaagtttataactatgtacatataaaataaatcaagcaatatattaatattactaacattttatacaattttttctttggaataatatgataagttaggtgtacgtctaatctgtataaaatttcttttttataatagaagtctgacattataacactattttgtgtatctcgatcattcaaaattgatatcatcatcattttatattacccattgtcattacatcatttgaattattaaattataaaaatattttaattaaaacatacggctgggacatgtaacatatgattaattaaaggaaaaatatgagatatgatgggtccgacactgctagccacgtgtagacatgtgtacacgtgacaaatttttagtggtacacgtaataattattaaaatattataaaaataatttaaaaaataagataataattaaataaataattttttctttttcttttctttttttttcttttttcttttttcttcttcaaccatcaaaccgcagttcttttctttttcttctgcgagatccaagcaaagggctccgactcaaacaactataactctacaaagattacaaccttctactcttagatccaaggttgcaactctaattcttttcaaatttttctatactagggtttctgatttctaatttggggctaaaaaatttcattcaagttgggatggaggttgttgatttcttagactttaaaccctcgatcatagtaaatgttaataacaatgattctaagaacgaccgtgtactcattaagaggaagaccttgcaagttgtgtagcagtgccagagatctcttgaattgctcaaaaccatcaatagttttattgatgatcatgacgaagatgatgatgatgatgaagaaaatgacaacattgttgaaccttcttccggagaccactaaagcaatgacaaggtcgaggaggtttaattttgagtttggcttaattttttgtagaaaaattatgactaacagtgcagaattaaatgaactaaattttaaaaaatcaaacaattgacaatgataagattaacaaatcacaaacaataatcaaacaaaaacaggggtaaaaagagtaaagaaaactagaaacaataaagatagaaaataaagaaataaatgtcaagatatatactagttcaagtctggtagatcgatgtgatctatggctctgctctagttttagaagaccactgaaatcctctttattga

SEQ ID NO: 219222 - DNA, 4716 bp, Cannabis indica
ctcacctcctttcgatgaaaaatgccagcagcaagggctgccgatgcgtttgtttttgtgaacacctcctcaaaatgttcggcagcaccagcaccactactagctatcacaggaatgctcacagcatctgatattaactttatcagatctatatcaaacccattcccttgacctgaaacgtgatgaggagaaaatagtaaatacaaagatacaataaaatgactgcaacttgtgcaccagttggacaagagtggaaggcctaataaaacaatatactaagtttttaaataaaacttcttttacagtaaatatatgtgacagggagttgtcaaggaagaagtcacattcaccatcgcaatcaatgcaatttagcagtatctctccagctccaagctcctcaacagcttttgcaagctcataagctccaattgatcgaccttcccgtcccccactaacctgaagaagaaagaattacattgaaatacagaaagagatactttttttctttgaaaaactagactcctcacctaatcctacaatatttaaggaacaagaaactataacaaaagttatctaggcttccaaaaccaaatgggactcaaacctcttatgggaccaaaccacaagcctaaccgttaagtataaagatttataccaattaaccattttcatcttctatagaaaaatatttcatttcatgctattaaaattaaatgtgattcgctttaagtaaagctagagtatcctgtttcgtattctttcttcttttcaagaataataattttaactatttattcttgataagagaggggggttggtacatattacattggatacacaacagaaaaaccatttccgaaaaccaaaagaaaaaatcaaaaactaagcacagtatgttgagaatgcttactgtacactgataccatgcaaattcttcaccatttggacctgtaatcagcaaccccaaaaagattgctttaacacagagtgatcaactagcaaaagcacccgacaagaaaaaaatagcaacagctaacattaatgattagtatactataaaaatgtttattactctttttccttctcgattcttctttgatcccttctctcgctcgctctctctctttctctcattaattaacaagaaactaaaacatttgagagcataaagattctttcacttatcaccaacaattgagcacatcacgattcaaagttttctcctataaacagtatgttactctattccttcacttctctccctctcatcaagataactaactaaacacaatagattgtaatgtttcatattgtacaccaatcaccagtggttgaacatttcgtatattgtaattattcttctagatgaacatacattgtaataaagtaatacaaataacaatataacaatttgcaagcttgttctacaagactgcagtgagaacttagagaatgtatcaagaaaccacaaacacggaatgaagaggtaaaaaaataaagaaatggaaaatgtccctttacctctatttgtgacccttacagtcttaaactccacatcattgggatcattgatgtagactctacggggatcaatgcttacaaccacagcctgcaacattatgtttaaatcgacatatttgagagcaaacaaaggacacaggacataaagtttacgctcagttaagctcacataaaaaactgatagagtaagaataaatatatagcaagaagagaatgaaagataaagcaaactgacaccaaaattgaactgcagatgatccaaaaattaaggccaataaaatgttgagtatttgttatgttcagtactgtagtcagtaaactttagacatggttccctcattttcaatacaagctactgttccatattaaaaagaagcatagattagcggatatctataaatagagagtgaattacttgatttccataaactttagatatctgttccaaactgcttttcccagtttttacctacaaggcaaagacatcagaagggacagatacatcagtaaagtccaaatgcagagagatgcaaaaccgtaagataaatattggaatcaataatgtagtgctctagttttagttctctgttacttccttaataaagatttttatcatactaaaagtaaaataaaatacaatattggaaaccatttccatactccagtttttatgtactcttctgcagcataaacagcatcacttccaatggaaatcttgtcagcgccagatctaaaatattctgaagcaacctccaagctagaatagtgtctgtaagaagtaagctcccatgtaaaatcacttttaaaaaaaaaaaacttaacactgagaagttgagaaataaattaaaccaaaatacacaaccaaatgatagcgtacaagatataccttccatttatgtcagtaaaatctctaattcctcctcctactgttaaagggacaaaaacattttccgacgtgcatctcaatacctgtattacaagtacaagattacctaaacaacaaagaatatatatacaagtatatctaaatactgaaattgagtgctccctgcgctattatttttaagtaaaatggttaatgtcgaaacatttaaaaaatgctacctgcaacattggcaagtctcccaatgggaagtcacggaaaccagttatatttaggaaagtaacctacaatatacaattatacatcaagcatagttaaccacagtgtcatgaagataatcaatcataaggaagtcagtccaaaatttagaaagtaacctcatcagcaccatctttgtagtattgtcctgccagctcaattggttttcccaggtttctcacctaccaaagttagtagtaaatgagagccaacataaaataacttgcatcttaaaatgctgataaaaccattcaactaaataactggaaaaaaccatgtaccaactcagtggttagtgcaatctgttccattaaaatgagatcaataataatactttgaagatataatagggcatgtgacaagaaataagaagaaggaaaataacattccacagcaatcacatttgttttctacttgtggttttcattatgcatggcatattatttcaaaggagtattttacttataagactccacacagttgcaccagaaaatcaaacattggaaaacctaaacaaagcacagtaaaatagttaaaactactgtagtacctcattctcttttgtatgctctcttacatcatattggtctcccttggttacaacaagatctcctttgtcatttgtccttacatctagacaagcaattacctagcaaacagtgatacaatttagcgataccttttaaccagcaaatcaacaaagtaatacatgaaaacttttaccaaaaaccttataaaaaattcaaaagggtttttttggcaaagaatataacttccaatttggtttggtttggtttgacgaacattaccctttttgcaagtttcgaagctttcccctcaataggcttctgtcttcgcattaacacccatcaattgttagataattcaaattaaataaatagaaagcacacatttgaggatgaacggaggaggctaccttcgtcacagttgacttaggttgcaaaaaccttcttaatacagaaagaccaacatctgaaaaatttaattcaaagatatcaatagttgaagggaaggggaaaatggcatcaacaaagactacgcattctgccattttttaacacacatttcagaaagaatgtgagagagactaaggtggtgtttggttagaatgaatgggataggaataggaatggaatcaaatttaaaatgcataaataaaaaattgataaaaaacattattaaattttttctagtaagaacattacaaaacaatcagtacaaaacttatcacacttctacatcagcaaactccattccctacatactttaaaatgcaatcaagcaaaggaatgaaaaaaaaattgtttcattttcattccatttcatttcattacctccaactaaacggcacctaaatgtccaatacttaagaaatgaatctaatttctagatcaatttaaatatttttcaattcactcacccaagtattgcacccaaataagaaaccaagtgcacgcacacatttaagtgtctaaaggatataacaactgaattttcaattttgacacaattggatgcaaaccaggacattttgtcttccttcttagtagaggaattcacgaaagcttcacattttggactactatttcaaacataaactgaaaattgaggtaataaagaatatcttgcctccacttttttctggatggaattgaactgcatgcacactcccccttctgacagatgctatgaaatcatcaccatagttgcaggtagatgaaatccaatctttgttttcatctgactacaaaacagatacagtcacgcaacccagaagatttaggcataagacaataacaagaacaaggaaaacagatttttaaaataaataacaaagaaaccagggaagaaacacaccggcatggctctgtaagagtgaacaaaataaacatggtgatctccaacatcatccaaaatttcagaatcttttttaatcttcaaagcattccagccaatgtggggaactctgaaatcatttgacgaatcaaatctctgaaccacaccgggaatcaagccaagaccatttactgaaa

SEQ ID NO: 219223 - DNA, 3317 bp, Cannabis indica
tatatatatatatataaaccaaaccaacacaacaccacacacaaatttacaacactatatgtaaccatcaggatcgatttacccttttatatccattgtttaagggtaaattaattgtttcgttgtgaatgtttcctttttaataaaaggttaattttcaaatatgtgaaactaagtataaaatgaaataaaaccctacaaaaaaaatgaatttagggactgaaaaggattggcaatataactataaggacgttcaacatagataaataattaccacacgacctagcttaagttggataatgaacaactatgtccttaaaagcatctgattgcctagtatatgtcatacaagttataattttatataactcattgtctagtccacacataaacctggcctccacctgtggctcctgctagcatcccaattttgtaagggtgtgcatcaaatctacatggaattgctgttatgtgttcactctgtaatgtcacaatagttgttcctttagaaggtgagatgacatccactcctctcttcatgttaccaataaaaatatatgaatcgtcccagccccatatagccctattcaaccagaaacatgggagtgaattagcaatcataacttccaaagtttctcggtacagagagtatgtgactaataactcagacaaaaatagaacatttattcaatgatttcgaataatatggcagtttaactgaaagtagtgaagaaatttatataatgatattaaggagacaaagacaaagataaggatgaatagaaaggtagttagtacttgaattgagaaatccatcttcctgtttgattattgtgtggaatccatgaggcctcctcaaagttagctccgtcaagtatacgaacggtatcgtccaaactacaacaagcaaccaatgaatctcatcaaaagaatgttctggcaccacagatcatattgttcctcctacatgtttttttgatacctccatagcttttatggattactcattaggctaaaaaagaaccatgggtatcacaataatatattcctaaacatcaatgaatgtccacttcatacaacaagggctttgttgccgtagactatgttcttgttataaaatcaaactaacaattaaagacactatgaagaaatgcagtaaagagacacaaaattaacaaaacttgagtattaatttcagttttaaaacatttccctccttatatttcagaagaatttttcaatatttttagttaaaactttcaaaagctgatcataattttccttttccactagaaagtttagcattgcaaatgggaataatcactatcatattacttctctgtctacgagtatttgtttaagaaacagtacgcagtaaatgtaccttgtggtggccaagcactttccagagggtgaaaaataagctgaatatacagctcttttgtgtgtaaccgtcttcaaagttttaggcttatctgtattaatacttctcaaatcccaaatgcaagcagttccatcagagcaacttgttgccataaagtttggattttgtaaattaaaatcaatggagttaatcctgtcaccatgcaaactccattgagttgcacagcttccagtcctctcatcccacatactcaagttaccatacccctcgccaaaatatacacactttgcatcatttgatcgctgagacagtgagaatatagctttattgttatcagaagaatatactaaatcaaacacctccttttcagcatccatcaatcggatatatccatcataacaactggtaaacacctgcacttgagcaaaattaatataactttaaatccaaatgaacatacaaacaatttccattgatatgataatatttgtctaaaagactcaaaaactaatctctgtttatcaagcgtgattgtaaaaagcctagagggaataatactaattaaaagttacctttgacaaggaatgttggtgaatcgaaatcccagaaacagggcctgagtgagtatgatatgaataaaccccatcatcttcttcatcaatcccattcgcatgatcaagattccaaaacccaacatcaccacccttgctcccagccacaacaatactagagctactacaagggaaaaacttcacagacattattcgattctggacaacccgagctacattctctggattcaaagtcatatcaacccaaatcctatctccaccaaactctgttcctaaagactgacccggttcagatttgatcccagtgctcgaaaaggtctcctttttacaaaccctatctccaccggactctgttcctaaagactgacccggctcagattttatcccattactcgaaacggtctcctctttacaaaccctaagcccaccaaactctgttcctaaagaatgacccggctcagattttatcacagtactcgaaacgttctcctctttacaaaccctacgcccaccaaatctgtttctaaagactgacccggttcagatttgatcccagtactcgaaacggtctcctctttacaaaccctacgcccaccaaactctgttcctaaagactgacccggctcagattttatgccagtatttaaaatggtctctattagagaccgatcagacccctcatgaagcaaagcttctctcatagtcagaggacccatcttcgtctcgctagagttagggcttctcactgtagactcgaaaagatcgccatcgaggattttggaatcagcctgcattcctcttgttcgtaaagatcgtcgcaaagcgacgggagtgtcactcttcggtttcttctgcggtttcactttgtttgctttgcctccaatcctgccatgaaaataagaaatttgacatgggttttcatacaaatggaaatcaaaagagagataaaggtagaagaagaagaagaagagtaacctctcacgctttgaggaggcggagagttgagtaacaatggattgaagcttgagcccggccaacatttcttccttcctacggatattctcgagcctctgacactcgtacgctgtaagcttcgcgggcgccatggaagcgaatagaaggtccagagagagagaggaatggagaagaaaccgccacaaagaaagtggtgtgtagttaattttatgaagtcacatttgctgatggcgggaactatgtagccaaaatgggtaagtaagtatttgttccccgctaaaaataccttttatcactaacctcagtctataaggtagcctaatttggaataatgaaaatatagaaaaaagttaaagatagaaattggaataaaaataaaatttaat

SEQ ID NO: 219224 - DNA, 2466 bp, Cannabis indica
gttttgtttctttattttcttagtcattttatttttgctctaaaaagtgttatttgacgttctatgtgtttgcaagttgtttttcttctcattttttcttttcttttattctattttttcaaaagggcattaattgataaaattcaagaaataagggggcttttttttgtgggttttattatttttgagcaaattttcatttattttatggaaacatgtattcattacatatttttcatttcctttttatcattatcgatttgtcttaggatagtaagttttctttatttttttttatttggtggggatgtgcttttatccttcgtgtgagtttttatgaatcatgtgcttttaattaaattatttttgttggttttctttttcatggcatttcgtataaggaattttttttttgggtaaatgcattgtattttttttttcaaatttttggggttgagtttttatttctttttccatttttggtaacctttgaccaaaattagaaaaacccttgtgttttctttttaaggtacacatggtgctcaaggtaagaaggtagagtttcctttattcttctttttgggtcttttttctaggatttcaaggattaatggaaaaacaaagaatgctcaaccatccaagaagcttgttcatgcttcctgtctttccataatcccaacctatgctccctgaaccagtggtcgaacctcctgggtcgtcctctgctccatcaagttgttaggaaattaaaatcccaaacccgtaagttgacctacaatcttagctcccctctgatcataagttctccaattgcatctttaaccctttggcttggtgatcatgatgaatcccattcatcacctcattgaagttgtgtcttccaatggagttcccaatgttgagagagccattgttcatttgcctatggtaagctccaaaactaggtcaaaggtttttactcataagaaactagaggtggtgaagtccaaagaagtctccaaagagaagaaaatggttacctcattttctagggctcaaaggctcaaagatcattcaccctccatctcttaatcagattctgaaccaaaagaagagcatgaagaagaagaacaagaatcagaggctgcgtctcattctagtgaggaatttgttcccgaagatccctcatttgttgatgattctgggtttaaaagtgaagtgccagaagatgatcctgccagtacagattcagttgttgttcttgctatagttcaaaagaaagacaaaggaaaaagacccatggtttctccaagccctattcttcgtttgaaaaggaaaaggccctttagtattactcttgaaaacttcaagcctcattctcattattattgttacaatgatcatgttagagatatgaaattttatgaaaataagagtttcactacggagaaaaatttcaatgttattgctcataatccttttgcggtgtataatttgttgaaaaaaagacaatgggtggatacactgatcgggtttgatggttatgtggattgaattttcaaggagttttatgctaatataaatgttgagagtctcgatgaggactcttttatgtttggcaaagtctttgtcaaagaacactggtattcttttactatgatggatgtggctgaagctctctatctgcctattggaattgaactaactgatgttaaatttgatcatcaaaaggtcttcaggtttctcactggtgtcaatgatatggaactctccgacacaatggacatgtctcaacttatctaccatcatgctgctcttatgaggtttgccctacccaacttatttccttgctccaatctagtaaatgtttcaaatgaacttgctttctttttgtataaagtttctactagtgcaaaaattaatttggcttatatgattagggagcaaattgtctctcttcgaaaggtcaagaaacctagggttaatcttatttttcctcacttgatttataaaattttatctaaccaaaagatgttgagtcttgagaatgaatctattgaatttccttctgttggtaccactttcaaagtcctagagaaatctcctcagggaaaatctattaagaaaaaggcttggtctactttgcctggtgctactaatgaacttgctgctgcatctgcctccaatttttctcctacaaaaatggatgaattcaatttgcgtttagtcaagtcttacttctcaggagaatggacagcatcatgaaattctttcaatccaatgatgatgcttaagtggctcatttttttttatccttttgcttattctctatgttttgttgaactccttgatagacaaaaatggagaatagtatttatcttttggattgttggttacaactctggatccttattttagggggacttgttttgtttgtggtttgtgaacttttccatttaaaaagttatttattttatgtgttagtat

SEQ ID NO: 219225 - DNA, 2558 bp, Cannabis indica
taatgtaagcccaaataaaagtctaacatgataatctgattttgtgttagaacgggccactacttgctcctttctaaagccccaattgataaggttgcctccaagaaataggcaaaagtcattggttgacttgcaatcatccatatttgaagcccaatttgcatagaagtagacttttaatgtcataacagaggtaggggaaaatggagactaggataaactattttgaaggactttttttacaagcattccaatgattcattgttgaggccttgagaaattatatgagtttgttaacaaagaacaaaatgtcttgtttggtgatagtgaggtattgaagtgttccaatgacacttttatacactctggattgtcactttgtggactctctccatgacatagttgttgatttttatgtccatatcagagttagaaaagtagaagcaaatttgataaaaaaaaaataatctaataagaaccataagctcacagatctcaacataatgtatatagattaaatctagactaatgaatagaaagattatacctcttgtagcctattaggggatcctcgttatcttttagtattattatcaaacatccaatccaagaactttgctgaagagatcactcgacaatcttccaagccagcctcaacacttagaatagaatatgctttagattctataagataaatataattatgtatcacaatatattctcaactcatgaggtactgtgatgagatgggattgattacaaactcacaccaacacttaaatgtgtgtggcgtgtgagactgagagaggaagagagagagaactttatttttcaatcatattttctctctgcttgttacggttgttagtttataataatatataacatatatatattattataaataaactctttaatgaattctttttaaaataaaagaaaatatctaagatttaaattcataaatcaaattcaaatatgaatatcttataactgattaacagaatttagttaaatctttttattttattattatctttttaattaaatagattatccagtaatataattaattcaataattaaaagattaattaattaatttaatttgaattattttaaccaataaaaataatcaaataaaattaacatgagctttatatgtcaccctacacgtgcagactaggcttatacgtgtgggtcatattttaagatctaaaattaatttctccattttaccataaataagattcttttatttattatgccaataaataatagttaattaattctcattaatctcttatttcacaaagattaaaataaatatattttaactaattaactaatatttgagagtaatactatatttaactaattaatatagttttatctaataatactaaatagttaaataatatttaagtatacaattcataattattataattattcaaaacaataatttttataaattactattttgcccttaataatttttttttagaaattaattctcacacaaatttactcatcaaataaaaccctcccctgtacagtgttgtatagaggtgactcagggaccatagaactatattttgaagctccaataaatacttgataattatcaatctcatcaataaaataatctgatttattaattccattattactccactataaatatggagttagttaaagactatgattgtgaaatcttttatcattttgggaaggccaacgtagtggctgatgccctaagtaggaagggtcctggacaagtatctaatctatttatgatttcacctcagttggtagatgacatggtcagattaggtattgagtttattgtgggcaaacttaataatctgacattgtaatctgatttgctagacaaaattagaactgcccaattaacgaattcagagttagtgaaagcccgaggagaggttctagttggtcaagctaaggattttacaatatcagatagtggattattactttataaaactcgagcctgtgtttcgagtagtctagaattgaggaaaaaaattctcgaggaagctcataccactccttattcattacatcatggcactaccaaaatgtataaacttaaaacctttctattgatggtgtgggataaagaaggacgtggtggaatatgtatctcgatgcttgacttgccaacagattaaggttgaacatcaaagacctgcaggattgtttcgacctttgactcttactgagtggaagtgggaggatatcaacatggattttgtggttgggttacccagaaccacgagaacgtttgattctatttgggttgtggtggatcgatttactaagtccgcatattttctaccagtgaaaataacatttacagtggatcagtatgcatacctatatgttaaaaaaatagtgagattacatggggctctaaagtctattatatcagatagagattcaaagttcacttctaagttctggcaaagtcttcagcgagccatgggtaccaagctgaagtttagtacaaattttcatcctcagacagatggt

SEQ ID NO: 219226 - DNA, 6894 bp, Cannabis indica
aaaaattatcactaaatgtaattttaaaatgtaaaaaaaactttgtggatataataaagtccttaatttggctcgagatagtttcaattatagatgatgagttattatatgcttgaattttatgaacgatattatgttcattactacataaaaggccatttgagactctttttcgggacacaacatattttttagtgtccctactttgttggtttgattatgatgttgttagaatatattgatgttgttatgttgtgatgttgtccatgttcttattggctttgacctaaacctcttttctatcctcttacaggtaattctttagggtaaattaagattgtatggcacgattggtactgagcaaagtgagttccaatacgaacgagtaaacgctctagaacctcaataatgccttagtttcatgtttttatctaagtactctaatttagagggaattacagtttcatttttaagatgtatttggatacttgttttgttttgtgacttataatcaagatatttctattttgcatattcatcaataaaaataaccaaaaaaaaaaaaaaaattgagtgttacaattcccctagataatttatgggtctcattattatcgtttttttaatttcatttgttcattttcataattgaaatactggttgttatgtctcggctcaataattacaagaaattatttgtttgtatatccactttatttgttatgtcttggctcattttcttaattgaaattacattgtatatccactttatttgtattaatttttatcttcattttcatattctttaagatatactcactgttataaatgataatgttcctattagacccttaagattaatgtaaattatatattaaacttccgtagagagtagagttatattgggtaatctacttataaaagtagatatattttaaaaaactataatattagagtattttttattaatggatagaaaaaaaagatatttctcaatttatctccaataattatagtttatggtttgtgacactatccaattacgtattcactagtatatgactaatttataaatactaattaataactaaaatttacctatccttacataataggtttcataaaaaaaaagattacattatacactataaaaatttagacttttaatcacaacaaaaataatttataactaaatgtatatttttatcgcaactcataagagataatattttagtcataataaattatttgtgataatttttaaattatataattagtgactaaatgttacttttacgtaaatttaattgtgactaaaaaaatatttagtcgcaatatattttatgacaataatctgtgactaattatcatttagtaaagttgtgactaataactgtcttttagttacaactatttattttgaagactcatttactcacaacaatacttaattcttttgtcactaaagatattaaaataaaatttaaaatttatatttacagtaaaactataaaaggaatccatttcttcttcctctctcttgccatggctttcgtcgtaccttctccatttctcatttcattctccgttgttctcactatcaccgacaacaacaaagttcttcttttgttcttctttctcgtcgctgccaaagaattttgagatcttcgcggctctacgatcgtgccctgagtcatgtggagagaccaaactatatctgattggccacaggagtgaatatgatgctatatcgaactatacggagcgatccattgttagaagtttattggggtcacaattgtatatataaaatgtgtgttgggtcatgacataaataagtaaaatttatgtggtctattttagaataaaatttatgacttaagggcatgattgtctcatgattttaatatgtggatagcataaggacaatttctattttgatgaggggccaaatagaaatagttaatcaatattacaaacagttttgtctgttggtaatataaacggtaatggtctccaatttatatcgcatcttttcactcttgtattcccatcaccaagagaaaaagtttcagagaaaagttttgatacaaattggaagatcaaaccattttaaaggtcgattctatggactctggtacgctttcactatttcttaatcttattgtttgattcttatgaattatgatagtcccaccaatttgtgtcttttaaataaacactatgaacccatttcacccacaagttgtcttattttgtcccaactgcctaaacatatttcccaagagcagcttcattccataactatgtgtttcggaaccccaagcccccacctgttttcgatttacaaagctaagaccaagagtcatataaccaggattatttgtatcagatgttcctttccataagaatgctctaaaaatggcatttatcttctttaacactgtttttggaagaaccattatctgcgcccaatatgagtgtatagcaataagcactgaatttatcagaattgttcggccagtaaaggaaatattccgagtcccccaaattttgattctttgaaccatcttctctactattgaaccacattctattgttgttaatcttttggcacaaatattcgggatccctaagtatctaaatgatagatcacttgctcctaataaaactcgagaaatccaatactctttgaatctcttccctctttcatgccacaacaatacaaagttgatttcatttcatttgggaataatctagatgacttggaaaacaatttaagaccttgtagaagaaagtagatagatttaaaatctccatgacaaaataaaacaacatcatctgcaaagcataaataatttagttttaactccaaacacctgtcatggaatttaaaatctattttctttcaaactttaattaagatccgagaaaggtattccatatataggacaaaaattaggggagacatagggtctcattgtctaactccccttttaacctcaaaaaagccatgcatggttccattaaaaaaaagactaaatgtaggagttcgaatgcataccatcactaattcgatgaacttgtggggaaaattcatggcaggcatcatctcctcaatcaagtcccactcaaagttgcataagccttcctctgattcagctttatcatacaacttggtcttacgttcttcctcccataatattttaccaaatcttggcaaaatattatattgtaagcaatatatcttccttgtttaaaaccactctagttttgagcaacaagttctggtagtacctctcgcaatccatcttggttgccactttgtaaataacattacaacatgctatcggtcagaaatcactaacactttcaaggcattttactttgggaatgagtgttagacttgtagaattcacttctttcaacagcttgcctgaatggagaaatgagaggactgcattagtaacatctttcccaacaattatcttggaaaaaatagttactaaaatcgtctggacctagtgctttacaactaggaatgctgaacaaaacttatttaacattagcttgtgtgaattcttgcaataaaaaatctctcatttgttcagataattttggcccttgattgataatctgatggtgtacatgcttcctttgatccatcttagaccccaacaaggtcttatagaaattcaggaaagcttcactcacttgatctggttctttcacccatgttccttccatagtgcgagtagaaagaactctatttttcatccttctagttcttaggctagcatgaaaaacagttgtgttatcgtcaccttccttcaaccattgaactttagttctggtgaaggaaagagagatatggtttgtgaatctccatgtattttttcctcgcttccatctccttctgacataaatattcatttaatggctgattttgtaaagcagcctgactgtctatcatattatttaaaagcttgaacatcagcagccactatatctccaactcgagttttgccttccacatgcttcttccagtttccttttaacagctccacaaagccttccatttgctgacacattcgaaaaaaattgaaaaggctgtctttccattttaaactctggatataccgttaataaagctgcacaatgatcaaagagaccttcccaaataaaaacaacctcaacatttcatatttattcaaccattcttgatttgccaagaccctatcaatttttgaatgaatccgagtagaaatttcttgcttattgctccaatttttgactttacaacttccatacactccttaaacgctgttgatttacttactttgacagttctccccactctttcatcggggttcaatatatcattgaaatcccccatgatgagccacggttctgtactattggctgctatcattttttaattcttcccacttcatcatttaaggcatagacaaaagtaaccaagaaagaatccttgttacctattttccaaaccttcaaatgcataatctgactagagcatttcagaatatccattgaaaaaattctcggattccaactaaatattatcctacctccctgatgccaaggattatttgataaaaaataccaaccagaaaacataacttgataatgattacctaacttttgagctttcactcgagtttcaaggagtccaaccaaaaccacttgaagatatcgagtttgttgagaccccttacattccaactgataattatattcatgaggcacatgaggtgctccccttcctcatgtgttatcacactttggatcccctatttcttgttccatcacaggtatgccatctggtttctcaagaattttgaaagtatccatgaggcacaggaggtgctcccctcctcctctgttatcacacttatcttgcatgaaataagttcttggcagaactatgaagactcacaaggtgtttttgtattttctacaccaaaaggaaaaacttcattgggtgaaagaaggggatgaaaacacttccatgttccatgccagtattcgtgctcgtaagattgccaatagtatgtattcggtgactgatatgaaaggaaattggtatgacaaaccttaaggggtgactgaagattttttaatgtattataaagacttgcttggaaccaaaatagaacaagaaaaaaaagtgaatggcggaataatgaacctttgaccgaaacttactgctaaacaaagccaaatgttattgtctccttttacaaaggatgatgtaaaaaaggtggtttggaaaattccaagtcacaaggctctaggacctcatgaatttagaagttatttttatttagaagttattttttccaagaatataattagaatttggtggggaatgaagtttgtgatgttgtcttgtcattcttgcattcagggaagcttttgaaggaaaaaaaaactccacagtgtctcttattccgaaaagtaaatgtcctgctaatgtgagtgattatcggcctattgtttgctccaatgttatttaaaaagtggctacaaaactgatttgttctagattgagaataatccttcctgatctcatatctcaaaatcaaaatagttttgtacaaagtcgattcattgcgtataatgtaatgatcaatcaagacttagtgagacattgtggaaggaaaattcgagacccaactgtatgattaagcttgatttgaggaaagcctatgatacggtggaatgagatttcatagaggaaatgttacaagcgcgccttcaaatttcctgaaaattttatttaattgattatggtttgtatctgagcacttaatgataaatgggtagttacatggttattttgaagctaagcgttgtcttcgacaagaagatcctatgtctcctcttttatttgtgcttggcatggagtacttatcgattgaggattttgataaaagttaggaataaggaaggatttaaatttcatgaaagatgtcgagggctcgtgttaaattacttatgctttgcagatgatgttttgatattttgtactgggtacttcaaatctatttatctattattgcaaggtttgaagctttttccttaaactaatggcttgcacccaagtgaggctaaatcgacagtgtttgttgtggaatggagcaattcaaagggtccttgatgcatcaagctttgtgagaagctctatgccatttcgatacttgggcattcctatatgtgccaagagattcgccgttgttgaatgtgaaggccttataatggtggcccaaattcaaacccggagctcccataacctcccctatgtaggtagagtaactttgatcaattttgtcttagtttctatacatgcatattgagctcaaataatgttgctgcccaaaagaatattgaagcaagtaaatgcgatttttcgatcctttctttggaaaggagagactgaatatggagggtcgagctatgtgtcttggggtaatctttgtaaacccaagaatgagggaggtttaggcttcaagaaattgaatccatggaatcaagggaccttgggaaaatatgtttgggcggtggctcaaaagcaagataatctttgggtaaaatgggtgcacaatgtttatatacaaagcaataattggtggatgtatgattccataagtcaaggaagttggtattggcaacaaattttcaaagtgaaagagagatgaagagaatcatgacagaatatcagctgcagcaatgtcgataatacactatccgatttggttatgatgtactgaataaaatgggggagaaagttagttggtatggacaggttttggggttgttataatgtaccaaacatcgagtcattctttgttggaccgattgcaaactaga

SEQ ID NO: 219227 - DNA, 6972 bp, Cannabis indica
tgagggtattttagagatattataaaaattgtcattatttacaatattagttatattattagaaaaaatttttaccaaatgtaagcattaaaaatcaaatttcccagttttaaaagcggaattagtagttaaaaatttaaggacaaataactcattgtcctctcataatatatgctatttttgttttaacaccacttctttttatttttatttgttgatagaacaccaatgtttgtatctcctatccaaattgccaaatatattggtgaacataaaattggtacatcctactagccaattaattaactatgacgtgctgtcacgattgtatcaaaacgcgggtgagtttatcatttacattattattcttaccatctatattctattctgcgtcattacacaagcgtagaattgtcgtttttcggaacaacaccgctactgcaacgatccaccacctctttctcctcctgcccggcaatctctcacagcgtttgaccatctgcggtttgtaaatcccttcggttggtttttgagatctctctaatctgttgctcaattttgtgatttgatcattgagttatgatcggtttagggttttatttgatttgaaattcttttttttgttgttggcaataattcaatgattagggtgaagatgagtgaagttttcgatggttacgaacgccagtactgcgagctctcggctaatctttccaagaagtgtacggcggctggtactcttgatggaggtccgttttatttctggccccttgttattacgttttaggtcaattatttgatgatggggttttgaaattgatggaataccttgaataattaaattttctatttcaaagtttgacaacagagttcatttcaatttagacctgaatttttgtgctttttgtttggaacgatggttatgatggcttttagttgattggggtttttgggacctggacctgaacatacaccatagattgtaattcatccattcgtattagcaaatgaatttgaggaacttatcaaaataagagtcattgatatgtgtatttaaaaattttaagattttacatgtgcagagcaaaagaaacaaaagatttcagaaataaagaccagaattgatgaagcggaatctttggtattgaattgagtcgttgttttgattgtttactgtaattttttattttattttctcttttctattaaatgattgtttgtttttcacctaaatattttagattcagaaaatggaccttgaggcaagagctttgcagcccaatgttaaggttgtgcttcttgccaaattgagggaatataaatcagatttaaacaacctgaaaactgaggttaaaagattagtatccggaaacttgaatgcttcagctcgagatgagttgttggagtcgggcatggctaataccttgacggtatgcatatatcataagaatactttttctgccttttaaagtgtctctcattttcactgctcttacatctaaatttatactaatgaatttttattaaataccatgttatcttatagattcaattttgaagttttgaatgtttattctttgaatttaatcaagtttctgattctaatgagaatgatgcatattcattaggcatcagctgatcagagatcgagattaatgttctcaacagaaagattaaacaagactagtgatagaattaaggatggcagaagaaccatgctggaaacagaggagctgggtgtctctattcttcaagatttgcattcacaacggcagtctctcttacatgctcataacacggtaatgcatagctaaaggctaaattaatttgtgctatttgaaacttccaagatggctcccctagttttggtgtatgctgcctcccattatacaagactacatgttaggctgtttttaaaagtgcagattgctggtgtctgtgctttactttaggcgtcaataaagaaaagattactataggattgctgaaacccctcctttttaaaataataataagaataatatagttttctagtaaattgtgattttcttataactgcatccaaccccctaaaaactgagaagatagcatttcacaccctgtaaaaaaaaattaaatagtgcccccacagcaaattgtctagctctgtccctggttcctgcaagatgtaacctttagactaactattaagatcaagatcttgttgtagtctaattagtgcgttttgttttcttgtagcttgatggagtggatgacaacgttggtaagagcaagaaaattttgactaacatggcaaggaggatgagcaagaacaagtggattattgggtctattattgcagttcttgtcattgccatccttttgatcttgtacttcaagcttacatagtcaggaaactgatgtttgttgggttacgcttgcaagtgtttccaggaagtgttatttttttttcttgccttcaaatttctggggtcgttttgtaagtcttaagtttgtaattgagtgataacgtgtgcagcagtaatggaagtgcaagtacgtgtgttttaatatttcttctctatcatactttgattttatcattattatcttcttggttatatattgttgatgacaaactgaatcgtgtttgctaacatgaaatttaaaactaaatgtaaaaaaattattaaaatttaaaatcacaccaaccaaattttattaacatattttttgtcaagaaaattcctttttatttgcgagaaagtctttcaataaaaaattgtgggttaattaaacactgaacattaaaacaaaaaaacaaaaatctcctgaaagaaatttgagagttgagccgttactgcctactggttgtttaagttttgtggatttttgtcactcttcatgattctcttcgcagctacgatgaggaaggcagttacccaaaaatatgaaagctatctttacagtgtgccaaactaggacacttgaaagtatcatcatcatctttgcaacttttcgatctgcaaaatataagatgttaatacgaggtataaatataattaataatacagaaaattcatattcataaaaataatgatgatacacgaattagaatatcaaataattcaaactcacccttttctccttttgcacgtagaattctctgaatgatcgataatctcatactcaaacaatatattctcttctatttataaaagacaaacactaagataattaaggtttaaatttttaaatatttgatagatattatcctagatttttatttatatataatagtatatatataaaataacaatgaatagatattagatattatcctagacaatataaatatatttaactaatttatattaaaatttagattatatataaataataatatttgcgatcacggttcaaaataattgaataataatattgtgattcattattggcatgcattgcttccttattgaaaataataaactgaataacaccttaaaaattgtcctttttttttttaaattgaaatgaattattattatatatatattttttttttgacaatgaattattattatatttgatttgagatttatctctaactagaaataagaccatgggtgtttagtgcccaaatcttatgaaaaggaaaatatccctctttttcctacttcatgtatttatataaattcaaagtcatatttttaatattatctgtcaaaaattgtaaaattctatggtaaaccctaaaaaaataattattgatttactgattattattacataaattatcataactctagttttttaatatgacaatcataactattaagaggatcaattctataaaattttaattctataaaattttaaaaaatttaaaataatttataatagtgcaaataatattaaaacagtctattatatgcattatcttattttatttattaaagaagcatatcttatttattctatacatatatgaaatagaactttaaactatactttttatagtataaattattttaaatttttcacaaatttgtaagatattttaaataattattatacaatataatataaataaaattgacattataactatgggaatataaaatatataaaaaaaaaagtgtcacagtatattaattttttagaaacatgctattaaatattcaaaaaaaaaagtaaaaattaatacattatttcatataaaaacaactaaaagattaacacattctcttaaaactaaatacaaatatttttcattttcatctataaatttaatagaattatagcattggattggattacttggattgagattggaataattttgtattagtgtttgatgtagtattggattggataaaatattttattcattttaaaatataaaattatttatttattaggattttaatttaaaaaataataaaatataatatatctatattagagtgtgtaattatggtagaagagaagtgctaccgtcaacctcctgttacaatctcttagtcaatctctacgctcgaaaatatattttggtactgtaaactattcggaaatttttcaaaaatttacagggatgatacagtaactatgacgaatactgctatgaaaaaaaaaaattaaaaaaaaaaatttcgacatgtgatttcggatgtggaggttaagtaataagatgttgtaattagcactcctctatagtgttgaaaatagtaaaaagtggagcccaccatccacacaaattgatctactttgggaaaagtagattattaatccaaagataaataatcttaatcctagttctagtcctatgtaccaaaccacgtccaaaattatattttattttgagaattaagaaaaataattaatttcaaaatacatttgctctagaatgaaaagtatctaattataattaatttagatagtgtttagttaaatgaataaaaacataggaataagaatgaacatgagaattaattttttttttttaattttaaatattagtattgtaaatattacttcaatatataatactactttaatatgctaatctttttttttttatttattttataaggagggttgcagttactcaaatatattacgatgatagtgttgaattggtctatgacgcataatttttttctacttttttttttcaagattaacagtttatgttgaatagagagttgaatttagttctttgtattatctacaagatcctttatttgtattgaattatttaagatatttattaaagatttttactagtttacttactaattttttaaggcgtccctaattaatgttcgtattcatgaattaacaagacatacactcagagtagatagtgaattagtttggataaattccctgtcgttttttcatgatgtactactctcttatgggtttttaatgaaatgttttttcattgttaaaaaaagaataaatatgagaataggaatatgaataagatagaatcaaatttactaatatgaagcagtcgcgttattaatagatttgcgttgggctcaatatgtgggacttcccgtggagagggtttttctgattcactttctttggtctcaactggagggtctgacattgtatttgcatgaactgggggttatcttttcagatattaaagttttattgtctagttttcctgaggcatctctctcatgcgtagcaactttattgttgaggctcatagattggctaagcatgtctttaggatagacaatgaactttattggatgaaagaaacctccccaccttttgtgtaacttttgttacccttgttattttaacatttatcggttaacccaaaaaaaaaaagatagaattaaatttaaatcgcataaaaaatattagcttttttcctcattttgtattggaattatatttcattttatttcaaaacagaatagttattttaccaaaataatattctattccattagaccaaaattccaatactaatgaaaaaaaacaatatgaataaaataaaattgtttccctaataacttatatgctatttaggacttttacccctgaattataacctatgtattattgtgtccctaaattttttagcttgttaaaaatagtccataaactataatacagtgttgtgaattggttcgtgaaattttttcacgcatgacaaataaaataatgacctgattgttaaccaattaacatgtatgtcaaatttaaaaaattaaggtgaaagactttaatttaagagcattgctattagtaccaatggtggtatctaacatcttctataggtgaagtcgcacaattgaacccgatacttaattacttaatgatataataactttgagaatggtgccaagaaccaatagttctttttagttagggtgtgcataaatcatccaatctaatgataaccgatcgctccaattataatcgatcgctaaatgttggatatccaattatgatcatatcagattttatgttatttttgaatatttaattagatcggatgggatgttggatggggtgttcaaaaatctaatacatccaacatccaatcgaactaattagtatttttcatttagtttggatgagtaattagattttataatattatacataaaatatatatgtatatataacaattaacattaaaattttactctttttttcttagattagatggatccaattcaatccaatacatactggacttaaaatattggatggatccaatccgatctataagaatactaggtttaaaatattgaataaatccaaagtaaaccaataaatatgtacatccaacagatagaaacaaaccaatccaatatcttgattggatgactaaaattaattgaatcagatcgaatagtaaaatctaacatccaatatataattggattagatctaactatgcttaaaaatattaaatgtgatccaacaataaaaggataagttgagaaatacctattt

SEQ ID NO: 219228 - DNA, 5315 bp, Cannabis indica
ttaggacttaacgaggctagacaaacgataccttaaaaatgtaaatggaacattactttggagggttttcccaccaaaatatgaggttagatgattttttgcaagtaaattgatagttgggggttttaccgcaaatttctctttccaatttctgcactatttatttctggttctgttttgattctcaaaatctgtgttttgcagtgacaagattgcaatctgttgctgcagactgttacaattgcgtttgtactgaaatttagtaattattggcatttggaaatacggtttttcataaacaattgggcaaaaatgtgtttcttaatcaactttttacagccttgaagtaaatcctaccaaaatcaaagttcagttggccaaatactaagccatatttttagtagttgtgttcacttaataaagaccatttttagtcacatatgacatggggtcttggttagtacagcctcatgcaatgaacttaagaatgtacatgtaggataatcctgaaatgaagttctactcatggttttttattcttaattcagaaagaacttaagggttaacattttattttcttctctttttttctttcctctatgaggcaacattaacatatggtcaaattttagctgaggaaaataaaaaacatacttctttggataagaagaattatttagcagtctctatccactcaagtatgtgtagattttaagataaaggtattactgtttgtttcactttttacttataaaccaatggttctcagcttgataaagcttgtaataatttcttattattgcaaacatttagtataggatcatgtgctcaacactaagactagtgaggtatactactttgtagaagaaatacaataagattcaacaagcatatttgatatttagtttatcaattatgttgacttttgatgaatgagtacaaacccctttttttgtgctcaataattccttgattttatattcgaaaataggatctttataagtggaaataatcatccttaacttactagtattttactcctacctactagactagtatctaatttttaaacatgattttatgatcccaattggtccatctttgcaaaataacaaaccttttcttttactcttttcttatgcaatgtgcagcatcaaaatttcgatgttgacaattatatgaacttgattattgtaccttttgaattttatcttcagcaatgttgacctttttggttggcaacattattgtccttatgatatgtggtttttggctttggcctaattagtgattcaggttggttggttccactattcaattaaattacaattagtggtagcttaatcatggcctacataagatatgtaaataaaataccaaacctaatctttcagtggtacttctatacttaattctagattctatgagtaatcatgttcctttgatttcaatcatgtaaaagtaagtggaaatatgattttgttgctgattaaggaatcctgactcttttttctaaagggtgtctttgacaagtttgttttatatgccatattcattttcagagagtaccatctaaagcaaaaaacacttgctgcaacaattagaatatatttgtatattcatgtgaagaatgtgagaagttttattgaatctttttaaggatctatctggacaaggaccaactaggaattaacatggttttagtactagacaagatttagctattgaaattaattgagctagtaatttttgttgaaacttcattgctgcaacattgtttgctgatataagcatttctttaagccttttatgtatatagatggagaccagtgagtttatcttacatagtattatttcacttatttcattatgttgtaaaactagtaaaacttacaaccataaaaggttctaacaactgtttatgttaacagtcttccaagacctttaatgaattcaatttcaagtacatgatcatcttatccagtctgtttttctttctataatgtgttgttgttggtgatttttcaaccaaaaaagtatattctttaattagaggttggattattttgatagaattctacataagaaacaaacacaggaaaggaggaagagctggagtggttggcaggattagttgccatattaaacaataattagtggagaggaaaaacttgtgttgtttaggttctcatatatatattattagttgatttgaagatgttttaattgaaaatattcttgctcccatttatgattttaaaagtaattactcctctcttttcttttaccttttgctcaagagtatatcctagccaaccaatgatgggacaatcatgtggctaagatcccacttttaagcccagacaaatttatgtcatagtacattttgctatagtaaaagtaacatggctgatgcaagagattagcatatcatttcaagcttttgcctttttttcattttttatccatgatatcataaatctgaaatgcccttatttttttggtctctttagatatttcatatcagaaatttcttaacagaaatcatatcttactaagtttggcttaagaagtgtatgcatgtgtatgcatcaatatatatatagataaaggtctttggttttaatagtagtagtgactcatgcagcttcattgttctacaagtagtaaaagggtacaatctgaaatgttctcctaatccattgaaccttgtgtcaccctttacaacagccacttgaactcttcctttttctttcttgttttcttcataaatttgacctttaattgataagaaaagaggagtatagtaaagtgaaatgaccttaatttttgggtatatgattagtggtgtatgccatctaaaaagggtagtgagtggaattggctctagttttcatgaaagtcattttcatgtacctgctatacactgctagacaacaactcatatgttaaaactgttttttgagtgctgtgaacgtgacatttcatcatcatttgattacctctctactaacacttttgtacttatcttccaaataacttcatttctctcgtgtctagaaattatttcaaggcactaaattgaactccaagacaatacaaaaagaaaaaggatttggttaaagtaatggtcagttttgtatttcaattttcaatctatatccaaagaattatttcgtttgtatgattatatatatccaaatgtcattaattaatagttaataataggtaataataggtggaccaccctgcttgctgtgtggaacattaataagctcattaaaaacgcagtcgtttcaatgaaagtgacacttaaattcacatgtgtgctgtatacttggccacatcgcctagcaaaatgagaagtggtgggtgggcgtgggtggtaccaagtctactattctatagctattgtgaattgaaattgagaaataggtctccacgtagtttctgattttttttttttttaccttatcatgtctcatgaaacaactacttcccttttatttgcattaaatcatgattgatgatccaattcatgtccaacaacaccattgtgatttttggaccaagaggaatcttcttcgtacacccctatataataggctatagtaaataactgcactgtcatttccatctacatataattcttcccataaatgtagtagtaaatagtattactagtactaccacttgtactgttatttgaaataataataatgcaaccaaacattgagattataattggttcttctctctaagtttcactattattttcatttcattagtgaaacctaataagacatatagtagtagtagtatgttattactattgcacatgtgatgggatatacgtctttatatactggaattggattgtttaaactatacaggagaatacaaaatatgtactggaatattatatataatgaatcaccaataatttattacttatatatataagtaatatttagttcggtgaaattggtttaactacatttcaaaaggaaataaaaaacaaagttgtaatgtttggtatgggataaaatttgcacgggaataaaaaactctgaaaagttaataaggtggaaatattcagattacttaggataataatcttaaattcttctgaaattagtggactttaaaatattcctattaattatataatatggtaggtctaacatacaattaattttaaatcattttttttttaaaaataatgtacgagacttaattgtgttggaccaaataaatatataattcaatgaatataatcataactaaatattcacatacacaaatttacatgaagctgaacgcgtaattttttttaaggcaaaaataaaaataaacgtaaaattaaaaaaaaaagaaatactcttagtaagaattgaacttagacttctattatgtctataaatattatcttttattataaatatatgtagtaatcataactaatttaatatttatatacatttttttttctctaatttctcttttttttaggggcaaaaaaaaaaagtggtccgcccctgtacatgcttctatgcagtacacccctatatatatgtatgagtatgagttagatatttaatgtaaccttatctatacatatgtaaaagattgaaagtatgaaatatttagttaaaaagaatgaaagacacagaattttattttgcagtttttagttattttatttgattggagctgctattaattaattatgctagttggtgggggattctagcagttaaataagttcatggcatgtgccccaataatggcatccttaattatttttatacaaccaccaaccaaaggaaaaataataatatatctctcaaatttgaaatattatgatattaataatgtatattatatattactaattatgtatgattaattatttttaatatattaataattattgatgaaactgtttatttctctcctaattatcgtctttaattaatatactttatcttctccatgtgacttcacaccttagttctagtggcaattcaaaacaaaatacaatcttcataagagtattaataatggcaaaaccccatatgcactaagcttgaatatattaatttaataaaacaagctgaacaaaactaaactaaacctttgattaaaataaagtaactggttattattatgtcagtttgtgtattatctgaggttgtagtacatgtgaggccaagcaaatttggctaatcccatcattggtttctgtctttttgtacagagattttttcttctttatatatatgagatttgaatattttcacatataacatata

SEQ ID NO: 219229 - DNA, 4135 bp, Cannabis indica
ataactaatcagattgtaaagggttttatttagggcacaaaacccaacactattttcctttattagggattttataattaaacaatatctttggctttttcatgaagttcagctcatgaagaatacgatctactgactaggaagattggagtttggttgatctagtcaaaaccatgttcgctaatggtggattattgttttgaaataactggacaatgtttgttatgggaagtttcccctttaatcgtgatatgatattcttgcgtgatctaacaattagcatttcattatttataggcagaaatgaatagggaaactagaagggtcttccgagaaggtactatcttacccctctgacctcatgataccagaggtgtcttccaggttggtcctctgagggcagaagactctacgagttcggaattggaaggacatacctaagtaggcttggcccactttatctttgatgaggttcccactgatgggtcttgaatactgaccttgaatccacatttccaatgccaaaagcgcagataatatttatccccaaacttttagtatgttgcacatggtggaagcttgctctaatctctttatttggacatgtggagatttgagaataaagtagtgatatttcacatgccactcgaccacgaaagctgacttctacctgtgatgatggtgtgtccacgtggcagtcacacgtgtgatagggcgcgactatcgaggagtgatctttcaggaatggctatatttcaatggctattcaattttcagcgtgaatattgaaaaaggagcatcttcctcattgcatcacgcctttattccggagagcagtaaatgctaggatacacattgattgctggtctccctaattgttggatggaagatgcgtttctgaagaaaagatcatggttgtccatatctttttaacgtggatcacctttttgggtataaatacccttggtaacctccagttacaacttttacttctttttttcaaattttcaaatcttcgaagtgcacaaatctccctacactctactaaacttcaaatatcctttgaagagaattcttttttctatcaatctggacaatgccatggacttttgtcttcgtctactactaagaatcagggcacgagaatcccctcacgttccttctctagtgatcaagatggctacaacagaggagatcacaagcctagactttggagtagagatcgactcattgatcgcctatgcctctcgtcttcaagaaaggtgcaatgaaattagggctacacacgagtcgggttttcgggtgggcaggttcgggttttcagatttcgggggtttgaaatgtgtaactgaacccgagttttgggtggtcgggcatggcaggtttcgggtcggattctgcgggtttaaggtgtctgggtttgggttttattaggcagtccgaataattatttttgggccaaaataaaactagatttttaaaagtactatcttttttctatttttctatttttctatttctattcagcgggcttaaataaaaaatgtataacataaaggactgaaaaatgtataatataaagcatataagtttaaataaagaactacattatatataataaaaattataatttattatcttgtacataatgataatgtatataatttatgaatataaagaactgaaatagagagataagaggagaactcaagaagaaatctcagaccgacagtgagcaagtgggcatgggcggacacgagcaggggcaccagaggtcagatctcagaaaaatagaagagggataaggagctgaagaggcaccgaagcacagctcgccgaactgagctgaccattgagatgagaacccgctggagaagaagaagcagccgccgattttcttgggttacgattcagtttacgaatggtaatatactctttttattttattttgttgttgttgctgctgttgagagaaaaggaaatcattggttctacaaacattcaaagagaaccgaagaaatgggcaactatttttcatgaaaatgatccaacccattatcggctgactctgtctgagaacaatttaacttttaattttaagttttaaattttaatatattttttcattgtaataaaaaaaaaatattttaaacttaatagtactattcaggtattgagttaaaacccgagtaaacaaatgtattatttaaaacccgaacctgacacccgtgttgagcttttttgggttagacccgacccgactacacgggtttcaaattttttgacttttttcggcagtgagtcagggcgggtggttgggttttcagatttgtgggtctagatgttcagccctaaatcaaattcttgagccaaaccctgcaacaatcaacttaacctctcctccctccaaatcaggtatgcattttttttttataaaacacattttttgaatttgtcattttgaattacatctgcatgctatgtcttgggatgaaattagggtttgttgattgtgcgattgtcatcgtagctagatttagggtttcttaaatttcccattttgtaagcccccgacttgatcgatttaagctgagaatgtttacaaattcttctatttgtctaaaatcccttaggtgttggggtttatttttaatttttgtcatctccttgcccacgtcattccagacttcctatctggaacaagtaactcttgaaagttctcatttctaggtagagagtccagttgggacctctccaaatagtttatggaggaggaccccatctccctttctatgttaggtagttagggtagctaacttggaattccttatcctatagggacgccacatgtgtggttttataaactagtttagtactaataaaataactaattattaaaatttgtgataagattaaaaacttaagtaaaattaaactctaaaaatagacattgaaaggatactaaatctatgtttcggggatccccattgtaaaagttttacagaaaagctaaatacaacaacaagccataacactaaatacaaatacttggcagatacaaccgaaaaacaactcctagaaactcgacacgcaggctggtagtgtcaatatgtacattgctggagaagactgtcacctcatggctaaactagcctttctttgcctttacctgtaccacatagcacccatgagctaaaaggactcagcaagaaaagtaataacaacattcatataatttgttattcaaatattatcatttatgttcagacattcataatcaaacattcacacattactcataagatgagatccaaatctctactgtcatttgtcacaattaaacgtaagtatagatattcagtaataaaaaaaaattatattaataatagaagtcatattcatttaataatataaattatatacatgttacctcataaaaatccatctttgttacatcacattgcctaatcagggaagtcgatactttaatcagataatcctgtactgcattgcttaatcaggcaagcccgtgccatagtctagcatccatatattgcataacttcatcacctaatcaggtgagccagtacgaaaacctggcacccatatatcgcataaatgtatcacctaatcaggtgagcccatgcaaaaacctagcaccgatatatcacaaaactgtatcacctaatcaggagagcccgtgccaaaacttgggacccatatatcgcataaatgcatcatctaatcagatgagctcgtgccatagccaggcactcacatgtcactactactcgtgcctaattaggcatcaccgataggaagaaacctaactacggtttcagtttatagtcatgacttatcacggttgtctcacacgaacaactcgaatacctctcttggtatccatatatctcattgcctaatcaagaaagctcaacccatagcctaacatccatatattgcattacctaattaggtgagccctcatatcacattgcctaatcaggcaatgttttcattatataacaatattaactgtatcttaacctctatatcaatcaattctcaacaatattaattgcattgcaagataacatgctatgcagtacactatgggctcgtttggaacgccgta

SEQ ID NO: 219230 - DNA, 4923 bp, Cannabis indica
tttccatttcagaaactcaataatactgatgtacatgttgatcctttctctcatatggtctttccctcatctactttatctcatacatatataagtgactttcctacagcagatccttcctctgtcacgttcaacacaactccaactgatcccacatcagatgctgctgctccaaatgtccaacactataccacagcagccccatctaacatggcaccagatgctactgcaccagaaaatgatgctattaatcctgcatcaactagtacaaatcccaatcctactgcaatcgatcctcctgccacccgaaggaccactcgaatcacaagaccccctacttatctaaaagattatgaatgcaattctattatccaggatcaatcttctacacctcaccccctacataaatttctttcatatgataagctttctaaatatcacaaagcttttgttcttgcaataactgctctctttgagccaagaaattacaagcaggccagccaatacagggtgtggaatgatgctatggctactgaaatatttgcactcctcagaaacaaaacatggacagtgatcaaattgcctccaaataaaagagcaataggatgtcgttgggtttacaaactaaaatacaacagtgacggctcagttgaaagatgcaaagcacgacttgttgctcagggatacaaccaacaagaaggattggatttttttgacactttctcttcggtcgccaaaattgtcacctttaagctcctattggccatttcctctatgaagaattggccaactctccaaatcgacataaacaatgcctttctcaacgcggaccttcaagaagaagtttatatgacattgcctccgggttttactcctcccaacatagaagacaactccaacttggtctgcaaacttcataaatcaatctacggcctcaaacagtcttctcgacaatggtataaaaagctttctgatgctcttctaacagaaggattttcccaatcacaagcagattacactctattcacacgaggatctcatgacacttttattgctctcctcgtctatttcgatgatattatactcacaggccctaatatcaaattactccatcaacttcaagactctcttcatgcacaatttcaactcaaagctttaggcccgataaagtactttttgggatttgagattgctcgttcagcagagggtatatttttatctcaacgtaaatacaccctgtaacttcttactgacactggttacacaggcagcaagcctgccaaaacccctatggacccaagaagcaagctcgatgatcaacaaggcaccctattagatgacccttccccatatcgtcaactcataggccgactcctctatctcactttatcaaggcctgatataacctttgcagtaaacactttaagctagtacatgtcctcccctcgaactcctcacttacaagtcgtccatcatcttctacggtatttaaaagggtgtccgggacaaggtcttctttacaaatccacttcttctctacacctccgagggttctccgactcagactgggctgcttgccccacaacaaggcgctcaattattagtttttgcatcttcataggggactgtctcgtttcatggaaaacgaagaaacagaacactatttccaagagttttgcagaagccgagtatcgtgctcttgccagcaccagcagcgaaattacatggcttcagtacctcttgaatgactttcaaattcctcaaccaactcctgcctttatctactgtgataaccagtcagcaattcacatagcaatcaacctgacatttcacgaacgaaccaaacatattgacctcgactgtcacttcattcgtgagaagatcaaagcttcccctatcagacttacactagttaacacgatattgcaattggctgatgcttttacaaagcctctaccctctactactcttatgtctcatgtccgcaagatggctgttgatgacatttacagtccatcttgagggggggatattagcttaactgttttaccgtttaaataggttaattagttttgtcagttaagtttgttatgttagtttgtctccctcctgctgttgttctgaactgctatatatacctctgtacacttcattcaattcatcaattcaattcagcttttctcttttcttcctttctttcattctgcttttcttattgtaatactcatgatcaactgatcaagtaaagataaatatacaatttatgatttgtcttattgtttgtgaaattgtttgtacttaagaaagtaaaatttatggatgaaataaaaataatcatgtattgaaggttgtttgatatgcaaattcaaagccataagcatattaattaagtaacaaataataataatataaacatgaaaatgaaagcagagcacgcgcctaaagtacgaccatgcaggtgagtacctgatcagtagtctaattaatgatactttaaggaaattttttctttatctttcttctaacttgtatatttctttgttatttcaataacatcacattagtagtaaaaagtgtagcaacaacatacgaaactagaaattacaaatataaatatacttttttccatatatcttcatgcatgcaagtaagagtagacaaaaaagaacaatatgaacttacctcaattaaataagaaattagttacctcattattaattgtgatcttatatattggagaaaaacacaatgaaaaaaaagtaacaattaaaaaaaaagtaaatataattaaaatatcataatcataatgtatataattaatataattaggaaatgaacttacataataacaataataagaataacaatgaattactcctttttgttatcttcttcattttattaaacaaaaataacatgaaaaagaaaagtaacaattaacaataagaagaagaaacataatagattttaagagatggtttcactcagtaaacaaaatagattttattatttttccagcaaaaacaaaaattgattaatttgagctacacttcgctcattggtaggttcttctcttatttatttattttttttttatgtatggttgaaatgctaatgtgaaatactaaaagccctagtcgtacttaacacttttattaatgtcatattataatatcttaaaatttagaaatagactaacaaccataattaacttaattaaaatactaatataggattatattaggaaaatttgacatttcatgctaaaatatcacacatagtcttatttgatggccacaaaataaacacaggttagttattctttagttttaagttagttccaaaaatacccctcatttcatttctccccaatctctttaacttccttctctctcctctttctcttccaatcttggttgtcttctcaccactgcaccaaagccatcccctccatggaaccaccccctccattcaaaccacccactccattcgaaccctctcgaccacggcaacactcaacccaagagacccacgaaacccatggacccaacgagacccacaagacccacgcgaccaacgagacccacttgaaccccagggacccacgagacccactcgaaccagtctccgttcatcttcgtccctgccaccatccacaaacccactagaaaactcgaactaggtttgtttttttagctgttttttttttgtaaagtatcctttaaatttagaatctgtgataaaactgaaatatgttgttgattaaacttttgttttctaattttttgtgtttggggaagaatctaggttaggggatatagctttttttgggtttttgaatgtttgtgcaattttaagcaatttatgtgcgattacatagtcactgtacactagttttgtgtttgtatattttgcaatatttgtgcgatatttgtccgatttatgtgatacctgtgcaatttctgtgcgatttatatttctaattaataatcatttttgtttgtaaatgcagatggctccaaaactcattctcccattttctgagcatttttgagggtgtatcattttagaggaaataagtattttgcttcaataaaagctaagttcgaagcctttaagttgaccgacaaggtgaaggaaactccctttggagatttttagaatgccaatgatcttaaattctctggggtgattgtgcatcaactgttattgaggaaaaagagagtgaggtcaaaaatgatgaagtgtggttttatgtgggtaaaatcgaagccagaattgagttgtctgagtttggtttgatcacaagcctaaagatgagcggtggtccctcgacaaaagaattgagtacacaatgtgattttgatcggatactgcaggactatctcaataatgtgaaaaagagtcacttttacaatcctttggctagcttttgaggcgtgcgatgttgcagacgatgtgtacaagctggagttgtgtgcatttgttgaaggtgtgtttttgtcaaagactgagggtgtttatatctggacatatatgctgaagttagtagaaaatgtagacgatttctttgagaatccttagggcctcctttcttatcagaaactgttgtcatccacaactaaaaatatgatgcagcttaggaagaactaaaaatatgatgcaactgtagtcaattttaggatgctttccagggacggatgccaaccgttacaaatcatttcttctaatgcgagcataatgatgtcttttgccattctattcttgaagtcttttattaactttccagcaaggatcatgcaatttattaaaatttacaagtacgtccccagaaagcatcctgaaattaaccttattgattgtttaaaatttattaaaagtcgactaactcctgaatttcaggtactaattatatttgcacta

SEQ ID NO: 219231 - DNA, 2109 bp, Cannabis indica
cttcaagcaatcatttttagaacaaaagagatacaaacatttgattacaaacaatgtggaaagaggaggaagatgagttccagtgacaaatatgcaccgatttactgctacatagattgtctaattttttaaggaaaaaaaaatatcataaaataacccaataccctaaactcctactgatatggtggggcaaagaaaaacccaattaccccagcctcaaatatttccatgcttcttctaacgctaaatcaaaatgttaatacacactactacacattagctaggctcctaaaagcatacatgcctaaaaaagttgactcagtcaagattcacacttatcggcaaccaaagctcagtgactatgtcgtgagaaaagtccatagtttctttccaattgaggcttcaccaggacgtagtgattcttcatcctcttcctcgtcctcatcttcgacgtgactagcatcttccccgtgggattcgctctgatactcatctctgttagaatatttctctgctctttcaggtgtcccgttcacctcttcactcaaagctccagtctcagccacgttttttattacatccccagtgtctccaatattcgtacactgccagtacaaaataaaacggaagatataacacattagaaatatgaacttccaatgctccctgaagaaaaccaccacaagcaaaatacagcagagtccatacaaaataagcaggaaaatcgaacaagtgagctcaaaatattggagaaaaaggtcaagtccttcattgaaactatatagaattaataaacaggatgattgttcaaaaaaaaaaaataaataaacaacaggatctatgaccacaaggaaagtagaagaaatcacttctcaacaacttaatattactacaatgacagatatttgaactaacaatcacaataaataatagcaataagcaataacaggttataacaataaaaagcagtacagcacatactatatcctaaaaatgtatctagaaacacatgtagattaaaaaagaacccttgatatactaacccgcaacaggcgcatacttccaccattttcactggcaactcctgctgaagaagctggagcagctttagaagaaacgcctacttcttctgtacccccaacaacatcttgttcctggttttctttgctatggtcaactgaagctctagccggtgcggttgtcacttgactgatggcaataagcaagagcaagagtaaatttcttgtgacaagtaactataataaactgaggacaaattatatatatttatatatgcaggaactttattctgttttgggacaaattctgtcgacttagttttatatagaaagatctaaaatattacttttttgatcggcggagattataacgccgtccaggtggagcttgctcaactggtggaactctgtctcgtcttctcttccgtcgccctcccatgacactttctgaacgtccttcactatcattcccatcatgctcactgactgtgatttgagatgtctgttgacggcctcgctttcgtagattagttttcttatcatcaacaccggccccatcctggttttcagcattagtattggcagaatcctcggcagtcccattttgatacccactctcatttagttctgaatcttctccaagtatagccttagcatcttcaacaactgctttcacagatcttgttctggcaactctagctgccttccctcttccccgagacttgtttcgaccacctttcaaatcagaagcctgagaatcgttttgagtttctggccccttgctgtttaagttgctctcattttcagcagagggctcttgtccagcttcaaactctcttatgctgttgtcagattgtttcctctggacatcaatagattcacttgcagcagcaaaagagagctctgcctcaatttcagtgccctgtaatttcttggatggttcttccataatctcctctccatcaaatgtttcctcagccaaatttcgaccagagatggactcattttgtttgcctggggagaacttaaaaaatcttagttgtgcattttcgaaaccaagaaatagtgccactagatagtggagattttg

SEQ ID NO: 219232 - DNA, 3192 bp, Cannabis indica
tgactaattataaattatcatttatatgttgtgactaaaaattacagtttgttgtggctaaatgtatttttagtcacaatacttattgtgactaaaactaaattagtgacaacttttaactaaagattatattttagtcacaagtaacattttgttgtgactacaagttatatttagtcacaaaaaaattattttgtgattaaaaagatgtcactaaaagtaacagaatttttgtagtgtctagacatgtcactttatgattggcttgctattctccctaaaagttattatagtaaactatatggactaatatcaatattaacaaataaaaaaaaaatactatatactactaatactaataccttttaccattcacattaattaccagcccattgttaactcgcgagactaatgtgggtgtaccctagaatcactcatcgtacccttttttgtggtgggtattgtatggacattggtaccctcttattgcacattccatatataattcattcttaaatatacttgatcattctagtatttgttgcttgaatcataggcaaatgggaaaacccaaaaaagaagcctcttccacatatattcgaccacaattttgatatcgtcaactatgtgtgtagtgtgagggaattattaatctctcctcttttgaaaacattattaactaatggatttattcattaatttcaggaaactatagtctataccttttttattttattatttatttagtgttactttattattttatttttgcttttgtttggttccgtagtcaatgatttatttccctggcgtaaaaagcagacccaaacttaacgacatgtctcatatagaaaaccgaaaattcaacagtatagtaatcctaatcaaataaaacgatatcacctttgaaattgtcttagtgaaaaggtatgtgatcaacgacattaaaataaagtcacatcacatcacattcatgcatgcttaccaattgaaactaatttttaagattgaaaaaataatagaacctgtaaatgtcttttggggtttttttgctgtgctgagctggattattacaataaataaataaaaatggtttaagagctcactgaaattaaaaattaaaaaaaaaaaaagtgtatgtgagctgactgaattaatcaattcttgaaagaaaattaaataaacaagttcgtattaaaaattgcagattaattttcaaccattattaatttatttaatctaaactatccattattatgaataatcacgaccgcaaatggtattgataattgttgactttgtcataattaaggttagggtgagaaataaaaaatatatgaaaataaaggaaaccccaattcaaaaaaaatatatataaataaataaaaaaaaaaatctaaaaaaataatttggggcatctaagagcaactctaataaggagtactgccttgatgggtgcttgtcgaggttggcaatttttatttatttattattttattttatataaaaagaatttcattaatcaaaactaccaaaatacagataatttgatactctatgaaagcgagagagagaatgaagaaaataacagaggatcactctaaagagatgagcactgcaaatatatattggattcaattacagagtttgttacaaaagctacttcaagactcagctgaaggaagaattagttacaactgatatcagaaattatactaacttttagttgtaaaacgaagaaaatatgtgaagaagtggaaaaatgaatcttcattaatcaagaggttcaatacaaatggtgggctatatagcacacaccagaaacaagaacacaccagcaaataaaactaaaataacagaatctaacaacctaactaactcaatacacaacacctttacaaactcttgatactcccccttaaggtggagggtatatattgcaacttcccatcttttctttgagaatttggaattggttaggaagtagagccttagtatatatgtcggctatttgttctttactgctggtatgaacagttttcacaaacccctcttggaccttttcgctcacgagatgacaatcgattttaatgtgcttagttctctcatgaaagaccgagttggcagcaatttgttgagctgctttattgtcacaatgttgcataaaagaaaaaatatgttcatgaaatataacatccctaaaatagaacattttgttagagttgagatcaagaagtttgtaagctttcatccccatgggatagcccataaagacacaaggggtggctctaggtaggagcaaattttaacctagaagcccctaaagtagaggcataagcaaggcacccaaaagcttttaaatgttcataactagggagcttacctctaaggacttcaaaacgagatttgtgcttgagattgggtgtaggagtcctatttatgaggtaggcagctgtgctaatacactctcataggattgaaacaacaaggctctagccgcatttaacaaatttggtgttttctttccacaaccgaattctgttgtgatctttgcacacaagaatgataatgcatgatgcccaaagaagaaaataaagcaggaaattaaagttcttttgcattgtcagaccaaatgcctttaacttgagcattatattgagttttaacgagctgtaagaaagatggaatggttgtttgggcatcagatttattctttataagatgaatccatatgtacctagagcaatcatcaacaatagtaatgaaatacctaaagccctcaacagtttgaatgttatatggcccccaaatatcaatatgaagtaattcaaaacaatgctgagatatgttgtgattgctaacaaaaggtagcttcctatgtttggcaaaatgacaaatggagcaataaaaattagggcaagaagaatattgaaattgtaaagctttatttaatgaatgattctttacacatgaagcatggccaagtccataatgccacaaattttcattacttattttggaatctgaaatagaacaaacaataggaagtttaggttcagacagatagtaaagattcccaattctttcacccatcccaatcacttgattcttggtaaaatcctagatcaaacatttgttaggaagaaacaaaaatgagtaatttgctgaatcggatagagcacaaaccgatat

SEQ ID NO: 219233 - DNA, 1544 bp, Cannabis indica
ataaaaatactctttaacaatttgcaatagagaacttttgcataataggctgtaatacatattgctctaatatgtacttatttcaatataaaaatatttttattttttttttatttttggatcttggacttatcatgaacttttaaatgaacctactagatgacattttaaatttataacatatataaagtggatataaaatctcaagtcgtagaaaatcaactttataaatgtacatgtaatatagtaattttcatttttcattatgctcatgaatattttcttacaagggaagaatcataagatttcattttaaaattaattgtttataagtgaagtagtctatatttttataatgaatcaatattttactatttattttatgtgagagagtggtctcacaataatatattacatataattttacataaaatataatttaatatataatactatatataatttgacaaatcagaggattccaggttaattattttagtgtacaacagtacaatataacaagtcaattcagaattatgaagcagtactatagtaattccaataattaaacttttcaaattaatataaatttttttgttatgctagatcgtacaacaattaatacaagacggcaagtaaaaatatatttatgaaacaatagaagttctagatctagtacgtatttccaataattaaactattcaaaataaattgtctttcttttgaaagaaaaaattgcatattactcgagttttttttttcttctatatatttatcgatcacattacttcataacatatatcaaaatcatatatacttaacatatatttacattcaatgagaattctacaatgccatatatatatatatatatgagaattatccataaatggggcatttaatactttattttcattcgtgagatgtacattaatatcataggtctagtagcctaagatgaaaatttacattaaataaatgattgtgtaatctgacaacagtgaaaataagtaatgtttaatgaatattgtttttttttcttcaatttttattagttggagaagattttgataataatgtttacttaatttttttttttttaaaaaaaaacctagagtttttgtcgtcttctcaattgtgtagtgtggcagtggtaaattgggttcaaattaatttctataaattgtggcaaaagagctttgttaaaaaaattcaaattttttgttgaagaaactcaggttaatgatcgtcattcgtgctttgtactggaacttggaagtgatgagtgatctaaacaaaggcaactggaagagactaatttttttaaattgttacttgaatttctttgttggtctttagtttcattgaaattttgtagattgtaaagtgagattgaagagtgtggaggtttcttaaaaaaaaaaaggagatccaaagagtatgacacattaaaatctactgctgagtctcattatacaaaaaagacaatgatgtggggccaagacatagaaaaagaaaccttaaaaatagaataattatctttt

SEQ ID NO: 219234 - DNA, 5325 bp, Cannabis indica
ctgctagccagatagctcagaaaaagtctctccaactgcacacattttttcaagattatttttgatgaaactcttgggcacaccaagttagtaagtgtgctatgtactcgtactctctctgcttcaacagtacatatttttcatctgtgatttttgtatgcacttcaactatgatttctggtatctttacctaagtttgaggatggaatatattatctttgttttcattctctctacattcgagttctcaactctgttctttttgcaccaagtttgtctaaaatgtctacattcataaaatctagcttgaaactattgtcaatgtatcaaatatacaaggatgacatgttctagcgagtctattgatgatacgtagacttataatttattaagttcatagactctgtaacatgaagtttgtaaagctttaccatgatatttattgtttgcaaccatagactttatcaaatttccagaactgaagatgacttttgatttttgtagtgtagtcttggcctgcactcatgtagttatgtttctctaacatgaactcttcacctcagtggtagcttattttccattttattttgattttcccttgtgcagcaaattcctaagacattttggatgaaatactgtggttccttgtcgagtcaagtaattcttaatcttccatgtggatcaagatgggagataggattgacaaaaagcagtgatggaaaagtatggttagaaaaaggttggaataaatttgcacaacatttctctttaagcagaggaaatctgttggttttcagatatgaaaggaaagagttccatgtgattatatgtggaataactactgtagaaatagattatccttctactaaagtcttggataacattccattgcatcctaaaacaagggtgaaacctccattaccatgttctcagccccacaagaaaatgcaacaaagtggtctccgtaaaggtatttaatctaaatctatatgaattttaccccagaatccatctaccactagagattaatttgtgaattcttttagttgtttgttaataataaaaatggtttagtaatattttctgcattttctttcttacatgtttacctggaactagcaagcgcatcaatcaaagtagaatcagttgacactacagctgttgaaagagccaacgactattttcagtctgaatatcctttctttactgttattatgaaagcatcatatacaactggtcggcattttttcgtaagtaaatcttaagctcatattttccatgacataaaatgtctgtttagttgtttttcacttgcttcacttcaactaattcaatcttccttctttcttgttcttttttgaaaattcttgcagcatataccatgctggtttgcacaaacatacattaagaagaaagaatgtgaagctagcctttggatttcagatgataaatcttggcctgttcattacaaagttcaattttcaagtggatcgatagtagctgtactcatacatggatggaaagcatttgtgctggaaaacaacttaaaagcggggtctatttgcaaatttgaactaactaataatgtcaatgatgtttcgtttagagtttcgattgttaagcctgatgatggtgcatataattacttaggtaataagaagtagtttacataaatttccaatataatgcaatgtgtatggttacagtattaacaagtgctgttttcagctaccaaattagcaagtacatcaaagcaaaatgtgaaacattattgttcttctactaagaatgacagaaggaacatgattccacataaaaaaatttcagagagagaagagaaaattgttgctaaactttcaggtatgagtatgaatcaagaataccattttttcaaagtaaatttattatgtctgtttaagtattagcttgctaaactttaagctcatatctgaagtgaacacaggcaatcaaagcacttgtactatgcctccatcttcagaaaatcccagcttccaagtggctttacaatcaaatcactctcataatctggtatgtagaaaatgttgctctggtttagtgataaaatgtgtactttttaatgtcaaagctgttaccatttttaatctatcatcaagagagtattagtagtaatgaaattcaatattaattatattttgtgcagcttattccattgacttttgcaaggcactatcttggaattaaagaggcacaaattatgactctctgggttggtgagaaatattggcatgtgaagttgttagcttatagatcaaaatatgagttttctgctggatttgctgcatttgcaagagcgaattctctaaagctcggggatatctgtgtctttcagctgattaagagaaatcaaactgagatgaaagtttccataattagacgaaatatgaaattactacttcccaattaatatgtaatgtgaaagtttcctacttgtgttgtaattaaactacttagatttatatttcattattattgtagtttttgcaacaatattattgtgtaccagtactattattaagcaaaatgacaatttttatattttgtaggtttcaacacaatgtatattattattattattatttgttcaaaagatatctactaaatggttttgaatattaacagtcacttcaaaattactatcctatattccgtggttttgttgtggtttgtcttaatttcattagtttttagagttagttggccagtttatttaattaattagtgtatagacatgtaatgtaatgtggttaataatcattaatgcaaggtaaataagtccaagttaatagctgctaattactcaaggaaggggaaaagtttcaaaaaaataaataaaaggggcagcatgtttgtctagacgtttaataatataatataacattttttttaagagagtacactgtttatttataaatgtattgtgttgtgctttaatatgatcagttctctaataaagttgtttgtttcaactttcaacaatggcttcttctcctactgctccccattttttcaagattattcttcaacaaactcatctgaacaagcttgtaagtataccttataccctaacatttcttctatgatttaatttattacaccaaaccaaatcatatattaacttcatttcttctataaaccatgaataatgtcttgatttaaagaaaaggaacatattgtatatacataaatatttataaattgtgtggtcatgtaatgtttctatttccttgtgcagcaaattccttatggattttgggtgaaatactgtggctgtttaccaagtcaagtatttcttaaagtaccttgtggatcaatatgggaggtagagttgacaaaaagtaatgatggaaaagtatggatggaaaagggttgggataaatttgcactacatttttctttaagccgtggaaatttcttagtttttcgatatgaaggagactcccatttccatgttatcatatttgacacaaccaacacggagatagattatcctcatagttctaaccattttgaaaagcagaatgttcatattgatgatgatgatgatgattctattcaagtcttggacagttttccaaggaatcctaaaaccagggacaagtctccaataccatgttctcggccccaaaagaaaatgagaccaagtgttcctggtaaaccacaaagcagcaatactaaaggtctttctttcttattattatttgttaataaaacagaacaatagttttagtaattttatttttgcactgtctttccataatacatatgatcaccacctttgaagttatgaaaaatggaagcttatcaagtaaagtagacaaatctaccccgaaaagataccagaaaccgtcgcctgtctacagaaacaccacagctcttgaaagagccaaactctttgagtctgactatcctttctttgctgttattatgaaaaaatcatatgcaactggtcagagaaattctgtaagtaaattgttgttatatcctttctttccttcatcatgtacttcacttaaaactaatcatttcatattttttttttctaaaataatttttagcaacatataccacgctggtttgcaagaacatatatttgtaagaaacaatgcgaagctagcctttgggtttcaaatggtgaatcttggtctgttcattacaaagtcataggtggatcaaaagcagcccaattcggtcatggatggaaagcatttgcagtggataatagtttggaagttggtgatatttgcagatttgaattgactaatagttatggcaatgaaatttcatttagagtttccattgttaagtgtgatgatgatgcctacgatgacttaggtgagaaagaagtgttcttaattatcattataattcaatgtgtataaatggttgaaggattaacttataggtgttgtttttcagctgcagagatagcagctacaccatccaagagaaatgtgaaacttgattcttcttctccaagcgatgattcttcttttgcgagtgatgatgaatccagcatcctttcaccgaacataatttcagagaaagagcaaaagaaaactattgttgaagattcaggtatgaatatcaatcaagaaacattcttaaaactaaactgagttatcagcacttgttatttaatgaaaatgtgcagataagtccacaaagttgatgtccaaagcaaacactagaaacaaaggcgcttataagaagccttcatcttctgaaacaaccaacactttcagctcaaaaaatggtagcctcaaagtggttttgagaccaagtcacttaaaaagacataaactagtatgtagaaatatgttgctcttataaatatacatcattatcatgacatctttgtgtcaaattttgttacttttgtttttaatcaatcaagcatcaagagagtactaataataattaaagtcaaacatgaaatcttgtttgtgcagaatattccaaaacattttgcaaggcaacactttaaggacaagacacagactttgactctttgggttggtgtgagatgttggcatgtgaagtttttggtttgtagagaatcttctttttctgctggatggaaggaatttacaagagcgaattctctaaagccaggagatgcttgcatctttgaggtgagtaataagaacagtctgagctgaaagttaccattattagaaaaagtggtgagaattcttcttttgagagtgatgatgaatccagcatggtttcaccaaacatattttcagatgaagaacaagagaaaattgttgtggaagaagaaga

SEQ ID NO: 219235 - DNA, 3580 bp, Cannabis indica
aaagtaaaagagtagagtacagtaagcgagtttcgtttttttttttttttaggaaagtgtactataagagattggtaaaattagagttttgggtgattacaaaataagtttgtaggaatagttgatagcggaataaaatcaaacctctaatgagtaaaagtccaatttattacattattatgggttacaaagttacaagatctactaatatttgtgaaactacaaccaataaacgaaggagaagaactattaaaaaaatgagacatagttttcaataatccagtgaaattcattctcattaagcgcattgatgactatcatcgagtcgctctccacgataataaatttggacccgaggtccttcgcaaccgtaaatgccaaacagtcgtaatgtggcaaattgggcattagcagctcttaaaccaagtttttagaccaagattacacctatctttgtgcataagcagctcttcaaacgactctttacaccaagattacccttcttttgtttgatatttactaattggtttcacacaaaaaattacccttttttgttggtatttatgaaaaatatatattgttaaagactatttactacatctttttttctttttatgcactatacttaattacatatgacattaattacatatgacaattgtgctaagaaaatagattagatatgactattactatgactatatattatcaaaataataataataacaatacatttgactttttgaattcatttcactgattattgtattgcactattctctcttactttatttcaataaatggatagtatacaaaataattcttatttacttcaataattatgattatataattatttaaattggatacttcattactatattttaaatgaaacttgtgacatgttcccacttgaaattttttcgttttttttaacaaattattatgacatgattgaagtacaacaaaaaaaaaaaattaatactggagtagtcatttctgaatttaaataaaaattatcatttgttacaaaaatttacatattaaaatataatatcatagataatataaattttatttttgaaaaactcctatttatatacagcttagagaacatattttatcaagcaaacaaaataagatttattacctttcaaaaaaaaaaaaatttattatgtattataattttaattaaactatgctacttaaataattaagacaataaaattttattttttagtggtgttttataagtaaagttttatcaaccatgctaaaatattagatatcagccaaaattaaacccacataatacacataggaaagatattctaatctttcaatttattttctaaattgcccctctcacttcaactttcctcattctctctaactcccttctctctcctctttctatcaatctcatagttctctctcctcaaaagaacccaacaaccactcgaacccactcaaaccagtgaaccaagcgtcggaccatcgagaaccacttaaacccaacgaacccactcgaataaagagatcgtgaaccactcgaacccacttaaaccaacgaaccagcaatcgagtctctaatcaccgtccgaggtccaccaccgttgtttgaacccacgagaaccaataaaccaagttaaaggattttttgtatttttcatttaatttctctttttaatacgcaataaattagtttatttgaggctagtttgggacatgagttttctctaatttttgtatggttttacgatattaagcgatattgtgcgagtaatcatgccaagtggtggtagtttttgtattgttttgcgatactatgcgagtaattatgccaagttaggatagttatttggggtttgtattgttttgcgatactgagcagtaatgagcaatcatttgcgggtgatagcccaagtaataataattttaacgacgattatgcgataattaagcgatttacatgggaaattgtttgcaattttgatgtaaaaaccttctacagctcttaagcgattttaagcaacgtttgtgtgatttgtaagtgttgttttgcgagttgtgccgatttatttgcgacatttgcgattcataatcatctttttttttgtaaatgcagatggttccagagctcattcttccattttcagagcatttcctagggcgtatcacttacagaaggaacggacactttaattcaataatagttaagttcgaagacttcggtttaactgacaaggtcaaggaaattccctttgaatctttttggaatgctaatgatttgaaattctctagggtgatagtgcatcaattattattgaggaaaaagaaggtcaatgaggttaaaatcatgaagtgtgattttacgtgggtaaaacggaggccagatttaggtgatttgcatttggtttgatcaaaggcctaaagatgagcgatgggtctttgacagaagaattgaatgcacaatgtaattctgattagatactacgagaccatttcaataatgtaaaaacagtgacatttaaaacccattaggtagattttaaggcgtgtgctattgcagacgatgtgtacaagctgagattatgtacttttgttgaaggtgttttgttgtcatggtctgaggatgtgtatatttagacagatatgctaaagttagtaagaaatgtagataacttttttgagtatccttagagcctcccttcttatcagatgtggttgtcttccacaactaaaaatatgttgcagttacgcaaaactacatggataagttgtcgggtaagaaagatgagaagaaaaaaaaaatctaagaaggagaaaaaagtcactcaaccaaaaacaaagtataatgtgtatgtatatgcatcatctttataatattgggtttgagaccatgcaagatgtagagaagaagtatggccagtgcaaagagataagattctctcaaatgttgaactagaacacccctgatttgttacgaaacatgatgtgaagcaaactgatgtggtattactatttgagaaaagagtatgtgaatctttctctatttgtcattgttgttctgctatctattttattatcagtgttttttgcaatttttgtgcgactgttttagatgttatgcgatatttaggcaacataattgtgatatataagtttttacaatatatataactttttgtgatatatatatttatgtttgtgcgataatttatgatttttttactttgcaatttacattataatttgcacaatattattttatattttttcgagcttacctctcaaatcgttttttatctttgtgcgatattaatgtgatttttttattcgttttgcttttagttgttcttcaaattttgtatcctcggaattgggaggttgactattggaagtctaactgtgagggtgaagtcttcacggtggatatgggcttggatgagatagaagaaacagaagttggtgcacaagattccacagtattcgagatacaagtaaaatagtttatcgaacatgttcaaagtgtaaaattcattccaccatcaccactgaaagaaccaacaaagttgtt

SEQ ID NO: 219236 - DNA, 3135 bp, Cannabis indica
taatatttatttacattttaaaaataaatatctaatttaaatttaaattaaataaaataatatataaattattaaatatataatttaaataaattaaattaaattaaattaacttgaaaaaaataatccttacaacattttccataaaagcaaaagatcctccccctaaacctctctaaggaacttcaaagacattatcaaaatacaatctatttttgatattcattccctagcctaattgagcttagattccataatgaaacacaaaataggatgatgttatttcactagaagacagagattttagaatgctcgaggaatccccaaactatggcattccaacttataagactcattttttctggcaaggttgcatagcaacacccgctgcttcattccaaatagtaacaataggcaccacagcatcatcttcctagccagccctagctcgcttgagcatacttcagactaaacctctcacatgaacattctttctagcaatggatctcttaactctcgccacagaagcagcaactgtcttaaccaaaccaggaatagacaaccctctagaggggccaaaaatagttgtaataacatgccttaagtctcactatgagcaagacccttccccttgtcacgttgagcaatacccttccccttgtcaacatgagttatcacagaagtaaccactataggggatgaaggcaatgtggacaaggccctagacgtatcatcaaaaccatgttgaggcctcagatgactactttgaccaccctggtagtttggctgagaaacatgatcagccatagaacccataaaaatagagtatagattgagaaactgatcaacaacttgttgtagcccttgatcagacccataaccctacccaaagtactcttcgaaaggaagaaagctagacaccttgaaagggttctttttaaaggcagctctagcaagggctcgaagagtttctttatatcatagcagaaggggcattaaaatcgtcacaatgcttgagatacaccacacttattgtaagtatgttctagcaagccacaaaaataagaaaaaaaatttgttgccctttatatttgaaactcaaccacttagtgatagaatttttcctgaatggagattcattcccctcctcagaggtttagttatgtctaagaggatcctaatcataaggtaagaaccaaaccttttaagcagagacaaaggataaatttcaatgaggtctccaacttcatcagaaaaaattgggcaagcttgggggatttttggccaaaagggatattatgggcttgaagccaaagtgggacataacgcagctggttaggggtaagggtgtcaaaatcctctaaattggaaaagatcattaggcatctatccaaatgccaaggctgctcctcaagaattctacgtcgatcaccttcacaactaaaactggcatgaaacaaactagagtggtactcagaaaaacttataggaaagtgaagagtccaagcttctttcatagctttttcaatcaatgcaggtttcaaagctttgggagagaggattttgacaaccagagactcagaatggtttcctgaaccccaaagagacatgatcaaattcatgaacaaaactttccacatcagcgagtgtgagaaggttaggtaagtttcgcttgaagaagacatacttaagagcccagaaacataactaaaaaaggtaaaaacagatttaatatcgaaaacataaatgaaatagtctttatatagaccaacaagaggaagaaagagtaatacctagagaataagggacttctcgcagagtgggaaaatcttaaaaccatttgctcagtactcccctagagtaggctaaacatctcaagagtaggaatctttatcctcaaatgcctcaaaaccgtagaaatggcagttgaaattactgtggagacacgatgtaagtaatttacaccaagagatccttgaaaccatattaattgtaataaaatatgcacagtaaaaattaaatggagattagaaagaacattaatgcgatgagaaattgaattttcaagatcaaaagtgtaatcattatcatcacataggaaagagaaaaagtacaagggaagaagaagaggagcaaagagaggagccttagaaaattccaaaactaaccatggagagagaaacttcacactgaagttttttttatagcttagtttatcttctgtggaaaaaattataattggataataaaatttttagccctaaatagatcaaggagtaagaaaagataatgtaagaccaaattttactccacaatcctacacacacatggtttggtataataatagttggaaatattagaatgatttgttataaggtgttgagttagttacatctttctgttattttgttgaattagtttgttaggatttcagttaggcagttagagctgaagttagctaaagcttgtatataaaactctgttcattcctctgttttgcaataatgaaagatgaatttcattctctttgtttctctgtaattgtttctcttctgcaactaaaatggtatcagagccatattgatcctttggctcttctttcgcatctcttctccttcttcttctcctttcttgttttcatctttccatggctcgaggaggtggaactcaaactcgaagcaatgttaacaatggagctgctgctggttccaattgattttcagctttggatgatggtagtaagctgcctatcaatgatccacgaagcccttatttcttgtctactagcgataatgcttcttcttcacttgttcctaagattctcactggtgcagagaattatagttcttggcatagatccatgatggtggctttaatggcgagaaacaaaatcaagttcatcaatggtaaattaccagaacccaatgaagaagatgaagactacgagtcttggatcaggtgcaatagccttgttatatcatggattctcaactctgtatctcccaccattgctgacagtattatgtacatggaagatgcctctcagatctggcctgaattacaagagaggttccatcaaaagaatgcaccaagaatctttgaagttaaaacaagtatgcagacattgacacaagg

SEQ ID NO: 219237 - DNA, 2549 bp, Cannabis indica
acaataataatccatatcacgtaatgggtaagcgaaatccaacagggcgtccagacacattattagtagtggtggccgtgccattaatgtcccaattttgaggtaacaaggtgatcataggagaatagacatgaatgtcattattattatttgatgagttggtttcatgatcttgatttttgaatgaggacatcatcccacatgatgatgaatgttgttgttgatgatgatgatcatggtcgtaagtagtactactagttctagtagtggtactatcattattatccattggatgatgatgatgaagagtactaccacctgaaaatagcttcaacttggaccatttgatcacagcagatgatgactgatgatgatgatcatcaaccccaagagaagggccctttttcaagattaagttgggggatctgatacattggtgtaagatctgagatgagctgatcaaacaaggagtactaatactaatactaatactaatactacaagcactactcctcttagtaatgttgttatgattattactattacttttattgaaatagtaccttttttctttagtccttgctcttgctctagctctggccattgctcttgactccttactattactcaacatcagcttctctacatcaaaattcttagtacaaaccaataaattttcttcatgtgggtcatgacttgaagggtcaacaacagcttcgttgacttcagcctcttcacactcggaagtagtagtagtagtagtagttgttgaagacaaacttatgttattacaataactactgggtgtggaccttgctaatgattcctcttttatggctttcttggatttgatgagaagccattcaagggtcttgcttgctttgtcaaaccctaacatgtcatggaggtcgaagaactctctagcgatctcgatggaaagtctcaccctccgatctctgagtccctgcgccgtgtaaatcttgctgtgccgatctttctttgtaccattcttgcccaacttctcctggtgaactttgttactactggctgggaccatagcattgggtggagagttggaaactcccaaattgataaaagtttcagctgggattagtatttgaggagtaatattattattattattattaatggtggtgttggatacgaaaaaaggatgagttgaaagtgggatttgatcatgaaaatggtggttttgggaatagaaaaggttgttgttgttgttgttggtatcaacagtacttgatgatgagtttggttcttgttgttgaggaggaaatggaagaggaagaggaggtggtggaaacggtggtggtggataagatgatgatgatgatgatgatgatgggaaatagtactgtggaaaaggactgttgttgttgatggaagaaaacatactttcctttccttttaatttcttttttctctttttattagaagagagaaattaatatagagtagtacaacttctcttccttcacatgatgagaaagcaacctaataggtaaccccattatatataatatatatctatcacctaattctcccttcaagaatataaattttcggattcattatttggtttcccaaagtgggtggggactctaaaagctgatgaagatttttgtcgataagggttatcagtgagaggtgaggattgctaattactactaaccattataattagtatataattacggttaatgttttatatatctttgtatataaattgttactattattattatatatatttatatctggtttttttgatcagaagtgagttggacttggattgtataattacttttgtgacaggaagagagtttgactatatgtctgcactactttactactacattgggattagtaccactaagagtcctcaaattttccttaattaattatgatttgcgttctaaacaaaataattagaggaagagaatctacattaatttttttaggtcttaattgtatgttaattttttttttctggtatatataaaaattccatttaagtataaagcacttacacccactggaattaatgagctccaaaacaaagaattacaaattcagagacaaatatgttaattttttagggtttagggggctacgtacaactctctcttttttatatataataatattacataaataaagacatgtacgtacatgtataaagtaaattaaaagaaccctgtatagatgctattatatatgaatgtgggtttgtgccagatataatcaattaatgtaacttttttttaactgttgtcagcataatcaaacaagggttttcaagaataaaatactaattaaataaaaatagagaaattaatatataagcagggcagcccacagaagcatttatgggaatcatttcaaaactgagccctcgtttacttttgtaagcaaatacactactcagactctcaggcagggttaaaaagtttagctagaagaatccttttcaacctctttttttttccctgttaattttctacacatcatgagagagagagagagag

SEQ ID NO: 219238 - DNA, 2187 bp, Cannabis indica
tctaaattgaagacgatcaagtcgaaccccataagtgctaaaaattcagtagcacaaaatgaaaatgtaagagatagtgacagagttaattaatggcaaaagcactttaatcaattgtatagagatgaaagcaaaccttgtaagactcctcttccaatctatccttgttagcatcaacccactccttatactgcttcaagaacaccttatacctatccaaacacatatcatcagtctcaactttgaccttcttctctaacccttcgacattcactctcactgcctgcaacttatgagcttctcttataaactccaactccttcttatcaacctcccaacccctcggaggccaatccctcggaggcatcattctcacgaccaatggtcccgcccatgtcgtacttattggctcaggcacctcaaatttagactcaatctgcttcatgtaatagtcctcctcagtcagaccaatttcctccattttcttcttccggtatctgggcctcaacatcttgaaagcttcaatggaatcgggtgattggagtggaacctcctctccctcgttcaagctcttacgagcgaaatcagcttcaggggagaggacttcttcccatggggcccaacctcgctcgacccagttgcgaattcgagcttcttcctctgtttcattgtctctcggggcgaaactctgcatgaatgactcgtcgacgggaaactcgtcggaggggaggcagttggccctgaagctggcacggagtggtgtggtcggaggaaggagaggacgccatgggagaggatggtggtggtgaaaatggggtttggtagaagaagggtttagggttttagggaaggagaagaagatatgatgaggagggttttggaggatttgcattgctttgctgtgaatacacagaaaaaatggagctaaacagagtaagagagtgaaaaataaattagtagaagtgagagtgtgagtggataaagtttttatttttatttttatttttattttattctaatgtcgtttttgatgaaaaacgacattgttgtctatatcaaatgatgtcgttaagtgattaatttgttctcttttgatatggtgtttaagaatagaaatgatgagagtaataggcgcagggtgtactcctggtcctcatctcgttaactattttaatacccattattaattcagaaactttctctggtgatgtggacatcaatgtttgacacgtagcaaaaaggatgatgtcacaaagttgagtagacttgagtcattgcagttgaccggggaggaaaccctagtcctgtgctacgcccaggttgacttcgggagcctcgggatggaagttcggacttcaatagcttgaatttaactcactatctttcagtaatctataccatgaagacatggagcaatcaaatccaagccttgggagctgaaattacatgaatctacatcccagaagccaacttgggcacctagggtttcacctagcacccaagttgacattctcaatcagggtttcaatttttggggctgtcttagagcaaacgggtcaaactttgcattaggacatcaactagacataccacggacatatttgaggcaaaattaaattcggagcaagttcatttttggcacccagagcacccagtgctcgggcaccccagcgtccaggttgacaatttgtcaatctaggtgtcttccaagtatcaaatcgacgatctgacaatttgtcaatctgggctgattccgatgatgtttttcgagaactcttctaagcatcttctctgttttcagaaaagatgtagatttcaactatttttgggaccaaacggaacttccaaagggtcataattgggacccagcacacaggttgacacttagcactgggcctagcacctaggttgacatattgtcaacctgggatgtttttattcaagttcttgaaaaagtgtttagagaatttttgccgtcatcagaaataatgaagattcaagcaaactcagggagaaaaccacaaacccgagcccctagaaacagggcccaacgcccaggttgacctagtgctgggctcagcacctaggttgacaatcaacctagtgtgctggtttcgatcactcaaatgtcaaatttgattcaaccaatgaattttgaattgtcaaaaaggggtaggagacctcatc

SEQ ID NO: 219239 - DNA, 6048 bp, Cannabis indica
tgactaaaatattattttgagtactaaaacaggtaagggtgcatcaatgtattcattttaagggagtgcattatagaattccccgaggcttattttgattgattatgtacctggaagaggacgaagttaataaggtagagaataaggcgtgggcggttgaaccagaaaaggtcgtccccaggttggaccacaggcactccttttacaacttctcctctttcttgaattcttagccccatctttgttataatcacttgtaatttcgtccccaccaataggatcacctaacacaatttatttataataataaattaataacttaaatatattaatagataattctataatacactcttttacttttttgaaagaagtttattaaagcaatttctatttaccagaaaaaaaaattatttttatagttatttattttgtagttatttaagaccgtaaaattttaaaaaatttcgaaaaaatttatatataaaaatagatttcaaatagtttactgcagattattatattttatacccatgttaaattttttaaaatttgagagaatatcataaataattataatgtagaaaattataaaaaattatattatgatttattagtatattagtacttacaattagaggaataaaaggtagccaaagataagaataccagcctgtccaaatgtaaataaattcattatggtccaataataaataacaaaaatataataatttgacatatgcacacgtttggatcttatcattctttaattaaaaatctaaactgtgataattagggatgcattgaaataattaatggtataattaataataaaatgctcaccatgggtattgaagagtaagaacaccacagcgaagaaccaaataggaggactgagattgatcaagccaaaacaaaataataattattattattatattattagaatgaattaaaataagtcatcatttgggaattaataatatataattaacaaattaatttttaaagattatatattatattaataatttacctgattcctacaacgaccttgaaatcttcttctagagatctgttaatgtacttctgaaagtcaaatttttgatggctttgaggggccaaatgtgcctgaaaattattaattgttataataaacctcaattaatttagttattgatcttttatgaatattaaatagttaatacataacaaaataataggcccacatttaatggctgatcatttatcctaacactatatatttatatctcactaatatttaattaaacaaagagtttattaacttaaacttaactctatatttgtttaaaaaaatatatataggtgaaaataaatagttaatttttccttatttaattaaattatgctgaagcatttataattaaagtcattactttattattttatatttttaaattgtatatatctaatactttagagtaaaatttaatcaatactgttttaaacaataattctcaattatatgtaataaaataattatatttgacttcaaaatttataaaattttaaataatttaattatattgataaaattttaaatttagagtactaaatatgtaaacacaaagcatccaacttgtatttagataaataccaaatatctctacatccatatttaaattgtatatgtatgtaatttttttgctgaaatatatatgtatgtaattagtgcaagaaaatcttaccattataaatccatgcctcaaagttaaataatcgactttaggaactgatctaacaaattgtctgaagaaacaaacctgcgaaaaataattaattaataattaaagagcaggctacaataaccaataattaataaattatatattataacttttctaaaaaaacatatatattatattatatatataaaataatagatatcatgatcaatcattctcttaccttaaacatataatttgacaaactaataatacaaaattaaggaaaaagtagtgttcaccaaatattaaatataaatatgttattaaatgtaaaaacaaaataatataaaacacattattatgctctagacaaagatgaattattggtggaataaaattaaaatataaaagtcaaaaaccaattatatatagagagagaaagaaaatttgagctgagccataaatatggagtaaaggcattgtcattttcacaccttgccatatacagaccgttgttatatatatatatatatatattaaccttaacacgtcaccatatatataaaagcattatgattaatatattttaatgtgttttaatcattttgttaagaggaataagagatagagtttaagcttgtttaacataacttgggaagcaaactataaattgaatatgaatggtttgactaattatatatgatgagaatatttcaaagccattttaaccattgaccaaaataatcttgttgggtctttttcatgggagaataaattaataaagcacatttaacattttgtgaatataccaccatatgtggtttgataagtcccaattaaattcatctatatagagtaatgaatatttagtgtttgaaaagaaaaaataaaagtcaacactttttatatatatataataggacaccatagcttgatatagtagcttatgacttctcagcccaatccctctaaaaaaagaaaaaaccaaaaaaaaaaaatgatattcctaccgataaatgttaaaaagtatacataatactaatattttatttagtgtcttattgatattggtataattaattatcgaatttatataatttgatataataacttttactaactaatgtcttaaaatacaataaataagaaaaaaatatttttaaactcttatttaaaaaaaatatatataatatcacgaaaaatttttttgagccgctgagctaagtggaccctaagcttagttcgtctataccaagaaccgagcctactaataaattaataataataacattattcattcctatattagccttagcttgtaaaatatagtatattcacgtgaatctacatgcaacttttcatttgttaaaaaacattttacaataagaaacaaaaaactttattaaaggtagttaattcagataagatgatcaatcatgaaaggtagatctaacaaactttatatatattatataccatcaaggtactatattggaatttcataatgtcataattaaaggtaattaaagaagaaattaatgggtttaaagtaagcactaatatcacaagtggggccacattattatttaatttgttgtattgtaacattaaaaggacacgcgtcattattttcgatggtgataaaaatttactaaatcaatgtgtaaactgattttcgagctagctatttacttcacttcaaagcaagcaatgattattattattattgtaattcattttttaagacccaataattctttaatgattaatttaatcaactagcaccttttacattgatttaagagtattgctattgggcaccagtgttgcctagcaccttctaaatgtgtcgacttacaattggctagcgatactctataaaaattattatattaaactatatgggacccgatacttaattgcaccaatagcgatattgacacgtaggagggtgctagacaccagtggtgccctttagcatttctcttgatttaaatatatattataacaaattccacgatgtataacaaccatgcaaacatatttatatgcatgtgaaaggctagaaagtaaaaattcacttataataataattaattataatgtaatacgtagactattaatagatataagtgcatggatatagtggtatatatataattaattaattattaagtgaatataaaaaagtaaaaaagtgggtaaaaagtgatcttactatccatattaggaaagggtgtttggtccagaaacttaaatgtcttcttccaaaagaagtgtccctcgcaaatctgaatctttctggatctgtaaaaatatatataacaacacagttgtataattaatctaataattaatgtcaacgctcctttacttaattctaactcccatgaaaaatactagaaggtatcagtagtgtttaatatttatttacgtgttaatattgctattggtacaattaagtatcagattttatataatttaatataataatttttataaagtattgctactatttacaagacgacatattttaaaaatgttaaacacaactgatatctaataacgatgctcatataatatatatagtaagtatataatttaatgctgagaagtaaatatcactcagaaacgatatgacatattttatgggtattaaacattatgaatattctttagtattaatctataatcttaactcatgttgactaacaatctaattaattaattacaccacctatagaaaaattagaattaagataaaagtataataataataataatagttaccatgtgagaattgatattcggctgttttagtctccttttcccaatgcttccaacttcccatctgggaatcaatttatatatattaattagggaattattaattaattaataaagtcatatctcaaaagagattaattaattcaaacttattaattaaaaatgtaaatcatataaattagtgcaattaattaagtaattaattaccttaagtctgcccaaaaacatagtcatgatgcagtagagaacatggaaaacagccaacacaaagataaaaatatgcaactgatgaataccatccgccgaaacaaatggaactttgccctgaaattataattatatattcataacatatatatataatacaaataacaattaaaaccattcatatatgtatataattttagaacagtacttaataattaagatcgaatttttgtactctgaaaaacacttcattaataataatatatacgtgttaaatggttagatagccaaaataaaaagtatataagaatattaataatatgacattaattttgtcatattatatatatataaatcctcatagaaatctattgttttgttctttcacgcggaaaatccttgcctttgtcatggactaattattatataattatattttattaattttagatattttaatattaatcattaataatattagttggggtatatttgacaaatggtttaactcgaaagagacaatacgcctaatactatacacataaaatattaccttaattatgaattataaacattttttacaaattcgatataaattaaaatcataattaaagtggtaagaatgagaatgtcaaactaattaaatattaagaattaaagagtttgtgtttttaggtgaagttttttttttttttttgttcaattaatggtaatattaattggatcatctctagcttatatgcgcttaggaattttttatttaagaaatagaataaaatttaaataagtttttaaactgtttttcaagcaaaaattaatattttgtggggcctttttatgagataatgttaaaaaagaattctcaaaagaaaaagaaattggggccaaacaaggtcggcctgtaaaaaaaaatgtgtgtgagaatattttttaatataatttaaaaaaaaattctagaaaatgctacattatgtaattttcattgcttttactacgctatacaaccatggcttggatgggctctcggtttgggtgagtcctaaggacggatctagtctgctttagcctaaaatcgggcatagtgccaaaagggctccggccgccctaacttaaaaatgatcctaatattaacccttccatcatctaagttttgtattttcacaatctaaagcaccatttaactagcataacacaaattagtatttttcaatgatgagagagctaaaaagcaaatgcatgcgcaaaaaggttaaaatatggagaatgatgctaccaccactctctaagagcatctccaatgacacattaaatttagtgttacactatcactaaatttggtgtcaaa

SEQ ID NO: 219240 - DNA, 6863 bp, Cannabis indica
aacccaattaatttcatattatcactattaaataaaaattccaaatatttcaattcaaattgcatttcgggctcgaacccggttcggcccgaaatacccggttgtgactataccgcgccaatctgtcagaacacacctgaaaagacatcacaagaatactatataataatatagttctagaagcacgtaattaaattaatttcaccaatttacccttctcgggtcataattaccaaaatgcccttggctcactaacagggtcttaacatattaaaattcatataatttcacatatattgaactatataataatataattcctcaattatacataattatctagttagggttttgctaatcctttctcataattccgggtattacactaggggcacgcaagtcattaaagctggtgatgggactacaccgacatctcaagttctaggttgaggcctcataaacagctccataactcatcccccaaggccaccaactgctgctggtgctgacaccaccgagtagattcctccttgggaaccatgtgtggaactagaagacctcgaggaggccaatccttgagctgaaaaactttgccaaattgtggctgaccttaaaaaacaactacgagactctttcgacaatcaacacgagcaatttcaaaaatggttcgtggagaactgaccgaacatcgagagacaacgagttgatcagtaggaatagtagagagctaacatgtctcaacggatcagagaagcctatcactttggtcgcaagactaccccccacaggggtcttttcgagttggtaagagagattccccgtcagccaactagccacgttggaacaagtgctcaaggggaaacccttattgcacaaaacactactaccacacctaataaccgtgcaagtactaaataaacaataggtgctgagactccccagaggaaagaaaaccttgggcaagaatccgaaagggctcaagctaaagggtgccaaccaatgggcctccacttgatgtcaaaaaaccatggacaactgagagaaccaatagaactacttcaccatgttctctgcatcactctaatgacaccaggccttgagaacctgaaatggtaaagggacctgctactcatgctgaatgagaaaattgaagatactactttgaaactagaggttgtgagacccaacgagtaaggaccaatgagccacttcatacttggaagtatttccgagatgaaagaggtgagttgtgtcgttactttgcctgtggcccgacggccaacaatatgagtacttccctcgagtacatggagaggagttgaacttgagcaaccaattcaattctctctgtacttgcgatctagttgaagactaatttgagggaagtagccactataatgctatgaatgaccgctcccacggcgcatcatcccaagaaaattcggagttcattctgaaaatatcactagtgtttccttcacgaccttgtggtcaggagacaacaacaagacctaagtcgactggggtacatgatcgacttggaagaataaaggacctgcgtgacactctaaccaaaaaatagttggtggaagtgggagcttctaaaggtaaccctgatcgcgtaatagaagttctaactaggacacaaaccaccatccatgggtgtcaaccggatagagtttgacaacctagcaaccctagtgaaaggaatagtactccaaagtttttgaaattcaaacttgacagagagcgatgctcacactctctgactgggtcaaagctctaccaatcccttcgaagttcaagaatcattcctagcatcaatacaccgagaaagaacacctgatatctcacaaccattacttcaaagtgcagatcgatctacaacgagtaagagacgatgtcaggtatagaattttacctgccacactgacaggcttatctcaattttctttaaacaacaaattttttagtgtgcccaaattttttacaattttggcactgaggcattcctttaaactatcagtcattctccaagtgactttttattttgcaaatgccacatggagaacacttgtcgttattttatttttatttttttctatcttctttttttaactttaggtttttgagactgtagatttatttcagactaaaagtatttttagttttattttcattacgtatgcctttctcgtctactttcatacgcttcaagagagcccataagttcaattggtgacagaatttctaaatcttttatttcctctatcccagagattatctaatcatatttttctgtacaagaaattagtacctgttgtgtactattttcttgccaaaaattatttttccatggattcccatttgatttactatcactttaattctagaatagtaatttttttgcgatctcattctcttttattttaatattttcaaaacatcgatcttcaaagtttttgtagtctaactgtgcgtaccttaactgttccttggaactcctcctgcaacgtgtcccatgcttcttttatcgtcattccacccattaatcgtgggaaaaggtcgtctaccatggcttgctgcaagcagcataatacgtgagaatcattttgtttgttatcctgtagtgccatattttgatttttcgtgagagatatgaagtatcttcaggaacattgaccccctcttcaactattcttttataaattttgtgatcgaaaatatgtaggtcattattttgatggactaaaaattatagttttctccatgaaaaaaattaaaagaggtaaagaagagcagttggagtgggaaatcatggtgatgaattacgcccagtaatatttgaatgcggatctaataccactaatggtttgagaattaatttgtattagtttaaatttgaataggtggatacgaaagaataagtgtttgatggtttttgtgataaaagagtgtagtaatgatgttgatgagtagttggtttagtatatgagaatagtttggcttaaaaaaaattgtacagcggaaaatagtaagctttattaatagtttgtagctttttagatttagatgttggttacacaatttagaacttttaatgaggtatttataatttcttactcctttgtggttagaattattttcctagatcttttttttactagaaggaattgtatgcatcacatctacatatttttaaagttaaacttaattagtatattttagattaatctaatctaaaaatcactaaaattcttagataacttttctccaaataccttgagtaattactattataaaaatatgtagcaacttctaataaaatcactcaattccaccacataataatatcaacccattctttctttaagaaaaaaacattcataatattaatgctaatatccaaaacaaaaacctaaaataacttgaagaagaaataaaaaagggggtgggtgtcttcattcatggccatggaagtctaatgaagaagctcttgaccctctttttctaagcaccaaaccacacagtcgatgttgtgttgtgcttcaaagagatgcaagtgaaaatttctccaacacaacacacaaacaaaccaataactaaaaagaatgatgtggactatttggagggatataattggtatttttctgaaactaaaatcccttaagtacttgactaaattaatcattgttagaaaaataaatggtaaaatctatatatgttaactaattaaatattttgactcatcattttgtttggttttttcttctctcagcaaacatatcatgatgcctcattatccaaaacctctctatctcttgtgctgttcttcctggaacccttcctgctattaagtcccacctgattatatattgaaataaatatcataattaatttattaattcatacaaaatattaaacatttaaattaagtgtgatctacatatatatttatattatattaaatgtgattatctaatagaaagtattttttttttataaaatattacaatttaaattaaaattattacacatatttttttttttatcttttttattatattgaatatgactatataacataaaatttatatatatttaatatcacaattcaaatttaaattcattgtatctattttttttaaaaaaaataataaattaatagaaaaatgtttatatttcttaataaagaatgtgtaagactatattccggtcactgcaaaaatatctttccattaatattattttgtaataaaaaatcgaaaaaattgcaaaatatttttaagaaatgaaaagcattataaaattataatcaaaaacaaattttcaatattatttatgtttctttttataaatagcacttacattaaatatttttgaataaaaatgatgttatttattaaataacttaaaaaaataattaattatgtacaacatacaaatcaaaataaaacttaaaaatataactgacacctaatattaattttattatgtatatgaactatttaagtttttcttttaaaaaatattcattttttatttttattttaagtgtctcatttgccccatcattataatgtatctgccatttcaaaacttataattattattttttttttaaaaaaaaaaacctttctgaagacattaatgtaatgtacaagccaaaaaaaaaaaattatacataaaaatagcatctttcttagtacccgagattcgagaagaaaaaacaacatgaatgtcaagactcaagtataatataccatcaagggaaaaaaaacaaataacaacatatattaacaattagtaacatatattaatttgaagatctttatataatgatcaagttcgttaaagtaagcatatatgatagtttttatcaagaaaattttcaaacttttgtcttaatacacaaataaaaatttcatatatacatatatatacatatgaaattatgaatcaaaattctttttttcttttattttcacttgcctaaacaatgatcaatgcatgcatcagagactatataaattaaacattcaaaaataaaatacaaaaagattattaaattattaattggtgaaatatagctataggagtatatttatttcttaagaaaaaaactttgttaagatatgttgtatgttaatttgtttgtcccacattgctaccaaattataaccatataatattatttttcataattcgataaatattatgtttggtttgattttatgaagaaaaaaaaatggaaaaaaattgtataaattattttcttaaacattaataaatacctatttcccacgagtgaaaacattctataaataagatcttcttcttgctcggtcatatttataaattcccattcaagactacaaacctctgcaccaaagttaatttgtaacaaataattaattaatctcaacatataatttccatataaatattttcaaaaaaaacacttaccttgatcagactcaaaattatgtggatgtttggcttgcttccggcgacgaattggggtggtgttgttctccatagttaaatattagaatgaatatatattattattattatatatatccactctataatataagtaaaatatatattcaatgaaaacttcagtacataatgagggccactacgatattgtatttatatatacagatatatttattataaatctgaatatatgagacttagaaaaattagtgtaaggttgataaaaatggaaagagagtgggaatgtgccaacaaacttgaaaagtttgtgttgttggttgacctttagacttatagacttgtagttaacaactctaattatatatacataatatttatatatatgtataagctttaccaaatatagcaagttatgtgtaaaaacattcgttatcgaaaaatgtgtaaaaagtattataatacaaatgcaaattagtagctagttaactaatgtccactttgttgttaaataattacaaagttaattaaaaaatgttttaactataaaatctattgtagctgaataatagagcttaaatattaattgtaatgtgtattcatcaaagttcttggtgttttatatattataaatattgttggtctgaatggtgagtcatgtcaagtgtcaactaacattctttgaaaatatattatatgtcaaaatttgaaatagtacaaatgatgatgagttatgtgtggttcagaatatgagtggtaggtagttgactaagtggtccaaaaggacaagtatagtgtcatatatttggaggatagcaacaacctcattctatttttatatatttaagttcaccccactcttttttctttcttagaaaaaactcacacctcactcttgaaatatgtgattgattacaaaaatccatttatataaacctctttaatatttaccaaagtaccaatggatggtctctgtctccaaaaatgtcatacccataaacaaaaatagttaaagacaacttggttcccaacatataaatattgtgaaattaaatgaaatcaagtgctatgatctcgtatctaataggagtgatggggaattgggcttaaccccgagtttttcgtttttattgagaaatttaaatggtatactaatttttgctattctttttacaaaaatactatcacgcggtatttttttttttttttacttttttacttgttttttaataagtttcatactgtaatatactgtgttaagttttcactgttattctactggtgttttttagttgttctactgttgttttgagttgttctgttttgtgctctactggttgttttaataaaaacacagttatttttagaaaaaaatttcttgtgacagtatttttgtaaaa

SEQ ID NO: 219241 - DNA, 2818 bp, Cannabis indica
attcaacagcaaattcatctttttcctttatctttccaaacccgttttaaccaaatgtattaccatatcaaacaatgcaccacactacaactcaaacaagactttcttacaaaaagagcaagactttcaaacagaaaatcaaaatatgaataatgttaatatgttgaaaatcaaaagaaaactagattggaagaatcattataaacaaacaaaaccacaaattcaatttcctaaagctacaaatgaacatgaatgaacctcataccacatattcaattttaaccacactcaaatcttaactattatacataaaaagactatctaactttatttgttgtatattaaacaaattcttatgctttaacagtcaattggatagaatctgaaattactttcagaataacaaagattttttaagaatcaaatgaaatcagttatataagcatattatttcaaacaaaacaaactaagtaatgctcttcttctgaactatgatattgtagaaaaaggaaatctttgtagaaaaaaaataaagggaaaagggaaaaaaagaaagatgcattgttcccttagagccctaaaatccgtaccagtgagttaaggagttcctcttctccgatgggttccgccgaaaacgccgatagagagagattgaatgaaggagtcgctcactatagtatatatgaaaccatttttattagggatttttagtcaaacaattttttttattttttcctacaaaaaaaaaaaaacaatttttatttatttatttatttattttagagtaatttgtgtagtaaataagtctaatttttgacagtaatatttatttatttttgaaaaattatttcatatatatattttttttttttttaaatttacagtttgggttgctctgttattttatgtgggttgatatacatattttgattgcaatttaagttattctgttagttgctatagagatttttacgtaaaattctgtaaaatacaaaaaaaaaaatgttataaaatgtaaaaataaaaaaaatctttttattttttgcttaattttatttgtttattttttgtattaccatagtcaaacaatttcattatttttcttaactttatttatttatttttggataatttacgcgtaattacgcataataataattaaataataattaaattatacttaagttattttttttattggtatatttaaataaatttttaaataaaaaaataaaaatttaataacttagaccaatcaaagattgttacgtggtaatttatttcacttaatagcaaagtgtctttcaagattataatttgcctaaaattacatttaagtatttatttataatcagaatcaattcttttttttttttagtatttttacacaaagtattgaaatgatacttcttttttcacattattttacaattttatttaaaaaagatagttatattttttgaaaaattaaggtaaaaataattattcatatttttgtaaaaaaaattaaaattcataaaaaagttgaaaaatgtaacttgttttgttatttttgagtatgtatgaaggtatttctttgtagaaaaaaaaattactctttttaaattgttgtgccctttttattccaccaattattttaatacacattatctatacttatttaatatataataaattagttaacaaactctaaattaaattaatatttgtaaaatagatataaattaatacctttgaaaaactagaaagtaaactttgattattctccatattttggatcaagggtatgcctaatcatagatttaacagtgttctaatcaaattgtttcttcttctccattggtttggtgattatgtcattaacaaacacaaaatttcaatgagcttttaaggacagcttaattgcatgtgcccataattgtctcaaatcttctccctcgcacactctaaaggccaattttaaaagcaaggagttccgcttcaacaacaacaaacaaagtatggcgaaacacatttttgctttaccaaagttcagagtcagcttaaaactatcttagttaacaccattcttcactattgatcagaaaaggcaatcagtctcgcctttgtaggcaaagcatctcacaaaattctccatagcatcatacttaatccccatgtgaatgtcaaggtcccaaataaactccaaaggtcttttactcatctaaacctatgagactgacttaacttgaaatcctttgcatatatatatgcagaggatttgattgattactaatatcatcctcgatcggagccggtttaacactctccgtagagccttgaatttaagtcaatatgaataactattgtagtataataaaaataagagaaatgtcagtgatgcttagtattttttttggtgtcatactgttattgatgtaattaagtatcagatcttatataacttaagaaaacagcttttagagaatatcgctatccaatcgtaaagtgtcataaggtgtcaaatatcaatactttaataataatgcaataatactatagtgaatactctaaattcgagcattgaattcaagtcaatattaatcattatgtcaagaaaaaataagccttgaacaaaaaggtatgtacagtattattagaaaaattcatagcatcatgagtagcaaagaccaagtttgctgcatatattttaattgaagccaacaaacaaccactaccatttccttgaacataattcactacattgttgtcctcagttaagttaaacgacatgtcgttaatgaaagcatggaatcatttaataaaaacgacatgtcgt

SEQ ID NO: 219242 - DNA, 5054 bp, Cannabis indica
ttctcggtgtggtggagagagagcacgaggaagagagagaaagtctaggagagaaaattaaataaaagagtattttgagtagtttaggaaaatatgtccttattttgtaaaaattagtggaaggtataaaatttgatattttattggggttattatcatgtattgataatggaattttacaaaaaaaaaaaaaaaaaaaaaaaatgaaaatccatttaaaaaaatagaaaaggagaagcaaagtggggagtgaaaagtgcagaaggcaaacaatgagcgaagagggatttgaagaatgggacgcagaattcctggatcagctcatccaaattgaagagcttgcacttccttcttcttcctcaattgccatccctaaccctaaccctgattcgcatgcttatcatcacccttctcatttcccttttcctcctccttcgctacgcaatccccccagcttctctccccctcgtcagctttctcaaaggacctctaccctaaattctttccctcgctcatccaatgccaccgactccaaatgtagtactactattgctgctgctactacatctctctcttcggctccgactctccagccatcggaggacgacaaagagctcgaaatcaaacgtttaaaggtaagggttttatgttttaaggttaattactgtattgtgttaagtgttattttgaacgggtaactagacattcttgatataattactgtattgtgttaagtgttatgtatggctttcacaaaaaaagggagctttgggtgaccatgaaatgcaattcttcgaagagtttggatgattcagtttagatttaagaatgaaataaatgaaattttgagtgaacttgatgacttctgaatgcagggggagctcggacttgtgtcgaagcaactttcggacttggtatgtttcttactattttgttcttgctcatattgctatacctagacaaatttattggaggtcttttgtagaataactaattaaaaatatccccgttagacatttgacctgtctctttttaaaaaaagaaaaaaaaagggagccctgttcgaacttccataatttatattgctccaagtttattagttgatattggaattcgggttttttcgtaataacttttctttagtgctgtttttgggtagtgggtttttccttagaaaactttgttgctttatcatcctggcatcattgactggacattgtgagttgctatccactctgtgggccgaatactactactttctttgttcttctcatgttatagactaaggtgtttttagctttacgatgaattagttatggaaattgtcacttgtttttgtttcccatattcattcttatcagctattgctcatgtcttaatttatattttatgcttactttttggcgccttctgctaaatgccatatttttgtttgtaatctcatgtttagtgttcattattggcatcatcatgactcacataatccaataatttgaaaataaagactgttccactctaaaatcctgatctagatttctataattataagaagctgtgattatctaaaaagaattctagagagagacacatttaaaagagaagttgttaacagaactgaaatagggtatttattgaactcattgtcgtagtgcatcaggttctaatgagtgtttgactttcccaagttcatcattgaaacacttacaccttttgagggaacattcgatttccaaataaaggaaaatgcattgaaatgatcatatccttccatcaatgacatggatcctctcatttccttacattttgaactttgcatataaatatgtagcgatcttcatatcttttgcatggactaaattatttacttcaggaacaagagtgctcagtgctaagaaagaagagagtttatcagcccaataatgtatcttccaaaaacgaagaaaaagaagcatttcttcccaattcagaaggcacaggcacaaattcgtgagtataagctgtttttatgtatttatttattattttttatatatgttttgtcatggttgtatgttatgtttaattttcccatcactagtattgctatactgagagatgtaccagtgaacattttttgttgccgtgggtgtaaccttttttttttttttttaaaatttttttgaaattgggcttctcgtggaggaccccacagtagttgagtgatgagaaattatagcaatttctcctaggtaatagtttcctaaatgtgtttttaatttcattatgatagaagttctatttgagaccttgagtgatccatatattttattcttactagtctagaaatttggtggaagtgaaaggttaggctgtattggcatctcatatattaatttatagttattaccttccttgagtgacaaattgacaaccttctttttaatttcattatcataccatctcatctcatcctaagcaggccaagtttgagcaaggttggaaaagtagaaaacctctgtagagatttgtaacttatcttaccacgtttatataaattgatttagaaaacaaagattatttaagtgctcctcgtacttgttctcgacagttagctttcacaccaacttttatcctagtcccttatttgatgccaagttgggaaaaccccagaaacagtcccctttatgtggaattttaaaagtgtgggatgtttaatatattaattttaaagttatgaaatataatattaattcaatctagtacaacacaacaaaatttaggggtgatctcacaaagacctctggtactttggcatatgcctacattttgtgtatattattgttttttattttaaatgtgaaataaaaaaaatgcaaattatgtattatggtataacagggacagagaacatggagctcttggtgtgcgtcacccggtggtttctcaaagatttcaaaatgttgatattggtgagagcatagttattacttatcattatatcttattgtcttttgtcatagtatgttattgaataagtcaatttaattatgcaatagcaataccaagcaaaaaagctacaggagttcagacagatgatagtgttgtttttgcccaaggattctcaaatgaattattaacatctcgggatctgtcgaagaagttgttagcgatatgggaattgcccaacaaccaaatattgggaaggaacataatttctaatttatttgtgacttgccaatctgattttcatgttcttttcgggtgcacgggcatgaatcattctgttgaattaaaaatggattttccagtttgtggcagctctaatgtggatttgcagtgccctgtaaactcacatcatacttcggatgctgcaaaagtatcgcatctctattatgttctgactaaggtgcgtctgtttttgattttatgcatgtatggttggatgactttgatgataagacatattaaccgtcaataaacttcctttatgtgagttctaaaacaaatattaagtaaaccgttttccaatacatggtaactgtgttttattcaggtttgggaaaaaggcggtgtgggtgttgtgtggggggttgatgaggagagaatggaagcaaggatttttggatgagaactgtttctccagatttcttttgattctcacatgtatcttttctttttgatgtgaggaaatattattaacataagaaagaatattaaaaaagatgacaaactatcatttttggttacagagtactaagacatgaacttaatttgcagttacacccttagtcacatggtaaatcagaaaaagaaaagtcgttatcgactttgtacttaaagatccattattctatggactgaattgtatgcctttatttacatgaaatctatctacttcagtgcataggattatgcattgtactttgtatttcatcattactaatttcatctcttataaaaagttaagaagcataaatactataagtatattgaaaagaataaaatactagcatctgtatgcacacagcacaagtattgcttaatgcttttgctcacatcagtcattaactcaatgtcattcatacctttaacttcttacttttcaatgtgtacatgccactcttttaaatatgtgtatgtgtcactctgtcagttctgatcataaacttctgagacttttgaatcacatgtagataggtatatctatagtgcaagtaggtcattaagataatgttaaggcatgttccccgtttcttatgcccacttggaaataagtattgccatcctcaactttcagcattgcaccaaatattcttttaggtttttatttctcacattttcctttttcccttgcagatcaataatggaatggcacatctagaggctttgttggaaccgttgcttgatctttgtatccttgaaagtgtgagttggagaattctcaattttcacttgtctcgaatgaaaatgaccttgctgaaaattctcattaatgcttgtagtgttagtgtcactgctattgtttatttttgaatcttgattaacttatttggttttattctttttgtttagttttactttttcacaagctgctgatttctagtctgtttatgttgcaggttatcattgttaatagatctcttcgtatacttcatatgtttctcaaggaccttttgagctttgaaaggaaatttggagataggtactgctatttttttgctcaagtgggttaagttttaaatttactttgatattgtaaaatttggtgaatgaattgtatgttttattcaataaaatagtatgtatttatatacaaaattggatagagtaaataggaaactagctaaattagagagactaaataggaaactaactaaatacaattaatatagctaatatattagaatactccccctccaagctagagcataaatgtttcatgcccagcttgttacaaagataatcaacccgcatcccattcaaagtctttgtgaaaatatctcttaattgttctccggtcttcacatatcttgtggagatcagaccttgttaaattttttcacgaacaaaatgac

SEQ ID NO: 219243 - DNA, 2441 bp, Cannabis indica
aaaagtattaccaaacggcaccatagtatattgttattgttgctgatcaaaaattgaactaccaacaccacaatataaagtatcattaatccccatattctattagtttaactaatttttaatcaagaagaaatagaagtattgaattccatagagtactaacttgatctgtggtcctcctgcttcgtcgatggcaggaaatggacgtcgaagatgggtcgtcgctggcaaagaacgagaaagagaaatagaatagctcgattgagagggagagcttcgaggtcgactcgaagagagattttaattgccaatttaggtctgattcgtctaaaggtgtttagggatttgagaaaaatttgtcaaaatagcctttttgacagaaatttacaaaatagtcttttcctgtttttttttattacttttgttttatacaaatggcacttaactcatttaaaaaattcacttcgtattaaataaaattaattagaacctcataagattaaaaaaatcctaactttcctttcttacatagaagaacgagagaactcctcttcctctttcttcttcttctcctcctctttcttcttcttggtagtaagaccaaaagtacctgccattgttcataaatggtggcaagtggtggcagtcacagacaaaagaatttgacattcattgcaataaaaataaaccctaaataattttcttgtctcttctcattttgcttcttttctttaattttttctctcaatctattatatgtaataactaatcattcaaaattataatagaatcaacaagtgatgcttcaatcacaatacccacaccacccaatgaacatgaacaggtaacatatatattttgttatagtcttttgaactataattgtgatttttataatttccttgataaaagaccttaaatttgctctgaacgactgtagagggaaaaatctataatgatctgaatggaaagatcgcaagcactgacaacctatagaacaaagaaaaatgaccgttaagaccttgggacactaggatggtgccagccgaaggaactccgacgatcaagtcagtaaataattcgaataaagaatagacgaatgtaaataaagaaaatataaaataaatatttccactgtgaagtgatggagaaggactggtaataataatattaatatattgcatgtatgctgaatgagtgttcaatgagtgaagatgagatgatccctcaagacttctaggttcttcttttatagagcctctgatggacaaactcatttgttttgaagaaccaacttgggaagtggtcttttccttttctaggaggaaggattgattcttgtagatcagttatagactcgttcctatcttttatatttgattggtgttgtagctactgggctcgtttgggccttgtattttaggcaaagcccaatgcattttagatgagtgggttatatttactgacttggtcttgaaggattgtgattctgatttagaatgtaagaggcatttggatctggtgcaatttttggccactatagtttgtctcttactctttgagtcaagtgtcgttgacttaaaatgtagttgcgctgaccgacaaaaaattgaaatatatgtatcaataataacttttatttttttgcgtattgattgacttggagaatgtataaatattgagtttatattagaaataatttaaacgagtagtatatgtatacacatttatatatgtgtgtgtgtgagagagagataaatagtatgtggtaaaaataataatggcagtaattgttgtgataataataataataataaggatgtacatatatatttttatgttgattttgatttttttatatgcatatatatatgtactcgaaacatataatgtatatgtctaatatcttagtttgaaaagtatacatggtatgaccttaggttactaaaaacttgtgggccttgatttgtaaaatgatattttgaatgctagaagcccaatgatagaaggtcttttgaagttgaatttaattatataattatatacgaagtgcaaaagtaggtgacgaaagcaatcatgctttgtttattttgagtctcctgctccttttctttggccatagacacgtggcctattatttcagacctttctcctccttacattattttttctttcaagtatatcccatatatgtgaacaaaagtaaatgtattcgacacagtatttgaatagtcctttctctctctttaggttagcttgcttttaaaaaatcaaatttttgcaaatgtcaataatatatacgaaaatacaaaactgtatacgcctgcagaagcagaatgtaattctgttactacagaaaccagttttgtagcgacaaaacagaacaggcagaatataaaaatatttgcagaaaattaaataacttgacacaagagatttat

SEQ ID NO: 219244 - DNA, 2712 bp, Cannabis indica
attttataatggttcattttctacaacatctcttgttattattagagattactttattaagaggttgtttagtgaatcaatgtatgcatatctaggatcttataatctctaactattcaacaaaatttctactataacacatgtgttatgaccacgacataaacaaactagcttgtgaaacttgtatagctttcatcttatttcgcatcagaaaaaaattaacaaaaatttttatttctctttatgattttttgatccatcaaattaaatgccgaaataaggtagatgatatgatttctcaaataaacatttaaattacattaatatttacatggattgaatattgagtgttaaagatctcatcaacctatccaccccaaagaagtacattattcatataaagattttcaaatatgaattctgtcaagaattaaagcaaaagtacgatattgaacaattgcttgataacatttaattaacttcacaaggtgttccacgtatctctcactttcaaattagttgaattcctttaatttacttttagaatgtatatatagcagcaactaacaagctgtaatagttcttttgtatagatatgtttttctaatgtatgtaccgttttgattagctgatgtaatttaagaatatattattatataacagataattttgtacaggaaaaaatactatacattttgctaattctatttacctttgttgcaaacaagttatacctaatgctgtaataaatgccacacttaacttataattaaaattactcacaaatttttttttttaaattgcatttttttttaacaatacattgcggcattcactagtatgtgtatgtgtttatgaggcttttaatttctaaattgtctaaaaatcttgaaaattaattatctgggttttgtgtgaatttcagtttaggtttgtttttaggggtttatgtgataaaaaacttaatgagattcatataataaactatatgtatatatgtttgtgtttttgtatatactgaactcgttttaggcctaacatatcctcaaatcccagatgaatgaatatctattcttcttagggaatcaattttgttgctaagcatatagagctattttttcatatcaaaacaaaaagtgtaaacttatgttggttaataacaaggacagttgtgactgtaattttttagcaatgtgagtctgtgtctcatttgcaatcctgttatttgattgaatttggaattgaaatttaaacataaaaattatggggtgtgccatttggagattaggctaaataagaagattgatgcatttgtgagagattagatggatgtggatgaatagattacctcaacctctttcttgatagattctcaaggtaactttctttgcagttgattagaataatgtaggctaattgaactttcacattatttggaacaccttttatgtggcgtttggttggaggtaatgaaatggaatgaaatggaaaggaaataattttcattgtattcctttgtttggttgcatataaaatcattggaatactattccgatggaatgacctttcccttattttggtggaatgattattccattttaaaatagaaggaaagaccgtttcaatacaagatttgaaaaaatttaataatttttttatcaattttttatgcattttaaattttattccattcaatttctattccaattcccgttctcattcttattcctatattttcattcctcccaaccaaatgccactttaatttttaaataatgaaattgtttgaggaataattgagtgtgtgtataaaagaataggagttactagatattaaaggataccaatgaacatttgcaaaatataatcttttataaagtttcctcaaactatcatgctcaaaggctttttttttttttaaatttaaagcgtatatatattagaaggaaacaaatagtcagacctcacggtcattacagaaaaaattactcggaatagtagagacttctaccataccagaaatattgttggcaaacgcccacttggccacattatgggccgcaaaattatagtttctagaaatataagaaaaattacatcaagtgaaaagtagagagatgcttgcattgtcttgcgtagttctcaagctgccaaaaggaatcgataccctttaggttcttaattactatcttagaatcactttccaccgtaacaaaagggtgatgcattgtggtatgaaaatgtggatacattgctatattagaatatactggtagtaagtaatagtagtagtaccatatatacaagtaaatgtataatattataaaaattgtgaaaaaaaaataattacataattctatacgagtttataaatatttacaaataaatatatatgtttaggattttaatttgttgattactttcaattgattttctaaataaaaaaataaacgcataaagctaaatatgtaaatataaaaattaatatttatattatgatatattactaaaataatgtatttactaaaatttaatataaaattttaaaaagaatatacaaacacacttacaaattttatttatattttataaacagtttatatatatatttattaaatatttgattagtattatcaatgtttacaatgctattattaatttagtatgtttattatgctgaatttagtgcaagtcagaaaaatattaacattc

SEQ ID NO: 219245 - DNA, 6869 bp, Cannabis indica
tttttcattaaaagtgggataaaaagtacccttttatcacacttttctctaaaaatagagatacaagggatattttttatcccgatttttcattaaaaccgggacgaaaaggtatttttatccccatttttatgaaaaacccgaaataaaaaataccccttttatcccggttttttaaatatcttttatcccactggcatacatcccgatttttattttagcgaataaaaagtcttaaaaaccgggataaaaggtcttttcttgtagaattgtaattattagataaaaaataaaaagtaaataacaaaaattccacgctagtaacaaaatgtatttttactgccaaaaatatgacttaagtacttatctgctacctaacataaaacttaagtatttatgccataatttacttttttaataatgcatctagacattaaatatgggttttaaaattaagtttacacatatggcataagaaatacaataaaacaatttaaaaattaaaaaataccataaaaaatgggcaaacataaaagtgccatatttttcaaaaaaaaaattaaaatcccatatcatgtgtaatttcctcttataaatagtgaactaaatatagtacaattttttttttttctttttgttgtaaaatttaacattgcattaaagatggtctaaaggctaagacggtaagagctcaaaactaatgattcatggtataagattaattaatactgcaatcactaaaactcattgtctaaatacactattgatttttcttgaatcttcaaatatttatagtttctcaaaaactcgacagagagtgtcacttgcaattttcaaaccgcaatatacgtaaggccatttcatatgcaaacgtgttaattataaatgaactaatgaataagaaacatccattaaatacaatcagatatatttatatttacacgccatctgctaaatatactaaataagctaaagtgaaaaaaggaatcatgaagttatatcactacatttgctactatacaatgtatcatgaagttgtatgagtaagaatttaaatttcaaagcctaatcagtggatggaaaatgaagatttctataaagcaaactgagaaccgcgggaatgtgtaccgcatcaacttaactgagttgagcaatgtcaacatcgtccggtaatttaaaggtgtctgctgcaccgaatttccttcgctcttctgaaccttctgtattttcttcttcattactatcatcttcatcattcatacaatataatgctgatgatggatcatggacacttttggatcgacaggatgctgctgcaagcatactcacttgaccaaagtgagagatttccacaacaactttgtcatcgtcaactggaagaggttgtttccatggctcgccgtctattctcatgaatgtatggctggctgctgccttatgaaactcgaaacggactccacttgcctacattgcaatatcaaaattaagagtttttagaattataatggttatagatatgaaaatcataatgagatgatgttgtaatgtgtattagtattagaattatattgtacctgtgcaagacgagtgccatgtccattaggagctagcaaaaccaggccatgccaagcatttctaaaaccaacaatctcaagaaggccatcgtctacgtatggaggtgtcaagtctctctacaagaaattaattggtcagcatttagcatgtgtaggtgagacaaattaaagtttggaaacaacccactaaaaccaaaataccaaggaaatattgagaagcgaaaactaacatcatgcagattgtttcccttcggttttccccatggattgagtccaccagagaaactgggcaagttgaggcaaacaacagacctgatactgtaaatcaaagtcaaaagcattaataatgaaaaaaaaaaataatgttcaattatatccatgcggaagaagtaaaaatgcgactctagatctctgtgcaatgaggcatggaattaataaattaaaatatgcgacatagttacaaaagtaattttaagcaatgaaagagcctatcaaactgtagatctatcttaatcaaccaacggcatagattactgtattaaaccaataatttaatatagcataacagagaactagattcatatatattatgtgtgtgcgcgcattttcacaatcatttgtttgtggaggtaacagattctgtctcaccagctaggtatgctgagttcttcccattgacctggttttttcatgatcatgacctttgtgagctgtgctatattcctgtaacgagatacatgctgtcacaatacagaccaccaagatgaaagatattaaattctaagaactatgaccaagtctaaatatgtaaccttgaagcgggatgaatcaacgaagcacaaaaccatccttgggtgcaaccaagcttcaagtaagtgctctgatcaagtccacaaaaagaaatatcagtagcacatccttccaaaggaaacccaatagataatcaaataattctgatgatctaatctataaaattttcttaaattgatgaccacattcttcatggcacagtatttttttacatgaaataatgctatacctgattaattaattgatttttaaacttttctggatgcaactttctttcggagtgaaatgcataagatacttgagcatccattcctgtacagaacatgtaattgtcattaaataaagcagtgacgttgcctctgtattgttaattttttgtatgatatagggattgtggattaagaaacaactatatcatttctataatttcagttactagaatatctattgcacaaagcaaaagaaaatgtatgcttctaaataaagtagagattagtagttcactactattacacttcaattgtctgactaatattagttgctcaataaactgaaactgtcctatgcatcacgtaagtactttaagacaataattcattcttacccatactgaaatagttccagaatcctccacggtaaatgtggtagccttcctgagtacagaaaacagaacaattggcaataagcatgcaattttacattccataacacaaacaaaaggaaatgacaaagtaagaaaatttgtatgacttgtattttgcttctttagttcaagcaagtaaaatcaacaattgaataaactaaaatgaaaaaaaaaaataaaattaaattgctatagccaaccatctttctttttttgctagcaagacatgaaaagaaagagtcaagagttgaaggaatgaacttagaggaattattttaaagtgtttattttatacaccaatgacaaggaaatagtaaatgaaacaataagtcaataccacataccatattcatttcatctgttttggagactcgatgaaaagcatgcaaagagtggggtagttcaagaggtgctataggatcacaacttccttcctttggagccttcattctcatgataatgtgccagctaaaataggaaagagatgaaaccaaataaacaagagaaaatttaacccaaaatactataacaagatatccattcatttaccacagttagcttcccatttttagttaagaagacaaaaggaaaccgtaaaagcaccttacatggtacaaaacattttctcacccgctaatatgaggctagcttagatttacagttataattagccaaaatgaatactaacataacattaatccccacctaacagcttcaaatagagcaattctatactcaaaatatttccaaaatacttttccatgatgttagtttaacatccaaacacactctttcagttccttagtttcatatcaaattcagcagtttaagtacccaccaataaatagaaaacgctgaatatagttcatatagatcatatctcagtcattatttcactaaaatgtccaaattgtaaatttatggcgttcactagtgatgcaatgcatagcatctgattacaccttttagctcaatttttaatgactcgttaaggattagtgatgcaaaaagctgttacatgtttaagagggtttgggtaagagtaatgttaagttaaaatcatgattatattacctgtcaattttcatttccctcgctgttttcactttctgcaagaaagattccactgattcttggcttgttccaggatttttctttccctgtaaaaaatttgagaaacaaataacatgaaaaataattcagcattgagtaaatgagattaaacagattttaaatactggcaagacccagatagaatattaatgctgagaaaacaaggtagtttgtaatgataaatatactgcatgctcaaataaaacgagcagcatggtaaaactactgagagaattcatccatatagttattgttgttgaatgaagagaaaacgtgttgactgttctaatattagaaacttacccaaccaaacgaaaagggaaggttatttccagttcctagtggaactgtagcaattggaggtggatgaggaagtttaagatcagaaaccactccaaggagccaactggctgtaccatctccacctgcaacctgttgaacaaaatttatgtaagaagagaaagaaatcgagattaaaattaagttcttaatgtatcatatctttgtaatcagccgtgtgtctgtgccaacctaacacgtaaactcacaattatctttaatctcttctcaatttcagctgcaaaattatctccactacccttgagttcatccaaagtaacatatagctggtgtaacaccttatcaggtgccttttctcccaagtcaaaaacctgaaagatagcgagaaatttaaaaagaagagacaattatttagaaacgaatcatgggaaatccaaaagacagattttcaagattctaaagcgccaatagttatacatatatagaatcagaatcgaaatcaataataataataataaaaaagtacctgatttttgttaagaagtttttgatatgtacgaaggagttcccctcctagctgaccaccacttttggtatttatgaacacaacgactgggcaacaaggaacatgtctagaatctccaatgaccgatcccggcacaagaatgtaatctggaatataatagtccttaagcacattattatcagctcttaaatgagtcatgaccacctcccaactgcagcacttgaaaatagaaatggtgaaaaacagttagaaaattattgtattctgtcgaatggaattatgtacaaatcaaatttcagaacatattctctaatcagtgactcaacaaagtgttcccaaaggataaaacactacttttgatttttcttatgaaaaaagtaagaaccttttatccgaatccgaaaaaaaaaaatcacaaacacaagaaaatgacttcttagagtataactatccaaagtgaaaagggtacgtatttcactatttcttgaattgcacgtataatatgtgagagagattacaacctcttggaaataaaattatgaagtgaacaccgaagttctgcagatacggaatgagaacctattgaaaaatctcttaaaagagtggttgaattgaccgaaattctggtcaaaaaggtcatcttggtattttgagaggaatgggattataaagaaagaaggaagggagagagcggttgcgtttacttttcttgaataattttcttagcaatgaaacagtaataaagagagagacgcgttgagaaaaaaaaaaaagatgctttacctgaaagagaaacttcatagatgcttccaaagagagagattcaaaagtggaagctactactgtttgggagggaagcgattcttcgttgatctctccgactcggattcgaacgcgtcaaagctacgaaactacattcaaatatataactacgcatatatatacactctttcattttatttgattttttaggtaaaactcactaacctcaaattcaactaaacaccagttaagaaaaaaaagcgactacacaccaaattagtttttgtgttaattgagcagaggcttggagaggtgtcatactcatagcataaccactacaacacctgcattcttttcgtcaaattcaactaacactaaattacttttttaaacatcaaagttatagtaaatttaaatacaaagaaatatctttaaatcattcaaaaataaaattctaaaatttacaaaaataactaaaaagggagagaaaacaatttggatgcaaaaactaaaaataaatatatctttattttttatataaaactaagaaacaaacttggggttgtattttatttgataataattaaattgtatcaaattttaaattttagtattttcatttaatgttttctcttaatatgcaagtaattattctattaaaaaaactctctgaatacacacaaaaatgattgtagagtcttaattttttaattattttgaactaaataaatgataatttttaattaatttatttgttataaatatataatttatatggttaatttttaaaatacatattatttgaacaaatcaaattacaattaaattgtttaaaaaaaataataaattaaggtatgaagaaggggaagaatattatttttttaatgatacatattttattttattgaaaactttaaatgatatatattgtttgaactgatataataaatattaatagaatatatgtgaattttttttaaaaaaaataataattatccatatctattctatataaaatgtggctatataatagaattcttagtttatgagaaattattggatgacttttttaaaaaaaataaataaataaataatatattattagatattgccacgtaaagggtcagcatccatgtagtta

SEQ ID NO: 219246 - DNA, 2684 bp, Cannabis indica
agtatatgggataatttccctaaaattaatggagataacaataatttaataatactatgagattctagtacaaattatggaattattcttttgcaattaatataatcatatcatgcaattcaaaatttcaacaattagttcacaatcaaagttagagtaaattataaatttatcttttaatcatcttattatctataagtactatcaacttattagtgaataattgatttataaactttcaaaatgttatttaaggggaccattatttaatcttctataataaatatatttagggccgactctgaaaatatatgggccgtctaaggtaaatttgattttagagcatccaaaacatatatatacatataaaatattgaaaacaagtgttatgagattcaaaccatgatattgtataatatatcatacactttaaccagctaataagttatgaattttttgtttacaatataattaattttacttaaataaaaacctaataattttttattattttttattttgagcctccgaaagttgtgggccctacacacgggcctagtcggcctatatttaggttagccctgaatatatattatgccctaatcatctatactaatgagtactcaaaacaaatttaataaattatttcaaaaatccattaaatttgtgtgagattatttaccatactgaaagtaaactttaaaatagcttactttttttttggaaaatcagtaagaaatatattgatcatagaactatttacaacttaaagccaagaactattagttacaatctttatataaagcttccacccaatctttgtctatcctattcaaagaattaaaattcatttattgtattctatgacaaattgatatttctatgcaattgacaatcgctttgaccattgggaatttgtgatcccaaatagagtaaagagtagcagctagtattgtataaatcttcattcttccttgagaaatctttaattttttgagcttaaaaatcatggaattcaagttgctcatccagtttttttactacaacaataagagaagaaaagatgattatgagactcatcttctccctcacaaattggacaaatttgattactcaccactccaaactgaaaaagtctatcttttgttaagagcatttgcttcaaagccagccaagtgattattttattgtttaggaacacaaaatctatcccaaaacatagaatatttctatttttccatgagaagttgctgtcataatgatgaacatttcatcaatagagtagttgtactgctgaaaatctttctcaataaaaaaattctttaacttctctttcacttgcacaaccctttttccaaataccagcttgagtcattggggacctcatatatagtcccaccaattgttttgttttatatatacagaattgacccatcgaacccaaaggttatctttcttagaagaaataactcaaacatgtttctccaagacacaaggattccaaagagcaatatctttgaaccccaagcaaccattcttttttggcctacaaactacagacaaaaaaatcttactcggcccattgaactattcactccctttctaaagaaaagctcgccatatttaattaatcttttggataactgctggtaagataactacttgagaccagtaagtgttgattgtaatgagaactaaattgataagagtaatcatgccagcataagacaaacttttactactctaaacacgaatctgacttgtcattttttcaacaaaacaatcacagtcaaccttattaatcttcttagagcagattttcattcccaaacacttgaaaggacgtttgctacaagaaaagccagaaagaacatctattcgatcaagactaaggggatccatacctgctccaaaaatattgatttgcccacattagttagtagccccaaagtactagaaaagagtttaaattcccgtagtgaaagagtggctgctttgtaatcacctttgcaaaaaagtaaaaggtcatctgtaaaaaccaagtgcgtgagattcaagtgcttacaccttggatgaaaatgaaaatcagcattagtagtaactttggcaagaatacaagagaaatactccatccctattacaaatagaagaggtgacaatggatcgccctgcctaagacctcgctgggattgaaaaaaatatgaagagaaccattcaccatcaatgaaaatcaaagagttgtaacatacaccaagattatcttcacaaacttttctgggaaatttaaagcttctagcatatctctcgagaaaaatctcaatcaaaagtgtcataggctttttgaagatctatcttaaacatataagtagacttaggccattttctaccataatatttaaccatgccctcacaaatcatgatgttgtgaattatttgacaactttgacaaagccactatggttttcaaagataatattagggggaatttctctcaatttggaacaaatcattggtatctattttatagaccacattgcagcaagcgatgaattggtttataatcacgaaccaaagtaactgtagtagaattaatctccttgagtaatctacctgtatggagaaaatattggaaattattttaccaggatctatttactatcatgtatgttggattaacaacctaa

SEQ ID NO: 219247 - DNA, 2541 bp, Cannabis indica
taaacgacacgttaatgaaagatgttattatatatcgatctagtcatccatcatcaaattatacacaacacttttactacatatctatccacatatgtgatccgaatcaaaatcacacacactagaagtgtaatgtatagtaaactatacttactaattctatattaaagattcttattactttaatacactaccgactcaatttattcatatcgtataatcttaattttcttgtacatccttacaaaattataccttctctatatgaataaagaatttttagatatttattaattatacttatataattaatgtattaatttatcttataattttatttcatatatttcgtaatatattattcattaattacttgcttttagggcataaatcctaataagtggacccttcggtgtatgaattgaaactagaggtttgtatgatgtacatgaaaggcagcttgattctgcctgaagttataaagaaagacagccaactaagagagttcttaaccatgaggaaaaaagttgagtccatcaaaatttctaacaccatttgtgactaaggtagagaggaatgtgattttggggcctactccccctactctcccctttcattatgtgattgagacttttatcccagattaggtcatgtggttggtttaaatgagtagtttgatgagtttgatccctatttcaacattgaacttgtggtaaatttgaaactatcgccaaacatctaaaatatggcaaaaaatcaaatcccaaacattcatgtcctcctataaagaaaccgcaaaacatctagaaaatatcgtaaaaatctaaaattcctgttaatcctacatagtaatcgcaaaataaattgtagattctaaaaaaatcgccaaaagtcaaaattctcacaaaccatcataagaacatcgtgaaatatattgtgaaaaatctaaaaacatcgcaaatgtcgctaatcatcgcaaaattcatgaatttcatagaaaacaattcaaacacacaatatatcgcacaacatcacaaatcaaatcgttaaacattgctaattacaaaaaatccaaaaaataaaatatctcaaaacccaaaaaattaacccttggaccaaaacgaatcgtaatacaaacaaaaatcaccggtaatcaaacctaatcaattcaaaaaccataaagtgtatttctaacactacaaactaacctaacatatataaaaaaaatcaaaatcaatactctaaacgttttgggtctaggtctgatagtgtaggcctggtctaggtattcaatggcgaaagaacactctgactaggaaaaagagatctcaggggcttgggtcgacggggaagctttgatgtttgcaattggtgccttgagttaataaaaagtgaggaggaagggggaggagggaagggtcttgggtcgacggggggccttgagtcgatcgactaaagacgaggaaggacgaggagaatggggtctcagggcttgagtttactgtgagaatttgagagaataagaaaggaagagagatagaaagagagttagagagaatgtaaagggatttgaaatgggaggaatattttaggtttagttggaaattaaacataattaggtaatgtttaatttggtaatttatttttggtccatgctttacatttaagtatgtaaatttaaatttttctatatatttagactagataactaagtcaagcttcgcgcggattcgatctaatttttgtaatcttttgatatacttttttagtaatttaattgagtcatataatttataacataatattttgatgtgtgtattataaataaagtaacaactttaaaattagaaacataattttttatttttaaaatatttaaaaagatagtgattaaatattaaaaatagtagaattaattgaaaaaatgtaggtattttataatagcataaaattaaaaaaaaaaaataacagtatttacgtttaattatttgggttgtgactaatgatgtaattttttaatgtaaaaaactatttagactattttcttcagcaaaaagaaacaactacaaaaataatttaagtgttatttataaacgttttatgaatgttggaatatcctttccacaaaagtgaatataggatgacaattgtgaaatgactcacacaacgttattttgaaaactgcaaacgagggattatataaaaatattagtgatataatttttctacatgaaatgtttaaataaaagaattaattaaattaaataaattatgtaaatgtgaaatttgtactgtaaattgtaatgatgaaaggagttcataagactaattttcttataataaaatatttattgtaaatattgtaatgagaatgggatgtttctaaaatcaaacaggaaatataaattataatcttttgtttatctagtattgattattaagttgcatatttttgttcaattaattattaaaatatgaactataataaaagaaatgtaattgttaattgtaattatttttttaaaataaaaaattaataat

SEQ ID NO: 219248 - DNA, 3807 bp, Cannabis indica
aaaattgtattttattaaataaaaatcccttttattaatttttccaccttatgcataaattaatttagttaattattcttgaaaaggtgagcaaacgataacaaagtttatgactaaagtagtgaggtgcataatcgtgttaataagtagcatactattataaaacaaacaaatgaggcttaatctcatacgccaaacaaaggagaatccataaaggaacaaaataaaaataacaagaaacaagaaacaaaactaaataataaatattttagaaaaaaaagaaaaaaacaacaaaaataaaataaaacaataacaaaacaaatttgcatccccaaataaagggaaagcaaatgttcatgaagctgtcatacattagcaaaatagacactgcttgaacacacaataaaccatcggaagcataggactaccaccgatttagaccatctgcaagaaaagctccacacccagaccaaaaccaaatatcaaggtagcggtttaagtgataaaaatgacgtctgtaattgctagaaaaagagttgttaatcacaacctgctaaacaaagaccaacaaaacatacacatataagcaaagaaataaagacctccctctcggccgaagcatttcttaagacaagggccaaagcccctagtcaaaaggaacaaaaaaaactaaaggcggtaattaacttcaaggaagaaaatttaattgtacaattcagactagaatgagaataaatctcttataatattaaaagggcttcatttatgtaaaaaagtatcctctggagtcgtgatctttagaaaaaagggatgtcagtggctgatgggtaatgacaataatattagcattcgaaatgatctttggattcctaaagagcatgtgggtcattcttaatcctttcaaggtaatgttggactacagaaggtgagtgatcttaaagttgacggggctagaatacgtctctcatcttgtcgattttttatgaagtggaggctaaagtaattttgtctattccctcctcctcttttgataggcaagatcgcttggtttatcacttcactgataacaggtcatatacaatgaagagtgactactggagtattatttctaggctcgacttggaatttgagcattcctctcaaaattaaaaactttttttggaaagctttcattcctacctatgagaaccttactcgtcatggtatcaaagctttcaaccatccatgctctatgatcttgccattcacttaaaacttcgtaaacaataggtaaaaggcctcgaaaagttcaccgctctttcaagtttttctaaatttttgatgacttgtttagatggtttatctacatatgaattaaaaaagttattgttttttttacttattcaaaaaaaaaaaagttattgttttttcttagcgcatttggcataggtgaaataccttcgtgcatgagcataaacttctgaataatgagttggtaaattattgggctttgagctacctttggcagtattaaacgcccaaagttacatctcggatggtggcttgccgaaactcccaactaattctattggagtggttgtggaaccacatgagccggttcttggggatattaatttgttcatcgacactggtattagtgctgataactggaaggttggtttgggtgttgttatctccgacaaacagggtcagattattgcttcaacgggatctcctctcgttgggacattctctccctaggttgcagaagctgcagcccttctacaagggttgcgattgtgtctgcgagtaggatacactaacatctcgtccttttttgattgtcaatctcttgtgcagatcatcggtcatcacgaacctcgccttttggagtttggtatttttttttttgaaaataagcgtaatcatatattaaatagatgttagacctcacggtcgttacacaaaatgttctctggtaaagagtggatcgggatagatccgtacatctggtgggtgaaaactcatttagccacattatgggctgcaaagttacaagtcctactaatattattatttctcacatccaacaattatgaatttttttttcttctatttctctgcattattgtaataggaagcataatgttaatgttcgtgctcttgttaaattaacattatccttatttaatccctacgtttagtggcccagactacttatggatatttaattttgttggctgttagttgtattgtcctttggaccttttggctttgtgccttactgaaatttttcctcaaattttttttctaaaaataaaacctatggttggttaaattgcaaaattgaaagacaaagaccaaaatgaggtcaaaatccaaatcaatcatcgactaattggatcttgtatcatacttttgtatcttttatttttgaaactgataatttgatctttttttgtccccttaaagaaaaatcgataatcccttctctcgaaatgatcacaacatgtcaattataaggttgaaaaaaaaatatacagagtgaaaataatctccatttttggacttaaatagattgaagatttatgccaacaaccatctgatatatttttttgtccgtaaaataagtttaccgataatcctatatatgtttcgatatttaagataatttattaattcaattttgtatggtcctttatattgtagttatttaagttatcttacaaaattttaaaagatttagaaaaatttaacacactgaaaaatatggttcaaatagttcgttacatgctggacttttttattttatacgcgtgcgaaagactatttaaacatattttcggcatgttaaatttttttaattttattaaaattttacataatatcttaaattacacaacgtagagaattataaaaacaaaattctcaaatattaaaacagataagaatcggtagatcttttcagaggagattgtagaatttttttactgtttttttttaagttctatttccatctatttgttttttttttaatattattattaaatttaaagctactttaaagattgaaaattaatattctataaaatttcaatagcacttctttttaaaagaaaaattttgtagaatgtatgtaaaagttcatatgtttgatacagttcctaattcaatttgtaaacgatcgaaatatcatgtaacctcatatagtgaacaaagttcaatcaaatcaaatcaaaagaaacaataatgattcttctgtcacagaatttgttttataacgaatactatacaagaatatttatatatatatatatattacacaattaattgattaaaatatttatcataaggaaaaaggatcacataaaatttacttaaaaaagaaaaatctttaatataacatattttaatacaccataacatgctgctgcacatgccacctgacctgctaatgttagagtacatataactctattccctccaaaatccattaacaatttctctctttttaatttaaaaattaaatttatattatctcaattgataaactaaattattcatttggagtaataatttaagaccatttaacaattattctttcctattaaagatgtaatttttaattcacattgctaaattgaaggtatatactaaatcagggatatttgtagcaaaatttggtgataagttaaaaactatcattttttattatatattaatcaaatatagcttcacaatagtttcaataaataaatatcctctcaaatataaccttatcaaaattagaattcctaatgtacataatatgacctataaaattggata

SEQ ID NO: 219249 - DNA, 5160 bp, Cannabis indica
ttttttttttttaatttttaagactttttgcatttatatataacttaaaatttcttttcacaaaaatatgttcttcatcaacgataacatcttttagaagacatttcaaaatctatatataactacttaacataatattacaaactaatattaacataaatgcttatatatataattacagtaacacagtaacatagaattacgaggagtctttcttatcatatctttcaaaaaaaaaaaccttaattgttttgtcagtggtagtcttgtgatctttttgatcaatgatgaagatgatcactttatttatgagcttgtttatcatatttatattaggaacgtcaatgagtttgtgtaagttggtgtaaggacttttaaaattcttataagacttattatattatatcttctctaatgagtgggtatattttgagctaaattttatatatttttatagatgtggttgttacttcactcacttgattatttagtattcaaggggtttctacagctgatactcaatagataaattataattactatgtcatattagatacattttagttttattattttttttgttttggtactaatatatttaatttttccttatttgtaattttttggtgggacaaatatacttttaggaattatttttttgatattaaagttctattatatagttttccgggagcatttctttctcatgttagtcacaacgttaatgttataactcatagattattttagcatgcccttaagatcgacagtaggcttttttagatccatagaatttcttcactttgcctctaagcgttcttttctctaacctatgacagttacccttacaaagaaaaaaaaaacgagtctatgttatatttcgttttatatagggataattatattttctattacaataataattaatattactaataatactacatatattttcaaggataataatattatattttaaagggatttttttcaagaatatacataaaattcaaattaattacaaaaataacttaataaatctcaactacaataatatattgccacgttattaaaaaataacgtaattccaaaataatatgcttgaaatggaagtaatcccaaaatctcgaaattctattttatttttttgcgtttcaaaagtaactttttgattacttatgatgttgatcagaaaccaatgagttacttttttaaaaaaaaaaaatcatttgcaaattatataatttgagatatatttttattattttctaaacctatttatatataccttaataatcaattagttacttttaaattatattaatacatttgagtaacttttaagtttattttcgaaaataataagtttctatatatatagtataagctacaatttttagtaaattgtatttagaaaaatatatatcatatacgtttaagtcactcgtttgtcttaaaagtatatgttcattttttattttatattatattatttaaaatatacttttgacgcttctatctttttccttttttttttttcttgtaacaatatttatgttaccttaaattctatttaagaaactaatgtgttacgtacaatgaaataaaataaatcacatattttattagcaaaagttttagacatctaaattaatgattagttagttattttaaaattatattatgatatctagatattgcttaagatacatttcgttagttcagtgtagaacctatttagttgttatataataacttttaaatataataaagggaaagtatattttagtaactcataaattcggtacacatattaaattttattctattgtaaaatttgattattttttagttaactaaatgaaaaataaaactactcttaaatgtggtcattttgacttataaaaaatatatattttctcatcgtcgccataataaaaagcaacaaattagttgcttatgatacctaaaatgaaacttaaaggaaaattctacaaaaattacaaaaacgattcattcctttataatatacatttcattattaaaaaatagttgcttatgatgccaaataaaaaccgttaagatctagcaaggttaagatcaccttagatgatattaaagatgaaatcaatttttggaaactatccatcgtctgctatgtgttgggatcgaaccctcccttacacatattggatggttttgctaacaaaatatatatggaaggacaaaattgacaaagtgaggatgctaacctatggtatctttaccataaggttcaattcaatggaattaagagattaggttcttaacggtgggtatatctttttcaacagaaggctggtaataatgaaaccctaggatccaaatacaaactttaagaaagaagatgtcaagactattcccatttggatacaacttaaggatctcgatctcaagtattggggctagaaatcactttttaagatagtagggcagcttagacatcccataatggttgactatgttactagggacagggatcgacttaacttccctagagtgttgatagaggtgttaatgaatcaagattccctgatatgttgaaattcgaagatgaatttggcatgaactcccatgttggtgtcaaatatgaatggaaaccagtggtgtgctcccactgttctggtatgggacacatgacagatgattataaaaagaaatcaggaggtaagcaagagtgggtgattaaagaagatagaaggaaagagaagcgtactacagatgaagatggttttcaagttgtctctaagggcaaaaagatcaaggaacagaagtaagcaacagtggagactaaaattgataatggctttctggtattagcatggcttgacctttaccctaatgtagaagcactctttatgagtgagggaacctttgatcacacaccagggatcctatccctgtaccccagatggagtaatgggaaaaagccctttaagtactttagaatgtggaaatcacatcctgagtataataaaagggttgcagcaatatggggaaaagagataagaggagctagaatgtaccagctaatttgcaaactgaaggctctaaaaccaatcttgaaagagatcaacaaacagggtttctctgaccttcagacatcttccctgcaagccaaagcaatcctagaggacattcaggaaaagctccagactgaccctttaaatgatgttctgcacaatgaagaacttgctacaagaaatggattaattgttgcacagaaaaaataccaatctttcttgcaacagaagtccaaagctaattggatccaagatggagatagtaacacaactttattccatgctagtatcaagcaaagaaatagacagaaccagattctcacaattgagaaagaagatggaacaagggtattcaatcctggtcaggttactaatgccttcatttcctactacaaatccttgcttggatccaaaatgacaaatagaagaaaggtttctagcaagatactgaataaaggacctgccctaaatgaagcacaagctgctatgctgacaaaagtgttttctaaagaagaggtaaagaaggttgtatttgagatccctgggaataaggccccaagcccagatgggtactcgagctactttttccaagataattgggatcttgttggggaagacatttatagagcagtaacatctttcctagaatcagagaagattctaaaggaaatcaatacaactgttctcacaatggtccttaagattaagtgccccaacactatcaaggattttaggccaagagcttgttgtaattttatctataagattgcaactaaactattgtgctctagaatcaaagtcattcttccagaattagtattaaaatcccaagggggattcatacaagcgagattcgttggacacaacatcatgatatttcaggatctagtaagacactatggaaggaaatcaagcaaggctaactgtatgatcaaacttgatctacagaaagcttatgatactattgaatgggattttgtggaggagatgcttcatggtcttcaattcccaaattccttcatccaacttgtaatgaattgtgtgagagctcccagattctccattatgtttaatggctctgtacatgggttctttgaagcaaaaagggggcttaggcagggggacccaatgtctcccttttttttgttctagggatgaaatacctttcaagaattctaggggaagttggtaacaaaagtaatttctaatttcatgagagatgttctaaactaaagatcaatcatctttcctttgtacatgatattatgctattttgcaagggggaattcaaaagcatatactatctgttacaaggcttggaactgctatctttatcatctggcctataacctaatcctcaaaagtcagcaatctactgcagcaacatgccaaatgatgaagtaaatagagtccttgtagcatctttttttactttgaaagaaatgccttttacatatctaggagtttctatttgtgctaagaggatttctgggaatgaatgtgttgcccttgctgaaaaaatgacagcaaggatttaaacatggagctcaaggaacctctcttttggagcaagagtggtacttgttaattcagtacttatggctattcatgcctattggtgtcaagtgatgcttctaccgaagaaagttgtgagacacttagaatcgatttgcagggctttcctttggaaaggccaagctgtgtctaatggtcctggacgtgtagcatgggatacactttgccaaacaaaagctgcatgggggtttgttgtaggaagattcaagaatagaataaggcagctatgggaaagtatatatgggcaattgcaaataagcaagatagcttatggctgagatggattcattgtgtatacgtcaaggggagtgactggtggaattacaaggcaccaatacaaagcagctggtactggagaagccttcaattttgaaagatcagttcaaggaattagaagcaggtcagcaactctactgcagaattactatgtatccaagatttacaccctgctctgcccaaaatcaaaacaaaagtgcaatggtgccaacaagtttgggggagattgaactgttggaaattattt

SEQ ID NO: 219250 - DNA, 8043 bp, Cannabis indica
tctctctcactctctctctctccgaccacaagccaccaccatccctctcttccgctctctgtcgcttcgtccttctcctccactctctttcctccgcgacgaccacccctctcctctgccaccaccgtcacttgtcactatctctttctctcgtatggagatactcgggcgaccatgagccaccacgagcaccaccatgacttcgtccctctcctccacgagtaccacgagttcatatttgttcatcatttctatgtttttgtttattgattttcttattttggtattttgtttgattttggtctgactctaaaattatttttgtatttcttttgtgatctagatctgtatataagatgatttgattttgattggtattgtagtggtgtgcttgcagtgatagtgggtagtggtttttgcgatggtggtgatgactgtttaaaacaattacctataggtgataattttaaacaactatctataatataagtgactattttaaacaatcggctatattgcttagtatcttcaacagatttgcatagtcgggaaaaaaaaaattctaacagttttccactgtcgcatattctatttaattttcttgacgattaaatatgtattaattttagaaaccgataagaatactttccttaattgttactaattgtttaaaataatcgagaaaatccaattttacagtggttatataaatactaaaatatacatccaaaggactaaatcgaaaaatatgaaggtttcaactttataacaacactcaaatgtaataatatctacatcgtcctaattttgattttttttttcttaaaaagaagtaatcatatagatgtaaacaaattaggccttataatcattataaacaatattatttggtattgaagaaacctcaatccaaccaattacattttaatgtcctaattttggttagataatattgagtaagtattattatagcttattattgaaaattagcaagattttaaacaaacacttgacaacatcattataacaatttattaattttttgtgaaaaaaataattaatgatttaaggtacaataatagtgttagggttcgtttggtacactgtattgtatagcattatattaaattgtatcttatacagtattttttatgtaaaattatatgtggtattaacttttatagacacttaaatatataatattttagcatagattaagatattaacttagtattatacaaaaatataatatataatacaatacaatacgaactaatacgatgtcaagttggtagaattgcatgatatttggagagaagaaggttatttgggtaattttagtcgaaaagataaaacaaataattgcaggaaaacgatgccgtgtagtacaccacatcatcacgtcatttactatttacataacactttcaatatataattatttgccatgacccaaggaaggatgatgtatgtctcttttattgttttttttaatgaataaagaacaacaaactttatagaacttcaaaactcgtggtgtgtgcttctatcacatcatcctaataagaaaacaactcaaagaagtccaattagcaaaatattatgagcaaatttattaagttatttaggacaacataacttagcattatacaacaaaacaaagtttctaaagaataaaattgttagttacaaattaattaacacaaaaaaaaaagcatgggcaagagctaaaacttttgcctttgaggcactatgcaccatgtgctgcaatgtgattaattgtcatgtaaaaatatttaggtttactttagataatttatttaattatgtactttaatattttgtagtataattattaaattaaaaaaatatatatttaatttttttagcttacttttttatagacaactataatcactacaccttcactgtatattagagatgattattactttattggacaccttaacacaacatattaggttgtattttacaaataattatattttcttaatattatttattaaattaaaatatgtataattttttaagttaataacgatacatgtatcatattaaattaaatttaattattaattagtaatacaataatacaacattataagtataggacaaaactttattttccatatccttattaaatataataataacaaagaatgacaatggaagcattctcatcaactatatatagcttgttgttcaaaactagggagaattcttacataatatttaagcttcaatgtcccaagaacatgttaaataaagtcgatgatgttaagatattacttcaatatcttatataattaaacttataggtaatttcactcatctaaaagggatgtattgttgtatttttttttttatttggatgttaaaaaaaaaattaatttaatttttaaaatttattttacacttgtataaaattttaaaaaaatatagaaatcaatgttaaaataatttattcatgtgtgttcaaaataaaaaagtcatcagattgtttgaactttttattttatgcattaatttttttaatttttttttaaaattttatataatatcttaaataactaagacatacataataataataaaaattagactaatttttttaggataattacaccacatactgaaatttttaatttttttactactgtggggtgaaatttttttcaaaaatactgtgtacattgttctacagttgttttagtacggttgttttagttccactgttatttttagttattctgttttgtgttctactgttattttataaaatacattattttttttttttaaaaattataataatatttgtaaaattaaattaatatttgtaaaaattataccccactaacatgtttagtgatgataataaattgcaacaaaatgtttctttttggattgtagcatatattatgcatgcacaaaagaatatttttggtcaacaaagccgccacaatattttatatcatcaaaaccattcataattagttaattaattaattaactaactacttttttttctcatattaatttctccatttttcattttccattgctgcaattttcatggaagaaaaagaaaaggttaaagaaaatcttcaggtggttgtattcccatggttagccatgggccacctaatccccttcttccacctctccaagtctttagcccaaaagggtcacaaagtttggttcgtctccacaccaagaaacctaaccaaaattcccaaaatacccccacacctttcctcactcctcaacctcgttaccctcactttcccacgtaaaataccaaatctacccctcaacgccgagtcagccgccgaagtaccattcgccgcccaatctctactcaaacaagccttcgactcgctcgagccggctctagccgacttcctacaatcctccaaaccagattggatcatttacgactacgcttcgcactggattcattcacgcgccgccgagctcggtatctcacgcgcttacttcgcgctctttaacgccgcgtggctttccttcctcggtccgccgttggatctaatcaacggtctggatggaagatcgagtgcggaggattacacggtggttccgaagtggattccgtttgaatctcgattggcttatcggtaccacgagatcgcaacgaacatagatagagagattgatatgagtattacgaacgattcggtgcgatttggtatcgcactcgatgagagcgaagtaatcgccgttaaaagccgaccggaattcgaaccggaatggtttgatttgctgggaaaactttaccggagacctgtaattccggtagggtttttaccgccggtggttgaagaagatgatgatgacgtggactggttagggatcaaggattttttagatgaacagaaagagaagtcagttgcttacgtggcacttgggactgaagcaactctaactcgggagcaactcactgagttggctttcggtcttgaactatccgagttaccttttttgtgggtgatcagaaactcgctggatatgttaccggatgggtttttggatcgggttatgggtcggggaacggtttatgttgggtgggctccgcaagtgaagatactgagtcatgactcggtaggtgggttcttgactcactgtggttggaactcggttgtggagggactcggacatgggcgagttttggtgctttttcctatggtgaatgatcaagggattaatgctagggttttgagtgagaagggagttggggttgagattcctagggatgagtttgatgggtctttttcgagagactcagttgctgagtcggtgagattggctatggtggatgactcgggcgagttgatgagaattaaggctaatgaaatgaaaggactttttggtgttggtgatgggaatgaatttcacttgaaccagtttatcgaatttcttaaagagaataagttaaggggttaaaatcaaaatcaaaacttgattgggtaagtttgttaaatttgtaattaaagtggtcaaatacttggccatacttggtcaaattagtaaagtcttctatttagtattgctccttaaaaaaattattaattcatatttaagttcctcaaatttgttttgagtgatgctttttagcaaggagaagataataaataacattcatatttgaacattctttgcacataatttcattctgtattttttaagaaaacttgaatttaaaaaaggaaattaaagtgaccatatggttgaagatgatgttatgtggcgttcagaactagccttgaagtgaatgaactagaaataatgaaattagggaatgagacgattctttcttgaacttgaacaaattatcatcatcttgacagtaatgctaggttttgaaaaaagaaacaacagaaggatcccaagaactaagacaattctttgcacagttaaaagaaaaaatgttcaaaagaacaaaagaaggaagcaacattaattaagaaagagagtcaacttgtgtagtcaacaaatgttcaacaagaagaacacattaaaataagaagttcctcaactttgttttgagtggtcaaaatacttgaactcaattttctcaaagaggacgatgaggcatagtttttattattattatttttttttgttttctttttgtagggaaaggtttaagtcaaaatactaatttatttggttttttagggaattaaagtgttaaagaaatacttggaactcaagagaggatattgattgaatacttgaacaaaatacttgaagaaactcaagagaagataaatttgcagttctattgacaacataacatgaaagctttctttgcacatttagtagttatgctaaagaaacaccttaaaagaaaattaaaaaaaaaaaaactaaggtaactagagtcaacttcagcaaatgttcaacaagaacttgaacatgaattcactgattcacttggggtgggatgtagtagcagtatcagcaagagtcttgttgtaagcttctaattccttcttgtaagcttccatggcttctgcagctttctcattccacacttctctatctttctcattcagttcctataaattcacaataacatacaatatttaggctcagttgtcaggacaaaagtaaattcatactaaacagcagtgtatattttaccttccatttgactgaaatagctgcattaactgaggcaccattgagccctggtttctcctccaacaagttctttcttgcttctttgctgcatttttcatcaacataccacataattaagctattttctcttatacccttcttcaattactgaggatattttcagtttattattactaattattcacctgaacaaaatgtatgatgaagcaggctttttgggcttgttggggtcaacatccttcttctccttcttcttctgttggagaacctcttttgttttctgtagattaatttaatcaattaagtaaaaaaactaaaacaaaccataatttagtgataatgggatttaaaggttttgattaaaggaaccaccttgatgatgttatctgttttctcttttttcttgagcaactgcaaggcttcttgcttctgaactttcatgttttcttcatcttccttcctcaaattctcagcttcctcttctttcttctgattgtaaatctccatctcttgcttatacttctccttattcttcttagctatctgcaattttcatatcatgaaaaactggtcagcaaacataatgttaatgacaccataaaatcatttgacaacaaaaaaaataaatcaaggcaggaacctcttcataaggagctttcatttcctctgtcatgttcttccactcttcacctgtgatcttagctacctccaagacactcttgttgtcttcacgcagagaagctcttctctcgttcaaaaagatgaaatatgccgacattggctgctttggtttcaatggatccttttctttcctgtaaaatttctactgagttaaacaacagtatatacattacatacaaagaaggagagacaagggattttcttacttagtcttcttgttttccttttcagccttttcggcttcttgtttaaactgaaggtactgatcaagcaactccatagctgtcttttgtttgtgttcatcttcaaagagcttcattgcttcagtctctcgcttctctttcgcaacgacaagcaagtaagcttctttctcagcttggtatttctcctcataaggcttcttctcttcagcagtgactgttttccatttcgcccccaaaatattaccaatatctgagaattgagcttcaggattctccttcttaatctgcatttcaaaaacccagatagattttacaaaaaagattcaaaatttcaaaaaccccttttctcatttgatctatatattacctcaatccactgatctttacaccataggatataaggtggagatggccttttcttttcagggcaaaccttcttcttcttctctttcttgtctaattcattatctttcatggattgaaaaattggaaatgtctacaaaatcataaaacaatataagaaattcaaccaatcattaaaacccccaaaattaacctgaatcaaaattttcaagcaaaaccctaaccatggtgggtttaaactccttagccttctgcaatttcttcagctccatctgaagcttctcctgttctttacctcgattctcgagctcttcctccctaaccttcaacatctcatctttctccttcaaaagctcctcggttttctccttctcgatcctcaattgctgaagcttatcttgcatttcctgcaaatctttctcaaacgacgacgtttgtttcgtcgccgcttgtttcttcgacgcggctttccctttcttaggcgaagtcattttcttctgagagaggctctcgtggttctccttcgcgggatcgttcttcaacatcgccggcgacggcgatggagatggctcagacaatttcccggccaaaatgttggtctcatcggtagttgggttcttctctttgagagctctgcggttctgcttcttgggtttcgtctcggctgcggcgactgtagctccggccatggtagaaggaagaaaggtgagatcttggtctctgttgagtggagtttttacggtgatttggttaggtcaatgaaagagaagaggggttttatatagagaggagagaataggttatattgttataacggctagatttttcaaattcaaaaatataaaattttgggggaatgaagaatggtttgaattccagtactgattcatttgtgttaatttgaccgttggtagaaatttaagttcaaaaatgactcaattcatctttaccatcggatatgaatatgataaattgttatttcaaatgggaaatttcatttttttgcccttaataaaacctccaatattaaaatttagatcctccactaatttgtacaaattaattccattgattacatgaacttcccattttacccttttattaaaaa

SEQ ID NO: 219251 - DNA, 4177 bp, Cannabis indica
tatatattatatatataaattttaaaataataatattagtaggtgtatcaatataaacaatctatgttacacttaactgtgaaaattatatgacatcttaaatttactaataggttaataatttaaaaggttttatgactaaaatttaagtttatatgattaagtggaagtgaaatgatagtttgagaggctcagcagcagcaaaaaaactctttacaataaagaattctaatattttgctctatgcgaaatgaattagaggattgaaagtggttttagtgttttgttccctaattgattcaaatattagattcaagaattaaagcatgtaaaagtaaaaaggtagtacaagggtatgagagttatggtgtgttatatggtttgatgatattttacatgtttaaggagtgatgatgtgttagatggtttgacatttcctttttagtttttattgatgttgcattggagctattgctcatggtcgcaaacatttaggaagtacatgttgatttggctttgattatgatcattcaggggacagagattagtaaatgtagtatgttgtcatttggtaatgtactttggtgtggtgtttcgtttaatattctcacctacattctttttgttacttaattcatttattttcattttctttagtttttgtttcaatttaattgttactgtttggtattgtctaggtttggcctgagtccccttgggtcggggactcagggttgtggtccgggttcaggccgggagccgaggctggagttggggtcggtaagcctgaaagttggcctttgaattggggctggggtccgaagtgggttaaattttaattaacaaaaagaatatatttttgaaaaatatttttactttctcaaataaagtaacaaaaaaaaatatttaaataataattagtgaatgcatactaaatatttagtttgttattcatgcttgagtttgtaaaagtttcaaacaaaacatggaagtggtaataacagttaaggatgaaacactaattaattacttagtacttattgaaatttgataactctgaagcttttaagtaaacttaatacaagattttggctaggaaatcaaaattgacaatcacttggatatatataatgttatgttaaacagcttcttctccactttttcctcgaactgtatcaatcgaaacaagctctttacaattcccatccataacaggatcaatgtgttgagtttctggtaataaatctttgctactaataataaattgatcagctgggggcttgtcttcacttttaccccaaagaaccatgtataagcctaggacaatgataagtgctccaataactctacaaaacaataaataatacatacataaagtctgaattaatacttgtaaagttattgtcatattttccaaattgagataataactgaagggaaatctagtgtatgcattacctgcccaagtacattatctctgacaatatgaaggagctcattattgcaactataaccatgcttagaggattaaaagctgtcacaaaaactggccctttaaccttcatgactattccctgaatatagtatgtgaaccctgaacaaattacaccctgcattgaaatttgaaacattttttcttttactcattagtacatttgtctggtttttttttagctgataaacatatttagatgaagaaagaattctaacactgtaaagagaagctaataacaagggacgcgagcctaaggaccaggctgaagggttgccccattctaatgctagtgcgacgacagtgctctcgattgcaccggccaagcatataaaaactgttagggagagctcagcagggtatgatgctaatgtcattgcctacaaaaatcaaatggtttagtatctaacagaaaaaaaaggtgtagaagtgaagtatggacaggtagttgagggtgaaattctctcttacttgaaggataatgaagactgaccaggttacacaacctgatgcgatcattacagcgcctttaaccgaggcttcattgttagtagcttgtgtagaatcatgatgaattgttggttttgtccatggaagattcaacattggtccattgtacatagtcataaacatagctcctccaacagtcactatggttcccaatacctttgcttggctatgaattttaccaagattgaccttctcaagcctatgaatggttaaaatgttcaaagattgattaaaattacaaccttaaacgggcatggttatgtgtatgctagtataatgatgtagaatgttacctgacaatccaagccaataagaacacaaatgcaggaagaacattgctcatggcggctgaaacagtagccgttgtgaacttcaatccagtgtagcaaaggttctggtctatcacaggcctaattgaaagaatagacttagattagttaataatccatataaaagaaattagtaagagtatggttaaagttttaaggataataactctagtaagccaagtaacatgatcttggtgaagacagatttggtcatttttggccttgttttcctgtaaaaacattaagagtgtcaagtgtcaacctgtgaaatgtaaaaagtccaacttagtgaaaattactaagatgagaaataatagaaacctctccaacacaagggcaaaaggagcaacaacaatagtagcaacagcatgccggtatgctaccaacacatgtgggcttatgccttggtttaaagcgtacttgaaaattatggacatccctgcaaagccgaattggagtacaatgataccaataaatggttttgctgatttgagcatttcaacaaatgattttgttgacattattctctacttacttaaactctcttactttctatttgttctgctataaaaggccaataaacaaaatgagctctcactcatttatatagggaattatttcatgccttaaggtacattcatgactcatgtttaggtagagaagtgaaaaaaatgaagagggttagttcctacaaagttgagctggcataaattctaaataatttttgtttatgtggattccatagccacctcagtgggattccacaatttccatcatcttttgcaacttgtataagtgtgttatgatcttagcaatttttttatttttatttttatttttattattacgcatatcataacatgtcaatatctctctcctacacacataacatattcttaacttggtggttagcttggtgtggtcttctcaaacatagttatatctatcaagtttttatggacatgtttagcagagaaagtgatacattataaagtgtctaattaagaatgtttactaacttcttaattattaagattacaaaagaattttattttataatattaaggtatacaataattaaaagtaaagtaaattattttaatataagatttagagtaagttattgattagttagaacacatgattataattatatgacttcactgaagtgacaaccatatattctgctgaattctctttaatgtgaattctgtaatagcatctcttattgtcaatctttgaatctaaccaacatatgggatatgccaatagaacaagtaggcaagatttgaaagaggcttaaatctcaactatttttccagtcattccatgtgttgttatttgacaaagccttctttaatccctaatatatatcttctttctttctttcttttttcagttaattcatatatatctttacctatttagataattagtggacatgtgtgagtagaatttttatgtatttcacccattgatgagcacaatctgtcaatcaaaccaccttgccaagatgagataatattactcaatgaacaatcccatcagacaaactattcctaaatgaatcacatgaagaaaggtgccttctcctctgttatgatatatatatatatatatatataaatatatatatatatatctgtgtgtgtatgatatatatatacagatgccattgttctgattctcatccatttctcaactataaggtataatcacctacaaataaagtcaagttttcaaatcatatctcactaaacgccacctgaagatcaatcaaatttgttttttctttctattatagttacaaaaaaaaaagttagttgtattatattactaaaaaaaa

SEQ ID NO: 219252 - DNA, 2283 bp, Cannabis indica
tagggacaaactccaaaataatctgtaatcgagataaaccatgggtgtaaaggcaagtaagcacctgtgttcatatggaaccgtgacctagcactacaacaaaaattttgagagctgttaagacatccatgttgaggtttttgaacaataatttcaagaaaaagatagtcattttttatcaactcaacttgatgtttggatatagtactgaaaacgagaggttttaacttgaatgctcgatctcttggatcatcactcttaatggaacccttaatgagtttggtttccatcaccttcccaccacatgccttgtctaaattttttgacttggctattgtgagcttagccataattaactgagccacgtgtgggtcatattcatcaggcattcttttaattctcttcatacgaggcatggcaggttaaaagctcaactaacttcaactcagaacagatgaatcacagctcaaatcagctcctttgaaccttgttaagacaaaatcaagatgactacaccttggaggaaaggaaaatttcagcttaaacgactcacataaaaatcatatttttgattttcggacgccttatcaatggagtttaaggatttccaaccagccctagaatccttaaaccaagctctacgagatgggaataaatttttttaaaaaagagctctcctatttataatgatgcaagtcctttattcctaaagcaattagaagtcttttaaatttttagtttaaaaggtaaagatcaaagataagtaaaatatgatgctcaccttctctcttctccttttctacttaagattttgaatttctcgttagaagaggaatagtaatttaaaatttagacggcactactactcctaatgcaattaggattcatgcaaattacaagttcaaaaggataagataaatgacaagtaaaagatgagcatcgtttctcttctccttttatacatagaatttcagatcccttattctaaaaagaataggaatacaaaacttggagactgacttaatcctaatgcaattaggatttgtgaaaattttgatttttaagggaaagataaaggataagtgaaaaatgatattgtgttttaatcttttcctttattttactgaagaattttgaattgcttatgaaaaaggaatggaattcaaaatcctaatcatattaggagtacttgaataacagaaaaattgctcaagatttcctaaatagatgcccctggtagtttcaagagtaactggcataattcatgtcatcaagttaacctcacacaagtgtaaagttgacttgggtggcaaatgtttacccaaaaactgaccttggtgacttggacatcaatgtttgacacgtggcaagaaagaaaagatcacagagttgagtagtcctgagtcatagcagtcgacctaggaggggtccctagccctatgcccaggttgacttcaggaactccataatgggtgtctggattctgccaagttgtttccaactcactatctttcgatattctattccatgatgaaataaataatccaagcccaaggcctaaaagctgaaaatacaagaaatagcaccccgaaagtcaacccaggtacgtagagtttcacctagcacccaaattgacattccaactagggttttaatttttaggaccgtcttagtgaaaatgggtcaaaatttgtactgaaacatgaattagacatgttacaaaatttatttaatgcatcagaattagattcagaataacttcaaaattgagcacctggagcacgaagtgtcccagtcaacctaggctgcttccaatcatcaaactgaagaactatcctgagcattgtcttcctcttcattcaaaacaaggaaacaagtacttttggggagaaacaaatcatattggagggcaaacaaggcactcagcgcccaagttcacattttttcaacttgggacatttacaaggagttttttctgagaagttttctaggcatattctctatatttgtcaaagattaagatacaagtgtggctagaaaatggacccaacacctaggttaatattttgtcaacctgggatgtttccaatcattttcccaaaaaaattgttctgggcattttttccgtcatcaaaaataatgaagatacaagtaaacttgggaagaaaacaagaatcccgaagggctaaaagttgagcccagcgtccaagtggacaatcgatttagtgcaatggttgttggaatttattttaccaggatcttagatctactcacaagtatgtt

SEQ ID NO: 219253 - DNA, 5529 bp, Cannabis indica
tatatatatttttgaaaaattgtaaatttaaccattaaacttataaggtagttaaacttaggatagcacatttgttctctaatatataggtaaattataacataaccattaagtaaactaaaactttgttgataaaatataacatttagttaaaaagatggatctcaatttcttttcaaaaaattacataaattgttattttggtaaaatatttacacttttacgtttaaatttttttttaacaattttacggtattctataaaaacacaaaaaaaccacatgagagtaacaaaaaacaatatcaaaacaactacaacaaaaaatagcatatagataacaataaattaataagagtacaacataaaaagattgtatcttttgtaaataaaatcataaaaattacaaaaatatttaaaattctgcacaaccgtatttttataatttttccttattgtttttaagtatttatgaaataatccatttttaaaaactaggttaaacacttttataacaaagcttttttataaataaacttttaacttttctaaaaactataccaaataagcgccttgtatatttcatttcaagcataataaaatgaaatttgtagttttttttgtcaagagatttatgattagagttagagtgtaagtgtgtaactggtataaatgatcaatttttcttttattttatttttaattttatttacatctactttctcttatcatgcatccaaatttgctctcagttgctaaatttacaaagatttttttaaaaataccttttgcataaagtgctaaagatttaccactttatagaattttcattaattttttaaaaaaacaaaaatccacatctctactttatcactcattagatttgtattaatattatatatattttcacctacaacaataataataagccatcttcactttgttgcccaaccaaatttgttcatgacattaaaatgagattacaaaagctcaaaagtaaaccccttcaaatattatgctgagaaacaacaatgagactgacctataaattatcaagctctaatcttgctgcctgggttgctcttaggtatcccataaaataaaatggtaagaaatccattatagtttcaaaatttctcgctctaggctctcgacattactgcacagaaatcccagaagaaatgcgaagcttcgagtccactcctccactaacaacagcatcacctttccaccaatcggcacaaagtacctgaatttgtttcaattgataaaaacaattataataacttcaaatgcattgtgaaataacgaaatgtgtagtttttttgctgtcttttatttttaccttgtcttggtgtgaattaatgacagatagaggccactgtaatataaaacagcaatttagtaattagcatctctaggagagaaagaagagaatgagaactgaatagtacacatatattcacacttagcaaacatgaggaaggaacattaccgcagttcttagatcccatagcataatttttccatcgtaggatgaagatagcacattaaaccaagatttattatgccacttgcaagccgatatccatgaagtgtgagatgaaaattgaaacacaggagccgaagttcctattgataaaaatagttttcatttcacataaaaaatgtgttaatggaaataaacatggtacatgtatgatacatgtttgttagagtacatgcgtattttctgtgctagttttaagcaatacatatatggtatgtgcaattgaaaatagactatatgcttggctcgttgaacagacctggcttacgaggatcccatatcctaagaataggatcagaaccaccagcagcaatcatcatagaaccttcaccaccaatatcgaggcagttaagggatttcccacaatactgtcaatgtggacattgtcatcatcaaaaatattttataattgaacagaaaacaaagatggaaaaagtctctttttttctttttctataaacaaaatgatgttctggaataaaattggacaccaaccaaattcctacatagctcaaaaagaaaaaaaaagagaagaaaaggaccccagcaagcatgctaaaagaagaatatatcttacgatgttcaacaaatctttgcctgtctccacatcccaccgtctaattgaatggtcccatgatgcagaaaagattgtatcacgctgtgaccaatttactgaagatacacattgtgtatgcccaactaatgtagaaacagcctccccctgagtttaataagagattaatattaataattgttaaacttgtgaggaaaacaaattatgctgacatcttaaggccaaatatgacctttcttttcttctcatcaaaatgcaagtgaaaaagaaaatcaaacttgagaaaaaaaaatgtccataatacctgcaattgaaaatccccaacctgaaccgtcctccttttccttcttaattgacacaaggtcaccttctgtattgatctcattagtttgccacaaattaattgtgctatcccaaccacctgaacatatctatgtgcattcaaagaaggaaagaggtagatgaacatcagaatctaaatttcaaaggacaatttgcaatatatatcatacaagcaactgacatttaggatatataaaccttaccatatccccagatgtctgagaagatacactttgaacggatgctttatgcccacgcaaaattttgaatggccttatcttcaaatgactgttagttggctcttctgcattgaactacgataagaaagaataagaagagaggaaaaaaataggagatggtattagtcaaggcaacaatcaactgtgacaaagtaaaatatctgattccaattaccttccatagccttagagtctgatctttcgaagctgtggcaacagtaacactttcttcatctgcacaaacagcaaagcttttaagagagaaccaagaactccagtaaggataacagggtatcgaagacccacgacccaaatatgcttggccacagaaatcatacaagtacagaagtataaacttgcatcaattaagtctcctttcaaaattactagaactcaacactaactctttaagaaaaaatgaagatgcttttacataacctgaatgtcaaatatcaaaagaccagtcacattgttaggtagccaacgcatctttttacataagttctttgtaagaattatgacttaattctttcttattagtctagactccggataaaaccaccaggatttgtccaactcttaaacctactttaagccaataaccatctaatagtaggagtgagaacaagctagttaactgacactagaaccttcatatatacaaatatatatcatttgcctttatgataaagtcttgtaaacttcgttaataactataatccagaaattcttaatgattttagtcctaattgcaccttcagagttgatgattctggcagaagtaattgcaccagtatgtccttccagtatatgtgtacacactccagcagacttccacaccctagagaataataaattgtaaacaataataaaaaagaatatatgttaagctccttattttgtgtaattataaatataaaatagaccaaaaagttctgaaagtgtgaaaatttaccttgctaaaccatcataacaacctgtcaaaatgaacctgccaaatgtaaaaattgatgaaatcttagtaactatagtgctaagtttttacttttagtccaaccaaatatgggaacacagtagcattcgtgatgccattttagaaaggcacttttgtactaaaaatactaacttttgttgtttcccacaatcacatacagtaagtctttcaagaatttaagggcagataacaatcgaagccgaattttcatgtagaggcttacccaggactagagccatcaacagcgctaacccagtcatcatgtaaagaaggttcttcttctttacgcgggacaactgcctttatgtactcaatttctaatgtcctctcctgtaataagttaaaaaaatagtgagtatcaaaatgacaaccaataagcattgcctcccttccttcatccattcaccctcctttgtttatgtcaaatgtcattaaagaaacaaatggcaacttcccatccctaatgatggtcttccctaattccaatttctaatgaaaatgttgtcattttggaaaagtaaatgtcaactttgttttctatctacctacttagttttgtcccaaaaagaacacttcccgcaagataataactcaaaacagaaaatgacagaaactaaattgggaagggaacacagtaccgccgatatgcccttggcgagaagaaactgctcaagtgacatcctaacgaattccccatcgatgagaaaatcaaagggttcatggctccactcaggatttcctggtaattaagaaaaagcaaaattaagcttaagagagtactatcgacggaaagtaatatgcaaacccaacaaataaaataagcaatgaaaagggcaaccagaaaccgataaattatatcaagtacctgcttgtagaagattgttgatgatggtcgaaaggccaaggcgggtgaggtttgaaggtatagcaatagaagtgggaggaactttgaaaggaggatcgagcttggtcacaaaccgggcctgcaccctcgtcgtgttctcttcttcgtctccatccctgtccatctctctctctctctctctcttctctactgagagtagtggtggaaagtatacaggagaggacagcaggaagtgaagctagggttttgcagagggttgagggtttaggaaacgcgcggaactttgtggtttttttgggattatttcataaaatataatagaaaatttacattttttaccgtatttttttttttttttttacattttattgttactttttatatattttattgtttatatatatattttttataaatttgtgactttttagatgaaaaacaacattattttattattttatgttgctgcaatgttatattacattacaaccgtattttataaaacaacctaaacataacggtcataatcagaattttgtaaaaaacataatttttttttttttggatatttttaaaattaatctttatatataatagacgtagagaataatagttttttcggtcttttaaaattttagagaatggctacactttatttctatataaaaaaaaaataatgttgattaagctgttctaacttggcaaacttgccatgataaaccatgcaccaaaataaatttgaaaataatttgtattttattgaaaaaaaaaatgcataaaataataagagtcaacaccatagatatagaaaacgaccaatagtgtttcactagtgaatggagcccaaaatacagcgtcctcaaattatatacaatgtttatatattataaaagacataattagtttatatatatatacaaaattgcaatatgatgtgctatttggtatgtccgcaatgttaaggtacac

SEQ ID NO: 219254 - DNA, 5724 bp, Cannabis indica
ttttattttttgttttttgttttccttttcctttcataatttctcctctctctctatcactacagctcttccttttgtctcgttggcactctcttaaccattccacaccatcatatataccaattccattttccctatctttggcgtgaggatattattaatagtaccctcatctcctagtcccagctcaataccccctttttccttctcatcattttctatttataatttcacaaaaactaaataaatttggaaatcatgttctttaccttttcattatttcctcttcatgattattattattattatcaaaccactactactactcttcctctttcttttctcttcctcctctttcttaactaccttttcccaatcatggttactttttgtagaaaaagcgtccacacttttttaagtctaaccactactcctcttcatcatcataataatgattatgatcatgacgagattagtaataataataatactaataaccccattatttctccattgacgaccacgattaattccaaaacaaccggaggttttggtacactagtcactaccgaggaggatgaaaacatcaccatacgatgtcgttcaactaacgatttggagtcaacagctgcttcttcattcaaagccgatccttcttcgccgtatttttccccgtcgaagacgaaggatcatcatcacggcagcagcggccgtggaatgggcttcatcgacgatttcggcgccggcgtcaacggtctcacgtcctgcacggagagtcttggtttcgaaagctccgatgaacggagggtggaagaggatgatcatcatgtcatggatagcgtcggcggcgaggagttgactttgacctcgaggccgtggtcaacgtcgactgctacaaaagcgaaatgtggtgggattaggaggaggagtattagggatcgtcatctgtatcaaaaccatgaagtgaagaagtttccgccgccactttcttcgcttaaccagaatggtcaacctagtttttatctccaggcggtgagaaaggaggggaggttggagctcactgaggttaggattcatcggccggagattctccgagcgtttcgtgaaaatggacggttgagattgcaattcataagagatgacgatgattgtgatgatgcagaggaagaagaggattgcaatgatgaaaaagtagaagagaaagaaaaagaagttgttccggaagaggttattatttcggagaagaagaagaagaagaaaaagatgatggtgatgatgatgacgatcaggaaatgaagattccggtgagtagcggagaaggattacggcggtgtcacgaggaggtagtgaacaaccacaaccaccatcaccatcaccatggccatcagcaccaaggccacgggcacagccggagccaccaccaatatcatcaacatcaacaccacttgcacgtgtggagacagacgcattgtgtgacgaccaggtgaagtcacgtgtggaagggaattagtctggggtggcacgtactcagagaaagagacagctatttcattttatttttttcatgggcagcaaagaaaagcagagagaatattgttattgttattataattaataatagaaataatatatcagatcagagtacaagagacaagtacataatgatgagttgtggtttggatttatatatcatataaagaaattcatgttatgcaagtgtgacaagtagtcacaacaagtagtagcggaagcagtagtagtagaacaaaatatataatatatattggttgttttgatgtcatcatatgtagtactacttgcgatatgtgcctctaaccctaattttggaatatttggaatgtagatagatggtgtggataactgtggattctctgcaaaaattgttaataatgagacatggcacggttgtttggctcagttctcgcacgcacatccacaaaataattataacaacaaaacatatattatttaattatttatcacttaccgctgtcattatatattttgtgaggaaagtatatatgtgtatatatttagtgttaaatagctccctaaaccatctctattatctctaaatatacaatttccttatttagttttaatttttgatacacattaaagaaaattcgttggaatttgttgtacattatggatattccattaaggtaactaataagaagttcttgtttgggtatatatagtataaagaaaaatatatcatatatatatttatatatggactcattcctgaaaattgtcaatatatgtaagtattgattaattgaagatgtaagattatctttaatagaagatgtaaaaattaaattatatttaacataaaaagtaattttgaaatatttttacatcattttttatcatggtgctccattgtgtatgcaagttattaattcaaaaaaatatgttcattaaaatttaataataaaatattaaaaatagcataataataaatataaaagggtgatatatttatatgataatttagtatactataataaattaacttttaataagatgaacttatataatttatttacttttttattagagatttggagatgctctaaatagagaagaaacagtattaattatgaatgcctttgactttgaacctaattaattaatggcataataaagtttagtggttggtaaagtatatcactgggaacccaacaaaaaacgttaatgcaaatgggaaaataggatatcgtggccagaatagattggttcataaagatgtataaatatattataataaataatagcgtgaacgttcgtaccgaaaaagagaagtaataagatggtcttgatatcgtgatgtgtagccatcaggagtataagagatgatgatgagatggctagcattatttaattaataagatcgtgtatttagtcaacttgatcaaaaagtaacggaaagtgactgatacttattaatttcctgggagtaaatggcactcttcttcttcttgcatggttaagttatattacgtgtattataaattgagaagtcaaagaaactcaaactagcctatttatatatatatataatatatatgggttttttggtattggcattttaaatttcactgaagtaaattagtataaaagaagcagtaaattggattagaaatcaattatgacagattgtttgaggttattataaaagattattgtaatttttttcatctttaaataatattttcttattttttattaaacaatctataatataattgcttatagtctttcttttctcgatcaaatatacaacagcaatgatgttctaattaagatagaattttatttttcttaactgatttaataaattaataaaaattctttatttacttttaaaaatatatatatacagcatatttaacgtatatctataaataatagtgtcacgtacgttaatattttgttatacatatataatgtatatgacatatactcaatttttttaaatcagaaatcattcattaaataggtagcagcttgttaggccgtggacagaagtttgtcgtattgtctactcaaataaaaattaacatcctttaatgctactcctcttaataaaattataattctaaaggctacagctagcccatttcaaaaagaataaaaaataaaaaaaaagtaaaggctaaagcaagctttattaaccgagccaaagtccatatacttttctttggaacttttgaaatcaaactcttattagtatgtattaatatttttattgctgtaattttttttttttgaatagattcatgtaattaaatattaagtcttttaattataattttttaaaagtatgctaactaattataaaatgacactaagagatattaaacattattaatatatggtttcgttttctttgaaaaagcactaattaatgcttggttggaaaaacacaccgacaaatgcatgggacataatggtattaataataaatctccatttatatataactattaaagatgatgtgccaaaaacacgtgttatttgtgtattagttagtttaacataacaccctcaaaatttattataaattaattatatattttattttctattaattacgtttaaataaaaaatatataagttcgttttttaaagtctaagtattatctatatatatatatatgttgtttaaatataatttatgtgattttttccattagagtatctctaatgaaaagctaatgtattgttatttttagaacattttgctaaaatttaattctaataatgtaaaatgtgtgctaaatttagcacagaagatagtatgggttaaatttttacccacaataaatactacatttttttaaattacctatttgtcacttattaatactattaattgactttgaagaagatatatttataagatattaaaataatataaataaaattaattattttgtatgttttgaatgaacattaatggtaatattgagttttatagctaagttgcaccttgtgtattggagcacaaatacaagaaatgggccaaatatagccttatggtattttttgggccaaatttaacctaaaatatacaccattcattagagatagtcttattatgatattatctactaataaaacaatacaaaaaattaacatcgtatatgaagtcatgttttgtttaatgtaatagagattaatagaattaaaatttctattaatctttgattttcttttaaaagtgatgtagtgggattacaatgtaataaaaattacattatgtaataaaatctttattacattagaaaagctatgtaatgagaattacatcacaaatattaaataaaataagtaaaaaattcaaatatgaaatttaataatccatgctaaaaaattggccatggtatttaattataccccaattattacacataggaaatatattctaatctttttatttctttccaaaattacccctcttttcaaactcctctcattctctctaactccattctctctcttctttccctctcccaaactcatggtgacccatcgcacgaacccaaactccattcgaacccaccgcacgaacccactcgtccaaaaccgaacccacggcaaccttgtagaccactcgaaccaagtgaccaacgagacccacgagatcccccaataactgacgagacccacaagacccacgagacaccccagcgacccacgagacaaagctccgtccagtcttggatcaccttccccgcctccgtccacgacaatccaacccaggtttgttttttcttttactttaaattcacaatctgtgattaaactgtggtttgtttggatttattaattttgtgtttggggaagaatctgagtttagggatatagtatttttggggttttctttctttgtgcgacattatgcgatgttatgtaattttgtgcaattaatactgcaaagtcaaatcgagtttttgtgttggtattatgtgtgcgatttccatgcaattttcgtgcgataagtcatgactatcataagtgtttttgtgttcctgcttgtatgcgatttttgggtgacattttgtgcgattttatttaaatgttttactagtcaatgcttgaacaattttaagagacattatgcaatttttgtttaaattattttaccaggatctagattgactaacaagttgtttaacatcctaatatgaa

SEQ ID NO: 219255 - DNA, 6246 bp, Cannabis indica
ggaagagagagagagagagaatcgcaggagagagacagaatcggtgtagagagagagagaattttgtttatatatggttaaaaataataaatttccttgatttcaaattagattcagttttttaaggtatttttatggttttttttttatatttgtagtttgattggttagttaatgtcatattgtgtggcatttagttttcttgccatatttattataacatggttcatttttcccatatttttgaaaatatcccaaaaaaaattcgtcataaattttcaattataaattttttatttatgtatatatgagaaaaaaaaagaaataaataagccttttctttaaaaaataaaaatgggccttaaaaaaataagagctgctcaagctgcccaatgcttgggccggcgtggctcacatgatgtgtgaagaaggaataaaggaatgaaagaggaaagatgaaagaggaaagaggaaagaggagggtatattattgttcttttaagtccttcctttttcttttaaagaatttgaaccgttacattatttcaaaagctgggtataaattaagaaacataaaatgaaaaaaaaaattacttcataatctcctccgtcgtaaaattctgaaaatagacagaagatgctaatgatcaatcgaaagattattctcatatagataggatattgctctcaagtggtccttccacagacgaatcatgccatctaaatttttaaaattaagaatcagaaacccacttcaatgcaaaaagaaagacaaggaataaccccttgcaatatatatctcaactctcatgtgcattttttattttatttgttattctttctttcttttttctgatatgaatatgataaaaaagaaaaagaagaacatgtacaagaggttaaaaaaaacgcacaaaatctgacactgattcttcattagtgggactagagaaatagaaaccttatattgttttctaaattatatatcatttatcataattaagccataaaattaaatgttaatgcaagcacgtataattgaagtatacacacacagagactataattttttttttttgaaaggcacagagactataatttgattattacatgcatgcatgttatttctcaacagtaaataacaataataataataataataataaggttaaaagaggcccctacagaatctacaagcccaattttccattaataataataataagtatgtaatattctatatatatactatatatttatatttatatttatatttgtagtacataaccttgaatgatgaagttggcatcacccaaacaaacaagtgtcacgaagactgagtagaattcataattcatcaaactggtcaccttttaccttaatggtatttaatgggtactctttagtaatagtagaagtagtattagaattggttttatagttggaggaatcaaacttgcatggatcagcctccaacagcaactgaacgacctccttcatagttggtcggagagccgggttcttgtaggtgcaccgaaccgcaactcggaggacttggatcatctcatccttataggaatcggatagagtttggtcaagtacctccatggctccttctcgggtatccaccttgttagaaacccaatatatgatgttcttgttttctccaaactcagcttccactggctttttccctgttatcagctccattaggacaactccaaaactgtacacgtcacactttgtagttgctttcgatgaatatgcgtattctgagtaatataattaaattagtgatcatcatcagcataccacttcttttctttttggaacgaaatcattataaaatatcacggcttaaatttaaacaactaggcatataacataacaataaaaaaataaaagatacataaaaatttaatgtaattattatacgtatattttttaatgtaattaattattattattataaaaaataattacaagtataacaataaaataaataaaaatgatttgtgaaaatcgaattgtgaattaaaaaaatatatttcatattaaaataatttgttaactttacctataaaattaatttatatgtgcgtatatgatcactatatatgatcataaaaggatattaacgtaacaagtttgaaacataaaataagaacaaagttttttgaataaaacatccattttttcagtgtttctaagttcattaataaaaataaaagagtatatcttcaaattaaataaatgttaaaattattattttttttaacactatgataaaagctggaaggtaagaaaaaaacattaatttaccaggagccaagtaaccataggtgccggcaataacagtggttgtagaatctttgcctcctctagcttgcaaaaccttggctataccaaaatcagccacctttggatgataattcacatcaagaagaatattagtagatttaatgtctctatgaataatgggacgaggaagatcatggtggagataagccaagccttgagctacccctagagcaatctggtgcctagttggccactccaaatggaagttattccaccctctgtggagagcatcccaaagatttccattaggcatgtactcatacaccaaaagattacaatccaagctggagaaataacaaaacaacttgactatattcttatgccttatgctccccaaagtctccacctctgttttgagctccttgttcagtatcaattgatcatcatcttccgaagtccatttctgctctgttctactccatagtcgtttgactgccacgacttctttgttgctcaactcaatcttgtacactgtgccagacccaccacgacccactatgttcttatcaaccatagcttccatgatttcacgttggtcaaacgttatgcggtggaagctcttgacttcgtaggagaagtacgaggatagggtctcgtcgttttccactgaggctctttctttgccaaaacgacgcttaatgagcaaaacgaccccgattatgaggatgacgattgatattgatattgcccagatggagttcaatttcttttggttgtatgatcgtgatggacaaagagggaaagttacgttcttatgggaagtagaggatttggccagaactgacgagtcaatgcatagacccgggttacctgaaaagctttctactaatcctcctttgattaatgagggtgggattggacctgagaggttgttgttggagaaattgattgagtttggtaaaagttcacagagactctctggtatattaccagtcaaaagattgttggagaggtcaagaacgttgagatatttaagggaagagagtgagtcagctgggattgaagaattcaacttgttgccttgtaaaagaagcaaattcaattttttcaagcctccaatatgggatgggattggaccggaaagaagattgttactaagatcaattttgaccaaatttgtagctctagaaatctcaaggggaagcacccctgaaattttgttattctgtaggaacaactcagacaagtttcgagctcttccaatggaatcagttatagggccactgaaattattgtaaccaagatcaacaattgaaacatgaggaagagccagcaggccctcagggattgatcccactaaattattagcactcactctaaacctcagtaatgaatagcaatttccatagctctgaggtaactcccctgagaacttattatcaagtaccaaaaatattgtaacttaccagcttgacaaacgtgagcagggagtggtcctgtcaagttattttctgacaaatcaagcacttccataggcgacgactgtccaagattccaaggtacttggccagtcaagtaattgtcgtaaagcgacaagatctttagtgtggttgattcagcgatcacacttgggatttctcctgtgaggctattgttgtagagctgcaatacatgaagattgggcaaacgacaaatcgaggttggaatttgaccagtcaaacggttgaccgacatgtcaaagtcatttagctccgtcaggttccctagctcctcaggtattggtcccactagctggttgtagtatagctccaacaatttgatattctttaacaacccaatctcggcagggatttttcccgatatgaagttcccactaagctccagatcaactagtgacgtcatgttcccgatggaccgtgggatttctccgtacaccatgcaggtggtcagcaccattgactttagcttctttaagtttgcgatactctccggcaatcgccataattcgaagttcccattctcgttgaagttgaggacttctaggttggtgaggttgacgaccgaaatcggaaactttccttggaaaaagttataagacaagttgagaatcctcaattttttcataccggaaaagtccggcagagttccagtgaggtagagataactcatgtccaactcttcaagctgagtacagttgacaatggtagttggaaactcaccagagattcggttccgtccgagtcgaaggacccttaattttggaagataataacatatgttggaggggaaggtcccagagagtgaccaaccgtacatgtcgattttgatgacttggcctccactatcgcattctatgccggagaagttacatattggttttttagccccggaaccaacataccaattgtccaaggtggcaccggagagagatttcttcatgaggacgaaaaagtctgtctggttgttggctccaatgatggtcgattcatttgaataaagctgtgatatgaagaataaaagacagaggaagcatgctatagagttgggcgccatttgatttgagtagctgaaaatctagattgagagagttttaatatttatgctttggttgagtaggagaagaagaagaagagtatataagcatatagcaggcataaggtttgtttagataaaagaaatacattgggaaagaaaaaagaatgagtattgtcatgactcctctaatcaagcacaaacgtactttacttattgccactatcaatttgctttatatcacaaaatttatgatttatcatctccttttcctctcctaattcattttagtacttgtggaggagatattatataaatataaatatacatttatataaagtaagtgtgtgtgtatgtgtatatgataccctgtcttttcatggaagaactattctctttataatgaaaggttggtgcttttgttttatggagcttccaccatgtccaaaagaaatattttatctccatgaatcttattcgtttctttgaggaccccccaaaccactcaacaaagatgggctacaaagtacactgtgcttgatccaagtgtgttatgcgtatccaaatgtacagctctccaaagatcttcacttgttgctgtgatttatatatatatatatatattcttcccaatagagatcagtgtttttttttatacaattaataaaaaaaattatgtttaaacaagagaatataaattcgcttataaaattaaaatcatcagtcctcctatctaaatgtaagcatatgtaattttttccattattatatattaataagaaaagtttaaatgaaaaataaaataataattaacaaaaatttatgaaaaaaaaataaaataacaacacaaaaaacaaaaattagtactatatgtatgggtttgcatggcggatctaagggtgttgagggaggactaaagtccaccctgaaattaaaaatatattaatatacaatttttgtttttatatatacatagtagtcaaatagctagaataattggttaagatgctttaaattgacatgggagaccatattttgaatctcattgtccattttttctatgtgtatttacttttttatttattagaaaaaacaaatgaagtacaaggttcaaattaagtctaaacttatgaccactataataggaggatgttgctaaatcatattctatttaaatttagctagttatttattattttggattatattaaatgtataattaagcccactctaaaatttaatcttgggtccgtcaatgcataaatctgtggttgtacctcatcctgaggagcgtatggttgtggaacatacgcctcaccagccacctctccttcttcctctgttcgcagcgttcctctgctgcttaagggattggacttcggtctttaattgttcaatctccttcgcttgccg

SEQ ID NO: 219256 - DNA, 6040 bp, Cannabis indica
taactctgtatataaatatgtattgttctatgaaatcaacacacaattcgaatcactattttctacaaccaccatatctggtttattcttgtagaaattttgttacatgtataattaattattactatgaattggcaattggtgtgtttaatcttttagtcctcttgtattgggaagtcctacggttttttgggtattgaaaaagatgtaataataataataattatgctatgggttggttcaactcaatgtagtagattgcctatatatttgggagttgtgtaagatttgctcatagaaaaatttcaacagaaatatagtaaagataccttttttattcatttgtgttttgttctttcttctttctgggctctttacaaatttcatttacaatactccattttcgaaccaatcttttctgttctgcgtttaacttcatacgtcatacccttgtttattacatgcatttcttttttatttaatttgtaagtgaaaataaaaaaccagattggaaaggaagaagaggaagagcttaatcctacagaaattaaggtcagccattcactgaacttctgtatttattatcattttttgaattttgattgtttttttttctattattttagtttactattttcattttcaactgaacaaaatatttgaagtttcaatctttctctcatgtgtttttagtatatttcgtcctatgaatgaacaaacaagtttgtttgtttctactgcacctttttataatcttattagtcttgattataagcttagtttgataattcatgacagaaatggcgagattttgtgatttgccaagtgaagttgtggagaaaatcatattgttggtacctgctgattctctagtagaatgtaaatttctgaacaagttttggtattcttgtatctccaccttcatcaacgatccaaaatgatggtaagaaggatcattttagaactgtcaaagcagatctaactataccacatttgaatatgaatcgatgggtttacatatatcactgtgatggacttcttttgctagtaaaagatggtaccgaggagactataactatggcgttgtgtaatcctgctttgaaagaattcattattctcccacaaccaaagaatagtgttacgtttaaagctcatcaccacataggatttgaacatgattctagaaacaacaaatacaaatgtgtttccatttggctcagtaacgaagacgaatgtaaagttgaggtatacacagtgggttctgattcttggagagagatcaacatgtttgttactggtgtaggtatgatcaaggaaccgaaaagatcataagttttgatatgagtagtgatgaattccgtttgatagattttccagattttgaacctttattggccatcgaagattggtttagtttcagtatttgtgaactacgccttgcagtgtggaatgattctgttgtgatgactttagctcccatagtttcagattgcgataccaacatcctttttatcttcaccatgtatgaatctgttgcaggtgtttgtggttggaccaaatatgagcagattgggccactagataagtattacgattacttaataccattttcaaagaatgaagagattctaatgaaagtatttgaagataataggcgcgtagtacacttggcttcttgcaacattcgtacccgaaagttaagaaatgttgtttttgatccagatagaaacataagcagtggtttggtttgtttatatcaaaagagtctgatttctattaggaggaggtgaagaagttcagtaccaaacacatcttttgtttggttaaagcgaaatgttatttgtttagtagtttgattttgtggaaccaagctgtttcttataattttattaatgtatagatgaaaattctataattttattggttagcataacactacaagtattctttaccaccatggctggttcaatggtttggttagatttaagcataaagttaaattaattacatgcattttttaatttactttttctaacgggtaaaaaaccagattgaaaaggaaaaagagaaatcatacaaaaattaaaaccagtcacatgtgatgcaatttttaagttattacttttgattaaaatcttggtttcatcaatttatgactaacagaaatggcaagtttttgtgatttgccaagtgaaatttttggcaagtttaaatctgtgaacaagttttggtattcttgtatttccactctcatcaatgatccaaaagaatttctgaaaaaacaaaaattaaaataatcacatttgttacttattgactttgtgattctatataactatgaggtattatccagattactatgagtgacaattttggagtctttattgattgtaaaaatgtatagattcttgtattgatgatagctatgagaaatttgtttgtttctttacttacacaagcaataatatattgtacacatacaaataaaacagacatacatgtaaatgactgtttgaactttgaaacactacaaattgttttaaaaaatttcaaaatgagactagttagaaaaaataaaatagagatgttgatgtatactataatgtttgtgcctatgaggtttaagaataaaatatagaaacttttatttaaatttttacaaaacgacagaaaacataagaaaacgacacataagtcagtcactcatctaaatcatagcaggctctgtttgtattgggccggactttaccaacaacaaatgttttacattgtaaatagcggcccacagatttgattggtacaaaatacaagctgtaattgtcccacatcgccaatataacatattcttagagtgtttatatatccttaccttagacatgttgtttgtcccttcggggacatccgataaaattggaacgatacagagaagattagcatggcccctgcgcaaggatgacacgcacaaatcgagaaatggttcaaatttttttttgaatccaaactcctgattcagtttcatcttaatttcaggttggagcttcctcaaaatcctcttcaactgatttttatttttaattcaaagcttccactaagaggcacaacgcacaaatcttgaatatccaaattgagatttttatcttatcattatcaaaagatgttcaactttttcactaactcactaaccaactactgaagaagagaagacaagtactgagtgagtaattgattttgaaatgtgttatggagactacttttcatgttctggtctggtgcattatgctttctttctttctttatttcaggtcgtaatgtcacaatttggtcaactaggaaagaaatggtaattcatacagttggtaataagtttgtgtagataattcattcatcataaaatgcatgagagtgtgactaacaagcttgttcttcttcagtgaaatatttcactaagaaagaaatggttgtggaaattcttcactatatgttatactaatcactatcacttattgtttaaaacttgaatcgtatccattataaaacctctaaaagtatttcctaatcaatatcactcataattcagccagctaaaaatgaaaaaaaaaaaaaaaaaagtcttatatatgagttattttgtgatttggtaaattgtattggaaatatgaattgtgttttggaatcttttactgtggtattgagaagacaagtattaagtattggaaatatatatgaattgacaattagtcttcttgtatgggaagtcctacagttgtttggtgtattcaaaaaggtgtattgtattgtttctatgtaattataattatggtatggcttggttcacttcaatgtattatttgcttttataatttacctatatatatgggagttctgtactgtaaaattagctcaaagaaaaattcaagagaaaaatatagtaaagattaacatttttttttatttattttgtttgtgttgtcttccttcttctgggttctttttcttgtttgagttcacacccttgttaatattatgcataattttactctgtaaggctaagaaaccagagtagaaaaggaagagctttgtcatacagaaattaaggtcagccactcacttcacttctgaatttactgtcattttcttaatttccatttttttttactgttttcattttcaactgaacaaaatctttgaagtttggatttttctgtcatgatgttttagtatattttgtcctatgaatgaacatttgcacctttttgtaatcttatgccttttttaagttattagttttgattataagcttagtttgatcattgatggcagaaatggggagattctgtgatttgccaagtgaagttgtggagaaaatcatgttgttggtgcctgcagattctctagtagaatgtaaatctgtgaacaagttttggtattcttgtatttccactttcatcaacgatccaaaatttgcagctaagcacctcctcaataccaaaaaccaatcttctatgtccttcctttgtttcaaagacccttccccccatgacgatcatcgcttgatcacatacccattgcttactattatccatggtgatgatgatgatgatagtaagaaggatcatttaagaactgccacagcggatctgactataccacttttggatatgaatcgatgggatagaatatatcactgtgatggactccttttgctagtaaattattgtttcaagaagactgtaactatggtgttatgtaatccagttttgaaagaatctatgattctcccaaaaccaaagaatgttacatttacgcctcgtcatcagtacataggatttgaacacgattctagaaacaacaaatacaaatgtgttcacatttgggtcggtgatgaagaagaatgtcaagttgaggtatacacattgggttctgattcttggagagagatcaacgtgtgtcaagatgtaatggatgatatagtggattgtgaattacgacgtggtgtatgttttagaggtgtttgttactggtatatagtggcagatgaccttgaagcgatcctcagttttgatatgagtagtgaggaattttgtgtgatagattttccagattttgaacttttatttcccattgaagattcgttttatgattatccgctccttgcagtgtggaatgattctgttgtgatgtgtttgttcattgaagtcccatatcatgataagagcttcctttttgtcttcaccatggataaagacgtagcaggttgttggaccaaatatgagctgattcgaccactaaaacagtattttgatgagttactaccatttttgaagaatgatgagattctaatgcaagtctctgaagataatatctggggcataaaacacttggcttcttgcaacattcgtactcaaaagttcaaaaatgttgtttttgatgtagatagaaaattaaagttaacttatgattcggtttgttcatatgagaaaagtctggtttctattaggagggagtgaaggaagttcagttccaaacaaacacatctctggtttggctgtggaagtgtagagactaaaatgttatttgtttagtactttgattttgtggaaccaaagttgtctcttatttaaacattttctatataattatttcatcattgatgccttgcagagtttacataaatgctaaagaaaattattcattcttaacagtaagatgatatcatgatatatagtttaagcataagtatatttgttgaaagatacaaccccaactaaaaaataaaagatataacaagagatacatgagaaatgttgccaagagtaaatctataaatctcttttagagcctttattaatgatccccaaatagctctaaattggatttgcaactataaatccatagaaatgaactctccatctccatgataagacccgactatccttaccatcacaattaatctcaatagcaatagaacagtagcccaacgttaaagaattatagcaatacagaaactcagataactttttatttactatattctagcaca

SEQ ID NO: 219257 - DNA, 3488 bp, Cannabis indica
acgaccctatggcgtcggttcttatgtaagaaccgacaacatatggtacacgtgtcaaataatcgtgtatactatgccgtcggttcttatataggaaccaacgccatatggttatttcatataacccaaagtcgtttaattcccaaccgactctaaatggtataatacaattctatacctacgatttttataaaaaaaaaaccacctttaaaagtcaattttcaataagtaggtatttttacaccctttagcttccctttttataaaatgaattgaaaaaagggaagttaaaaatccattttatagtagtgttatactttaacagatcatactctgcaatagaaaaaaatcaagagttagagatttgaatggaagaaattatattattctgttgtcattgctgtgaggattacttaattcctaatgtctttatatatttatcgttgttatagaatttcatatttaggttgttaaattatagaatcataatcaacataagtaaattttgattcaaataaaataagtttccaacaataatatttatatttgtaatatatatatatatatatatgcttatcaaattaaaaataaccaaaaaatataattattttaaacaaattttaagttcctattcaaaataaaaaataatgtttctattttctacttttgttttctttaattactctagtctatatacaaatataactgagttgctcaatttatgtatttatggaatttaatttttccaacattatttcatagacaaagtaaacatggaattatttttttctcttcaaatggttgcaacggtcaaattcttagatgtcaaaaatattaacaaaaaaaaaaattgtaactccgaacagcacaaattttacgagtctttacaatccaaatagaatatgagttttgtttatcgtattattttgttttgtgtatttggagtataacataaaggcacttatattatatttttttgttttattttattgtaaagaagaggatggtgcatatttagtggagacatggtcactcccattcccattacgtacattatcccaaaacagagaaagagagaacttccaaggcttcacgtttctgtacagtacaacactcaagtcttccttatcaattttatgaaatatggatcattattaagtttatatatttttatttgtcaactatataagatttttttttttaatttcacatttgtggaatctttaggttaaggaattagattcttccctttctatcttcatgcgtataatttgtttatcgctaagaatattcttactaacctatttcatattttcgttttaaaaaaaatctatttcatattttaaacacgaatttatatatttttcttaaaaaataaataaatagtaattggaatatgcattttcattgtaaaaatataattacaatgagccaaactaaagaagcatatactacttacttttgtatgtgtttttttattaatttttttgaaaggacatatactacttacttaaatgaagagctttcaacatcaaattgttgtaatgtgtttttcccttataatacacatatttactttgagattaggcaattgactaataagtgatggagaaggctttgggcccactcgccggcccatgagatcattcatcgatatttcttatttgtgacggcacgataacgataaattaataaaaagtaaaaaacaaatgatacagtttgaaatcatgttctttattaaataataaaaatagtgaaatacaaaataataataatctattttaaaaaatgattatcaacaaaacatattaaatttggaatttggaaatatctaaggtagtggtggtgggggtgattaattaaacaatcctatcttttataaccaaacccaaatttgaggtttcattatggtgtaattaaatattatattatggtcagttttgttctgtcttttttttttattaatatattatttaaaagaaaaaaaaatgtaaacgctaaggaacaaaatttggatttggtaagagttagtaatagaaaagaacatgaaatgaatatgattattgattactaacaaagtatgattaaagtttattatcactatggaattcagctgttttagtgaatcattttataagataagggaggtggagaattgatagctattaatattctggtcttattcattaaaataaaatatttcacaatgataagaacattaatcatcacgtttcatcaatcattttacaattaaaatactatatattatacgagtcaattagatgaggatagttcattcaaagagagtgaaagctattagggtatgttcttcaatcttgatttcatttttaatatcagattctaaaatgaaaaatattgaagcaacatagtttggatattaaaataataatcttggtcaattattattattattattatttgaaatggattattattttcgttgagtctatggctatcttatgattaggcaatggaaattacaaatacttaaagaaagaagtaaaagaactttgataaatataatataattttcttcttaagcttttccatggcatattatagttatttacatttttatggcttgttttcacatatttgcaaatttattaacaatatgtcatagattaatattttattacttctattattgttacttgagttaatatcattttaaattatttaattttacaaaagttattgattggatttttaattttgtaaaatgataaattagactctatattttttaaaatagtacaaataatagtaacataagcacaatttttgataaatttcttttaatataactaatttaaagacaattttaacacgaacagatgcaaaaaatatactgaattttgttataataactctaaattagattattattaacttttattttgataaaaaatcagttcaaggtactattttgtaataccctactagattaggcgtgttatcgtgttttcatgattactatgcatgcctttactaatcaaagagtttattaaaaaacgtggataattaaaattttcttaaataatataactttttaaaataaacataattttttttataagtctgggatcttgttaaagtatgcatcaatcaacaaaatacttgcgttacaaaaaaagttgtctttatatgactattaaaaaggtgatcagcctaaactgtcccaaagaccctgaacgctctaagtctaaccatcttgatatgtacaatcctcacccttagctttagactcatcccggttcgattctagcttataccttcacaaacacgtaataagtgtgagtcaacagactcagtaagaaaagcataatcataaacataaatatatatccagaccataactaggtgcccatacacctactcaagattgttagacatttatatgtataaattgaaatatatatgtttatgtataaaatgcggaattaaatcaaacatatatacactat

SEQ ID NO: 219258 - DNA, 3449 bp, Cannabis indica
ccctaagtcacaatcacataaaactgataaacgactcgctaaaatcactcttggagacataaacacaaaactagaagtttttctaccaatagatagcgtagaaatatcataaatatcaaggaaataaaaagaactaaggcccctaaaaatcaccccaatcgatcaactagatccccaaatagtccagcgtttcctggggtcctgcctgaccaaatggttaatcgtttcctggtagaaaacagaaacctcaacttttctacttcaattctactccaaattcaatgaaacctttcagatcacctatatacaccacaataaacataattcaattaaaaattacatcatcaaacctcataaacaagaatttctattgttgagcaagttttgagttcaagaagttttgagttcaagaactcaaacttgctcaactctcactatagctgccaaaaataacacaaagcggcttcagacagacctaattcaagttttaaaacaaccctaaactccccaataacaaagtgaaacgacttccaacctcacatatacaaaccatgctttttcttagaaatcgcaaagagaaataagaggttaaggttacctttgattcttcctagattaattgctcgtcaaactttgctaaattccctttagaatggtctgtatccacaagacaagctcgggttttcttaggttagggtgagtgtgagagagtgagagattaatgagagagaaagagagggagagtttgatatctaattgattttatctttctaacgcctttgttttattcagcttgttaaaagtactagaattccactaaaaacaatttatacaaccttaggaaaattaccacaaatgtccttttttctagcttaagaaacttttatttcctttcgggtaaaatagtaaaaaactattacctcacataagtccaacatttcaaaagtctataaaatcttgcccaactaatttaagatactaaactatatttttgtgatattaatgaccaaatcattgagtttcactgttactaagtacaaaatacaaaagtaataaaattcatatataacatgtatgatacacttagaatttaataaaatctctgtaattaagaaattatctctctaatatctatttttaagaatatatcttactttttttaatgcatatataatcataaataataattaatttattaataattaagtgtctactaatttttatgactactaatttttatgactaaatatgtggttattacattcgtaaagtcacacactttataaatagtttctgttggtttctttcacaacaaattaattaattttttagggtaaatagcggcataagtatccaaagttttgagttagtaagcggcataaactcaatgattttttttagtggcataaatacccaatgtttgtaaaactgtaatttttctctattttcgtcagcacaggctccgttttaaatttattagaaaaagatttgaaagtaactgatactacatatttttcgttcaaaaataatctaaaatttgggtcttttatgtgtcttgtttaaaacaataacatggtctgtactgatgaaactagaagaaaattacggttttaaaaacattggctacttatgtcactaaaaaaactcattaggtttatgtcgcttacaaacctaaaagtttaggtacttatgccactatttatttatttatttattaatgtaaatgacaacaaatttgttaaaagttacaaccaatatcattacatagctatttatatcatatgtaagatttatatatagttttcctttatatataaatatatatgtagaagccatcactataaattggcttagtgcctaatacgtctgaaaaactaatttattaataaacaaattaataaagcatgtgctattgatttgatcatacctaaatgaattgcaaatcctttgtaattatccaaatgttttattacttagtacaaaagcgtgttaagtaataatattatataaaaaaaaagtgttactcaaatcactttccaactccctatgttttattttagtagttgtgttgaagacttcagatcattatgccaaatcatacccaaccggccaatcaatacatatgtcacactttgaaaaaaaagaatggtttcacacgtttctgatgtactaaaataatcgtttgagaatctttgatatggatgatctatttaaaatactatttgtgtaacaaaattaatattaacatattacaaaaagccatccataataaaataaaaatattaaaataatttaattatccaatatatgacaaagagaggcctacatatttagtgctcacacgcttgacttttcaataaactttttgaaattttctagaattttagatgatctcatggccgagtgatgtatctccttgatacaaataagattaatgttaaaagagaaattcttaaaggtgtgtttagcatttttttttatgtgttattattgctattattttatttaaatattgaattttataaaatttaatatattaatttttatagagtattgctagctaatcttaaaataatatttctagaaatattaagtactattggtacctaataaaaatattcatgttaaaaaagtgctcaacaccctttaagagtatactaatagagtaattaagtattgtattttatataaattaattaaataattttaaaaatataactaatcaataattagaaagtgtcacctctaaattagtactcaataacaatatcctacaaataattgatcaatacgtgatttctctattcactttgtcaatgaagatttaaaatcttaattattttaggtttattttatatttcagatgaataaagtgtagcttttaataggccgaattgggaaccaagattgataagggatttctgtttctattaactttttgttttttttttcgataaaaaaaaatgtttctgtttttattaattaattaattaaaagttcatgtcatcaaaatgttgataagtaatgcatcatccatgtacgtatttaaatagcaatatcttcattattaaataacataattctctcaattataaaattttgtttgataaaccaaacccatgaatttatatatttataaataaggtaaatggcggcaaaatcctcaatactttcgttttagtttcactaaaccatcaaaactcgtattttgttagcaatttaccttttccgtcaaaatttagctattaagtatcaggttggcttgtctacgtggacacaatatacacgtagcacaattttattagtctacgtaaataattatattaagaaaattaaaaaattaaaataaaattaatttaaaataataaaaattataaataaaactttttttttcttttctttttctttttctttctttttctttcttttttttctttctttttcgtttt

SEQ ID NO: 219259 - DNA, 2586 bp, Cannabis indica
aatttaaaaagaaaatataaagtatagttagtgagatttgaaccttaaccctctaacctatttaccaactaccttaaccattacaccaaggttactatcatgtctataaatatcatcttttaatacaaatatatgttgtaactaattaaaatacatatacatttttttctcgattttttttttctagggggcgactgcccccctcgctacaatgtgggtccgcccctagtcatgaagcgtataaaaataaagacaatttataaaaaaaaataataataattcaaaattaagaaagctgttatgagactatatgttgcaaaaatcataattcactataagatcgatctagtttccaaaactgtgaattcagcagtagtataaatagatcaaccacggaggcggatgttgatggttgcagctggagcatagtcgtagtctggggcatcatcgtctccgtcgccgtcgaagggggtgaggcaagcagctggggcatagtcatagtctggatcatcattatcatcaccgtcaccgtgcttcttataattgtaagtagtattgttgcatggagtcgacgatggtgaaaaaatcatgagactagtcatttcaacaaattaatattgttctatagtaactaactacttcactcaatctatcaaaaagacgtaactacttcactctctcttgaaatgactaaacaaatctgcagctatatatgatgttaattacactgtactctctttttgaaagctaataaggtactatgtatatgcaaagaacacacccctatatatattgtctttttggtcaagaccaagtacaaccttattagtcgagttgtacaaattaatatatgacaaaacgtggtttcaactctttaaagaatataaaaggtgtggaagacacgtgcgtgagtaatagaaagatatattaaatgtgtggtattcattctgagaattgcaaaaggtatcaatattttttttatattattatcactgtaattttttttttaaagatataattaatctctaaagatgtaatagttaatagcaacttcctactatgtagtagtgacgtggtatatatgcttctaattaattattatatacaaattagggaaattaagaagtaatagcattagctgttagcgcgttgtagcgcacagagtacaggtggaaaaagcacgtagtggtcgtcatgccacgtggctgccacaaaatatatgaccggtatattgttggtacacattaataaaactttagccaaataataaaatataattaaggataattaatttgggtgtaatatatattacagtcatcatgattacttcatcacataatcgatctcaatctcaacaatttcaacacgttttcaagaaaattacggtcttattagaactttcaaataattttgcatatatttgtctcgcatgtttattgtggacatgaatatatataataaattgatgatgaaattaaggtctaagaggaatttaaaaaactgggtttatgatgtgttttttttttaatgattttggggccaaatggaatattaattattataactatatatatagttccagcgttaatatacacctaattaaaatattattctctgattaaataaatataattagtatataatattaagcgaaataaatttttagatatggaactatggaagttgacattttttgcgggaagttgacattagaggccacattataaatatataatatatacatgatatgtacagtatatagctaggtaggggagatttaacgacacaaataattaaggatgcttgtagggtgtttattgcatcacatgaatttggatccaattaattcaatctaattatttatactattaaattttgtcgtccgatccaatccaatcgaattgagtcattcgatctgatccaatcaaatggatttattagattagatcggttctaaccattggatacattgatgggttttttattagattggattgggtctatcaaatccattttagctacatttaagttaatttcattaaaaaatatatatataaaaaaatataaattaaaacttaataattcaacatatataataaacattagtttaatcttacctaattcttatgatctcataataaaactgttaaaaataaaatttaatcaatacgtattgagaattttattaacgtttaagaagatgagaattaatatcttaaatctaagattttttttcttaaaatcaattgatatacattcttaagtaacatatattaaatatataaaattataaatatattttaaaaatatatataaatataattggatgatatttggatcagtgtggtcggttatccattggatcggatgtccgatccaacgactgatccgttccgattggactttcaaaatttacatccaatccgatccaattatgattggatatccgattctattggatcgattgggattagatcggtcgattatgattggattggatgacattctgcacactcctaaattgtattttttatttatttcaatatttttgaaaaatatttttgtgtattgcaacgctagttgcaa

SEQ ID NO: 219260 - DNA, 3864 bp, Cannabis indica
ggggtatccgaaacggatagtcaaatgttatctgagccaagtctgctgccagctcctggaaattgatatttttagcacctccaccttcaagtgcctgatcaaaaaccttggccaggacaggcaaaatgggttccaaattaacaccttctggaatgaaaccaagtttaacgaagtctctgactatggctccataatcacgatgtataagatgagcaattgcttcgatcattccatacttttgatcgtccgttaattttgtgacaagtcctattataggcaaatcaaacgtatcataaacaagtcgtctttatagaataaagcattaatctattaatccactcaaaagaacattcttcaataatcaaaacaacaatacatcaagcactcaacaagagtgatcaaagacacatctcatctgcaattgagataaaacaatctttttgcagttgagaaagactcatcaaagaaagaaaaaattgtatatcaaatctgaaaataattattaagaaaactaaagacatcaaaacatagctgcattttaaagcagaaaggccatgggttatgaatgtcctgtagcaaagggtgcaatgtattttgttaattttcaaacatctataatcataatggatctattctttaatgtattttttcatcaaatttttattttcgatcattattcctcagatttaaatgaatgacatttcatttgaccaagtggatgcctaatgtcttgtttttcatatcctctacctgtttgaagttttcagtcgtgcttagataaatgagaaatatcaacatttatagatgttccgaggaaaaaaaatcacttattaccatttaagaatgcagaactgggttcaaaataagtaattctagcaaaattattcatgatatgaatacagaaacatgtttctcactgaatactaataatgatgtaaatatgctacaattttatttttaaaaaataatgatgtaaattgttaccaaaatcaagaatagctagcttcccatctggagtccgaattaaatttccaggatgaggatcagcatgaaaaaaaccagtgtcaagcagctgcaattaaaatgacacaagtttacttttaaatatgtaatgcagtggttaattatttttccaaaattagaatataatagaataccattgctactgagaatttattatgagttatgaatataaataagaataatttaaacaggaattttagcaccattgcatgtcagcaaagctaccctagtttgaaagcacataatacatgggctaatgaaatttcttttaaacaagtaatgtttcccagcgtttcccaaccttgaacagataagaataaagtttcatgttcaagctgttgcattcaattcttcaaacatagagcaacaatttatgtatagaatcactaaaacacttaattctttggctccccgcaaaacatttgtcaaattagcaaggcagcaagatgtaagcatctaccgtgagataatgctttgaattgggaaaatgttagcaaacagaggatcccattttctatgataaagatattaagtcaatgtctccagaaggtgtaagattcctaagctattgccagtaacttacctgcttcagatagcagattactccaacattaacaagttctccaacatcactttctgtactttgtgaaagcttttctccttcaacccatccggtagtaagaacctttcttgaagtatacttctcgtaggtttgggggacaacaacctggaatggaagaacatgaaataagcagtataagaaagtaatttcatgaagcaatcataaattaaaatctcagaaatccccaagtaacagaatagttgtttggtaatcatagtattaaacaatacttgcagcttcataataaacaagaattcagatacaaaaaaggaaaggttatcaaagtcacctgtggaaggtcctttttcatcatttcagcaaaacgtgttccattttcaccctcattaacataatctagctcctcaaaaaaacgggctgcccattcatcaaccagtccgacaacatctacagagatctgaaatgaattaacaggaagaatggagattgggaggaagaaatcttttattaacactgggttcacccctttgaaaacaagtatttgaaggaaaggagcaatactctattacttgagaaaactacctggggaaacttgcgaagaaccagtcccaaatttcttatgacgaacagatcaactgttacagtctcaagaacgaagggcctttgcactttaacagccaccaaatcaccattttctttcaaccggcccttgtacacttgtccaagggatgctgccatagaacacacactatgagcttaaagagttctatgctttgttgataacaattgcaacatctatttatactcagaaatctaccagcagcaatgggggaaggtgagagttcagaatatatctcctgccatggacgaccaagctcctcttcgataagagccatagcgacatcatctgggaatgaaggcaccttcaaatatcatcaaacagaaaaatcagctacagaaatcaaatgagaaaatcataaacatgaagtactttcatcagttttttttttttggtatgaatcaaaaacccctcaatagaatctgatcatttgcttgggagattatgcaagagcaatatatagaagttttaaatttaaacaggatataattccaaataactctaccttatcacagagtttttgaagctcagtcatcgcacttggtgaaagtatatcaggcctaatgctcaatgcttgcccaagtttgatataagctggacccaaagaggttacaatctcccttagctcaatggctctagcaacttcattctggtgcatcgaagagtaagaagattataaagcatagataataaaaagttcatctttcataaccataatagaaggtggaacctaaattatgtcggaaaaagtaatgaattttcgcaatcattcatgaagtctgttatgatgctgaaggaggtgacaaatgtaattattatgttcctattgcttgaccatgagttcttatgttaagtccacagtgatgtaaaccagaatttccgtaaaaaaaagtcaaagttcaaattgatttgagtgttaaaaaaatgggcatgcatcatgagtgaactgaacgttgatgttatacttgatggcactgaaatgacttaattttatcacttgtctcagacaatatctccagctcagaaacaaaagaatgggcacacatattacctctttgacctttttgtttatgacatctaatgcaatacgtgaaagaaacccccctgcaacagacattaattggacaatgcgtgtagcaacagcacgtggacgttttccccaataagcagagatgctagcaggatcatataccaaaggcagaaattcactgctttcgtctacctacataagcagaaataacacaaaaatcaacaaccaacataaataatacctttatagaaagtttgcacatttagcttactggtgctatgtatttgaaaactgaataattataacacagaagcatagtaactgaattgcaacctggattggatattcactaattagtctcactctcttcacaaaaaactttaatttcaatcatgaattcaaattcaccattacaaaatttcatggagaaagaattcaaattcaactgtataacgtgtaaaagtaattatacctcaacaaggcgaagctcaacattatcctcagcaaactgagaatctcttaaatttgttccacgaagacctctcatcagtatcgccagttcttcgttttcttccatctgtgccctcactcttttaatttccttcgacatat

SEQ ID NO: 219261 - DNA, 2931 bp, Cannabis indica
cttgccttcctctccaaatggtttttccaatcctaattgggtgttgtcgggtaggggaacagtgaaaaataatgcaaatgctgctcttgacgcttctaatgatagatgtggtttggatatggtggttcgtgactccacatgtaagattatgccttctactatttgatatatttttggtactttttttcctgaaatgatagaagctttaattttaaaaaatgttgtcatcaaattctgtctattgagttttcaaaatgtatttttgaatctaattgtttaaatgtagtaatgaagtttaacaactaggtttcttttagcctcttctttgggtttagtccttgcagattttagacatggttttgttgaatttcattatgctaatccttttttttattatagatctattaatgttgttggtcatttttaaatatgtattgtcagaacttcttagcaaaatatggtagtttgatttactctttttgtatctatgatcttattttttatgagatgatttaatataattagtatctgctccacttttttttcaagctttttgcttgaaagggtcatttggggtttcatctaaaaagaactttaaaattttaattagttatacatttataacaatatatctatataaaaataattatattttaataatatatattgtttataaatttatttatgtaaaattaataattttattgtaaattgtaatacaaatacaaatactatatttacacaaacataattttattgtaatatggtattaagtatttttttttattgttatagcatctcaattagaatataatttatttaattttaaatatatatttttttaaacggctctaaatatattcttaattagaaattcaaaagtatatataatatatttatgtgaataaaaaaaaaaatacatacctaccaatacaactcatagtatcaacataattacaaacccaactcaatttaatcacaactaataattcaagtcgaccaacctaccaaccaaagggccttatagtcaattaacaagataattatatgataaattagagtattgttattagataccactagtgcgtaacactttttattggtggtgccttacgatcagacccaaccttgtgcataggcacgctaggcctgtttcttaggcccacttagctcagaggcctatttttttttcttttagaaattatatatttttttactgattttaaaaaatatcatattttgttctaaataagggtctaatttttttttcttcatatgatttactaaatttcagagtcggccttgcctataattagttagtgatacttcttaaaaactaatttttaaagttatataaaaatcgatacttaattatactaataaataataataatatgacactgaggagactggagagtactaaacactagtagtactgtttagcatttcttaataaattaccataagaaaaataaaaataaataaataagtgaattttttcattatagtttaatggtgaaacattgggaatgttgagtagagaaacagagttaatcataatgtataggacaaatccaacgaatcacaataataaataataataataagccaatcatctaggcaagttgcatattttttattttatttgtaagagtataatatcatcatcaattacattatttattgtttttaattgagtggcatttatcttttggcttgttttttaatattaaacttgtataataatcattcacagcagaattaagagttgttgttttcttagtaaaaaaatagtttatgtgcatgaacaaactctttatctctattttctagtgatagaggatttggtgcataaatttggatatgattatttatatagaattagattatattggattgatgatgcataataggaattcttaatttatgagttgttgtaagttaacaatggtgtccaaccttaataaattgtgatatcttataagttataagtggttaaattaattattaaattaaaatatatgaaatttcaacatcaaaaaaaaaattgtatgaaacttaatattattataccaactatgttatgatacttttaaataatgttagaactatcggtgttatttaacaattccctacaaaaatgtttagtaggggtaaagattggatgtgagggaatgtgtagtgtacttcttgtttggattaaaattttaggtagatgtttattttttgtctcactcgattatatagagtaatgttaacttatttgaagagttgagtttcataaatcctgtttggttgagattttgcttatttttacttttttaaaaggttttttaaaaactactgaagttgacttatgttaaagtagtttcctaaatctaaagttgaaactcattgattatctaaacgacaataaaaaaagtatttttggagctttaaaagctcaaattaacttttaaaagtccagccaaaaataccaaaacttctaataataaagttgtaactctcaaatactaagcctgactattgcgaagtttttttataagtgactaatcttaattgtttggtatgatgtaatattttcatgagaattgtaattttttacattcccataattggtatgggatttttttttttattttaagtacaaaaaattattgttattgaaataaaattattccataagagagtaatcttaaaatctttcaaaaaggtagattctaaacatatttttgaattttatacaataaatttaatgtattgataatttatataacattttacaacactttatcaaagtcctatattcaacaaaacaataaccaaaacaatataatctaattaattaaattctcatgcataattttgtttccaaaagaaaatcatcgtaaccaaatacaattaggactcagatcctctgtctaatattgc

SEQ ID NO: 219262 - DNA, 5602 bp, Cannabis indica
gagaaaggaagagtggaaaaggtttgattttgagaaagaaatttagttttaggggttttgttagatttagggctgctaatgaaaataaaaatgaaaaatatgtattttattattatttaatacaagttccgggttatacccaaacctgaacttcagttttttgggacacacggacctgactcagtgtgtaattgggttacacccaaacccgaccaataattttttaaacccaattgttttgggtttttcgagttccggtctggtggatgggtttttgagtacaaatgttctgccctaggtcaagtcgataaatagactagaccaatgccatttggacttattccttaatgtaacacaattgctaaaataaataaaatgctctaagagtttcaagaattcccaagtgttaaacgccgttaaagtgcttatgtgtgtttggttctgtgagtgtacttatgtgtagtgtgtctgtgtgtatgttctagtgtttgtttttatgagtgtctctaaggctcaagatcagtagcatcgtcaacaagtagtatcagagttagactgttcgaaggtgaatcttaatctgtaaaggtgaatcttgagctttgaaagaaattattgatccgaggttgaagatacaagagtatgatcaaataacagagaggagtaaggaatgctaagtatgatctggaaaagtttacaggcaagaatgactttggtttgtggagggtcaagatggtagctctgctgattcaacaggggttgcaatcagccatccaaggagagaagaacttacctaaatgattaactgagaaagaaaagaccgatattcttaaaaaggcacacaatgctataatcctaagtctaggggtaaagtttttagggaagtctcaaaggaaagtgtgactgttggagtttggaccaaattggagagtctgtacatgataaaatctctagaaaacaagttatttttgaaataaaagttgtattatttcacaatgatgccagggaaagatgttgaagatcatttagatgatttcaacaaggtgatcctagatttagagagcattaggatcaaggttgaagatgaggactaggccattatagttatgaattctcttcccatagagaactataaacactttgtggataccatgatgtatggtaaggattctttaacatttgaggaagttcaatcagcactaatgtccaaagagattaagaggaggtcagagatcaaggaggaaagcactagaaatggcttgcttgttagaggaaaacaatccaaaaaggagaacaaaggacataactcaacagaaaatgggaaaactgcattaaaattcaaaagaaggtgctacatttgtaactctttcaatcatctgaaaagagattatccagtcttaaaaggctacaatctaaagaaaagtggaaatgcagacattatctcagatggagaagatagtggttatgatagtgctagtgtaatggtagtatccaagacaaatatgcaatagaattgggttcttaacttagagtattctttctacatatgccctgatcaagatcaattctggtcttatcaaaaagttacatgtggggttgtcaaagtaggagacaataggtcttgcaaaataatagggcttggctcaatcatattaaaaatggatgatggaagaattactcaactggatcacgtcaggaatgtatccgagatcaaaaggaatttgatattagtatcaatgctggatcaagatggttgtttgatcaaagtagaagatggaaagttgagagtaattaagggagaaaatatcattatagaagggtcaatagttaatggaatttatgttctgcaacgaaatacactgcaagatcaagtcaatgttgtgtcaaaggatggaaaaacataataccataactccaaaggaattctagactacttgcattcaaacttatatgggccctccataaatgtgtctcgaggtggagcaatgtacttcctaactattatagatgattactctatacatctttgggtatttatcttaaagaacaagaatacttttcttagtaagtttaaaaaattgagaaccatgctagaaaatcaaactgaaaggaaaataaagaaattaaggactgacaatggtttggtgttttgtgctgatgaattcaaccgattttgtaagtcaattggtattgctagacataggtcagtaccaagaataccctcaacagaatggtttagcagaaaggataaatagaactatccttgaaattgttaggtgtatgataattctgtcaggaatgccaaagaatttttggacaaaggcaattgttacagcttgttacctcataaatagatgcccttcatcaacaattaattcaaaactctaatagaaatatggtctagacacaattcagggtatgagcacctaagagtttttggatgtgtggaacacataaagtagggcaagttggaacccagagctataaaatgtatttttctagggtatccaacatgtgtcaaaggctaaagattgtggagcattgagccaagagaacatcaaaaatactttgtgagtaggattatgacctttgaagaaggcaagttctacaaagacacattgaagggtagctcaaaggctgtaggaactcgtactgacacaactttgaatgaagatgaggtagaaattgaagaagaataggtggagctggagctggaagaagatgctcaggattatcagttagtaagagataggaagctaaggacaataaaaccccctgacaagtttgggtgtttagatgtggctcattatgctctcagtatagaagttatgggggtggaagagccaatgtcctatgaagaagccatgaggttggaaaatgaaactgagtggaatcaagcaatgtgtgatgaagtcaagtccttaaaaaagaataagacttgggttttagtcagaaatgaagccaatgggaaggttatcaactgtaaatgggtctacatgtataaagagggaatccatgggattgaagagtctaggttcaaagctagattggtagcaaaaggattcacgcagagagaatggattgattatgatgagattttttctcctgttgtgaaacacactgtaacaccctactagtttaggcgtgttgtcgtgattttaacttaattgtgcagctcgttgctaatcaatgagtttattaaaaattgtgaataactaaaattttacttaattacttataaataccaaaataacatatatatttaaacgggatcgcgagtataaaatgtttacaactgttacaaagtatgtattacaaaagatgtcgcctaacgactatacaaaatacaaccagttgtcccaaagaccgtacgctccgacatgtacaatctccatgtaagaaaaacataaatcaaaacaaatcaagaaccaaattataattagtcacccatacacccaaccataaccctatctctgtgtcccacacggtactgagtctagaacgttcgtacgaaaatactatcgaccataatattagcctatctcggtatgctagtcatactctagtcgtaccaatgtgatagggtcaattagtagctgagccaaccatacatatatcggtatccaacatcattctacgtataatgttatctctatcgatgtaatctaacaggattaacaaatatgtacgctaaacatgtaaacacatatgcatatcattatactaatcttacctcagttctaaattcaggtgtgccggccaacctgagttaaactgctgctcgacgatttacaggcccctaaatcacattatttataaaattgacgagtgacatgctaaatcactttttggggacttaaatttgaaactaaaagttttcctatcgatggataacatggtaataccctaaatattgtaaaaataagaaaaatcagggttcccaaaactgccccaaccaacagactggttccccaatcggtagaccaattctatggggtttcttggggaccaaccagaattcgaccgattcagtgcaggaaacacctaaaaccccacaacaacctcaattcgaccccaaacttcacaataacttccagaatacttatttacatcatattaaacataattcatgcaacaaaaaccagaaacaacccttgaaactcaaatcaccatcaaagaccaaagtttgagctctaaagctcaaacattgcccaacaacataaccaagccatcaaacaacaccaaatcaactcaaataaccataattcaaccacagaatacgaattcaaacactaaccttagaaaaaccatgcaaaaacctaacttaaagcttaagaaatcactaagagacaagctagaacaccttaccttgagttgaatcacaaaaaccttactaaactactctaaattgcagctgaaaaatccccaattgttgttggtttcccttgagggttcgaaaaagagagagaaagagaagtggtttttcttgatttttcctaattctttttattttcaatatatcactaaatgaaagataaaattaaactattttatcaaatagtggcgagctgccacactaaatggcaaccacctaatccaagttaaaatgacaaaaatgcccttctcttaaagcttaactagaaagtagcctagagataatatggtcatttttaaaaccctgactattcccaacattcccaatgcctatctaggttgccccgctattactaaaatgtgattctatgggccaaacgccgcgttccaatgttattgggcataaaacataaaaaaatatagaatttcatatatagcataaataatacaccctgaattcaaataaatctccataaattcataaatcgtaattaaaaatctaatttcataattaagctttaattatctactaatttccataataaaattaagcgtctttacacacacatcaatcagaatgttactcaatttggttgcaactgaagacatggaacttgaacaacttgatgttaaaacaacattatttcatggggatttagaagagcaaatcctaatgaaacaacccaaaggctttgaggaaaagggaaaagaagatcatgtttatttgcttaagaaatctctttatggattaaaatagtcacgaagacagtgatataaaatatttgatgactttgttatcaactatagcttcaaaagaagtaaatatgacagttgtgttagttttatggtactaaatcaagcacgcaatggaagagttgtaactgattatcattgtaccatatgctcaagatcaccgtatgtatatatatattaaactaaaagtaaatagatgaagttaaaggagtattgtcacaaaataaaattaaaaggttaagtaaataaaagtaaaacataaaagaattttgacgtcgaaaaatactcttttttattattatgcttttgaaaatatatattagaataaaaatatgtatttaattggatattattgagataattttttttaaaaaaaaaaatatatagagaatttgttcaattctatctatcaaactatgtaacttttattttttttttttgtaataaaaatcataatatatattaattaataaattcg

SEQ ID NO: 219263 - DNA, 5564 bp, Cannabis indica
caaaaattaattttatggtacctaggtttgttttttgtaggatgtacaggtatctttggcaagagattgtatgattctttagcatttccatttagatgactttgtgctcgttctttactacaccatgccttcatgtaattcatctttattttgtaattgtctttcatttctctctttatatctacaggactgtactttgtttttagattcaagaactttagttttatgaaatatgctattaactttgcagttgcttgtagttgatttccaaatcttattgtaactacacatatgtgtttgataactcctaattatgaatgtttttttgtttctattttttgaagcctttaaactccatttgcaatttgagtctaaacaaacaatattgtattttttagagcaagattcactactttgtatagaaatgtttttttgattgcgaagtagcatagggcacttatcaatgtatctttgtccttgtaaatctgtccctttttaatttttcgtgtcatttattagtgatgataattatttctgtgttgttgacttcttcttcttctttctggttggtttcaagttgctgtaccatttttgtagcaacgagctttgcatagtcggtgaagtcaaaacattcttcttttgtaggagtttttttgttgttgttgttttctagttgttgtatggttgactctgatgttaaagtcacagtgtcgaccaaaatagcatcatcttgagcgaatccaattattgctataggtagttgttgcttatttgttgttgttgggttgttactaggatgttgcgcatctgcctgagctaaattattgtgatctactgtcatcatcatattgttgcacatcattgattggttaggtgccaaaaaggtttgtttctatgtgttactaaattttgttcacacacaatgggtactgtctgaaatcattttctttgcttaatagctttatgtagaacaacagacttttgtcattcttgattcgtagtggttggcatccttctttcagttggtatttcagttgtatttgtgtcgtatcatggttccttttcactagttgaacgaaattgcaatctctttatagtgattctccacttgattcgaatcaacatatttgttgtcatccgaattgccattgctctgtaccaaaatttgtagaggttatatgtcctgaaatttgtgtatttgttataattttttagtatcaataattgcaaacaactattttaatctaataaaaaaacttataaacaactatctttttcaataaatattaaataacatttaattctactgtatttgcattttcttaaaaaaaaaaactaattcatatgtttttttagattgtgttcataactctaaactttgattttttatttgtcaaaacaactgctaaacaacttaaccgtaaatgagattttatttaatagttgttgttcatttttacacaaacaatcattataatcctcgaaaacaacatatatacaactgtttccagaaaaaaaaaatagtagattatatttttatgcattagtatttttttcatttgtaatctattcttatttatttattaagatcaaccaaatttctataccattaattttttatctgattttcacgatctaaacaacatttttaaccatgaagaatacttaattaggaagaatatcattagaaaatcattaaaaaaaattgtacattgaatttcttctctgattcgtttatggataaccttcgaagtttattcaatctccttgtcttcaaattctctgggcagtacgatttgaatttttgattgtaggttatttttgtattttttttcttatcaatggaggtcaaaatctcttttttctgttttaacttttgattttggatattttaggattttattgtttattgattgagatctacattttgtttgagctaaattctcaggtttttgaaagaaaatcgtggagatttgggatgggtgtggttcggctgggtcatgaagaaggagaagcttccttcattgttgtggttaggcccatatttttggaaatagaaacttttattttctatttttgtttatttttcctttctagggtttaaatgtaaaatggtgcccttagttgtttatgtttactgagtttttgagcaactgaatatttttagagcttaagaaagtaataatggcggaaataatgaaataacaaacaagagatgtttacgtgtttcaggaattaactatccttagtctacgagtctattttattaagctcattggccagtgaccatttacacaaatacaaatacaaggacttttacccctttccaccgtgttcctctcgaaaaagaggaagcttagtaggaatattctggagttaataattggattacagcaatgtgttttcttaatgaagagtaagtctttaatctcaaggtgacggtccaaaaaaaagggtcccttcctttgtgcttcctcttggatatttataggccaatctccttgcatgggttgtctttgatggatcctcctagggatgaaatcccaccgttggattggtaggtgacatatttcccatgaggcttttatgagtgtgagactgtatcggctgtacatgcaaggcctcgaacgcgtgtctcctcaaggtcattccccttatccctaatcattggattgtttagcccagtgcacaaggacacacatgccctgcatgagagtttgacgtggaagacaacctctgacatcgtacacgaaaaaacccaatcattgggtccgtatcctaatgtgggctgagcttctgcgggataaaggtgtacccaagaccgttacatcatggtttgagaagatccctatgatttgcatgaacaaatggtctcatcttctggagtggaatgaggctttagttgacgaatactctttgcatggacaacattcggggagacttccttcacagagacctttctcacgaagtcgatgccttcatcctctcggagtgctaggcaaagtgtttgggtggcttaatgctcattgtccttctttaattaatatccatgtgtcatgcttgaagaaatgcagataacatttacgcccaagcttctaggacatcccatggtccgggaccttgcaacatcttttcttgaaagaactttacgcacgtgggacttctgataagtcttttaatgcactacgtcatcagccgctaaactagagtatctttgctcaataggcatgattacttatattatttttttttatgaatcagagaagttgtattgctcacaaacaaagttttttacaatctaattgcacattttaaaggccaagaataactatacatgtatcaggtgtcaatattgtcaatattgttcttatttacaatcatctacaacttgtaaaaccaggctttgtcttcttcctttacccattttggctaataaaaagtaatgcgctgcttgactgactacttaaactgctggatcaaaagatctgattgcacctgagtttgacaccagattttggcattccgggcactccatatcatgtacaccagatcagaaatgcatgctgcataggtaagctttcgaaacttactcatttttgctctcccgatccacctgagtaatcgggtaagataagtagcagaggcatgccaattcagccatgttttaactgctgataagcaccctgctgcaactgcacaatcaaaaaatagatggggacctgtttctacatcctgacaacacagaacacacattgtatcttggctgattcccatccgagctaacctttcctttgttttcaatctctcctagattgcaacccatggtatgaagctgtgtttgggaatattcaatcttccccaaacctgttggctccaactcactttctcttgatttggcctcaacaaaagataacctatagcaacactataaggtgtatgaatagatacctgaccagcacaagcttccttgaatgtatctttcagcaaaacaagccttctttaataccagctcccttggataggaggattgtattaccaccgattctcatctcggatatacacgcaatggatccatttcatccaaagactatcttcttttatttgatatggcccaaatgtactttcccattgctgcaagattccattcatgaactcttttgaacccaagtcctccacaggttttagaatagcatagtttctcccacgctattaaaccaggacccgtggctttatcctgacctgtccatagaaaatttttacatagagcttcaatatcatggacaattttctgaggcaaaatcattacctaagaccagtatgcattgatggataagagaatagagtttatcaaaacaattcgggctgcaaacgacaggtttctcgatctccatgttcggattcttgctgtcattttctccacaagtacagggcaatcgttctttgatatctttttggcacaaataggtactcccaagtaatggaaaggcatctgtttttgactgaaactgatgcatcaagaatcctagttacttctgaactagccatgttgctgcaatatatagctgatttttgggggttaggttgaagtcccgatgtttggctaaatagctttaagccttgcaaaagataatacacactcttgaaatccccattactgaagaggaggacatcatctgcaaatgcaagatgatttattttaagctccgagcatctctcatggaaatgaaaatcctctttcttgcccataacattcaggattctagaaaggtactccattccaattacaaaaaggagaggagacattggatccccttgcctcagacccctcttactttcaaagaaaccgtgtactgagccattgaacattatagaaaatcttggagttctcacacagttcataatcaacttaatgaaatcccgttgaaaattgagtgccttcaacatttcttccacaaaatcccactctaaggtatcataagctttctgtaaatccagcttgatcaagcaattagcctttttagttttcctcccatagtgcttcaccagatcctgacaaatcattatgttgtggccaatgaatctcccttgaatgaatcctccttggttatgagagatcaatctaggaagaataagtttgattctagaacacaaaagctttgttgaaactttgtatattacattgcaagaagaaattggtctaaaatccttggccgaaaagggcatttaactttaggaaccattgtcagaatagtagaattaatctccttaatcttccctgattctaggaaggaggtaactgctttgtacacatcgtctcccacaagatcccagttatcttggaaaaagaaactagaatagccatctggcccaggagctttatcaccaggtatctcaaatactgccttcttgacttctaccttggagaatttattgactagtagagctgcttgtgaagattctagaaccagtccttcaagtatcacccttttggaaattctcgttctattgttcatccgggacccaagcaaggacttataataggtgatgaacacctcagtaatttg

SEQ ID NO: 219264 - DNA, 4040 bp, Cannabis indica
tgatccacgtgattcaaaatcaaaggccaggattgtctcggcgaaaacacaaaagtgatccaacggatgggagttaaaaagactgcttttaatcccatttagtggaatcgaggtatttttcatcatatttattcccctcgggccctacattcacatctaatagtcattaaatcataactctgccccatttcgtttctctaaaacaaacacgccccctttgagtgtatggcattcacggatccaaaggttgggcgacacatgcgcacttccagttgtttatcaccaaagttcttgactcatcaattgccaaatgccagatgaaaagaaacgattccacatctttaaaattgcccctgtgtccaagtgtcccatgatgatccagaaggagactgcaagcttccgccactcgagagttccagaagctttggggtaaatgttatccatgttttcggagtaaacacacatggcaaaagataggagatgattgtctaagcaattatcgtctaagtttctttgattgcggaaggttgcggaaagacttagctagcctggaagaggcctaggtctagggactgtttatcacctcgtcacaagaccaagcaaccgtccaggacctggaagttttctcaaccttccgagacccaaagaagattaaatctattaagtctacaggaagatacttgggagctatttgaagagtctaagacggatatcgtatgcacaaggaatgttaaaagcctactacgaaatggaaatcggatgtctccctcgacgtatttacctttttagacataggatcaaatcttgtctcctgtgtcagagcatggtagtgcgtgcacctcttctgaataccccgttttgtccaacggctcctttgagcactgtctattaggcgtgacctttactcgacaaatgccctacaccaacagtggtcccaaatgtacggaaccgtcgctccacgagaagaaaccttctagggggcccaatagtcatgtatataatgtattttaccccaatagtgggcaggcttttgacaaaaccataaacaggtcacgggtatgcccgaacccggactttagcctatataaaccctttcatttcttcataaggggggatcaaaaaaaagatagccgaagctctgccaaaatatcctctaagctttcttctttttcgagagaaacttagagacacagagttagggctctatgttgtaaacatcacgtgtaatacatttgaaaagcctataagaccaatatactgactcatggactaagaataattaacgtccgaactacgtaaaaatccttcgtcgtagttacttatcaattatttaatttccaaagtttacatttaattagatttcgaaaatctcagtaaacaattcccaagctgctgtaataatgattatgcaatggaaataatacaagctgaccatttcaaacaagttgagaattcaattttatactgttcaattgactttttctaagctttattagagcaaccacataattaaatgagtaaagtaacaaagtaggcatgatatgatgtggtaaatgtaatgcatattgtaattggattacctttctagtccactgaggtatttgtcatagatggaaaactgaagtcgcccacaagttgatgttgtaagcacctcaaaaagattttcactaatgattacatttgcaataacaggaactgctggagcaattctagagaaagcttctatcccaactgaaatgtcctcatctaatttctgcaataaagatgaccagagtgactatctacaaactacatggaaaaccataaagtctaaacctttgactattttacaaatgtggaataaaggacccatttaagcgagtctacgacctataataaggtatgaaaagaaaagtacttctatagttagcttttactttatggaaatgttaatgacaatgaaagagtttcatgtttgcggatgctaacctactaagtattacagcagcaataagcatttgagtctaggacaattgaactctatatctatacaactcggaataggaaagtaaccttcaagggtctatactactgagttttcaaattattgaactctctctctctatacaactcggaataggaaagtaaccttcaaggggtcatcagtaagattcctgtttaattgtatctacacattcataagaattttattgtcaactctacaaaacccaggccaaaaacatacatcaactgaaggtttgctgtcggcagctggagcctcccaagctaccatcatgtcatatgttaaacgtcggaacttcttatcagccaaatgaccagaaacttgtgttgacagagcaagtgccttaaaacaacaatattccaaaaagttcctagcatatcgtgatggatgctttacagaatgagatgcctctgcattgaagctctcttgaagttcggttgtaggaacagaaaggattctgcatcagaattatttctgaaaacagttatcataatttgaagaaagcaaaacagctataacagtagcaaaaatgcaagatgtatttctaacaaagtttgaaaccagttgatctagatgcttacaaggaaaatgcaccaaataaatttagaagacacaaactagtaagcttactttgagcatcttcgaacaacaatgttcgcaataggagagagctccgatatccaattctttcgggcagaaggagaccttcccatctcctcgaactcctcattgaaagaacttctgctgccaagtaaccatttaaatgatccttctcttaccagattctctagcatatttctggttttgcttgacaaagccatctcacgtgcagtgcaactgaagaaaaaagtataaccaaataaacttgctacaactctacaattcttaaactttaacttaacagacaccacaatcaacatcaacccatggattaatcactaattcccttatgattcattcacaaaaatcaagttcagcattcaattccacaaacatagatttcaccgctagtatcccctcctatagttatagtacctaacttcttcaccacttaaatactaaaattaaatacggactaccaatagaacaccattcaactaacatcaaccaaatctgacagatcatgcaccaaaattgctttcaactaaaaacccaaaaccccaaacacttttcccgaaacaaaatcgcgatcgtcccaagctcaaagtcctggaacaaaattatttaaaagttcaatactgacagctatatgaacctccaatagagtaaagttacccgaaaattgccaactcagaccgactccatccgcattaatctcataaacctcaaaattctccgagatactgaaacattttacaaaacccacctcggattacatgcttcgaagcaatatctacgaacccacttggccgatcatagaaattcgtaggattcatttagttccaatcgaaactagaactcggttggcgcagacatttattatcgtctttattgggtttttattattatatattataagataagatataatagaatagagagacaagcaaacatcaccagagtattggataagctcatcagaatcaaaatcttttcggaagaaaagtaagggaaagtaaccgtatgttgtttcgtagtattaattatttttaggcggttttataaccagaacacaaataaaaataaaatactttttatttctgtttttagtaaataatttgtgcaagtaagacatttggtagaccgattatggaaacatccaatatcctagttattttgctaaatcaaatcttaattagataaagatttacatgcatactctcaatgttttattaaattaattaaatgtttcatttttaattaaaatcgtaacgagcgaaaattctaaaattgaggctagagtgtcaaaattgtccaatgacccaaagatgagcaattaatgttcaaattaaaatgtattacaatttcattgtaaaatataatacaagaataagaataatataagagttggtaaatagatgttacaacatatgtatat

SEQ ID NO: 219265 - DNA, 2521 bp, Cannabis indica
ccacaacaagctgaagtggttcaatatacacaatttgtgataatttgggaatggaaatttgtgtattttgccaagacaacaagcagaatagaaagatggagttttattagattacatgatgacaagacttttgtaactgttctttcagaaggatggcctaaactattgtgccaaagatcaaaatcagtaaattgtgctttattacaccgattacattacagaattacattgaacaaagtgcttgaatgtttctgtggggtgttgagtgtttgcagaaggtacttgcgaagcttcaggcatgtatgagatctgggattgatcaaaagtatataggccattcttgtgcctccccatcaaaagtgtacgatgactcaactcgtccttaacatagcatgtcatgatgaaattgaaagtaaacattattgtcaagcgcaaacttagatacacttaaacaaattttttgtaatttctgaaacttgcaacagattgtttagaacaagaggtttattagtgtgcttggttaagaaatgagattgaccaatatgagtaattgacaaacctgaaccgtcaccaacatacattctctcaaggccatcatagcttgtacagtttgtgagattattcacatcaggtgtgcaatggttggttgccccaaaattggggtaccaactgtcatctgtttcttgagcagcggcagccaagttttcttgagcaacaatgtttgaggatgtggcaacatctatagtgggtgtggtaccaaccaaccctgtaaaagatttgtcaaacctgtagaaacatgtatgaatagtgtggcctaatttcaagcaaagttgacattgttatctgtgattagcaggtgcagggggtaatctaccaattctattttgattcatatttcctcgaccaaaacattgattattaaatggagtgtgattagaggaacttggaggtgatcccaatgaagaaccttggtggtaatttggtcgaaagacatttttgctccctgaatttgcagtgtgtcgaggctgctgttgctgtctgaaatttctataggccatgttagcttccactagagcattgatgtctgaatcttggacagccatgtgagcactcaagtcaatttcagtgtctttcttcttgattctagactcagacgaaaggagtaatgcttcaatctcggcaaccgagtaaccttcaattctcgtgtttgaggagatgataaaagtatcgtacttactaggcagacctttgaatatagtagcaatgtgatctcgtgcactgagtttctcacctaccaaagcaagaagatcaaccatttgcttgactttaagaagatactcgttcaatgacatcctccctttcttaatctgttgcaacttggttttgaattcaagaatcttggaagaaacttgaagagcaaaatgtttctccagagtatcccaaatttgttgaaccgtattgcatccaaccattctggttagaagactttcagtcatagaggagaggagccaagaaacaagaagttgatctgaacctccagtcattgtaaaccggactcgtatttccaagggcacgatcttcatcattgagatactaagctgaaggatgattgaagatgaatctttgcaacatgttacctttgattgcagcaaggacttgttgtttcgacaacaagaaattgtgatcattaaggcgtattgaaaggctccgatcgtagccatgttttccgtcaatggagaaaagtcccactctgataccatgttaagtctattcgacattgtatagaagataagaacagagagaaggaaagagatagaaagaacagagaaagagagaaaaagaatagagaaagattgaaattgaaaagaatgatttcattgaattgttaggactgtaaacagtacttatttatacaacattagaggcatacattaacaaccaacaaattataacaacctgtaacaaactaacagactaacgactctaactactatcattagctgtctcaacacttctgaaaatactttaatagtatagcatctttcacgaatactataattataatctcataatatatataatttttattattaaactattatatatacatactgctcctttgaaaaatcttaacatcaataatattatataatatcaatataaaattttaaaaataacatttatcttttaataatatagcatcattacttttgtctactgttttttgtttgtttattattattttattgtcactatacatacactatacgaaagatctacctttcttcaaaagttgatttctgatttttctagagcatgcaacattggaatatgacctctaccaataataaataatattcactatttctttctaaaataataataataatgaaataaaagaggatgactttttctgacttgtattttatttattaccaaagcattaattgaaagcaaggcttaatggagaagaaaagggagagagtgtgagtgtgactgtgactctatgtatatgtaatca

SEQ ID NO: 219266 - DNA, 4432 bp, Cannabis indica
gtttttctttaacatataatgatatgatgtcgcgattttgactcaacgaatgtatatctcggctcgtaatttctttggtgtattggttatattagtgtttttttggttacagttgctggtaatcttccatgtagaggtgttactttccttttaaattttcttagttatatggaaaaagaggaaggtaagggaagatggaccagttgtaaaaaggagctgggaattattatggtacataaaggcatatcattttggggaggaggaagattattattatagctatactttcacacacaaacaaatcaaaaacaaaaacaaaagtacacaagacttgattttgtagggatttgtcttccaaatttaattttgtttttctttctcttttaaatgtttcattattgtagtagctacttatcaatttgttttagaaaagttacattttgtaagaggatttatcattgaaagagttctggatttaaataaactttcttttaaatgtgcaatagactattgtgttgtttgttttttcctctcaaaatgtagtaggcaccgatgaatctacatagtgtttaaagtttaaattattttttatattataaattatttgaaattttcaaaactttacagaaaattcagattagagagacacaatcgggtgcatatgtgcactaaagctaccacttttggtttcaaggaaaaattggacaaagcaagttttacataaacttagaaaattatgccactaatatagtagaaaattacaccataacattaaaaaaaaaaattgaagctaaaaataaatattaatattctagtgaatgagacaagtgttaaaagtcgttaaacaatcgatattcgagtacttttacttggcaactattgtagagaggtcactctccaattccattattattattattattattattatttgttctatattgttctaccaaagtaaagctgtattctctctctcgaaaattgaatggaaaatttcagagaaatggaaactaaagatgggtttcccgcaatttgcagtagagagataggtttctctcgcccaatcgtcttcgctcgccgattttctgcttctgaggtcttcaaattctctctctctctagttagttaactaaaatttgtttcacactagttgtaacaatttgatttgattatttatggtggtattcaaatcacgatagttatacatgggaatggaataatcaattttgaagctttattaaattgggattctgttttcttggattaaattgtgttgtaatgggaaaaagaaacaaaaacaaagattgtaatggactgataataatgaagtcgaaataaggctagtttattgttttgttttgtttattgtttaatcattggatccccatgtgatctttttttttgttttgtcaaaaaaaccatttttaattgttattattttattgtgaattagtgtcaacatgctcatagttcctcgagaatcaagaagtgttttaaccttaaaatcaactatggattttggtggactcataaagacttttcttttatcataaatttttactagtttttaaatggtgtaagtaatggacttgaacatgacagttttctgacacagaaaatcattgacttttccataatttgctctcaacggaaattggatttgaaggctgatgcgaaatgagaaagtgggaaaatttcaacttattgaatgttttcttttttttttttgggcagcaattatccaaaaaatttacaagtacttttaacattttatttggtggcttattattgtaggttattgtgaagcagttgaatctctatgggaaactaaatggtcataagggctgtgtaaatacagttgaattcaactccagtggagatctccttgtgtctggttctgatgacaagcaggttatgttttgggattgggcgactaagactcgaaggttgtcatatgcttctggccaccatgacaacatattccaagctagaatcatgccgtttactaatgatcgtcgtgtagtaacttctgctggagatggacaggtgaatttggagtatttcctttgcaagtgtattcctttgtatttggcatcaccacttttgttagttttgtttagtttctttttcaattcttgtggcattgatgagtaattcagcagaatatagaaataaatcagacataaattgtggttagatgtaaaattacctggtttaggtagattctaatagttttgcttccatattaaatggaatcatttctatgcagataaggcttggtcaggtcttggatgatggtcaagtacatacaaaaaagttggggaggcatcaaggccgagtatacaagcttgctgttgagccaggaagttcacacatattatatagttgtggagaagatggtcttgttcaacatgtatgccaaatatcttaatatacctacttgtggaatctctcattatgttttcttgtagtttcagagtttggtttttcttgtgtgcagtttgatctgcgaagtagttgtgctacaacactcgtttgttgcacttcgttaaaagaaaacaacaagcagcttcaaaacagtgttataagtttaaatggcattgtaattgaccccagaaatccaaattacttggccgtaggaggtgatgatgaatatgcacgtgtatacgacataaggaaatgttggcaaaattcttcgaaggatttggatgaaccagttgacacattttgtccccgtcacttggtgaaggacgatagtgttaacataacagggctggcttactcttacacaagcgaactacttgtctcttacaatgatgagctcatttatctgtttcagaagaacatgggattaggcccgataccatcatcttccacctcgcttgaggccacacaggaattagaagaaccacaggttttcattggtcacaggaattcacaaacagttaaaggagtgagtttctttggccccaatgatgactatgtgttgagcggttctgattgcggtcatatattcatatggagtaaaaagggagctaaactcgtgcgcttaatgaaaggtgatcgacgcattttaaatcaactcgagcctcatccccacaagccctttttcgcaacatgtggaatagagagcagtgtaaagctctgggctcctatggaaactggtgttcctccacttcccgaaaatgtacagaaggtactgtcttgcttaagttgcttttggttttcagtaccgaaaaaggtactactacattgctgttttacataacatttttcgtttatctgttgttgtctggtattagataatggattcgaacagacggggcagagagaaccaatcaagggtggtcatgactcctgatgttatcatgcatttgttgcgtctgcagagaaggcaagcaatggttacgttgaaagaagatacaataatgctgataccgagagtggcgatgaagaaaatgcagagccttctggttttaggatcctctgttgactatggcaataccttgcctgaagacaataacgatgatgattcagatgaaagttccagggactgtaacattagctagatatatcattacaaacttttttttgtgtttgtaaatatacctatatatatatgagtctagtctttgttatgaatttgatacttggaataattctgttttgagtacataacttttatgtgggaatttgagaaatccattatcagactctaatagcttttacttggctatgatgaggatggtttttatggtggcattttgttgggacctccaaacaaatatggacagtaagagtgtagataaatttttgtaaaccgtctaacctgaacaactcgctcaaactaaattgagataacctgatgaaaaatgtaaaccgaaaaatccgaccaaaatataacttgctaaatctttatatggggtgtttaaaaataatattaacctgtccaattaactcgaattaattcgaccaatctgattaaaagagttttttatattgggctcctatgatgactattttattatttagggaaaaacttgattatttaattgtttatttatgtactttgaattgatttcttgttaaaataaaacttaataataactcaatttaaaagtatttatgacaaaactaattgcattttttcgcatatattcgtgttaagaattatcttctagtcggttatattaaaaaaattataaaaaattaagttaaaagttctatttgtattattctaaaaaaatataaaatctattttataatttaacaaaaaaaataataatttaattgataatttttacgaaaacataaatccaaaatattattaactcataaataaatacataaaaaatttgaagaatagttgtagaagtagtagtgacatggcaagcaagcaaagcacgtgaccaattattattattatttattt

SEQ ID NO: 219267 - DNA, 7209 bp, Cannabis indica
tttccaaaaggattttagctttttaaaaagctctccaaaacggggcctaaaaataattcatgcgtacaattttaatcaaaatatttttgttcaagatatttttttattaattttcaattaaaacacgaggatcaaaagaataatatttaaagtaaatgttctgaacttgtattaagtaaaaataaagggtcaaaaataatattatctaaaaaatacttataaaattaaatataataatttattaggtagatatcactcttaataatttaatattggaaaaaatagactaattaaatatcaaatattatcccacaaacttatttgtaaaattaattaatacactttgagaaaaagactaattaaatgtgcaaacatcacacttctattacttctaataaacttctaacaaaatatctattttttgtgggaccataaaagataacttattatgatttatataaataactttgaataatttgtacttattatgtgagttaaataataataataatttgtatatatatagtacaattaatgtatcatttttattatacatggcggctagtgagtggtgacccttaggactattgacttaatttcctatcactatcgtgcatgtatattaataccaatttttattattattaattttttatgagaaatgtcatacttaggatgtgtaatattgttatgaaatactatagggggtattatatattttaatttaataattattataaaatatattttttattatttttttaaagagaaattttcattcaattatcaaaggagtcaaattttataaatcaactaaaaattagtataataagaaaagggagagatggtcttctactttctctctctgtttccctttcgtttcgtgtctccttgtgtctgttcaacctttcattagttgagtcttccctaggtctgctgtgtgtttaatctctttgttttgtttggtcttatcctttcttctggtctcggttagtgtttgtttggctgctctcgtcttagggaggttttgagtgtttattctttcagtgttttggttcctgtgtttggttagttttgtctgtgtggagttaggtaagatttggtttggtgagggtccctttgctggttgttagggtgcatttattttgttcctgttcgttgagcatttatggagtcaatcattgtctctaactcccctcttaaaggaaaaaaattttcgtgtcttgaagcctctgtcaaactatccccgtgtccctcttctgttaaggcgttggcttcatcttgtttgtacgggaaggtcattgctcccatggctgtggatattcctgctgtgatggattttgtggcaaagacttggaaaaggccagttagtgttgtggctatggtagatgacctgaagacctctaatgtgttcaagtttggttttggtaattcggatgacaggaattgggcccttgctaatggtccctggtgtgtgcgtgggtacactctagctctgcaagattggactccgagagatgacgggccgattatgtttaactctcttagagtttgggttcagttacataaccttccccatgagttttactcaagtgctaatggtcttatcctagggggactggtggggaaagtggttaagttagacttgaaagaggacaaccctgcttcttggtccaccttctttaagtttcaggtggacattgaccttcataaacccctggtttcagggtgtttctttgatctaaactgtggtgcaaaacagtggttacaaatgaagtatgagaaaatcggtattttctgttataactgcggacgtttgggtcatcaacgccgtggctgttcgttgtcatcgccggtgacggtggcgaaatgtgatggtattccttttcctatgttcggaccgtggctctccacgtcctctgcttaccatgatgttttttcgggtccgttctatggtggttcgagtagctcttcatcgttagcagtgggtaaaaaatggtggtgcttctcggccgttgatggtgtccccggcattgaacgcaggtggttcgaaggtgaccgctgagttggcccgttgcccgagacgccctttgatggcgactgctcgagatgctgctgatcctggggttgctaagcgactggtgtggcagcctaggcaggcgagtatgagctgtggtgaaaaacatgctgtttctggtaatgaaggagttaatggaggaaaagctcctctggacgttgctattttgaaggaaggcgtggaaaaaaaggagcattaatagtaagaatttgaatttgaaggagaataccgttgatttgtctcttggtggaggggtcgggccgacttctcgttgggccgcgaggtgggttttaagtgggagtgagcccattcttgtggaacgtgggcctcattttttgaaacatggtgacttaagtgggaataaaaaaagccctactactttaattaatgatgggccggtgctggggaacttaagggagttaagtgagaactcttttgttgggctcaataaggacccgattgtgaaagcttctattcctggtgggccggcgccttgtgagctaattattggtggtcatcgggggctctatcctcacgaacccaatgctgaaaaggagaagccggatcatctaagtgaagaccatgccttggctcattttttcaaagcccaagaggatttattgtacgatcttaaacattttggaaaacttgatctgtatgagattcgtaagataggaggggacataggtgtcccggcttcttccgaagttaatgataggacgactcctttcaagaaacggaaatttgaaggttctgcttctctttgctctcggcctcacaaaattcaccgcaagtacccaggtgtagtccgcgatttcccctgggacactaagacgaaagagaaggattatgacctggtttctgatgagccttctgaagatagttccaactccccgagccgctctggtatattgaagaaccccctgattggctcatttgtgatcgaagatgctgtgtcgagtgcgtctgcttactctcatacccctgtggaggagaatgtggaatctcctccacaggagccatgagaggcatcgcttggaactgtagagggttagggcagacctctacagttcgggaattgaagtccctcatccgatctcgatctcctgattttctctttttgaccgagctcaaagtggatgccaatcctctggtacgtattcttaagtcccttcatttttattataatatttgtgttcctgctaagggtagtgcgggtggtattatcttggcttggaaagttgggtttatttttgaatgtatttcgtgcacttgtaatcatatctcggggattgtgtattcggatccccctacccatccttggctcctttcgtgtgtttatggtcccccctatttgcatgcaaagaaaaaattctggtctgagttcttgaacctgggagatagattcggggggccctggcttattttgggagatacaaattttgttcttaatgcctcagaaagggaaggttcgtctggccgtgatcccttcattccaatcatatctaatcttatgaatgctagaggcctcataaatatgcctatccatggagaccatctaacctgggataaccaccgctccgggcggcatcatgtgaaatctgcgttagataaaggtttagtcaatggagcttggattaatttgttccccagggctatagtgacctcgtcccagactagcaactcggatcatagacccttatgccttttgtcggatggcccggcgtcaaagttcaaaaggtgcttcaaatttgaggaaggatggactcgtgattctagaagtaatcttgtggtggccaatgcgtggagctcgattaatcatgcctgggctccggcgagaatctttaaaaaagttggagccaccagggtagctctcctgaagtggaatcgtgcccaattcgggaagcttgatgagacgattaaagagctcgaacgaaagctcaactctcttcagagtcttccggccgggtctagggactgggcgcaggaatctggaattcgccgggaactcaatgagtcaagggaaagaaaagcaatctattggaagcaaagggctaggatttcttggctcaaagatggggacaagtgttcaaagtttttcttcctttcggcggctattaaaggtcggcggaatgccattgagagtatcatgaataaagacaatgtctggatttccggacgagaggctattggaaaggagtttattgagttctttaagggtatcttttctgagactgctactagtatggagtataattgtgcccaattggttcaggagcgattatcccatgaggagttggaaaatcttactagctcccctagtcctgatgatattaagaggactttgtttgctatgaacaaccataaagccccgggccctgatgggatgtcagttcttttctataaacattattgggagtctgttggtcctgacttctgtgatgcggttctagacttctttgagaacggtaatatgcatagagggattaatgccacgaacattgtccttattccgaaggtccagaatcctaaacgcgccagccaatttaggcccatctctctgtgtaatgtggtgtataaagtcattgcgaagatattggctaataaagttcgacctattctcccttccattatctgcccaacgcaagctgcttttgttccaggtaggaatatccatgataataatgtcattgtccaagagattatccactcctttaagagaaagaaaggcaaggagggtttctttgctatcaaaatcgacctggtaaaagcttatgatagattgagctggaaattccttgaccatgttctggagagttttggcgttcccctgaaatttcgtcattgggtctctcagtgcatctctactacaaccctaaatatctgccttaatgggggtcatgtaggcaaagttaatccttcctgtgggcttcgtcagggagaccctctctccccgtacctcttcatctgggctgctgaaatcctttcaagactaatccatacggcccttgcccaaggatctatcaaaggtattagacttagtaggagtggtcctgttctatcccatatcttctttgcggatgacctaatattggtgggtagagccaacttaaatgaggcgaatggtttctggagctgccttgaaaatttctgctcttggtctggccagcaggtcaacaagcttaagacgacaattttctttagtgacaatacctcgataagcatgcgaagagatatcaaggaagccttggggattgattatcctgagggatgccttaaatacttgggtcttcccttgtttagatctagacaaaaggacgctgattttaactttatattggacaacttaacgtcaaaactccagggttggaaggcaaagactttgtctaaggcggggcgagcaactcttattaaatcagtgggcttgtctttgcctatgtatgcaatgcaaacaacaaagctctcatctcgtatggttaaccggattgatggtttggttagagacttctggtgggggtttgagaaaggaaaccatggtctccatctaaaggcttgggaccaactgtgtctgcctaaatctttaggtggactgggattccggaaaaccaaagaaatgaatcaggccttcttggccaaatggggctggaatatcttgaccggaacccgatctttatgctcccaagtgttgactgcaaagtatctccggggaaaagaccttctctcttgtaagtataaaaactcggattcctggttttggaaaagtgtggtcaaggctaactctatcttgaaaaaaggggcttgcaaactagttgccaatggagattcaacaaacatctggtcagacccctggattcctcatgctaaagatttctgtccgaaattgattagggacgcaccgcccaaccttaataaggtagcggagctcattcggatcaatggtcaatgggacttacaaaagttgaagtttctctttgatcatgatactgtggcggccattataaaaggtggccaaccctctggtgtaggccgcgatagatgggtttggacgctggagaacaatggccagttctcgtgtaaatctgcgtatctagcccaagcttttgatagagccccccatcgtgacgtcgctccaaagctttggaacagactgtggaatagcaaaattttggagcgtcacaaggtcatgtggtggagcattttgtccaacgctctcccggttagagctgttatcggaagcagattccatatagaagacactagctgccccctttgtggaatgcgtgatgaatctgttgagcatctttttttgacttgtgatgtagctcaacatttatggcgttcttctccttggggtatctatcctatgtgtgacacgggtattcgtgcctgggattgggtcaagttcatctgggatcttaaatacaaaggagccaatgttgatgatattttcctgtatgcctctattattgtggatactatttggcgggtgcgtaatgataaggtccataataactgcccagttgattttaacaaatgctttgatattatttgtacttcttatgcagatatgtatgataccttgctccccagtccgactccagtttcaatgaatacttggtccactcctcctctggattggattaagcttaattgcgacgtgaaagtgggtttggagagtatgtgtatcgctgttgtagcgagagatcatcatggttcagtgattagagttcagacagctcgggaggagttctcggatgttctttgtggggaagccgcggcttgctgcttggctgtgtcaattgctgtggatttaggctacaagttcattattgtggagaatgactcgagagtagtaatcgatgcaatcaatgggaaggaatctcgttgggctttagagaactatatctcattttgtactaagtcttctcctttatttaatagttgttgtttctcttatgttagtcgatcatgtaactatgccgctcataatgtggctagatgggccttttcccatcaaaaattcggatctataccggtctcttctatgccggaaacgctattttgtaatgaccacgaggtctaactcagtttatttatataacataatcgtctttctcaaaaaaaaaaaaaaa

SEQ ID NO: 219268 - DNA, 6123 bp, Cannabis indica
attatagagatgacagagtggtttcaccctttttcttataaagaggaagttttaaattcgaattcttttttacaaaaaaaaataattataaaatattttagtccatcaaatatattaaaaataaaattatcaatattattagtcctctaataataaattagtcattataataaaaaaaagagaccttttattatcatttattaattattggttaattaaaatttttctctctaaactttaacatgtactaaatcacgtctcctaaacttttaaggtcgttaaaaatgttccctaaactattgagattgtcgaatttaagaatttttgttcaattttagtaaaaaaatcttaacatggataaaagttcaaggacatgattagtagatatcaaaattcaagggacatgatttggtagatatcaaaatctaaggagcatgattaaatacataaacaatcattgaaacagtaaaattgaatgaaattagacaaaagtccttaaatctaacaatcttaatagtttaggaagaatttttaacagccaaaaaagttcaaaaagcatgatttggtgcatgtcaaaattcgggaggaaaaattctaattagccttaattatttgctggttgatttttatttcacaaattaattgaccatatgttcccttttaaaaatttaaataaaagatcattaattatgctaaaaaaaaaatatatataaaaaagatcattatgtgaaattggcacgtgccttgcacgtgaaacatctactagtagaacgagacgaagaaaccctaagtatttcctttcattcaagcttcaacgttcccggttctctcagccgccgccctttctcaaagccgagctgcaggtgagttctgtattttgattatctaaatctattttgatgtttttgttttgaataataattctattataatgttatgataatggattgatgattgatactgtcaaaatcaaattttgtatatcattcttttctctgtagcttcatgtttttctaagtttgtctctttaggctaataatttaattatcttgatttaaatgcattgatttgggtgttaatctgtttcgctgacggatgaagtgaaggaatactgttagcatgtagtgatttttcaactcgtagtggtgaaaagctgtattttagtttgaaatgtgaatcaaaattatgttcttcatggtgggttttgtgtgtttgtcgatgtagatcttaattcctgctctgtcttggtttttttgctgatggaatatagtttagttagtagtgactagttatgtgtatataaagttggaaaagttggtgtactaatttatcccgttcaaccatattcctgcatttaggctatattttccagcgaccatctctgcaggagatgagagctgagattctcattgaaagctctcattggtagtttcactttgggttctttcttgttgatcatctttctaagaactaaatgatattgaccctatcatgtgtctaacagtttttgtgtgttttcatttacgttttttaacattttgatttagtagtggctatattttttgatggcatcttaagaatcttgtttgtgtgattttttttttcttccaaagtttccaatttgttaaaatttgaatattatttttaattcaatttttttaattaaattatgaactttttaatttatcaatatttcacttaataaatttctctattagtgttatgctaactatttcttataacatctttaattttgagcgattgtaatgttagatatgtttgcaaattcttggttttcttttgatttgaagtgttttttcgttagtctcctgattatttatgtaattgtgttcttgcagagtgttttttcacttagttgttcttgagctcgattttagtgccagtcagatttgaattttatttggggattcaaatgtaaaaagggtttttatggtcgtgcctctggggatgatcaaactaataactttcgttcttcgtgagatatcccatgcggaaaaatattggagacctgaactgaagatgctaagcttaatttaataattttcaacttcttttctaggattaggaaagaatattaatttgatgatgaggatgagtaagctaggaatattgaagcaatactgtggttttggggcatttagtactggaaaattctgtattttcctgaaaatatcttactcgaataacaattttttgtacatagagagatcaatatgtaaatgtatatatagttcaaagttgtaagtattattcatgaaatattacatataaaataggaagaatctccctctgcggttggaatagcgaattggattattggagatattttgttagttttgcaaatgcttgtagacttgttgttactgatttacattattaggttttctggattattatgataatatccaaaaccctaaaaaccatttctttctctcaggtctcagccatggcgtcaaacaaagatccggacccttcgttgggataccttaccaggaaagacacggaggtcaagcttccgcgtcccaccagagtcaagaacaaaaccccagctccggtacaaatcaccgccgagcaaattctccgcgaagctagggagcgtcaagaagctgagattcgcccccccaagcagaaaatcaccgattcaaccgaactcgccgattaccgtcttcgcaagaggaaggagttcgaggatttgatccgacgagtccgatggaacactagcgtttggattaaatatgctcagtgggaagagtctcagaaggacttcaatcgtgctcgttcggtatgggagcgtgctctcgaggtcgattaccgaaaccacacgctttggctaaagtacgccgaagtggagatgaagaacaagttcatcaatcatgccaggaacgtttgggatcgagccgttatgcttttaccgagggtggatcagttgtggtacaagtacattcacatggaggagatattgggtaatgtggctggagctaggcagatttttgagaggtggatggaatggatgccagaccagcaaggttggctttcgtacatcaaatttgagcttcgttacaatgaagtcgaaagggccagagccatattcgagaggtttgtacggtgtcatccaaaagtcagttcttggattcgttttgccaaatttgaaatgaagaatggtgaagttggtagggctagacaggtgtatgagaaggcagttgagatattggctgacgatgaggaagcagaacagttgtttgtggcttttgctgagttcgaagaaaaatgtaaagaggctgaacgagctaggtgtatatacaagtttgctcttgatcatatacccaaagggagggcagaggatttgtatagaaagtttgtggcttttgagaagcagcatggagatagagaggggattgaagatgctattgtgggtaagagaagatttcagtacgaggatgaggtgagaaaaagccctcttaattatgatacttggtttgattatattcgacttgaagagagtgtggggagtaaggaaaggattagagaggtttatgaacgagccatcgctaatgttcctccggctgaggagaagcggtattggcagagatatatctatttatggttagtttatccatttgagatttatgttggtgtattttgtaaaatggggttgttttattttgtctaattgttgtttgtttattcataatttataggattaattatgctttgtatgaggagcttgatgctggagatgtagaacgaacacgagatgtgtacaggtaatctgttattttcctataattagttataaactatgatcttaaagaacttatttttgctgtagttattggtaaatgataagtcttgatgaacttgtttaggtttcagtctttggggtattcattttgttttacttgtatgaagtattcatgtttcatttccattcgaatttccagggagtgtcttaagctcattcctcatgagaagttttcatttgcaaagatatggcttcttgctgcccaattcgagattcgacagcttaatctcaaaggtgcaagactgatcctaggtaatgcaattggaaaggcacctaaagataaggtaatgtttttattttctttctttctttctattgtgctatattttgtatgaaataagctgaattctatggattgatgcatatttttatttatttatgtttgtttgttgttgttttttaacatcagatatttaagaagtatattgagatcgaactccagcttggaaatatagatcgtggcaggaaattgtatgagaaatatttagagtgggcgcctgagaattgttatgcatggagcaagtatgctgaacttgaaaagtctctgtgtgagacagaacgagcaagaggcatatttgaacttgctattgctcaaccagcactagacatgcccgaaatactttggaaggtatgtgcatggcattctagatatgtgatatttgttctcaattcctatatttgttaaattttttattgctacaatcttcttgaattattgatactgagcatgagtttgattacaggcttacatagacttcgagatttcagagaatgaatttgatagaaccagagaactttatgagagactattagaccggacaaagcacctaaaggtatggatcagttttgcagaatttgaggcatctgcgattgaagatagcaatactgatttggaggaggaggatatggaagattttcttcgtgaacaaaagaaactatgccttgaacgagcaagacgtaagcactcccaaaagtctatgcttcatagttattaaaatattttagcatttcaaaccaaggaatcaaatcttactgttatatttgctttttatttatttgtgtgacaggggttttcgagaaagctattaactactttagaacatcagcacctgaattgaaggaagaaagggctatgttactagagaagtggctaaacatggaggctagtttcggtgatcttggtgatgttagcagtgtccaggctaagctaccgaagaaactcaaaaagaggaagcaaatgatgaccgaagatggaccagctgggtatgttaccaattcacatttcaagtcattccttcctattttgagtctgcagtcagacaagagcatgcataatttttttcgggtgttttcagaacaatgggttttgctaacttgttttttaccctttcgtatgtatttcaggtacgaggagtacatagattacatattcccagaggaaactcagaccacgaatctcaagattttggaagctgcttacaaatggaagaagcaaaaagtatctactgatgatgattaacatgaattttttttgttcatatgaccaatcttatttgttgtagaatagttttttgggggttaatgttcaatatccaatagatgatttctcttgaaaaaacaagcctagtatcaatgagttgaaaagggaaatgaattttggtttgccaatgacgttgataatattctgtttgtatagtgtacatttttaccaacaaattttataatattttagttatattgatggcctttaagatatcttttatgtttggcattgggattttctatttagaacaattggaaatgatagaaatagttttatcttatcaacttggatttcatagggctcttattcgagcatgtgcttttggttttggattttatagatttcaatcttttattgagcacttggatgaaacgaacattttcgggattatgaattgaagcacatgttgaagggtctttgcggatagaaaaagtgacagctggttcttattcgagcatgtgcttttagttttggatttcatagattttatagtgcacttggatgagacgaacgcttctaggaaggctttgcagataggaaagtgacagctggagtcgattatttgggagaatctggagtcgattatttgggattctctttcaagatggaataactagccattcaaaactctttttcagaggaagactagctttcttgaagattttttttggagggacacaaaggctttccgagaaagctctttcgggagacgactaattttctaagatgacgaaaaatttacaaagatgtttttatt

SEQ ID NO: 219269 - DNA, 4283 bp, Cannabis indica
attagctccgagatcaatcctcagctgaaaggatctacaagcaatgtttagaaaacagtttgtagcaacaaaggattttgacctggaggccagttctctgaccattttcaaatagtaaccgggggaaattctaaagaaatacattgaatgcatgatggtcgttgctactaaaactaaggttactgatgatatgaagataatggctttcacatcaggattaaccacaaggtccttgttgtggggagatctccaatgtaaaagggcagatattttaatcaatttttgacgagagctcaaggattcataaacttagaagaagattatgctcaagcttctggggtacttccatcaccttccacagacctagcaacaacccaaacttcacagatgactactccatcaattttcccttcagcaattgcctttacaactcctactatttacaaatcaagtgcttccacacagccagttgcacatgctagtttttcaagattcagaggggtgcaaatcagattcagtgctgctcttggaaaaatgaaccaaaatgcagaagctccagaatgtaagccattcacggagcaagaggagttctaatggtccaaaccagtttgaatttgcgaagaaaggaaagactcaagagtcttgatactccgagtatacaagccttgtagatactcaagagaacatttatatggaaacttgtaacatgatccattacaaaaaacctccgccaatgtacaagggtagaaaataaaaagaggcccaaacaagaagtgcgaatacgacaagacataggacaaatcaccaatgaatgtcactatctgaaggatgagattgaaggattagtacgaaacagacatctatccaattgggtgagaattccaatgatttatactggacagggggttgcacatggacaactcttcattcctggacaacatggagcaataattcctcctcagggaatacgccatccacaagctcctagaattcaagctccaaatgcacaagccctttaaggggcataaaatgatctagcggtgagaattgagtagctcctagtcttggaagcccatatcctcctggagtagcccaacctatattagatggtcacgtggcaaccattttttgtggaccacacattgctggaagcactcgaaatgcacagaagaggtacttgaatgaattagatcaagacgagacttgtaatttggtacaatcatctgcacatcatcctcgaatgattaatctaccaattactttcacagaagatgaggccaagcatgtgcattttcctcacaacgatcattggtgatagaggcccagataaaaaataaaagagtttccaggaggatccttatggataatggaagctctgtatatattattttaaaggaaacattcaaagccataggtcttgtagaagccaatctattaccttgtccaattttactccaaggcttcaatggagacacccaggtccccgtgggaaaaatacaacttccaatggcaataaatggagaagtttttaaaagcaatgcaatgtcctctttcaagtacaacactcttgtaatagttgattgccccatagcttacaatgttattctgggacgacaaattctggttcattttagagcagtaatatccatctgccacttttgtcaaaagttccctcgtgatactcgaagcattggaacaatcaaaggtaatcaaaaaagtgccagaagctgctacaatatttcaaccaagactgttctcatggtccaagaagggaatgtagcagaagctggaacatcttcccagccagcactgggggtggtctaagaagaagatgaactagatccacgggtaggcatggaacgaagaatagaacctagagatataaaaagtatgcatcaatgatgaagatcccaccaaagttatcagagtgagagaagaatttacctccgatagtgaaagaaaagattgtctttacagttaaggaaaatatgtattggctgggaatcattctgatatgactggaataagtcccagggtgatctatcactgaatatagacctaaaagttgatccaatttcacagaagtggagacctttatatccagtaagtttagaagcagtgaaggcaaaagtagacaagctaaaaaacattgattttctcaaggaagctctatttcccatatagctagccaatttggttttggtcccaaagcctaatgggacatggagaatgtgtatagatctcatggatctaaacaaagcttgtcctaaagacatctttcacttccgtgaattgatcagatggtcaacacaactttgtagtatgaacttttaaccttcatggatgcatactcttgctacaaccaaatcaaaatgcacatggatgaccaagagcatacaagctttcaaactgacaaaggtatatattgctacaagatcataccttttggattgaagaatgctggagctacttaccagtgaatggtaaataaaatgttcaagaatgtacttgggatgaatatggaggtttatgtcgatgacatgctgctgaaatcaaagacttccatgagccatcatgaggatttaaaaagaggctttttccatcatccatgagtatggaatgaagccaaacccaaagaaatgcacttttggagtttctttagggaaattcttaggtttaatacttagttctcacggtattgaggcaaactcgaagaagattaaagcccttcgacatgccttcacttagaaaacacaaggacgtttagaagttaactggaagaattgcaacacttagcatatttgtctccaaatctacagataagtgcatacctttgttcaatgtactttgaggaaatggtaagttggaatggacaactgagtgtgaagaagcctttcaacaacttaaagaacatgtaacacaagattcaatattgtgaaaacaaggtgagggaaagtcgttgttcttgtacctggcagtgtcaggtcatgctataagtgctgccttagtgtgagaaaaaggaaggtacaatttcttatttattacgtaagcaaaagattgttgggcgtggagtccatatatcctatgattgaaaagctttcctttttcttaataattacttcatggaagttaacaccatactttcaagctcatgccattagggtactgaccaaccaccctctccgtcaagtgttagccattgatcactcagcctcctggatggccccaatactcaagtatttggaaacaggcacactcttagaagatagagctacttcgtggaagatcaaatatcaagcccccaaatatgtaatgatggagggagagcctatttcaggacaatcctagatcactttaaagcccttggtggagcttgtacttccttaaattattgtaaattataaatttgtttatgtgctggtccatctcccatggactatcattcaaaaccaatctcagagcatcatccttctctgaaatctcctcttccatctcaacctcgtcctaccgaatcttcttagacatagtttctataaaaagaagaaaaactaagaaattagctacccaaactacctaatatagaaaggaagcaggggattcctcccccataaaatgcttggagaggtcgcaattaaacttaccatccagaaacaaaaacattcaggggtcattcattccaaatggaaagttaggaacaacgaatagaagaaatgagtgaaaatcaacaaagttcccaaaaccagaaggattttggatagggaaaattttttctagcacttttgctgcaaaatgactaatcccaagaattcctgacattggaatctaaaaggaacatggcctataatgcctatatctaccaatgatagtaattgtatagtcagaaggccctaatttcacttaaaaatagaacatgcaaatacaacatataaccgtaaatccaaagaacacaaccaaaagacgagaaagtaacatacctgacaatgagagtgaaggcactaggctaattgtcgctaggtccgattgacgaagttgatcagacctttcacgaagatgaacgataaaggatatcaatgaattgatctctgtgttaaaatccagactcgtaatttcctctggcataaaactctcgatcactaggggttggtgatttggaaattctgaatcctaatccttaacatgaagttggatgcaaactcaacataacgatccagatcgattgaggttgtgtggtttttagtttggtttaaactctcatagaatgcagagaagaaacttgaagtttt

SEQ ID NO: 219270 - DNA, 1831 bp, Cannabis indica
attttgtgattaaaaaattgaaaaacaaaagtgttacctaacagcaccataatttttgactaaaaatgaatttttcatgacattaccgttaaaatactgaagcattgtttattttctttttgactaaaataagttttcatgccattattaatcgtaaaattatcgttaaacatcgcagtagcattactgagttcaaagatttgcaaattttagagttataaatctaaaaaaaaaaaaaagattaaaaccattaaattatgcataaatgtatttgaaatgcttaaattagtattttaagtgaaactttttagaaatttatgtataatgagctcattatcccattcccatcagcgtattagctcttttatctttattagctattctataaattcgtatgagctgaagtttattccttcatcttcttgtcaagttttataataataaacttcccaattttattaacaactctgtattttggcaaaaactctggcatttaaagattccaccaagtcaaaaacctactatggagagctgtaatgggatgtctgcctacttgtttacaattgcaataaaaaaaatatcgatgtctctcacatctgtccgatatgtaacgtgttcctttgcattcagttgctggtgtacagcaggaatcattgctggtgtgccaaacatggtatttggttggagtctttattcacttctagttatgaggatactgtctattgggctctttggaaatctagaaatgcccttttttggaatcataaatcttcttctatcaatgatgttgtggtttctgcttcagtaactcttgatcaatggaagaaagctcagcgtgcaacttctctgtcatctttcaacatttgttctaaagatgatggtgctgagatatggactaaaactgttgccaacacaattcaagttaatgtagatgctgccatttttgagaatgaaagtttatttggttatgggattgttgttagaagcgatacgtgatcacttaaatgtttatgtcctagtggacagcagcttgttgaagtggttaaagctatgggagtgaaggaagctcggatttcgcttaagaccaagaggtggcaacatgtaataattgaaaccgatagcatggcgaccattcaagcaattcgcagcagctttctaatgttcaaaaatattttgttaagtgatctacaactcgagtggcgcaatatcttgttagaagcttttgatcgtagcattcttgagcataatgctccagccgatttttctcaattttttttttttattattttgtattttgaatgcttgaattaattatgacaaattgcattttcttaaaagaaaaaactaaaaaaaaacttcacaattgaatttcccactaaaagacattttcttgaggatgcgtttgggtgttgcgttagacaacgattagcgacgcaatgtctaagccgatgtttaaaactgggcattgggaacattagtcacgatgcatggtcaagccatcatgacactagcagcgtgacataaaaagaacaacatcatgaatgcatgcatcagtatcgcaactcgcaacgcccaacgccgaagcctggcttgaattcttcatatcttaagcgaacaatgtcatgatgaacaagcactagtgtcatgacgcttaagaccaaaattccaaaactattatcttcagttatatgaaccaataatcaacactacttgtatattatatattaccataatttataattattgcaatgtggttttccatatcacttcataatagatcttgtttgataattgggcataaaagaatgagatcttactacttttttattta

SEQ ID NO: 219271 - DNA, 3969 bp, Cannabis indica
tttaacagtcaaaaaagttcaagaaacatgattaggtacatatcagagttcggaggaaaaattactaatcagctatttttataattggattggattaaatatttggttcaattgaattgcattgaatttcttgtccacctctacttcggccttagttcagttcggtccgacccgtcacgttttattctgaatcggaccaagcccgacccggtttaagagattgagaatagaaattcaaaaaattcaaactcccacctaatttcattactatccactttcaaatattcaaaatcccataaaccttagatcaagggcgggagcttcatctttctgagattcgacgccattttcgatcctctactcaggttcgtttcttcttcttcttcagttcttgttttttcagcattttatattatgtaaaatcgtctgtttcttcaacgacttctatcaaatttctcatcgaattttgccttatatgatgtacttacattatagttataatcataaggacagaaatggcggttgaagagagccaattgacgaagaaaatcgccaaaatcctcgacgaagcctctgtctccaatgcaaaccataaccgtaaactcaaggacctatcttccctacgttctaagacaacaacttcatcatcatccttcttgtttcattctccgaagccctaattcctctcttcgccttccagaggcgatcgccctcagccgagcgtgttgtccgcttcgtctctgccttcgcaacctacagagatcccaatcacaatctagactgcgataccttcttggaggactttcttaggttcctcctcgttgccagtgctgctgccaacaagacgcccaggttccgtgcttgtcagattttttctgagattatcatgaggttacctgatgatgcagaagtagctagcgaactttgggatgaggtaatagaatgcttgaaggtccgggtggtggacaaggttcctttgattcgtacttacgcagttagggctctttctcgatttgcaattgattgtgagaacagtgatgttcttgatttatttctagaggttcttcctctcgaacaaagtgcggtgagtttccctacttactttaatgctgtataatcaatcacatgtaatctgcacaatacatttactttaataattgaattagaatacattggaatgagaataactaataacatagaagaaaaggacttcggtagttaaatttttctcagagagagatttatattaggtgttcaaaataacttgattaataaaacagcaaatatgcatgtgtagaaactataactgtgtttagttatgcataggaatttctagttagattaatgctgtataaaatctttagaactatgcaaatcgttgcaaatattctcctgttattttttataacaatttgcttatatggctataaattacaattataattatactgcaagagcttatttgaatgcacatacatacttataataagtggcttaccacgtaagtgtgtgttttatgtgtgcacatatcattactcttactttagtattttatttttgagatatttctttgttattatagaaaaggcaggtcctttgataaaacacatcactctttcttttagtttgatttttgtgggatacctttcagaaatggcagtttatttacttccctcatttacaaatatctttttgataatatgcaaatggtgctttttcataggaggtgcgtaagactattctgctatctctacctccttctaatgctacttcacaagcaattattgaatgtacaatggatgttagtgaatcagtacgcaaagctgcatactatgttctagctgataaatttcctcttcaaagcctcaggtatattttcaagttctgatgtgatttggtttttcgtattactaacactgcacatactgttcgcttggctgtatataactaaatttgaattggaggtggtttaatggttattgttcattttggcagcatcaagctcagaacagttattcttcagagaggacttgcagatcgttctactgttgttgtaaaggagtgtattagaatgatgacagatgagtggcttaacaaatgctgcaatggaaaccctgtacagtttctcaagtatcttgacgttgaaacatatgaaacggttggcgagtctgtgatgcaggtgttgttagaagctggcttaattcaattacatgatacagaaagtatccaacaatacatatcatcacacaatgacaactactgaagatgccgagaattccacctcaaacattgaattgatggaagctgaagatgctctttattggaagatggtatgtaggcacttgcagagagaagcgcaggccaagggttcggatgctgctgctactatgggaactgaagctgcagtgtatgctgaggaggcttcaaagaacaatgaccttctggagaggattttacctgcaactgtttctgactacataaaactagtcaaagctcatatgaatgctggacccatttatcggtttacatctagacagcttgtattgcttggtgctatgcttgatttttccgattctgcaaacagaaaggtggctagtgaatttttgatggagctcttgcacaagccttttgacaatgaacaagatgatgatgggaacattgttgtcctcggagatggaataaatcttggaggagacagagattgggctgatgcagtgtttgaattggcaaggaaggtgcattcagcaagtggtgaatttgaagaagttgtccttggtgttatagaagagctagctcagccttgcagggagcgaacagcgaattttatgcagtggatgcactctcttgcggtgattggctttctcttagagaatacacaatccttgcgtttgattcaagggaaagctattgaacctactgaaatactgcaatctatattgcttcctggggcaaaacatgtgcatctagacgtccagaggatttccatcaggtgtattgcacttttcggcttgttagagaagaagccgagtaaagaagttgtaaggcagttaagactttcacttgttaagggcccaactccaattagcataatggctagtaaggcattgattgatcttgggatgtggcataatcctaaggaagttgatagtgctttcggactggatctcttaccaaattgtcaagagaatgaagtttcatcaagtccgacgacaattttcgatgatgaagaaggtagcttgaatattaaattactcgatctcttgtatgccggacttgttaaagatgattggggcgattttctagcaagtgatgagaatgagtcagttcagggtgttcttgcagagggatttgcaaagattcttcttttgagtgaaagctatccaagcattcctacttctttacatcccttgctattaaccaagcttattagcttgtatttcagcagtgaaaccaaagatttgcaacggttgaaacaatgtctatcagtgtttttcgagcattacccttcgctctcagctaatcacaagaagtatttatccaaagcgtttgttccagtcatgcgctctatgtggccaggcattgatggaaacactgcagcttctcccgttgcagtgtctaaaatgcgcaagtgtgctgtccaagcatcgagattcatgttgcagatgatgcaggctcctctttacgaagatagtgtcgaacctccactcgagtgtggcgaggaagggctcgcaatacgcatagcaatagaggtggcaaatttctccccaataaaaagacctctgcagaaagggcatatatatcagctatttctaaaatacttgttctgcttcatttccgcccatctgaacaagacgcaattaagttaatgaggaggattttagtttctgttacgacatctgtatcaacaacagagagagaccttattaaggagttaaaaagaaatggctgatcatcttagtgaagttgata

SEQ ID NO: 219272 - DNA, 4013 bp, Cannabis indica
ttcattttcagaaaacctaatattccattcctctcttctctctctcgcccaaaactccatgatcctctcttcgcctcaagctccatgaacgaagactctctcgactaggccagcagcacaccaccgaatcttgagggccatttcaaccttctccactctatttccctctccgctggatctctctccccttcgccctcttcttagcaacccgtagcccaaaccaccaccaacccgacgacccaaccacaacaatacctccttggtgtcctcttcattgccgaccactgctcctccagaggtatatatatataattaacttatagagaagaactagtaagtaacaataatagtaattttagaggttcttgagcttataaagtttgattagttgtattacataatgttaaccatgtattgaatgttttaaaagcaaaaaataagattatattcatttagccatttacttcttgtttttgttatcttttggtgaagcgcttattgaagcgggagtcttttcatggtttttgatagaaaatattcatttagccatttacttctcctacttgctatttgtttgatttgttttgtttttgttcatttttggtgaagcgcttattgaagcgggagtcttttcatggtttttgatagaaaatattcatttgtatttgcaactgatgacaactttgattttcttgcttttggatagaatagttgacatttgtggcccaaaattaaatatcgcggaataattcataccaattcacgagcgggtgcttgcataaggattccattgttcctttggttatgggaattatcttcttctttttcttcttaaattggatatacaagcaatgatgtacagttattagatgagtacaatattttgcagttattgactttgagatatgtttacatattgtgaatagaggttgtgggttttgctatggaaaaagaattaaatctgttagtatatattgagcgtatatatttatatttaacagatgtattttgattttctttgagttagttgaacttttctaccacctactaatttttcatttgttgtcttttttatcttcatgccatagtttctcaggctaccataaacagattgcttctgaaacagaagccattttgatctgtgactaatgatgatctatgtttacagacatggttacgagtctcaaccaagtggttgttggtgcaattataggttcaatattctctattttttggtattggtcatggaatgctttcttgctgcaggcctttgaatcatctttatgggttcaaataattgtactacttgtagctgctggatcatacagggatttgttttctacgtgtttcggtactggtttagggatgaataatcaactgtacaaaatatgttatagccaattctttgttttcttccatctgtgctctcactatgctctcaccaaggcaagtgttgactgcaagttggttcctcactatgctctcacgaaggcaatatttataatgatttacttccttaaccactacttatttactcccttctctcagaattataatagtacttcatccttattataaaccacattcacatagtgtatatacatatttatatatatagccataacactaattataggacacttgtttcactcacacccgagacagtgaaatatgaggtgaggtgacctcatcgaacttagtttttgatctctatataatcctatatatatttcttcatatcctaaagcgattagaccaataaaagatgccaaaattataaagaactaacttcattggcaaagttggttctctatgtataagtatttttgtgttgccaagagtaacacactaatctacatttcattttgattcctcattgtcatacaattaatatcaaaggcacactcaatattcacatatagtaaacatgttaattgtcattaaacatatataaatatatttcttgctattaatgcttatggttttaagcttcaggtgacacaattttgcatatgataccacaatattttttgtaccctccatatttagatgattttttcagttatttatttgggcatagacatgtatatcttgttcaaaatatcacttctgttgatctgcatggttttactctatgcacagatagtcatgtacctaatttttaatgaatatgaaatgcttaatttaataattattttattacatatgtctccaatatttttattgatttatttgactgcacattgttagagttgcttatttttgttcttttatatctcttatctcattcattctaattatgttatatattttatatttggatgtatataatttattggttagcatgagaatgaaagtatagaatacaagtgtcaagccattgttatcccaaatgtcatgttttcactcatttattgaattttatcaacgttgttcagcataagttgtcaaaattatttattgggggttcatataatgttatacaaaagaatgttagattttctactctgcaaaaatatcctcttacatttcaaattatgctttttatatattccaggtgaagaagctgcaagggctattcctcttagtgcaaggaaatctattagaggatcgagtgaaggagttgtaccatttctgcagctccaacattttagtgagtctgttgctccaacattttagtgagtctgttataaagaaaatatctcgcaagctaattaattaaaattatatttctgggatccttagtatagtttgtgagctatattattgtctttgaaatcttaactagaaacttgcaaggtaattaatttgttatgaatcaaattgatccaatgatttcaagaacactatagctcacagcacaattatcaaacactttacaatcacacttaattatcacactaagagaattgaatacttgaatcattaatgagaaaattatattctatatgaattgaattaatgtaagaacaatctcttcatctgaaattctctaagaataatggggtaagaacttagcctaggtgatcagttagtatgtcttatatactttgcttcacagtatacatctataattgttgttattctgttaaatcacttctcttcacagtattggagtgctttattactaatcttaggtctattttttagcttcttattgatgataaaagagagcttatacatatttaaggttatggtaactcgtgtactactataactttgtttattctttgcaaagaagaaaataaatgtctagcacaaaacataaagctcacgacgttacttagtgatacgattttaaataatcctgacataaagctaaagagttagtggaagaaaatttctcttcttatataaatgaggtgattttatatttaaaatttcaattgtgtattggcttatataaatttttttgattgttgcagaaaattactcaatctttcattataaagcttatgacgctacttcgcgatacaattttaaatcgaagattagataagcaagaaggtactttgaataatatcaaaacttatgaaagttaggagtagaagaaccttttctaataacacatatggaggataggcttgtatattgtaagtgtaaatttttattaagttatggatgttgggcttgtatattgaaagtattcttaaaaatatttgttatatagacactttatgtaatattactcatgtaattgatacaattttaaatttatcttttattaattctaactttatattattatttttaatagtgaacttcgagttaataatgtatatgtttatatggatatatgatattaatttatcttttatatatggacaaactaatattagtatgtggaaagttttaccatgaaaaatgtcgtgtacatgtacacataagtgtcattttagaactgacggaaaaaacacttgttgcgtcagttaaagattgacgcatagcttgttgtgtcacttcaaaactgacgcaaaatgctttaatttttttttttatgttttgcgtcggtt

SEQ ID NO: 219273 - DNA, 2508 bp, Cannabis indica
ctactgaaatttaagggtttgtaattctttttgaagagtgccagttgttcacttcagctgctttatcaataattcttgtcatcattttcggtgtatatagtagtttatattaaggtgtttttaggcacaacattctgtttgtactgataattttctgtttatatatcttgcaggccatccctgggttcaagttggtggtgtggctcctgacaagcctctcgattctgcaatattaagtcggttgaaacaattctctgcaatgaacaagcttaagaaaatggctattagagtaagtcactggatgtttttgataaatgaattgttatataccttaattaaatgaatagatgaattgtaattattttaaaaccctcatttggcaggttattgcagagagcttatctgaagaagaaattgctggcctaaaagaaatgttcaaaatgatagacactgacaacagtggttcaatcacttttgaagaacttaaggctggtctgaaaagatttggagctaatcttaaggaatccgaaatttatgatttaatgcaagcagtaagttcctatacatataaagatgattttgtgcacctaaactattagaaaaatggatatccttgctctttttattaagatgccaaataaagaggctgaaaaaactgagcttttctcagagctaaaagtaagtatattaaaagatgattctaaacctaaactattgagaagctctccttttgatatcctacacttaagaatatatcgtttagggtaagcaatctaagtaagtatattacttgccttttaatttgatattctcttctttaattatggtgaactctcaaggatatgatagataaatatttcattcatatattgtttggagaatattacattggatattcttagtttaactttacttcctgaattgcaggcagatgtagataacagtggaacaattgattacggagagtttgtagcagccactttgcatttaaacaaaattgagagagaagatcatttgtttgcggcattttcctactttgataaagacggaagtggctacattactcaagatgagcttcaacatgcttgcgaggagtttggggtagaggacgtccgcctagaagagatgatgcaagaagttgatcaggataatgtaagtattcaactgatgattatactattactgcactaattgaatggctataaattaaaattcagagatttaaagatctgttttccttttagataagttgttttgttttgcaaatatcaagttgggctcattagaacttaagatcttggttccgtggttgaatttaccttaaacatcttagtctctactcaaatgaagcatgcactcttttaaggcttgcattgttttctgcaatttatggtttttaattcgatatggctttcatttcagttcgtttcacatccaaaacctcactgtttctcccatgttttattttcgtgcaggatggacgcatagattataacgagtttgtggccatgatgcagaaaggaactattggtggccctgctaagaagggcctacaaaattccttcagcattgcttttagagagggtcgcaaactttagttacgtaattggcaacaaggttcttatttctttcttcctttgtattttttttttttgattttttttttattaagagtttcttgagagatcaagattgtacagtaagaagcttaaatgctggcctaaggtatagccggggctcatttatgctcttctttgaattcatggagatctcttttgtgtttgcaatgacctttgcagccatactatattttgtacacaatgagagaaaaaaaatgatttctttaccttttactttaatttatgaaactcattgaaaatatattatgctcttctcttcacagaacctacattttatcaacaacccaattttctaaacgaattggtttctgagtttcttcctttggttttgtatcattttctcttcattctttactattcttctcataattgtttcttggaatcaaagtggatgaaagtatttttcacataattttgttgtgtttcagtgacaactattctgcctcttaaaaaaagaaatttgctaatacgatgaaagaagtaataattatttattagattacaaatttgttaattgaaatgaagtctgtttgtgtcatttctctcattaaaattttatatttaatcatagtacacatcttttgaaatggattttggattgtcatcttttcattaaaaagttaaataagttatgatatgtagattttatataatgtactctaaactcaattttaatgattaatgcccctccaatcaattcaattattttgttgaatgtttgatcgctatgtggacgaacctgatacgacttatggttcaaattgtccaggattatggagttctatcttaaaattaattagttataaatggagtagtttatattttatatatggctcgtttggaattccgtattaggtcgtattgtatt

SEQ ID NO: 219274 - DNA, 2015 bp, Cannabis indica
gttaaactacaattttgtctgtataatatatatataaaaatctaacgaacaagaaaagctaattaatggtaccaaataccaatgcatgtgaacaaatgatggcttttaattacccacttcaaaagaagcctttgaaattgcttttattttcttattatgaatcctacaaaaattgtttgtctcagtacacaaaaccaagtcacccagttagtccgctagtcacttttctctgtctttctctctctcatatttcatttcccagaaattgtcaacagtcgtcatttactctcatttctctctctcctttcatgatgtttcctttcctataaaagtatgtacgtactcatacgataagtactcttttatgaaagagttagctacccaaagagagagagagaaagtgagcatgtatacggtatacctataatttatacatatataatatataagctgtatataatatatttatttataattaaaaagatattaaagggtattgacggtgctagcactctaaaatatagataaatgctaaaggttactagtggtgtctagcaccctcctatgtgttaatattgcttttttacaactaagtatcgggtctcatataatttaatataaaacttttatggagtatcgctagcaaatcgtaatgtgacatgtcgagaaggtgctagacactactggtgtctaatagcaatgctacaaaaatataatatcaaattttgtttattttatttaataaatattattaaaaattgataattaattatatggtgacaatttaccttgatactatagtaatgcgttatgtaatcaattgcagtattaagagttggaaaatcgatgagaggaagaaacatatttccaaagtcattgtcaaatgaaaaattaagaatttcaaaacccttttataattaatgcattttaaattttttatttgtcaagttttctttctttatgtctgaatatttcctttacataaatatttatgtgcaagctcaagcatgagccctcgtttttgtgaccgtatatagtatagagggagatataaatatatacattgccgtaataaatttggttttcctcataaattacttgttactggcccgttaataaagtctttgatatctgtgtttatgggatgtcattcatatttaatattagtaagaatgttatttggcacattaaagtaatttataattaattagccgtttaataaaatatttattaaattaaaatatggagtatccatatccattttatccaataatttgtcacatcttataaatccatggaaagcttacccatttatatatatatgtgttcattcgtaattaaactcttcttctactagactagtactttagaacaaccaaatataaagaaactttattatatgacatgtacttaacagttctagcgacaagtagcaattaataatgtctgaattacatatgcccactttttgtacggaactgaaatcaaatatatatatataaatgaatttaattcattcaaatatttatatacatatatatttatatgaaaatagatatgataacactaataataactttaaaatgttagctagagctcatcatctatcaattattactgtttttagaggaaatattttttacaataattaaaatataaccaataaaacaaaaagtcatgagcagtccgataattctacctaaactacttctcatcatgttagcgatcattaagaattttccacatatattagccaatatactttccacctattagccatttggggtacaataatttctaataatatcatgttacattaataatttgtaccttatttttaagagcactcttacaaggcacctagggtgcacaacactggaattaaataatatgtctctcatgtatatattattattcttcaaataaaaagatatataagattggaataattacataaggcaccattatatttttacgttcaaagattatttttttcacatttttacggttttcca

SEQ ID NO: 219275 - DNA, 5483 bp, Cannabis indica
cgaagggaaaaattactaattagccttaaaaagtattatctttgtatttatgtgctaaaaaacgtaatggttgacacactagattaaattaattaattgattagttacaaacaatgacatatatatattcatattaatatgtaattagtgtttttgtgtaaaatagttatatagaagagtgcctatcatacactttttaatttatttttgttaaaaaataaataaaatcatgttttttttcgttatgtcagcttctaagcatacaacaatataataaacgattttttattgttttttttccctgataatttaaaaattaattaaacaaatcgaatacatagatataatatttataatatttagaaaaaaaaaaaatagtcaagtataattgaatgcatttaactggttttggttctgaaaaagtgaccaagttcacttgatccatatgttaatgaaaaatccatttactaataaaataatatataagtaaatcattatataccattgttaattaatttaatccttaattcgttccacgtggcatttaattaagcttcctctggtgattatatatataaactatttgatcactttgtaataatttttcatttttaaaatgataattccaatttgatttatttaattggaatctgaccaccaccctgcattgattgttattttttatttatatatacacagaaaaatatcacgtgacgtcctttattaagtatccatattaatcaaccaccaaacttcatatgattattaatatttttagcatgaaaaataatttaattattatatattaacaattattgtaattattatgaatatgataaaaccaacattgcagccacatatattatacacatgtacatatatgtaattatttaattaagactatttataaattttaagaaaatttaaatataatgacgaaaataaaatttaattacctgttacttaatatgcgcataaaagaaaacagtaacgtgtacacaatatgtaaattttatttttagtattataaaatatttaaaatgttttgaaaatttacaagggattctaaataatataatatatacaatcatacaaaaaattaaatatgtatcgaaacagatcaaggattaaacactcttttaaactgaaaaatgtattgtatacttatcctatattatatatttttaacgtatatattagaacgttgttgtagtatactttaaattacatgcacgtgttgaaactttctcaattatttatttcgtaaaaattgaaagaactagaccaacgaccatgaatcactaattaatgataatataacttttatattcatttggtttattcggaaaaaaaaaaagagaaattaactttatttatatatgtaaaaaaaatgttgacaattattattattatattatttgaagaaaaacactaccgtattcgaaatttttcattcaattaatgtagggttttaatcttaagttttggatcacttaaaataataaaaaagcattaatcataaggtgttaatgatatcattattataataatacataattaagtgtacttatatatattgtgatgtggtaaaaaaattacatagtaaaaattatatatattttaatttaaaaatagtaaaaaaaatcacgattataatttttatttaaagtaaatataaatatttttgagaaatttaacaacaagaaaatgacataaaagtaaaaatatttaaaattatgtacaaccataattttatttatttttgttattattaatttttttttttgttattgttattattaattttttttttgtatatttttaaaataatcttaatattttttataacaatttagtccctcacaaaataaaaactagtgtattagtgcttatatataataattctctaaatattggaaggtgacatatttgcataggttacccgtgtccggtggccactaacacaatacttttatatataaaataaaaaaaatatttatatattttttatatacacaaaatctaataagtataaattatatatataataatagtggatggatcatttggtagctttataagaataaaaaaattaaggataattaatgaagattatattaaacataatggctcacgtaaggtaaattaattaattaattaatttttatgataattgtatatattcatctaattacaatgaactagattagactggtcataagtagtagatatttagtcaataaattacaaagaccaaaataagaataggttcacttggtttgaacttggactatgtactattgtgttcaaatcaattaaattaatattttaatttttattcatttatattatatttataataatctattattaattaataatccgaatctttttatttgttcttttgtgcatgtgttgtggaagggtatctttgtcatttactactaagcaagttttgatttttcttttcccattatagaactaatagctatatactattatagtaccttccaaatatggacactaattgctaatttaatcacaattaatatttaaaacaaagggttttgtttctaaattatggtcataataaattaaaaaaaaaaacaaatctatggaaaaataataatatgcttatttatttttgcatgataatgaaatgatttcaacactagtcccatcaatcttaaattttatattatttttaactacgagcaaaaatcgagctttgagatgagattaaatgagtcttataaaaaaattataaataaatgtagagtttttaaaaattattaattttttttttttgagttgggtggaccttaagtgcggacttagcccgccttaactgaaatccaaactagaaagtagttgtaatcatataaccactttaactattttttacttcttcttctaaaacttcacttaagaggtctaagacccttattaggaagccaaaccaagaacaatccacaagtaaagtttgaatttttagacataatattatccacaaggatatgatttaggtgacaatttttgtttgtttgtatatagacacaaaaatataaaattaatattagtatattttactcaatggaatattctcttcgtccttaatttattacctaatcactaaaatatataattaactattcactacacacgagtcaaaacataatagctcgtataatttaataattaattaatttaaatagatagatagatacatgtacaagaaaaaaaatccaaattggattgattttacagatttttcaaacatctcagtttcaacaaaaatctaactgaaaaaaaaaaaaaacagatttataatctttgatcaaaatcaaagtactatataatttttttggattaatatttttgtttaaattgaattatttaaaagctgttctaaatagtctgctcctaaatcttcaaaaaccaccacgttttctattctcaaatccctttctttgcttttcttgttcacaatttttcttctcattgaatgttttcttttgagtgccaccaccggcgaacacccgtcatcaccgccaccaccaccgccgccattcagctcgcgaagagactctctaaccgtttcaacgggaaaattgagtatagctgcgggtccacgcatcgaaaaagcagcttgatcataggctaaagctgcatcttcagcactatcaaatgttccaagccaaactctaattccatgtcgggttgaatccctaatttcggccgcgaatttcccccacggccttttccgaacgcctcggtacgacttctccttcctagaattcacttcgtcttccttagttggactctctattgctttgtatgtttcttgacttgtgttggaaagtaaaccatagagaagcatttcttcggaatcattttcgttgaaagggagagaattttcggttgaatcccaaccgaaaggcggttcgggtgaaccgaaggaagattccggcgataaatcggaagatttagaggtgaagaaagaggactccatttttttctcttcaataaaatttactctgttttttcaggttgctctgttttttgagtaagcaaaatttggatgctctgcctttaaatatttatactaaaaaaataagagaggggtaaaattggaattttagagagttaaagaagggtaaaacggtaaaagccgccggggtgtggtggctatattatataaataaatatatttggtggggtccatttgcaatttgacaaaaataaggataatttcaacacatgggtcaattgaaaggcttgaaagagaatggtaaggcggccaggtcagactgccaaatagtagtgacgtcattaatttcatttgtcctacgtggcatcatgaggggtcagtgactagtcaagggacctttaattgtgtacacgtggcaatcacgtgggccaatgttgatgataatgaacgtgagccatgactttatttatttatttttgaataatctttggaggatattaacttaaatagaataaatttaagttaatatttatttttcttttggcatcaattttaaagttttttagtgaaaatattgtgtgtggatgttataagtaatgctatatgtaaatatatattatctataataatagcttatttatttaaaataagactttaatacttttttaattttttttaaaatataaaaaaatatatatataaaacatcacattgtatacagtgtaatattttgttatatgttttaagtatattatcatatcattatattctttgaatagtcaatataatttgataatttattatgataaattaaataatcaatgaaggtttacccttatatgagagaagattcaaagttgtatagtattatatattcaatttgattttttacaggggacattatttttgtctttattgtagtgttttttatttttggaatttcaagaaattatgttttaatatttttatatcatgtcactataattaactatagctctattatatatatactgttattttttaatttttttaaacaccgaaacaataaatgtcactacataaaaaagtgatgattttacctaaaaaatttcatatataataaaaataatatagacttgtattttatttttaacttttcttattggatttggatatactacataagcacatgggtttatacttaacggtaagaataattagtgtttctatgttctcaaagaaaaataaatgcatgatgtgaggtataatattatatgttggtgcatgggaaacttcctcttccacctaattgatcaattatacaaaaactatttatatatatatagtattcatgcataaatatatataggtttttttatataattattttaattacaatattgaccaacatacatactttattcttaaagaaatacattttggacaaccatgcaaattatattatagttgagaggttatatgttgaaactttacttaaaattttataaaatat

SEQ ID NO: 219276 - DNA, 6553 bp, Cannabis indica
tattctaagatagagatgtgaaagtggaaaatacacaagaaagaatatattattagttacatacctcccatcagcatactcaaaaatgtaaggaacagttggaattgtagaaataacatgagctccgtattcctaaaatttaaataaacatatttaaattcgaaatatttatagccatcaccaaaaagaaattatgatcacaatgccacatagcaggaaaaaggggacatggatataataacaatgatcactatttttccaggcaaataggtttttgtttatcattgccgatgtttgcagttattatcaccatccttttgatttttttgtttaaaaggctatggctaagtaggatactagatgatagaaattaaaagcaaaagcaaaattgaaaaaaaaaaaaaggtgggaatggcattttctccatcaatacttaatattctatacctgctcaagtctctgatgaaaaacatccatgtgaagcaagcctaggaaaccacacctgtggataaacataagaatgataaaaatatcccatatgaagtaaatgtaacaagacaacaaatgatgtttaaattaacatcatttataaatagtaaaatagtaaaatagtgagctattggtgccaaacctgaaacctaaacctagtgctgtactactctctttagcaatggaaacactggcatcattacatgtcaatctctctatcgcatggttaagcgcctcaaaatctgatccatcagcaggataaagaccagagaataccatatgtcttacaggcttgaaccctatcatttttaaaccactattcaactgttaacaaaacatccaattatttttcatttgataaaaatgaagaaaaagaaactgactaaatataccaggaagaggctcaacaacacttttgctatgatgaagggtgtctccaattcgtgcctctttggtcgaacgcatgccactcacaacataacccacttgtccagtaaggagtattccagtagaagtgagttcaggatgcatgatcccaacatccaaaatatcataagattggccagtggatactgaagaaatcttgtccccttttcgcaacacgccatcaacaacagcaacatggcatattactcctttgtattcatcataatatgaatccaacaaaagcattcgtagaggtgaattgtgcaccccaggaggaggtggtatacgctcaatgactgcaggaagtatgtgctcaagaccaatcccggttttcgcagatgttaaaagagcatcagcagggtcaagatcaaacatggactttaattgagctataacccggtcaggatcagcagttggctgatcaatcttgtttataacaggtattatagttaagttagattcaaaagcaagataaaagttagcaacagtttgtgcttgaacaccctgtgcagcatctacaaccaaaagggctccttggcaagctgctaatgaccttgaaacttcatagctaaagtccacatgaccaggtgtatcaatcaaattcaacaaaaaactctgttcctcttgcttattatcactaccaacaccaagactagaatggtggttgtagaacatggttgccgtctgggctttcacagtgattcctctttccctctctacctaagacaatcattacaagaaaatgaaaaaaaatggtctcttggatgaaaagggcttgaagagcaaactctttcgaacaatgctaattacaacttcttagtaaatctccacgcccgaaatcacattccaaaatatttttcaccatgtcaatatttgtcatagttatcgttcatgcagatttttgaaaaattcggaatagtttaaagtattgaaaatagagttattgacattcaagtttaccatgagtgttgaaaaaaaacttaaaatctatttccgacactatagactacttcaattttttaaaaaatttacagaaataatattgcacctataatgaactgttatggaaaaaacaaatttgaaaaaatattcacagtcctcaaccccttttatgttcattatctacaccttactatattgcccaaaatcatcaagtactttatcattacatacgaactacgaacgaaaaaactgaaacaaacccatcaaaggtgggataagtacctgcaatttgtcaaggtactgaggttgacccttgcctcgtttaatggtcccagtgagctccaaaagcctgtcagcgagcgtagacttgccatgatcgatgtgggcaataatagaaaagttcctaaccctttcaagagggtactggttcaaatctatcacattttctgtgctgttttggcgagaattagaacaaaatgtttgactcaatccaacacggtggtgagaattcaatcttccgagaaatgggttacctccaaataatgaggaattgtgcaaaagagacaagtacttagatgatttcagagactttgaagctcttctgaaagaacccatttggggtttaacgagctgtggaacagaagaaactcccagcggcgaggaagccgaacgcagaagtttgtacttgcttttaccgaatcacgctgatttcagctcttgcgaaattacgggcctggggtgaatcttattgggccacaggcccagggtgtgaaaatgccgggcccatacaaaaatctgaagaaatttacacataactgagttttgtagcaggaaaataacattatttttatattattgcaacattataaaatataacgtgaaaacaatatcttttataaaacaacttaaaaacaacagtcaataaagaacataaaaaagttcaaaaaaatattccataaattttctttcaggttgattttaggtattttgaaaataatctcaaaatcttgagttggagtatcttcaacccaagatgaaaattgaaaatgatatgtcgtctgtaatttagaaacgccatttcgaaataattgttaataatttctattttggcaacaaacactaagagggcattcctattcaaaaattaattacacctaacaccttatggtgccactaagtactagtttcctataacatttctcaaatcaaatgtgctaattacaaaagataaaagagctacacgccaattaatagattgttgaacaaaatgtaaagaaacattactaaaattattcaaaagactcctataattacgaaccaacaaatggaattctaaaaacatatacaaattactctcaattgcttatacacaaacatgcgtgatagcacgttaaatggtaaaagaaacggtttgaattataattttaacacctcaaactataattattagcgcactatataggacaccaaagaagtctcataatttataagtatatacaaaagaagaaagtaatgatgataataatacacatataaattgtactactaaaacaaacctttgacaattatgtggttgaaataatcatgacaatatgtagtagtgtgtgaagaaagaaaccagtactagttccggccagtagtagtgcctacatacatagatgctactctctcagtctcagccaaaaagcctgtgtgtgtccttgttttgaccgttggaggcatcttgtctatcaattgctgtacaagtacttgaagataaggtacgtacttagaatccaacataagataagatcaattctatatatcaactcttagattccctcctatagcaaagctggtgtggtggttaaaataatttctcacccaacccaagatcagtaaaaaaaagttataaacactatatatgttcggtaggagagacacaatatggggtggaggggagagtgacatcttgtttggtacgagagagatgagtgaatattttccttcaaaatttaaaaatttaatctctccaaatttgggaggagatggtagaaaaacacaaatcaaaatttataaaatataataaaattcaaacgaattattttataattttactaatttttttttttaattcttccaacattacacctaacatcaaacaatcaactattatttccatgcttcttactttccatcatcctctgtaaaactttccaatccatggaagaattattacactactcaatatggttttaattttttttttttaaacttaaatatgacaactttaagtttaacctttttttaatgacatttcttttttgtttttgaattatttcaaggtatttattatacggttataccatgtacatgtaaatttaaaatttaaaattaaaatttaatctttagataaattgcttatcaaagaaccttcatcaagaaaatgattttaattatataaaaataaaatttatatacaactttttaagtttttacctattcgacgacgatccgtcaaaacaaaactcaccaaaaatcttttatcaagaaattaattttttcatttgtatacgcccttcattttactcactgttttttctaccaacagagccttaaaagtggcagttgtttgtgtgtatctattgcagcccctatatgcacggtgtcggtggctcataaaaacaacaattaataataatgaaaatcattattcctctttatcttaattgtctttcctctctattatttcttttacttttgggcgtttcatcatcaaatcatgcgaaaccctttattaaatattttcattctgttttttctattttctacaacaaaacatcaaatgactctctctctctctttctgtgggatagaaaaatgaaatgattataagttggtgaagttatttgtttttgctgcattataatttatatatgtttccaagaaaatccaattgcttgtagtgactattttcaagtacttaattatatatatatagagagagaaagaataaagactccatcatatatatcatgtgggtgcaattaaaacaaagatacataataatggtaggacatgatgatgagccgtctcatttaatttgaaagctacatattatcatttccattattaatttctgaattatatatatatagtttttgatagttagttgatcataataaatttacattgaaagaatattaactctcattttggatcccaacttttattccactctttatattattacactaaaaacaaaactctgatctttacatactcttccaaaaaaacgcaagtacgtagcaacttctcctatatatatcgtacgttcagaggattaggtatggcaatggttatggcacccttcatttctctctctctatatatactgtttgacacgtggagtatagtgcatgtatgttgaacctgaaataatcaacataaattaatttaataactataacaaaatatcactaaatatttatacatggcagtactaagtactattgccctataatgcttcgtattggacaaacattgctaaagcatcaacaaaatttactgtgttgggttggcattggtgccaagttgacacatcaattgtaaacaaatattttctgacgtgcctaatatacccatttaatcaaaatttatgaaattacactaataatattacatcaacttttattgtgtttgacaccttaacaactcttaaggtctagtcttaatttccctttttaaaatcccatttcaagctacaattaataacgaacgaaatgagctactattcagccacattattgtcgagagaaaacagtactacgatttatttatttagtcattttatgagttaattaaaactttccttatctaatttttacgtctataagtttacctctacaggcataaagttgaccaaagtctagtctagtgaataattcacacaattgaatttttctcagtaactgtaattgaccaaataaaacatacactgttctctaatttgaagtttattattactatttaaaatgttagtgacaatagaatagagccaaagggctggattgaccatgccagagcagactaggcctagctagtggggtctacactaactgagcttgctcgtacatgtgacacatcacattagctttactacttaaatgagaaattcatcaaaatcttgtcccataccacatcaaacttcatcatcatcatcatctcttataatactttttcattctcttttctcttctctgcccatgaagaatcttctctgttgctaaaataaggtagtctcagatctctagaaacagtgtttgtgtggaaatgtttagattttttgcttgctttttatggaaaaaatttgtgtacttgtctcatttatatgttggagttcttacttggattattttctgtcaaaccagaagaaccatttttttagctttcagtttgtgacatgacatgatttatttgatcaaatattaaccatgcatgcagggttaagaaaaagaaggaagaacacataattcttgcaatgggaaaatctccaggaaagtggctcaagactctgctttttgggaagaaattaccatctaaatcaaaacttccaaaggaaatctcatttaatagtaatgtcaagaaagcagcattattacaggagaaagatcaggcttcccctgcatccaaaacggtatcgtttagtgacatgcca

SEQ ID NO: 219277 - DNA, 5521 bp, Cannabis indica
tatattttaactctatataatctaatctaacttattttttaagagacctactaaatttaaaataacttccgacttaaaatatatttttcattcacaaaatatatacaaatatataatttatattttaataaataaattatattattattctcacaaataatttaaatgtagtttataattatcttactacttttatcaataaatataacatgagaatcattattataacattgttactcgcaccataccaccactactactttaatttttttaaaagcccaatacttacatgcacacatatatattaaaatatattattatttttttttttgtatgttctagattaaattatttaatcatgcttataatgtaaatattaaagcttaaatagccatctcaaactaatgaatcaaccaaattcaaccccaatattattgtaccaaacaagattagattgtacaattaaaaataattgaatagtttatagtttttccaaagcatcataattgagttggccattaaaatacctctaattcagtcaacacaattcacgagtatccctactttgtaaggataatttcactaatatttaaaccactcccatttcataaatacaaaaatatttaaaagtattttttttttctgaatatattaaaaaatatttttgattaagttattattattttgagaaaaaattgattaaattttgttctgaaatacatttgtactaatttcgctgattaaattattagctctgaaggaggagagcagtgtaatgtgaaacccacatgtgtgtgggtgtgaacagaaataaataaaaattaagaaggaaaatagaaaagaaaaagaaaaatagagaaagtagacttttattggagaaaaagagaaaactaaccgttacaaatggacacgtggcaggcagtggatccacctgtctcctttggattctctgtgctaagctaatcactcttaccatatcccatctcttccacactctctccctctagtattcctttcttgtttgtttcctcattattctcttcttattaggcaaagaatacaatcccatccctctcttctctcctctctccacccgtgactctcaatccatcttcttcttcctcttcagtttttctctaatgggttttaactacaatcactgacaatgtcaaacccttctcccaaatcttcaacctttaacttcttcttcacttacttcgccttgtgttccgcaattttgaccggtgccgccactgaattcgacttcggcaccctgactttgagtagtttgaagcttttgggagatgcccatttgaacaatggcagtgttcgactcacacgagaccttccggttcccaactctggctccggcagagcgctctacaccaaaccagttagattccggcagatcggaactcacttaccgacgagcttctccacattctttactttctcagttatgaatctcaatccttcttccatcggtggaggacttgctttcataatatcaccagacgatgaggcagtcggcgacgccggcgggtcactgggcctcgtgattacagaagggccagcttctgggtctggttttctggcggttgaatttgatacccttatggacgtggagtacaaggacataaatggtaaccatgtagggtttgatctgaacagtatggtttcctctgcagtggcggatttaggagctgttgatatcgatctaaaaagcggtgaccttgtgaatgcttggatcgagtacgacgggtcaactagggtcttcaatgtatccgtttcgtattcgaatctcaagccgaaagaaccccttttgtcctttccgcttgatctcgatcagttcgtgaacgattttatgtacgtggggttctctggttcgactcagggaagcactgaggttcatagtattgactggtggagcttctcatcttctttcgacgcatcttcatcttcttcttctccgccacctcctcctccaacggctactttgatgaatccaacggcgaacacagtaagatcatcaccaccaccatcaatggcaccctctaattcagcaccaagtacaaccattacggagaagaacagtaaatcttcatcttgccataaccaactctgcaaacagggtcctggagctgtagctggagttgtcacagctagcgctttcgttttcgccttattggccggagttctcatctgggcttactccaagaagaccaaacaactcaagaaatcttcagattcttcattcgcatcagaaatcatcagaatgccaaaggaattcacatacaaacagctcagagtcgccactaagtgcttcaacgctaacagaatcattggccatggcgctttcgggactgtttacaaaggcatattgccagacacaggtgacattatcgccgtcaagagatgcagccatagtggccaaggaaaggaggagtttctatcagagttatccataattggaacactccgccaccgcaatctcgttagattacaaggttggtgccacgaaaaaggggaaattctcttagtctacgatttaatgcctaacggtagcctcgacaaggcactattcgaagcaagaactcctctcccatggcttcaccggaaaaaaaatcctactcggcgtggcctcagctctcgcatatctccaccaagagtgcgaaaaccaagtcattcacagagacataaagtcaagcaacatcatgctggacgaaggtttcaatgcccggttaggagatttcggtttagctcggcagatagagcacgacaaatcaccggatgccacagtcgcggcaggaacaatggggtacttagcgccggagtatcttctcaccggaagagctagcgagaaaaccgacgtgttcagctacggcgcggtgattctcgaagtggctagcgggagaagaccaatcgagagagaggtcacgggggccggaaaatttggggtggcaagcaatttggtggagtgggtttggagtttgcacagggaagggaagctactaacggcggcggacgatagactcgagggtgagtacgaagagggtgagatgagaagggttttgcttgttgggcttttgtgttcgcatccggacccgttggcccggcccactatgagagcggtggtccaaatgctggtgggtgaggctgaggtgccggtggttccgagagctaagccctccaccactttcagtacttctcatcttttgctcagtttgcaagacagtgtttctgactgtaatgatggtatgatgatcactctctcttcttcctcgtcggagaacagcttcgacgatcgtctcgatatagtctaggtttgatccaacggtggatattgggagttaatgggattttgtttaattgatttaattaaaaaaaaaaagtattctcttaatattgtatttattgtttcgatattgaattaatttttgtacgtaaaacacaataattgacatgaaatataagaattttttctttaaatcttttatccaattgtctcaaattttaggtttcatgttgtatgccattaatactaaaattaattttcatcttgccaaaattatatatatatttattttcaaaaaattaatggaaaagtgcaaagattattatgaaaaattattaggtaagtataaataatgcaatataatcatggttaatagaaatttctattacaatttttctttttaatttcttatttgggaattgaaagcctaaagcattctttcgaaaaaaaaaaatgaaaatgaaagcttaaagcagcttagagcctataccctcaaaatgttaatatgacgattttttttttatatcaaatatacatattatgtcaaatataatcaaattatgttttcaaaaaatatatatacataatcaaattaatgcacatccttactttaagatcttacactaatctagtaaaaaattattgacgtaattataataattcagataacatagtactcatgcatggaacattttcacccaatgacgttacaagatgttggcattacccattccaattaggaatttgggcaatcaaagaggaaaaatatatgatcattttgtttatttattgaagagtcgcctatatacttttatttaatgattatattttacttttatttttcttttatattattagaaaatacttaaatatagtcacgaaaaatgtttgtacaaagagatattttttttattatgtgtcactctatagttttatattaataattaattaattcttttatattttttatttttttgtaataatttgatgacccttaataaggaaagttactaaaatttaatattgtggactcttaagcctcatttattaaaagatcattaaatgaagtgtcttacatgggaattttttttaaagaaacacttctacaatattttcgttggaatttgaaaattgaatattatgaacacattctacatataaaactaaggttttaattacaattaattaatcaaataacactaatttttttaccacagcttgtatgacactgttagtatggctttcgataaatattattcacttgaagattacttatattgtatcagcatacatataatttgttcaccaatcaaaatacaattaagaaatcctataatctatcactcatcctttttatcatttatgtataaaagagagaaagtgacatacatacatattacattgatcaaacgaaaaatattgcagaaatgtttctttagaaaaaaaaattcccgtgtaagacacctcatttgaagatcttttagtatatgaagcttaagagtcttttttttttttaagaaaagcgtacttatattataatcaaacgcagttagaccttgcggtcattacaaaacaggtgttccgggatagaggacatcagaatactaccgaacctttggtgggtaaacgcccacttagccacattatgggcagcaaaattacagtttctgctaatatcattaaaaaatacaattaacaaaataaggagaggatctaagacaaaaagagacgtagttctcaatctcccaacgggtaacctccctattgcgagcattgatcactactctcgagtcactctcgataatattatgtttcgcgacatccagagtgacagcaagccgctgcttctccacataaagcattagcaaaatccagcttagaagtatgcacccagatcaccctacctagataatcccttgccacgaccgctgaacacatgttgtctaatcccaatttaacatcacgattgagcttcaaccagtcctaggggtagtacgccaggcatccagccggcgcggtggtacgcaagggaacaaagaagcatggtgaactgcaaaagaggagcgaatattgtctatacacttataaacatcgaccagaccattattatgtaccttttcatttcgggtccgccaaatagtatccacagttagcgatgcgtaaaggaatacctcatcggcattagtgcccttgtttttaaggtcccagatgaatttgacccagtcc

SEQ ID NO: 219278 - DNA, 4134 bp, Cannabis indica
atatatatatatatatgcacatagcttgtttgttagtgttaatcaatagctcaaaataacagtattatagatagattttatcagtctgtctgcacattttgattttaattaaatgcttctgaaagattttattttaagtagcaactagtttaatttttatgaaaatagctctaatatatggagacaaggatttgagaatattacataatgctctttgatgttacttcacttggagagaattaacaattatttggctaggttagctccagggccctaggcataggcgggctaggcccgcgcctagggcccgctcattttaagggcccaaataaaaaaatacctttcaaaaaatattcatatttttttaataatttttaaaaatattatttatagggccaaaaaaaatttgcttatagcccatttcaactcaaggccggccctgattagctcttactagagagtttcgttatgtttggtgtgtctaccctaattatattgcatttgctattttcttgaatgattcctcttggttctaaagaaaaacacccaattatttgatgaaaacacaaaaataagattgagaatggtaataataatgaaattgaatcgctttatttatttttatccttaattagaaaaattaaatgacatttcaatattttaaaatgcaacaaataaaaaaataaaattaaaatccccaaccaaatgtaccctttgttattgttccatggcttaaatgtttaggttgcctaagaatagaaacaaaaataggaatagaatgaaattaaatttaaaatacataaaaaaaatttataaacaatggaatggtcttttctttatttgtaaatagaatagtcattctaccaaaatgatggaaaagtcattctattagaattacattctaatattttaaaatacaacacgacaaaggattaaattaaaaattatctcatttctatttcattacctctaaccaaatactatcttagctggcatttggttggaaggaatgaaaacataagaatatgaatgaaaattagaaaaggaatagaaatggaatgaaatcaaatttaaaattgataaaaaaaatgtttaaaattttttccatcttgcattggaatggtcattcttttcatttcaaaatagaatagtcattcaaccaaaaacaataaaaatcttgaaatgacattccaatactttaaaatgtaaccaaataaaaaaataaaataaaaatagtttcatttcagtagtgtacatgcattatagcttgtactatgtttggcagtaataactaataaggaaagtggtttggctatttacaccatatttcaaaaacaaaacaggattacatttctatagaattcacttgtataaattgtgaaatctaaagatacatcttaactgaaattttcaattattatcaatatgtatcacaatttatgaaggtacaaatcacacattattcatgcaatagaaaatgcaaactgtaactgaagatacaatcagactaagtgatttaatgtccataaatcacaaagaagctggttgaagaacacaatacacaagaatgagtgagaattaaaccaaaaacagctttcacaaacaatcataatttggataataatggccatattttgtatatatatatatacataaagggaaagaggaaggaaggggagcacttttccctttgttattgaagaaatgagagaagaattgaaaaagcagtcttgtgttgcttggtaggaggaagtagttgagagaagggagccattttcaattgtacaatactaacacttgagcttgactataatcacctcatttctctcctttctcccacttcaccctcttactaaacacactcattaagtcctatatttgaatttgttatttcaagcttggttacctttcctctgtccaatctccatgaggaaattatcgatctaacaagccatgcataaaacaaaaagatcatttggaaaacttaagtggttattagtaacaccctatcttcaaattcttatgattttgccaggaaaaatcacacaaccaaatccaaattttttcaacaggaactagaaaaaatatctatgtaaaagccttaactgaggatagaatacagaccataaaagatattaattatacctggaagactgggaaacagtcatggcctcagaataaccacttgggtcagattcccttttagtaagtatatcaacatcagacccaaagtgatgaatgaccccacaagccacaaacttcatcatgttcactagtccttatgtgtttttttctttctcatgcatcattgtcctctcattactcacaatctaacaccaaaagctatattaaaagtcatgtgggcccacttgtgccgttttctaagtcttagaaagggaataaaaaacgcgtaatagcattatcaacttacaaccagatattttttttctctttgctgctatgaatctgtttactcagtcaaagactactcataaaaaaccatgcctagttcatgttccaccatacgtaatttttcattttttttgtgggaaaagaaagaaaatatctgttttgccgtattttagggtccaaataaaacattttgtaaagactttgaaaagcaaagagtcaaggccttgaatgggattaataaatccaagagtatgggaaggttcgtcgtgagtaacccattttacttctttttttcttcaacgtatgttgttcttaaaaactatccaaatttccaagtcaacaactaagtcaagcagaaaagcctctccttaataaaacgttgtggcttagcaaaaaaaggagtataaacctccaatccaacctctcctgttttgcattagaattctagaataattattcctgggatgttcaacctcaggatgggtcctactactcctctgcttgctttctttttcttctttctcagtcatcttctgcttccaagctccgctgaagggaagagaattcctcgtcctcgtaactgtacacaattcccttgtggaaaacttggcatgattggtttcccttttagcaatatcagtagacctgattgtggggtgttcacactgaactgttcggaagaaaatgatccaaagatccaatttaagaaaggaggaggctggtatggtgtaaaaaatatcaatcaaccagattttagttcttttgtggtcttggagaaaacactacccttttactggaatcattccagggatagatgtaaacttatcaatgatttctctgctcccacacccaacactaacatttcattactcttctcttcctataactttacagctgagaaattgttcacactttacaattgcagccacaatgttagcatcactccatctttattagatgttgataaaactagttgccaaggagactatgacatctactgcaacactcaaaacataagttttccattcaaacaacaatgtccaattatcactcttccattttcacatccacctccacctccatatccttatcctcatcaattgatctttcaagtggaaataaatcgtgattgttttaaatgccgcttttttaatagagggacatgctacaatgataaagataataaatttcggtgtattttgcattcaaaaggtatttggtattggagcacagcactaacactaatcttggggagtcagttcctcaatgcttcatatgcttgttttttactctctttcaaaccatacactctaatgattcttctcatcaatttacacaacttatttattgtcatatgcacgtggcctggctatttgttaatgtcaatcattatgaaaaatatgtacaataatattttagatacaaatttcatataatatgagtctggacatgtacattttgatttttgtaaactctaaccatctatgtctctctcccattttatttctttaactaattacagatgatttattcatgaatgtttgttgtttcaggaaaaaagaagagaaaattaataataggaataatagcaggtaagaaacatgagacatcattctggagataaaaaaatcttacattgattctgtgcattcactctgtacgctaacatatgatgactttcatatttcagggttgggttcgggagttcttttaactacaatt

SEQ ID NO: 219279 - DNA, 4176 bp, Cannabis indica
atatatatatatacttaattgattaattaagaaaagtagccaaacgcttaatcaaggccttggcattttcagaattgggattcagaatatggaagacatggtcctcttcaagtgtctccataatttctatggtccctccccaacccaaactactactcattttagctactttttcgtagtaaagccaaccgcgatctctcaatatgtccttccctgctacaacaaccagtatcttaggacaagtttctaacccttctaagctcggagctccctctgcaaaagggtttatgagagggtcatcatttcccttgtctgaagggcaaaccacactccaccaccggtccaccatactcttccgaactaagtcatgcacctccgacccaatcgcttcttttccccaaaagtacggctgaattgaagcaaccccacatatcttgatcagtcttcgactcgggttctgctccgatattcggcagattaggtggtgggcaatgttggctccggcgctatctccagcgaggaaaatccggttgaaatcaacgtggtttttcagccacggttcctccgtagccggtgactgaacaccaccgccgctgctggaatgtgaagcgacccaactgagcgcctcccaacagtcatcataagccgccggaagagggttctccggcgcaagcctgtaattgacggaaacaattatgactttggcctctgcggccagctgattgaggctgttgtgataaagtgggtcggcggttgatgatatgaagaaacctcctccatgaaagtaaaccacgagtggaaggagcttaatatgcaatggggtccggtacagtcgagctgagacgcctgtttgaggagcaatgattacatctttagagacaaccccagtttgaggatcgagaccagtgggtgctatttgggtcccggcgagtctctcgatggttccatctttgtagactcgaaggtaagggaaggcttcgatggagacttgttgtggtatagttgttgagtcaagattgtgtgaacccataatttatatttatttatctacacagattttgagtgaaaggaggttttgctactcttaaatagagatcaagaagacaaggatggataatattcaaagtcaaagatggatttcgtaatggtgcttaatataagtatcatattgtttcttttatatataatatctattcaccaaccaacaacaacctaccaagtaattaattatagagcattaatcatcaaaaaggaattaattatagagttgtttaaccaaagagaaaggctaaaagcgctaatactcccaataccactatgacttatcatgcatatcattatgggttacatattttaaattgaataatttttataaaatattattatggattattttacaaatacataaaaattacaaaaagaggattaaataagcacatacgaagttacactacacattgcaaacaaacattaaaaataaatattttcaataagtcaaatgctcactgctacttaataaagtaactatttcaatactgtaatctaataagacaaccatttcaatactgatgtctaataagacaactatttttattatcagtgtttaataagatgatcatttcaataatgatgtctaataacacaatcatttcaagaaaatttacatttgagaacattagttgtaatttaattacaaaaatctcgagggttaattcttataccaaaattgttttgcatgttgttgacgtcacttatcacaaccatcacgtccacaatcacatctccacacctgcaaaattatgcactcacaattttttaacttatttttaaattttagtcggttagcttttataagaaattagaaaacgcgtttcgcattcagtgtattatgtttagtaataattaaaacataaaattatatcaaattttaaatttgatatttttaatataattttttttaataatatgagtaactattttaataaactttttatttttttacataaaaaaaaggatgacggaataaaaaaaaacaatggaataaaaaaattgttacgaaaatactaaataaaatgtattttctttttctaagatactaaataaatggtaatatagttttaaaaataacttaattttttaaaagattttaaaagtaatatattaatttataaggtttatataatttatgctatttactatttgagaagtattttcaaaagttataaagaataaaaatattaaaaaaattataaatctttaaaactcaaaagaaattttaaaaagataaataatagtaatcatcttacaattaaaagaaaaagtaaataaagagacatttttaaatattatagtagaaaagaaaaaaaattaaaaatcgaacaatttactcttataaaattgaaaacctttaaaaaaaagactttagatataaatttatagaaaattcatcataatgtattctaaaatattgtacatcagtatctcacttgtagttatcattattcattatccatcttaataggtttgctactactacataaaataaataaaaatttgagttaactattcactttaaatttatatttattataaattttaatcgttttcttataaagtgctaatgataagttcgattatttatttttaagaaattaatacatctttaaatttttctttacacctaagtatataaatatttttgttttattaacttttgaaaaaataaatttagaatggagagttcgttcatgattatatttacccattattatatatttatataattaaatattaaatattaaataattatttatattatataatgagaactaattaagtaggaattgataagaatagggcctataggtttttttgagatgatacgtaaatataggtatacatattttttaagagagagttacttgaattttgtttcaaaagaaaaaagaaagaagaaagatacatggattttatataagtatatgtataattattaataataaattttttataaaaagataataaacttgatagaccgaggatagttacggttagttaactaattattatttatattagtttattaattattatataaaactaatcttaatatagaaaaattagaaaaatgttttgtgggattagtagttttatgttttgttgttatagatatttattaatatggatttttttttttttataaattaatttaaaaatctgattttaaaaattaattaaaaaggtgaagaaaaatatatgaatgtccttaattttgataactctcgaaaaaatgttagttgtagatcttttttgttttaataattaattaattaaagaggctgattaagaaaaagaaaaaaatagaaaggattaattgaaaagttattaattcttccatgagatggtaatggttatttaatctgcatacaaatttttttaaacaggaaagcttaaagtaaaataagaaaattagcatcaacaaatatatttaaatagccaattcattcaaattcttcttttggttaactaattttcatatttctatgaatataatcgattaaacttattaaaaaaatataaatacaaaatcaatacatactaagatgaatggtataggaaaccattgaatggttgaaattgaacccataatcaaatactctaatctcataataagcttaattcgcaagagcatattatcataatatatatacccaaaccaaaatctatctatagtatgttaattaaagtctctccggcaatatgtattaaatagacccatatcaaaatttattgggaggaataaattcgaactaaaattattgaatgagaaagaaaataaattattgggttaagtaattatatgttatcatcaattactaaaataatatacattaataatgtacagcaacattcattaataatgttgaaaagctaaaagaaaaatataataaataataattttttcaccttcatatgagataacaaataaataataattgtatcaccttatataaattatagtgttggtgttgagacttgagagtattgtagcatgttgcatcgttgattgtagaatatgttgagcggtcgagtggtgttgagcggctgagtggagaagggagaacaacaatagttatatatagtgttaaggatacaaataaattataagaatttttt

SEQ ID NO: 219280 - DNA, 3463 bp, Cannabis indica
cttattaattccttattgaatccacacttagaattttttatatatattttgcttcttttttctttactcaccataatctctaaaatttaacttccaaatatagcaaatttaagatttgtttttcggtaagagcaaatttaagagcttgaaaggaaacattaaattttcctttttttttttttgttatttttagggcacctaatttgccaaaaatagattttattttattggacatgatttaattatatttatttatttattgaatgaaggttcattattcaaaaaaaaaaaaaaaaaaacaaaattagttgagctgagggacagcagtcattatcggacacataaaaatggctcttttctatggcgtccgtacctctgtaaccatcaaaattaaaatcaacccattaattgtttctccaatgacctccataatttatatcaattctctccttcaagctccacaatctccaatctccatcttccttcagccattggaggagagaagacgaagaagaagaagaagaagaaggagagaccttgttctttctccattgacaaaaagaccatcatgacttggccactcgtcagttggcttttatcttcttcttcgtcttcgtccacatcctcctccgaatacgacaacgaagacatatttgacgaaccagacattaatgaccccaaatcaacaaacgacgacgacgatcatgatcacaatcaagaagacgattacgacggcgttgattccgttaccgtagccgttacaagaaacgctgatccttctttctccacttcgaaacgacgccgtaccgacgacgacgacgacgattactacccaaacgcggcggccgctaagaaagttaatttgcaaaagagagtttggagcgaagaggacgaaatcgagctcttacagagcttcctcgactacaccgtaactcggaaactcggtccgcaccggagaacggctaactcgttctacaatgaccgggttaagcccgagttaaggggccgattcaaccagaaccaactggctgataagctgaggagaatgaggagaaagtaccaaataacctttagcaagttgaagaactcgggcgtggatttccggttcaggaatccgcacgagaggggcattttcgagatttcacagaagatatggagtggcagaggtggtggcggtagtggtagtaatgatcagatgctgagtcagcaggattatgagatagagaaatggatattgaaaacggcgtcgtttgaagaagaagaagaagaaatgggagatgagaaatggagggaagagaagattaggggtttggagatttattcaaaacggcttgagtcgattcagactcatgttaaggctgctttggaaaagttaagaaaaggaacaaccataaccattgttgatgaggctgctcctgctgacgtgtgatgactatttgttaattttataatgattagattgtggttggttggtcaacggttaggttgggttgggtgattaatattaataatagagagtagagagaagaaagttgtgaatagaattatcattaattcattattattattattattattgttaattaccgttatagtcttacagagcataaagaaagaaacaaagtcaagtgtacttgttgttatgctgtttgattatctatgctatgtttcaagcaggggctgtgattcctgacaaaatgtcagctgaatgttttgattcgtagtgctaaaaggcaataccagttgtcaatattattagtccaattaactatacttctatataatttaataatttttaaagaatatcgctaaataacttgatgtctaataataatactctgctttcactttttattatagttaatcactgatataattttttttttctatgatcctcaaagttaaaagttattttttaaaaaaattgtgaaaaaaaaaattttggaaaaaaatttaaaacaatttattaaaaaatttatgaagaaactatactaaaagctaaaaactctataataaatttatttgtacaaaaaaatatatttatctatttaaaataaataatatttaaatatcttattataactctagaaggcttgtggtttatattttaaaaaatgagtagtttgcattagaagaagacttgtagtttagtttccattttgttaagagtgatttacatttcataactaagtgctagaaagataaaatggggatatcaagtataaaaattgttagttaaccgaaaaaaaaaaagtataaaaattgttagaaatgaaagaaaattaagaatttgttaaaataagttgctacccattataagtgtatattacaaacttcattagataaaaagtaggatggtaactttcaaaaccatcctgtaaaatagaaaacaattaacaaaaatattgtgatactaacacagattttttttatatttttactgtagcaattttacaaaatactgtgtttattaaaattccaaaattataaaaaatttaaaaaaataaaataactcaaaaacaactaaaaaataaacttagaacaatttaacaaacaactataaaatgataaaaatataactataaagcaacagaaaaaaaacaaaacattgacctaactgtaataagcaaaataatatcaatttctcaatattcttttatattacgatttttttgaacaacttaatttatttttttgtactattataatatttattttatagaatttgttgttacaactttattctttcaacttttttttcttttcctttttgacttaataatagttaaaaaaataattcaaaaacaatataaaaataacaaaacaaatgcacacatataaaacaaaaatattgtatggaataaaccaaaaatatatacaataaaatgcacataaaataaataacaattgtacaaaaaaaacatacaaaaataacagaaaaccaactatacaacacctaaataacaacataaaaataattataaaataacaaaaaaataactataaatcaacagaaaaataacaagacatcaatcttgttaaaatatacaaatcattcataaattaactctgaataaactacaaaacatccaaaaagaaattgtattgagaagtaatgtgtatggaacgctcgagacatcaatttgtggtaatagtcctagatatgtaattgctcaagatatcatcttatcatcttcggtagaaattgttaataatacacaacatgtagctaacctagcataattaattaatttgtgtattgaattataaattgagaggaatcgcggatatcgtataaaaacgccaaataactttcaaaacgggagttatctcttctatttttgatagtattaaaaaaatggttgtttttgataaaaattctatgaacaaataaaaagtaaaatattcatttttttactttgacttatatcttttaatgtaaaagataaaaaatataaaaaaa

SEQ ID NO: 219281 - DNA, 1875 bp, Cannabis indica
ttatttaaattttattttcagcaatttaaactatttgaatttttttaaaatttacaaatggtgcataaaaaaaaaaacctacttgaaggatcctttagagagttcctctataatataaatttctaagtataatttaagaaaaaatgaaaaggtatctaaatgtaattattctcattactgtaattacatatacggaaaaacgacagcttttcctacttatattctttatttacaacttgttatagctttatactgtgcattattttatgagtatttttgttcttctttttttttatgattttttttttcaatttataaatacataattatggaagtgaatggctagatacatcttcactagtgatgcatatttttctcaatccaatgaatttccaatctttaatgaaatggcacagagacaaataaatatttgtcccaaaacgatagatgaaacggggttgttcaaaagatattctaatatatattcatcacaacaacaaattaaatattttaattaattcttattctcattattattcttattttattataatatcattactaataccattattattatattgtaccaaactaaatctcacatatttgctaaataataataccccaaaatatttatttttaatgaaattattccttgccatgaaaagattatctcaaaatgtttgagaaaagttggcacgaaactagaaagagactagggattgagtgcttttctgtactatataaaatttacttctaaagttagtattaggttttattaaaaagataaaaatatagtctaattttataaatgtgtaatagatgtaagaaaagtagggaatgcatacctaataaaatttaattgttcaaatgaaactatcataccaaaatggcaaaatgaataactataaaagtcatacacaatatcatacctaatgttatttttgtccgaaatgacataaacttagagaaacttcctcatatgtgaggtcactcactctagccaaacatcattaattttgtattgtttagattagtaacaaattataggaaatttagctctgatacataggaattaatctctgtaatttcagctttaagatcacccttaaacaaataaaagttaaatcaaaacaaacaaatcaagaacaaaaaccagaaaacacattaaattagaaaatataacatagatgaatctaaatgactatcagaaacaataacagaggagatttatactggttctgattctaagttcaatgtgaacttagctatactccagtttgaaagcattgtcacaaatctttattgataatgagaataagagatcaatctcaggagctacaaggaaataattagcaagtcatgcatggtgttatccctcaacactcattaactcactaatccgagcaaacataatcaacaatgttgctcaatacaatttctcaatcccagctctctctctcagatatctcactccatttctcactttaacttctctttctattgtgttgtgtctctctatctctggccttcacacttgtgtttgttcaccttatgaaatgagaggagtagttctctatataggccaaaccaaatagagttgatgtcatatttgagagttaggttagttaaagactaactaactaatcggatgcaagttgggggtttaaggaataatactacaaattataccttatttcttcaagccccaactagctaagcatatttgtccaatggatgttgtaatactttcatgtgtagctacttagcaactaaaattgagtaagtccaagcaatgcttgaacttactaataggtaactattagaatatttttatttttggaaattattttctaattaaggaaatgattttct

SEQ ID NO: 219282 - DNA, 3675 bp, Cannabis indica
aaaaaatatatataacataagttttgtatatttctgattacaatgaactagattattgcattattatcatcatcattataatagaattttaacaagtcacaacacttagaaatttataatttaccacattctgctatagttgttttttttttcataatacgattataactattttttcccatagcacagttgtgccaaattgaccattcgtttatctccttctttctctttttatttatttatgatttaaaagattatttatttatttatggattatttaaatgcatgtatacttagttttatgtaagtaatgtatatagagaagccatgcttttggtgaaatatttttaaaaataaaatcgaaaaactaatggaaatgctttcagaaagggaatatatttttatagtaccctgtgtttttttggaaattatatttagtactatgtgtttaataatatttatttggtatcttttattttaaaattgtacatatctagtactctaaagtaaaatttaaccaatttgaccaaacaattctcagttatatgtaataaaataattaaatttgttttcagtttttataaaattgaagataatttgattgtattgataaaattttatcaaataaatttgagtttagggtaccaaatatgaatgattttgaaatgttaagcattattaaaaatacagggtaccaaacctatatttagataaaacacattgtaccagaagtgtagacacccctttcaaaaatcaaaatcccattaaatgacgtttgatatttcttacatttaaatcgagagaagacagattctagattattggtctcgatgaaaatatgttgtattagttacttacaaattttcttttaataaattcaaagcggatggagaaaaattacagtttaataaacattgagtacttatgttgctaaaaaaataattaagtttatgccgcttacaaactcaaaactcaacacataaaatgtctaaatacacgatcaatagtggtcacacacattcatgaattaaactgaataggtccgaaggactattatgctagtatagcaccatagagcctgtgagctcgtgcgtttaaatatgaccgaacaaactgtaaattaataagtcgcacacgttgctgcagttaagacaagaactgacgaaactgttcttacatttattctgtaatatttctattcattaaattgtgtaattattgtaataacagtcacgtctgaccagttgtgtaatcccaacgaacacatgcattctatataaagggatgaaccaaatctaataaactaagctgaaaatattaccaaaagtagactaagtagactaagctctgaatgaaccactataattatattgtcttctttacatttctgctctagttttagtctattctgtagcctaaactttgagtactcactattctagttgaatactcgcatagctatgggtgaatgtttttgctttacttgaatactagcccttttttgtagttgtctaaattctttcaacaagaacaattactaattagtaagaccagtgagatgaacaattaccagaaaaaattcatctcgggatacacaaagtaaaggataaacaagacaagagtaaactatgaagcaacaagtcggttaggaaaggtagataatgagtctttaagagcttgtaactcattaacccacatacccgtaagtatattgaaagactaatatatatgagcaaaagtcaatttacctcaaaatattcataaaaagtaaaatacacttagtcagtactaacattacggaagagtgcgaggagcatcttagatgcaatacctcaacaaagaagctgccttcaaaataagcacaataaacagttaccaatatatgttgggagacatagaaacttagtcagcagcacaatcgttttgggtaatgacaaaagacaattatttatttattccatgtgttataatatgaaacgcgagaattgtccacgtgtaatgaaagatcaaaaaatattcataaaaagtatattgaaagactaagatatatgagcaaaagtcaatttacctcaaaatattcataaaaagtaaaatacacttagtcagtactaacattacggaagagtgcaagagcatcttagatgtaatacctcaacaaagaagctgtcttcaaaataagcacaataaacagttaccaatatatgttgggagacatagaaacttagtcaacagcacaatcgttttgggtaatgacaaaagacaattatttatttattccatgtgttataatatgaaacgcgagaattgtccacgtgtaatgaaagatcaaaaaaataagatcagaatagaataattatcacctcaagcacttttaaatagggaaagaattctcatattcataaagggtaaaaaaatcaagaatcaaacttgtaaaattctggtaatataatagactggtagactatatactaattattattactattgattttttaaaatatatttataaaacctaggctcgtaataaaaattggcgttaacatctatatacatataatatagatttggacacttttaggagcttcataataatgttctaccatttaatatccaaaaatagagtacaataaaatattaagataggattgtgttttttattgcctttgtgacaaaaaagatctatcattgattttatagactaatgataagaatctatgtatctaaaattaaaaaagaatttggcagaattaggtaccccacatagtcaatttcaatgcttaaacaaaataaaatacatttgggataaatactattttgaaccctttattacctcatacaatcaatttcaatgcttaaacaaaataaaatatatattgggtaaatactattttgaaccctttatttttataaaaattaccgactgaactctatattttgttaaataataaaataaaccctatattttttaatatgataaaaataaaacccttaatttaattttggacaactttttttaatacaatcaacttgaatatttaaatgtgaatctagtcctaatcttcatattgtaaagatgttaacactcctttctacatcaataaaaaaaaagattattgacataattagtacatacattgaaaacaaatatttattattggtaatgagtcatttgtaatattttttttttttacaaagtttggcaagttttcatttttgtaaatgcaccatttacataccatttttccttttcataattacccacatttaaatacaatttatgtaacaacaaccccattccaacacactcatcttcttccattataaagttattattataattattacttcttcaaactacttcaactattccattgggagtgaattatgagaccaagtagcaaatccaccagctatgtcagtaatgtaagtatagccctgaccaaaaaaaaaaagagcataaatgagatactaaaaatgttaggtttgatgatattgatattcaaccaaccaaaccatattttgcttacagaagctaaaagatcagttgcagccatcatagacctttttccactttgacatccctgtaataatgattaaacaaagatcaaaactgggttctttagtttattagataatcataagtcaatacaagacagaataaatggaaattaactc

SEQ ID NO: 219283 - DNA, 2344 bp, Cannabis indica
aacttgggggatgtcaacttgggcacccaaggtgttttagtcttcggatggttttgtttgatgtctgaaaggcattgtttccttttatttcacgaaaatgaaggaaatgatcggagaacatcttcgcaaataccttgtacatgccccaagtcaacatacgccaacttgggcattgggtctaggttaaaactatcttgatttagcgtctttgtttcccaacgatcttcttggtggaaaatacacacgcaaatttagtttcatcaaagttggatatttcacttgagcactgtcaacctgggtgtcagtacatctcactgccccttccggctaccagttgcacaaacatccttcctacatggatttaaggaattggggtccaaagatgttccaaaaaccctaaactagttgtcgcatgcccaacatgacatgatgtcaacctaggcgcccctaggtaaagttcttctctagaattggttatagggctcaagaattgattgtggcatgtctttcatatgcttagttgtagttgttgagctcttttcatatatcattaagacttaaaaccaatattgatacgatttagggcacaaatgtgaacctgagcaccgaggtggaccctcgagatgtctagatgacatctttagtttctagatctaactcccgtatcttattcgtaatccatttacttagactgttgaaagacaaaacttagaaatgaatttttaggagcttaagtgcttacttgggtgctcctattaggatttatgccctcaaagcaagtatttattggataacatatttttgaatatatgaaatacaaatatacataaataaatatgttaattattaaaaaataattaataaatatcagaaattttcttattcatataaaaatgtatgatcttgtaagagtataagagaattaagatcataccatatgaagagatttttacgtggttaaggtattaatgacccttagtccacaagtcacttgtattggtgttgaaggttacaacaatggcaggttttctagagaattttaacaacatttttgcttgatctaaaattctctggtctcgtttacagtaagtgtgcagtcctatttataggaaaattagagtgggaccttatgagattaaggcctttatgctgagaaataccctaaaggttgcatctttagaggtaatttattcttttttttttttttttttatgataaggcttttcccttaagtaggtcatgaatcgagatccaaggtagaaggataggcacgtacaaacatgacttgtccattgtgatgtgctacttgagggcataggtcccttaaaggagtatgggaaaggtgcatgtcagaaaaagcaatgtgggaaatctccaaatttatttgctttatgggaaacccattttgctattgatacgcaagggccaacctagctacaacgcttttccttgttatacgctgcaagatggggaacatgcctaaaagaaaggatttaagaggatgaatctcccagaccttcctatacttaggcttcacccaaactcgtctttacagctgacgaggacctctgggactatactttgctcctaaagccaataccctattttctcaattatgataatcggcattgtctcttaggtcgagaccctttttgccacctggcagatctttcgagtgcacatgtatggtcaaatatttgggataacatttctcccaagtctctatttgcattcttggatgtggagacttgttgatggcatccatcaagttcccattcaggagttaaccttgccattgcgagttatttaatgtgatacagttgtgtttggtacaagagacgtgtctatttccaaatggcatttttattcacacgcattcacctcctttttttatgaggacaatttatattttgatgcaaaatcctaaggcgcaccatttatttcagagtagtaggagggtactcgagtaccttaaatgtctcctcatatatttgtttcatctagaagcgtctggaccgttggatcaagtgtgtttcttggaaattgaagggagttgtcacattaatggcctagatcgacccctctagggcctataaatagcctgtggctctcttcattgatatttttgcactttagaattttccagagccccttttgcccaaaaaaatttctggttaaccagactactttttgtgtttcctccatctctctcaatcatctttttaccttcacaccacgttgtcgtcgtcgtttgaaaacaatcctttcgatcacataagtttcttctccttctccttctctttctccttctccttctccttctccttctccttttccttctcct

SEQ ID NO: 219284 - DNA, 5075 bp, Cannabis indica
aattgtaattcctttggaatgggctttcaagttctaataaagaaaccaaacacttgattgagctttcttaaggaatagcaagtccattccaatgctcattcatgtgaaccaaacaccacttaagatggaagaattaaatgctagaattgcggaggttattagtattggaatgtgggcattggccgtatgtctagaaaggtacaacctccaaggagcatcccatgttgtgggccagggcctctactcctcctgcgcatgttagcacttcaaccactaaaatgaacttcatgggccataccaagcccattatacattgaaactagatccacttcataaatgggctttctctcttttagaattctaatgggccttaataaagttgaacaaaaaagaaagtcaaggcccaacactactaattacaagaaccatttcgactttaagccaaaaatggaatgtgaaacaagtcaaaactacaaaattcactagtaaagtttccaacaatgaaaaatctaaagctatctagtataattatacatgagagtaacatgaccaaattaacttacaaattacaatatcaaaaaagatgaggtagctcttgttgttgttgctgttgatcaactcttctcattatcataatgctttaatttgccctccatagccataatatttcaacaacccttcatcttgcctccaattttctttcactttcacttcaacctgtgtaatcaaaattcattttaatggcattacattaatgacatcttcaagtaaactcttatacgtaacatggagaaagtggtacctcaagataaaccttcttctgtaagaaattctcaatgtcaagccgcgcagctgttgcaagaacttttaaagccttaccgtcctacatagcgatttagggcaacgaaatatcatcatgtgagacaatagtagccatttatggttgtgccaatttgtatgaaaatgaaaatttctatgaacccttacaaatgtcaattataaattgatggagtgaaattatttgtcaagactttctacaatcaagaattacctttcctataaggatgatcttctgtgagtttttttcaacaacaatttccacttgtataaaatcttttgcagttggcctagttttgtagctcacaacattcacctacaacattataaaaaacaggcctaaattagacaaagaaataaaaatagattactaccgtcgttttttacttacaatcgaataagtacctggcatacgtatggaatttccttccgatactgaataaatatcttttcccttacaatttcagaaacaaagaatctttcgggatgttcactgacaatgtcctgagaaaacatataacgaaacatgagttatcctgcaaagactcatcccacaaaccccttcactttgtccgatgagatgagacataaggaaacagatagacaaagagtttatcaggctaaaaattgtacggcatgatcttcatcgtaggtgatcgaaaaaataataaggaacttcacattctgagtacctttggatagtaagcaggcccggtgggaagttttgacagaatccaattcttgatatcttccactccttgaccatacttggcactcaccggtatgacctcatcaacatttgtaaatttttcataccactgcaaggcatttacagtaaaaattcatggaattaagaaaatctacaatcacaaaatcaaagaaacctcaatacatggatatcgatctacaaattcttacctccagcttctttgcaagttcaccaggtttaatcatatctcttttattcaaaaccagcaaaatgggtggcattttttctgagaagtcaccaagaccttcctccaatatttcatcaatctacaaaagtaacaataacacattaggacaagtagaaaaagtattagatcagttcctacaaacttaaagaagcatactttatcgggcactttacatgcatcaacaagaacaagtacacagtctgcattgacagcagcatttctgacattcttcatcatcatagaatctaacatgtgcatcttcttctcaataacaccaggtgtatcataaagtaccatctgaaacaaacccgataaatccatgaagattaggaagcatcagaaaagcaaatctaaaactaaaaatgaatgtacttatatggaattttttacttgagcagagaattaaagaataaaatattcacttgaaaattaaccctacataattaaaccaaacagaagaaagccggaagctttgctaagtaggtcacgtaaagaatcaaacccgaaacttatgaagaaaaaaaacatggccctgatcaataatttgtcaagtatcactgttaagcaatagctatctccaagaacagtacacaactattagaactcttagcattcaaatctatcaaagagtagagaccctatatagctcatcaccccctaacattaacgcatgaagtacacctaattaaggttttagaatgaatcccagtagttaaaaaactatgttgattccatggtttcaggcattgtaacttgttcatgtcagtttcaacaacattaagaatacaagtaattaagaaaaacaaacctgatattctggtgtagagcatataccaagaactcgatgccttgtagtttgcggtttatcagtaactattgacaacttttgacctatcatttggtttgacagtgtactctttccaacattaggcttcccaagtacagccacatatcctgcatttgaatcaaaagcaaataaaaatctctaatttttgtgtcttttactggtttttaagttcaaaaccaagaattatagtatcaattcacagccaaagaagcacaatcatctttaacataaccaaaacaaattcaccaatcattcttgtttccaacttgaaacacttatataataaattattaggaagtatattgggcctaactcaacctaacaaaaccggcttatctggagtattgctctcaccttattaagtggattgtataatgaaccataccaaataactgtgaacaaatcaatattaaggacacccgaaattgaaaaactaacccgcgttatacagaaggatattgggtctaattcaacctaataaaaccggcttattaggagaggattgccctcaactggattgtgtaaatatcaccagtcaatgtgggactttaatatgccctctctagcaaaacctgaaccatgtcaagcaactatgaacaaatcgatattaggagcacccaacattataatattgtgcccactctatagtatattaggaaagctaattagcctaactcaacttaacataaccggcttgctaagtgtggattgtcctcatgaattgcttaaaatgcggtactttaaatttaaatcaccataaagattaaatgatgaatttagcagctgaaaatgataagcactctttcatatataatcatttgaatcccatatatggtaagtggaaaaatcagtagacataaaacccaaatggaataggaaccatagaaactaaccgcttcgatggttagggtcagagtaatcgagctcctccaattcatagtcgtctagtaacgccatgttcctgtcaggcttcacactcagagacagtaaagaagattcaccatccgaataagagctcatttcttcttcgtcttcctcttcttcattttcttgttcgctaaccaaaatctgctgtcgtacactcaacaatacgaattgataggtaaagtttctgggttggacatggaaatgagtttgtagtggatattttctgatagaagaaggaaagagaggccttcggttatctgggtttgttcggaatttggagaaggaagaggaaccagttaaaagattttgtcttgaaagagttgaagttgcagagttgtaggaaacaagctccattgccggagctccagaccagaaagaattatcaatagcttttttattttaaataaataaaataaataacattttctatgtcatacagaggaaaaggattactccaaaatttagaaaacaccgatacggtgtcgtttcgattgacttcatgtgattattattttttttatattacattttttagttacatacattgattatcacatgaaatcctctatatggccacttagggattttttttttttcttttatcaaagaagaactttatcaatcaacagtattgattaaaggtaccggtgcctagcaccttttcgacatgtcgagttgtgattggctaacgatatttcctaaaaactattatattaaactatatgagactcaatacttagttagaccaatagtgatattaacacatagaaaaatgttaagcaccactagtatcctttaacatttttcattaatcaactaggcaatttataatcgaaacaaagtcaacacaaatagctccaaagaagctataagtgacttgtacacatcttaaccaacttttctcttttagtattctttccccaattacaagtgataaacacactttcatgctccctctaatcaatttaactatacaatcaattgacaaacatttttgttcaaaaatacataagttcctattaagccttaaatgctataggctaccccgactaaagccgcatacttcagctcctctgagacatttcgagctctttgtaactctgtccacttaactcaattcacaaactctttaggccaagagttcaaactcaatcattactactcagttcctattaagtacagtgtaactacatgatcagataaacatttgagtttcaatctcaaaacttagattatgttacttatggtattttaagttttactaattaaatttagatctttgtagtaataaattagtgttgtaaatatgggtcggactttttgatacgacacgaaaccggcacgaatctgagaggcacaagcacaatctgacacgaaaaaatatgggcttgagcacgacacgacacgaaaaaaataagcttaagcatgacacggcacgacaagcccgaaaacacgacaagcaagcacgaatttaaaaagctcaaaaaatacgacacacaaataaatat

SEQ ID NO: 219285 - DNA, 4435 bp, Cannabis indica
agattcagttacagtttcttttaaaggtatggagatggagttagtgaaaatcttaacagtcttcacttctattgatttgtcattcaaccattttgttggagcaataccagaggagttaggacagcttcaagcactttattttctcaacttatccaacaatgctctcattggccaaatcccatcatctattggaaacatggcacaacttgagtccctagacctttcaagtaacaagctgaatggatcaattccggtatctcttgcaaaccttaacttccttgcctttttgaacctctcatacaatgatctaaccggactaattccatccggtaatcaaatccaaacatttccacccgaatctttcgttggaaataaaggactgcggggatgtcctttgacagatgattgcgggaagagagtggctcctcgaaacacaacaaagaagaatggttcagaagttgaaaatgataatgagattgattggaatctcataagtgctgaaattggattaattgttggctttggagctgtgattttaccacttgtgttttgcaaaagatggaggattaagtattttgagtgcattgatgatgttggtgtgaaactctttcctcaattgtatataaccaattacaacaagaacataagaggaagaagaggaaggcactcatcttgatgttgtttcttaaagacatgtaagaatttttctttatagctcttaacataaaaattctattgtaagatatataatttagtaatagactagtttgcttttttcttaaattgattacctaaagttgaatacaaattatacaatactaataggaaatcccaaattgaacttgtaggaatctattgagtggtttggagctgagactaatttttgctgctggtgttttacaagagatggaggaagttatgttctgtttactattgttgattttagcatatacaaatattatgtttaaggtttaaagcaagttgtgctagtagtaatcataactgtgaactttaatcaactttctttcacttgttgaaaggattaaagtttcaagtaatcataggttgtgctggaatgtttatgaggttgtgtatggttggaagtaatgaaataaaaataaattaatttttattctatttttttatttggttgcatattcatgtttatttacttgtaaagggaattatggtaacaattcttattctattgtttactaaactaaagaatgggaaattttggttaagtaaggggtaaaagaaatggaaaacttttccctaatgtgagtaatgacttctatttatttatttattttttaaaaaactatatagtaaaaataatttggaatctattattatatgtttgctctacattttgttgtttttgatgttaaaacggttttacttatacatgtgaaatgagttttgatgtattgggagtattcgtatttatagaaattttaattttcgtacttattctaatatttagttcatttatgcatggtgaaaaaagagcattggaatggtcttagctggcaattttgtcattagaaagatattttggtctatttaagtattttgattacgttttatgataaagtagacaaagataaaaccattatgattatgtttccaaataattttagcaaagaacatattacaaataatgattatgattctttcccatttattttgttatatttctccatttattaatttcgattctaattatagtttagtaaatatgtcatttaaaatattggaatgttattttaataaaatgacttttttattattttagtagaatgactattttttttaaatgaaggaaaaatcattccaatgcaagatgaaaaaaaaaacttaataatttgtttatcaattttttttatacattttaaatttgattatattctattcgcattactatttttatgttttcattcattccaactaaatattggtgttgcgttgggttagaggtaggtaatgaaatagaatgaaaatagaataatttttatttcattcctttgttttgttgtattttagagcttgtttgatacaccatattagactatgtataatattatattatattatattatatattatatttgtatacaatactatattaaattttgatttatatctaaatattatatattctatacatatacaagttaacatcaagcatagtattatatataaacataacataaatttcacataatattatacaaacgatacaatgtaatacagtgtaccaaacagatctttaaagttttagaatgacttttttataattttggtggaatgatattccatcttgaaatagaagtaaatatcattctaatgcataatggaaaaaaatatttaattttttaccaatattttttatgcattttaaattttattttattgtattccacgtaatgttttaattgtcctctttaccaaaccaaacgtaccctaaagtttcaattgccattctccaaaaaaaaaattacaaaatatttatatatatatatactatatatattgattagattgagaacagagataaagaactagtgttacaggctcacctttttaggcagcggaacactcgtgtggcaccttgatttctctaagccaaggtcatccttccaaccatctgagtaacaatgggctcatttttcgcgcgaccgtgtgcctcgtgcacacttccgtctctcaaacaactcttcccgagtcatgctcacaagtatccatgagtgtatccatgcatcgaggctctctagccaagatactcgcactgtccgtaggttcccactatgataaggcaaattccaacaccgacgctcaccttgtcactcgtgaccaaggtagcatgtgtggcaagatgccaacaccaagccgacgtgccaacgcttttatcatgccccgttcgatactgtccgaacagtctccctcgtcgccaaaggactcccatacgtccatggaccaattctcaaggtgccatgcctccacgcatgttggcaggccctcgagacaagctaccaaactagttgcatacattagacctttgtcccgatgcaatgcgcgtatacaaactagcccacgaatgactacccatgccatctcgtgttgagactcatagccaaggcgcaccacaacatctcttggaggtttgggccacgtcccatgcaagcggcataccggcaagccaatagaaacgtacccgttaacctctggcagcttcttaaacgcactatcgggtcggcccgataatgttcatgagtactccaactcatggagacatatgagtcccctcgtagtcctcatatgcccgtcctactagtcccgctgactagtagcagctcacttagcactaaggtgccagggggtggtggagagctggcaccagggtactcccttaaagagcattctgagcttttaaccttctactaagaacatacatgattttggctctgtagacatacggccaagccgcataccaaatcacatagttttgccaaatcgattgcaccattatatttgtagacccaaataaatggtgaatttcaagtcccgtcccaatccagacaatattgaagatatttacgaaaatgccactgcatacaaactaagcatcaacatgccaccagctgcctcaacatgcgccaccacttgaccaccactaggacaacttgtgggcatcacttagcttgtaacgtgccatcttggcatgcacgcaactagcggtggataatatctaatccaatccaattgaatcatatcgatctaatccaatccaattgaatcatatcgatctaatccaatccaattgaatcatatcgatctaatccaatctaatataattagatgttaaaagataaattttaattggattgaatcggttattggatgttaatctcaaaatctaattaaaaatcgatccaattcaattacatttatatatgttaaaaaattatttatataataaaaatattaaaaataaaatatatattaattatattttattttttttgttgaatttgtaacactggattattttctgtatttattttaatgatgtttcgttttattttattacttagtaatgttgttttttttatttcaaacttttagttgcatcacacttgtaataatatttttatggagtattaaatttaaataaaatgtgatatgtagtttttatgtatttttcttcatatttttaaattaatattaaaatttaagtatgtaattagatatccaattaaaaatttgatctaatctaattagtaattggagtggattggattagattttgaggtctaattagattggatcagatgataattttctaaatccaattattaattggattagattagatgaggagaaaaatattgggaaatttacatggtatactaacttttgccattttttttac

SEQ ID NO: 219286 - DNA, 3515 bp, Cannabis indica
ttttctttattatggcttcgtctagtagtagtcctgctatagaggagcaagccgcagggattaccctggatgatgaagaaattggttttagctttgcaggtgggaagaggaagaacctttcgatgtacggtggtgcttagtaggtaggttcttgaatgttgggccaatggactttcaagtaatgcaaaacatgatggcatttttatggaagccggtaaagggtctgtatgttaaagagcttgaaaataaccgatatctattccaattctaccacgaggttgatattcagagggcgatcaaaggcagtcgatggacgtttgatagaaagtaattgatttttaaacgattgaaggatggcgacaatccgtgaacaatgattttaaatcgtatagacctatgggtgcaagtctttgatttacaacatggttatcggtccgaaatggtgctgaagggcattggaaactatatcggagtctacgttgaatctgatgttaacaattattcaggcgtatggaggaaatacatgaagattcgggtaacagttgacatcactaaacctcttaaacgtaggatgaagattgttcggagtgctaatgattggttttgggcaaattttaaatatgaacacgttcccactttttgttttgtctgtggcatcattggccattcagaacgtttttgtgagaaggcgattgatattccttttgaacagcttgttaagccatatgggacgaatggtgaggatactcccgagaatcatgggatttatatgggaagaatggaggaaagtcaatgctacgtggaggggaatgaaattttggctctaaatggcccaaaacgcaggagagtgtttattggggataacatttcgaaggggcccattactgagatgttagttgatggccatatgttgaacactgggccgaatttggatactgagggtgatgttgaaaaagagcaaaatattgatagtgacatcccaaaaaacttaagtgcggcgggtgctggtgtccaggcccgccgagaattatgaccattttaagttggaattgtcgggggcttgggaacctacggaatttacaattccttaaggatttggtaatccaaaagagacccaaaatagtctttttatgtgaaacactttgtggcaaagaggttgtggaacgggccaaatttagtttgggcttcgatagtgctattattgttgaagcccaaggtcatagtggaggaatagcactgttgtggaaaaacaaagaggaggtgcagcttattgatttttccagcaaacatatcaatgttaaagtgtgtattgatgggtagccggtttggcgattggtgggtatgtacggtgaaccaaacacaagtctaagacacaacacatggagacttatcaaacatcaagctcaagatactcggtggccatgggcgattattggagacttgaacaacgttaccagccaggatgataagcatgggggaagaccgtacccgataagcttaatccaaggtttcaaccagatactttttgagtgtgaattgactgatatggagttggttggacacccttatgcctgggaaaaatcccgtggaacttcaagatgggtggaggttaggcttgacagagctttagtgtcgaaacaatggttggaagtttttaattcttcaaagctttttaatttgaatttttcatcttcggatcattgccctatttatctagagtcgattattgttaagaatgtgtatggtccgaaaaaattcaaatttgagaacgcttggttacgtgagcctttatgtcttcaagttgtcaaagatgtgtgggagagggaaccgcggttggatgatcaaaataaaatcaagatgtgtggtgatgccctgagtatctatggcaaggattacattggcgatttcaatacaaggataaaagaggctaagttgactttgaagcaacttaaaggaagacgtgatgaggagtcggtcaagcaatatgacgaggctgaaaagagcttgtttgagattcttacccaacgagaggtgttttagaagcaacgatcgaaacaactttggttaaaagagggtgaccaaaacagtaagtactttcatgcatttgctagctctcggaaacgtcagaatctaattcaaaagtttcatgatgagaatggtgtttagttcgagtgggatagtggactgggggatttgattgcaaattattattctcagttgtttgctacttcccattcaatgggcgatgaggtacatcaatgtattgatccttgtatttctcctaaaactaatgattggcttatgaaagagatttcagatgaggaggtgcgtagtgctgtgtttcagatgcatcctgataaagcaccagggcccgatggaatgacgcctggtttttaccagaagtattggaaagtggttggtagtgatgtgattaagctggttcgatcctattttggtacgtctactcttcctgagagtttgaatgatactagtctggttttgattcctaagaagtcaaatccagtttgtttggctgatttgagaccgatttcttttatgcaatgtggtgtataaagtgatctcataagttatggcaaatagattgaaaagtattatgagctcaattgtgtctgatactcaaagcgcttttgtccctggaagacttatcacagataacattatggtgtcttatgaaataatgcattatctaaaaagaaagacgatgggaaaagtgggtcagatggctgtgaagctcgatatgtccaaagcctatgatagggtgaatgggggtcccttgaagccatgctatacaggatgggcttccatagtcactggatatctttggtaatggaatcggttctctcggtgaagtattggattcaatcacgtggacatacgttgggacctattgttccaactcggggtatcaatcagggggatcctctctctccctatctatttattctgtgtgcggaaggcttgtctgcgttgatccgaaaatttgaaagtagaggctggattagagggtgccgtgttgctaggggagctccttctatctcttacatgttctttgccgatgatagttatctctattgtcgtgctcaagagaaggatcttctaaactgttttgaaagagcatcgggtcaaaaggtgaatttattaaagtcttccattttctttagccaaaacacagaggctttggtgaaaaataacatatgtacaatactcggtatacctgaagctagtgagcagagcacgtacttgggtttgccaaacaccatgagcagaaacaagaactccatcctcggctttttaaaggataagatgcagaagagaatcgagggttgggataacaaactcctttctcgtgctggaaaagagattctcatcaagttggttgttcaatctctcccaaattatgcaatgaatgttttcttgttaaccaaaggaatgtgtcaagaaatggagcagttaatgtgtaaattctggtggcgtacttcaaataaaaaggctaa

SEQ ID NO: 219287 - DNA, 5272 bp, Cannabis indica
ctctctctctctctctcttaatgattctccgcttctcattctcacatcgtataccatttgctaccaaagttgcagggacgatgagcacacccaagagggcgagggccatgaccaccgagtcttcaaccatggcggatgcattcaccagatatacggactacctcaatcagcttgtaaacttctctaaacctttatttactgtttctttatttgtgagtttttcttgtttggttttcttatttccttaaatcacaaagctcaaaactcaaaggtcaagctctgtttttttctttctgcaatggagagtctctgaaatgtttgtcaccccctccaaatgggctggcatcaagctgaaaaaggactaggttattattattatagatgaaattcagtggtggtagagtagcgttcggtaattttgcaattcattttcacacattttatctttgttgaaataacaatttaggggagctgaattcgtctgggtctgctggcttggttttttacttttgtacttagtttagttgttatgataatttgattaattttgttttgttttatgcttttgttaattactgtgtttccaagataatacttggaacctgcgtaactggaaacttgaactgtaattttaggaatagccatatccaacagcttttctttttcaattgttatagagaataatgtgggctgcaactatttgctgatgaatttttcaatgtgacatttatctagtggtgcagtctaatcgcttcttattagcaatataagcagcaatatatcattgtcgttgaagattgtgtcctttccatgcaactgtttgttctttcagttacggatgcattaaattatgtctgcagaatgagaaacgggagagagtggtaaaagcaagtcgtgatatcaccatgaacagcaaaaaagtcatttttcaggtgcacaggtaacgagaatgaagagaaatatagaaacggaagtttaatgtgtctatcaacatatttgttaagcttttcataatgatggttttcttagtcttttctcctagtatctagaaccgatcaaatcttatttacatttctaattatcttgtcattgtttagtaattgtttgatttagacatattcactctatccttacattcttaacttgtgatggttttggcgagtactaagctctttgttttgtaatttcatttaaataagacttggtaaaaacaacaaagaggaggttctggaaaaagcagaaaaggatttagtagctgtggcagatcagtatatttctcggctgataaaagaattgcaagggagcgacttttggaagctaagacgagcatactcacctggggtaacctcttaattcttatttgttgtacccatcaaaatcagcttgattgacttatttgttactgctcttttataggtacaagaatatattgaagctgcaacattctgtaggttttgtagaatgggaactcttttgcatcttgatgagatcaatgctactttattgcctcttagtgacccctccttggagcctttgcaaattaatgttctcgactatcttttgggggtaattgcttacattttaagctccaattgcaatatatgttgtctgtgaagcacattgatagttttagtggtgcacatgaacctagataggtagagagccgctattatataatatattatagctttgttcttctatattattgtcaagtaatcatataaattagttgggaactgattgaagatagattagtcaattgtatactaatacgttcatatgcacattagacatacacattcaccaacatgattaatgtagctcaaatatcaaattttttaacatacaacttgcatattccctataatgtttgtgagctggcttatgcacataatcatccactaatgcactcacataattaatgattggactttcaactttcaaaagtgtttctgggtgttcatgtgcagcttgctgatttgactggagagctgatgcggttggcgattggtcggatatcagatggtgaaattgagtatgcgcagaagatatgcaagtttgttcgtgatatctacagggagctgacccttgttgttccaagaatggatgatagtcatgatatgaatacgaagatggatacaatgcttcaaagtgtaacaaagattgagaatggtatgtgtgtacatttccccccatttctcaatgtcgcatttgttgtcatgaattagctttgagtcatatttttaaatactattataatagaaatgattgtataaaccagtaaattattattaaattgacactctagaaggtgttatgtttgtcttctgcaaacattatgaaaatagtctgtcggaatcatgtaggtaactcctaatggcaagtatgtgtaaggcatccttgtttgtcaaccaataccatatttacatggcactcttgttgaatgcattttactgccaagaattacacttaggaagtgcatcttaaatctgtcatctaggtcccctgtaatgagaaaaagtaggaatataaccccaagatgtagtgtaaggagtgttgtaaagtgatggtagggatttgttccaaggttcgaatccccactaacttaaaaatcttgaggccactgggaggtctttgggtccaactggcagggaaaacatgcaaaaatgcaaaatgcgaacaaaaagaaaacaaaataaacaaaaaaaagaaggtaataagtaggaaaatatatataggacctagaatttctttgataatcagtattcccacttatatatagactataactctgtaaaattggatggcatttacatattattcttatttggatgaattggtcctattatgccgttgaaatagttatcggaaatcaaaggccttcagcatgttgaggctaggtcaagtggttgagtttgagtgactttatgattcaagttctccttctcgtaaatgtatcatataaaggattaaaaaaatgaaagatttcagacgttgattgcatcccaaaattgtagatatacatgtttagcaaattcgtaattcttctctcttttcatataatgtctggtgtttattttttgtagcctgcttcagtgttcatgtgagagggtcggaatatatgccactacatggatccaatgatccgaactcgattttattgggggtgccagacttcgaaacttgaagtaatatcttgttcttttattctctcatttgtactcgtttagtattatgtatacacatgtcctcactacatatttttgcttgcccagagcgaggaactcacgtggactgctttcatctaagttcatacatttgagcaccttctcagatagtttttaattttacaatttacattttctttttgaacaatgataattactattatattttcttaaattttttaaaattatttttatgttttttagtttgaattatgcaatgccacatcattgcccaaacaaccatatcaggtagtcacattggatacaactatatgtttttcatttgatagaatttatatattaaaaatataatcacgtaaaataaaatctgcgaaccatgtaattaacatgaaaataatttttttttatttttttattaattaaataatgagattacttagtgtttacccaacaagttagtttgatgacatggacactatttgaagaaaacaatcttggccttgcatcttaaaattatgcagtgttacttgcacattgaaggcatctaggtagagacttagatcctgcaaaatcgtttttaagcttcatcctttaactgtctaagtaattaggtcacaaatgactcgagaaactagaatggaaagctaaggatgtcacctagacattttatgggccatcttgtgaccatgttagtactgggtgcccaagttgacatcttggaccttgatttgcattggtttcagttctaagctaatatctatgtgctattagctcaaccattgcactcaaatagaagagagataagccacaaccacatttcaaactccaaaaccaatttcgaaacaagccctacttggaggcgctagataggcatgggtgcctaggttgatatccagtcaccttgggtgacatgacgactatgttttggttttatggaacttctttggtctcgattcctcaaatccaacaaggatcaatgttaggacttgagtttttggtaacaaaatcctaaaggtccacttctcagaatatgggtgcctatgttaacactggaaactgggcactaactcaactctatcaagtagcgcatgtgcagattagacgaaattgaaattttgtgtgtacttttcaccgaaaagaaaattggacatcaacaaaacatattccagggacttttcccttgacttgggcacctaaggtggctcacaagatatatatgggtgcccatgtcaacctgaggcactctagtacacttttcgaagaagtctcctagacaatatccttgtttttgtcaacaatgaagatacaagtgctttcggaaaacaaatcaagttatctaaagaccagttcacatgttgggtgcctaggttgacgtattccacagttcgtgtgaatccattgctcagaaagtgattccatctagagcataacttatttttctcctaaaacaacatatgggacgtgggatgagaatgatccattatccaagaggtagtttagccccaagcaccaccagacatcaaccccgagcacctaggttaaaggtcaacctagagctcagggttccatccataaaatggtagttcctgttgtaggttggttaattataataaaagggtaagcacaattatggtagtttatacctttgatagttccacattaagagtgtgtgaattttgatatagtgcagaacataattataattgattttttgggtttaaaattaccttatagaatgtatatggttacctatgaagtttgaaatcatttggagatatcaaagaggacaattaaacacaaaatagttgtctaggcaacatatcgcttcgaacataatgcatgttgcatgaaaaatacataggttgatctctatcatatgttccaagtgacatgtcacctaggcctaagcgacatgtcggctggagcattataaggggagtttaagatttgtgttttaaacgtgtttatgctccaaatttaatttcaagtgtcctaatactattggttgagacctaagacgatttctacactatatagggtttatgataatgaaaatatgatcacatatttctctctctctctct

SEQ ID NO: 219288 - DNA, 3979 bp, Cannabis indica
catgttgaagaaactaatttttttctgttgtttttaatgaaataattatttcttttaatgttgataaaactgatttttaatgttagtatcgtttttagattataatttttgcattattattattattattattattattattattttatgaaacttattttagtttgtgatttctttggagatatttatctcttattaaataagagattaaatgcccaaacaaagtatgaagttagaaattagggtattaggtatttatataaatttatatgttgaaaattgatttatataaatttatatgcccaaataatcaaagatcctctatagatgatttacattgagtaatgattaatttaccgttctacccctcaatgtattttatccttaaaacacttaacttcctataaataatatttcagtaaactaatattattaatgaaataagagctcttccatttatgtctattaggccaaactcaaagaaaatcatcatttcacttctaaatagttatagaagctatagattccatatctatgattagcgctcccacttaattgcactctcatgttcccaagatgtaagtactggaccgatccaattggtcagcattaacgaacaagtcaaagaacacaaatagtacagttaagccaaagcctaaccatctcaggattgagatcttttgatctgagatcaacaagtgatattgacttagaaaagaagtttatgatatcttttccactgtcaatattggtccagtccgatgtaaagccaatacatctgatattagtatactttactaatgccttggaaagaacattccacttttacaagtgtaagtaaactttatcgctgattatcacgtaagtataaatccagtgcacttataaatcatgggattaaagactttgaagcatataatcacaattactttccactgtggaggtatctagtactaccaatagtgaaacagtataaagttgtagaaatctaaaaagaaaaagataatatttcaagagacttactcactagatagtgcctggacagtgaaggaaaaacctttggtctacgataacaacacaagaaaaagcttgggttcttaaaattggctggtcttttctattttgaagctttctctctgagataatttttgaagaagatgaaatgggaaaaataattaagggatggagggaaccatttataagggtctttataaaggattttcccccaaaaattaaatgggaaaatcaattcccataaaatttgcttggggaagtgaagagggctaaaaaggtgtaatcatgggggagtgtagctgtgagcacgatcccccatgatttatgacctgaaccctcataatgataactaacttggaggagtgactaatgggtgacccgttgaccctgcacggaccattcgcccaaaataatggcacaagactcacgcatgtgtcaacatcctggctagtacctaagtccctatccggataggctttataaggggacttcggggggcaaatgttatctatttttttacctacccgacgtggtgctatgagtggcctgatctagtagacacatgtcataagattggacatccgagtagctatacaaaccgtgcaggtctccaataagatttatttcctcaagtgaattactttcttgaaagaaccttgccaagttataaacatgccgactaggagtaacaagactaacataccttgtgaaggctcagtaaaagtgatcttcccaagcagacaagtctctagaaacacctagctaagttgtcagcatgctggccagagtagatgaacccagaaaggccaaacaaggtaaatgaaccttgatcttttcttcagtagcctctgtgaatatctccaagcgcatcctacaaatgcaaatttaactcctctgcccaagattataagactctcaatgaattgtaactgcaccctagaatataggaatatttactttttgttgcttcctttaaacaactaattgtaacaatcttctccctataaatagtgaatgaattcacagggggaagggaacaaacttcatgatgatctctactctacttcttaagagcacctctatgaatattattccctataaacataatgagatctagctagaaatcactttgtattttttagtgatatgattagtgttatctcaatatcaatacaactaaaaggggagtacgacattacaatatctaaggggcctaacctctataattcttagtgtttcttttatttttatattatttctaactcttgatttgtgattgattagaatttattagaccttagaatcagttgacaaatttctaagtaaaaagtgtcaatctcaaacatcaacatcttactttttaggtgatttaacatccaattaaaattgtcaatagcctgaaacaccatcatgcagcacaaccacaaatgcagttgaatctgcaaacaaaaatggaacaaacattaattcaaatcacaaatatgtcatgaaatatcgcaagtaacatcatgacatatcgtaaaacacatcaataactacatcaccacacattgctacttgtcattaaacgtcattcctaatttttgataggctagttttaggttcatttaataaagtgttttaaaggtgtttttcaattgattatattcattttgtgcaaaattacgcttattttctacttgttttaggtttaaatggtaaatttcataatgtgaatttaaaatgagaataaacatattaaatgatatgaatatgataaattatcatggaattttgagttctaggatataattggtgaataattctaagtttttgatgctcaacacactccgtttgtgatcgaaaattaactctaaaacttcaaacaaatttttgactatgatgctttcactttaaggaaacatattctgaataaaagttctagatctctctttcatattttcaaaacatcttgaatcatcaaattttgggcaatattgaaagagttatggccaaaactttatcagttagcacaccaagaagcttgctgccaaaaaattagggtctaatgcttcaacactcccagctagtgttgaggcttgtgtgccaaacatatcaatgccacaacacgggtcacgaaactaagggcctagtgtcgaggcttgcccctgtcaaattcgaaaagtggatattttttttatccttttttggctataaaatggaatggattttcatactttttaggaagaaattagagattacgagttggaaaaaaacaaagtgaccaagaaagcttttcaacagagttttcaataaattcttctactctattttcttcctatgttcttagttgatatgtgtcgaattgttacgatgaacaagagtagctaaataattattagggtaatgatggatattgtttaacatttgtttgtggtttaatatgattttattcttcttcaattttttatgtgtaatatatcatttgtacttattttttaaatagtctggccattaattaattgtttatgattttgatacgaaatttgagaagtgcgtgtcaattattttatagtgaaatcagaaaaaatcttgatctaggatgagagtaccaatgtggtttggatagcttataggattttgtgtttaatgccttttacatgttttaatttatcacgaaagtaaaaaatttgcatgtaattgagatttatatatctgataagacaataacttacttgagtaaacctgctattgcatagaaattggtttaataaattgaattatattaggcataatagatagatacaattgaaattaataaccctagttctaatcattgttaattcacatatcaatttatgtgtttttttttgtttttttgtttttttagtttataactttctcttaaattttgatatagccaaatagaagtatttaattttaacgtatttaactacaatccatgtgggttcgacctcacttgtgt

SEQ ID NO: 219289 - DNA, 3729 bp, Cannabis indica
ataagagagtttcgccgcaaattagtcgtgtcaaacttgttatgttcgtgttaagtagatcatgtcgtgtttgacccgttttaatttcgtgtgaaacgcttcgacccattttcaatccgcgcataattttttcgaccctaacccgtaaattttgtattcgtgtggctgtgtcgaaatccatttggccacccctaataatattatgtattagtcatttgacacgtgtctttgtgctatttagtggacagggatcaagacagataattcggccataggagatccgcgcccagaagtagtaggctgtctatctttttttaatgtttagaactataattaacaagtatattaatcaaacaaaaaaaaagtatttttttgatctgaaaataaatattaacaagtataaacaggtgcgagctcagctgcgttactgactaattagtccggagacttttcttccctgcttggggttttcaaaattaccaaaatatccctcgcctgagctcaagttcaacttctcaacttcaaattagggatctctctctctctctgagtctcttttctttgtccggagaaggcatgctgggcggccgtagagatggaccgttgatgagggagaagggccacacgggccgtggatcacgaattgctatagcaattgtgattggagttcttcttggctgcctctttgctgtgttctaccctcatggattattcgtttcagattcgactatccaaaaccgtcactcggatcttcaggttttgatttgtttttctctagttctttaaatttacctctttgactttccttttaaattcagattttaacttgagagagttgacttttagattttcagtgttgatttatgtttaatgcttcaaatgttgtgatcaatgttcatttagtacgagtagcaactactcagaactttgtttggcaaatatatctaaattgattgtagtattaaactccaaacgttaactttacgtttcgtaaaatattgtcggtagaatttgaagaatgtacaactcgtttcctgtagcattgaactatgtagtctcacgccatagattaattttctgtggttatctgtctctagcataaaaatcgaaatgtgggtctttgttgtggacctgtttcttgctatgaaatggtttgaagagaaaaggggtgttgaattatctttagtagcctcagttaatcgcattggatatttatgagtccagattttgcctagcatacttcaatctcaccgtttaattttcttgatttagctgagtttgtcatcatgcgagtcatcggacaagattgatgccctgaagttagatattctatcactatcgaattcgaactcagagttgcagaagcaggtcagagatctgactgggaagctacggctagctgaacaagtaaaggatcatgctgagaagcaggttttggtgcttggtaagcctcataaagctgggcctatgggtactgtcaaagccttgaggaccaatccaactgtaagtcctgatgaatctgtaaatcccagattggctaagattttagagaaagtctcagttcaaaatgagattatagttgcacttgcaaattcaaatgttaaaagcatgttggaagtctggtttaatagcatcaagaaggttggtatcacaaattatttggttgtagcacttgatgacgtgattgtagatttctgcaaatccaatgacgttcctttctacaagagagatccagaagatggtgttgattcgattgcaaaaacaggagggaaccatgccgtatctggaacaaaatttcgtattttgagagagtttttacaattgggttacggtgttcttctatcagatgtcgatatagtgtatttgcagaatccatttgattatcttcatcgtgattcagatgttgaatctatgactgatggtcacaataacatgacagcttatggatataacgatgtctttgatgaaccttccatgggttgggcacgatatgcgcatacaatgagaatctgggtttacaactctggttttttttacatacgtcctacagttgcttctattgagcttttggatcgtgtggctggacggctttcacgagaaccaaagtcttgggatcaagctgtttttaatgaagagctcttttacccttcgcaccctgggtatgaagggctccatgctgccaagagaacattggatttctatcttttcatgaacagtaaagtcctattcaagacagttaggaaagatcctaatttaaggaagttgaaaccagtagttgttcatgtaaactaccatccggataaacttccaagaatgaaagctgtagtcgagttctatgttaacggcaaacaagatgcactagatcctttcccagagggttctgcctggtagaatagttctcatggaattggatgtgcttttactgacttatggttttgataggttcagaaattcacgtgctacacaagttgggtcaatttgattggaatttgctcatgagaccccttcaaatgatctcatttcatgtctcttcatttctttacttcttttttttttttctgggctttgtattcagctacacaatagaatttcggttgctttgtcttcatattcatagccctcttcttagtattatgtataattttccattctttcttgttgttctttttttttcgttttggacttaataacattgcagttcttatggagatatcaatcatgatttcacggtgaattgcatttttatatgctcaattttgtattgactttctctctcccttgatgatggtattttctcacctaaatgctataggacttgcaatgaacttttattgttcagctttcactcaagattatttccacaaactctgataaatcaagttgcttttgttttcatgcttcagctaaattattttataactaggtaacaaagccgcccatcatgcggcgcggcaattattttttcttgcgcagtagttaaaatattttaaagttttcaattatttatttaaaatttagtacaaaatagtttatagtgtagatattacaaaaatactaatagaatgaatcatttatttaattcacatctatattaagtgtatataaattaattagatattttagttgatatatacgataaaattcagattatatatcgtaaatatatattaattttagttaactctcagataattttttgttttatgtatgttaatataaaaattatattttatctatgtaaattgaaagacaaaaaagttaaatcgtcgtcgtcatcatcgtatcttatttgtcttcaccattataaatgtcgttttaattattgtgtttcatttgtagacactacatttgaagttaatattattatcgcatctcagttatagttagcaacatacttaaactcattatcatcatcttatctgaccgcatcgaaaattgaccaaaatcaatttaagaaaaaaaattaattaaacttttaagtcaattttttaattatacaaggaaatattattttttttcttcttcaattatatatataaaaaaattagatagtatttaataaattttagatcacttattatttggaatatcttatgtcttcactttatggatacacatatacatgttttttaatatatattttgtttttctagtttttcaaggaaagtttgttaatagtaggaaaataaataaaaaaactaaccattatcttaggattagttggaattc

SEQ ID NO: 219290 - DNA, 2682 bp, Cannabis indica
atgtaaaaatttctttcttttttattgtataggcagttttgtctcatctttcgtttttgcataaattgtacatcagtgacactgggatcgtagtagactagtagtatctgatgtttctattgatatttcaggaaatgctagcagttcaacttggggtatttcatccatttttggtggaggtgaaagccgtagtgcacttgttagagagaacacaacaaataaaccattcaatgagcctattcacaacattgagcaagctgtatcaatgatccacctaagagaggtattgtcattagctttcaatttgtctacactaattttttttttctttctttctctattaacgttaatttcatcttctttttccctgttaagcccccaaccgtcttgaggccttcagaaacccattctgagcaggagagtatagaaataacagtcacgaaactgctgttgaggtcgtactatgacatcgttaggaagaatgttgaagactttgtacctaaagcaatcatgcatttcctggtaacattatatttttatgtattttcgcaatgcgtctagatagaactatttgatttcatttttcgtcaatcatatgacttggattccaatcagcttttagtgtgtagaagtttttgccatgtatcttgatagtgatatttgttttgcttaaatccttcaagcattcttatgcaaccttgtgtttcttgctgtatccgtaattttagatccatgcttgcatatgcattggattcgagtaattattgactttaaaaaggctgtttgtatcaaactattttggacattttagtttcatttcttgaatattttcaacatatttatgttgcattttttatgtgtatatttcatgacttattttattctatcgtgtgggtgtgtgttgtagtctcaacaactgtcttcacaatggttgcatacaataaagttgcctgaattccatacatccctaatattgactttcttgatttttatatctttgtaaaccatacaaagcgtgagctacacaatgtcttcattaggaagctttacaggtaccattttacatttaaaataagaaagcaatatttcaaatcttactatattttaaagaaacaactcttaacacgtctttaacgttaatttgtgctattttcaacttttaattgttttttatcctgaacagagagaatctgtttgaagagatgttgcgagaacctgatgaagtagcatcgaagagaaagcgcaccagggatacactccgggctcttcagcaagcatttcgggtagttttctgatctaattatatctacagttccagtgtagtaggaacttaattacaatatctatttatatactgctttgcatctatcatcaactctttgatcacagctatcttgaatgttctatattcaatctgtggcatgccatattttatctacctttttgtctattttttctcaactattttcaatgtttctacagctttttaactgtttctttttctttagcatttttgttttggccagaattctgacttggtctgtacactgatgttctgtctcactgaattcccatcatagcatgatattaacgttttacgtttttgggcagacattggatgagttgcctttggaagcggaaacagttgagaaaggttacagcttaggtggtggtgatacaacagggttgccaaggagtggtctgcccacatcatcaatgttctctgctgctagcagctctaatgattcttatacagcatctcctaaacacacaaagtctagaaaatcatcacactccggggagcttcactctcccttttatggtgttgcagattctaacggtggtggacactctaccatgcaaggtctctacccaactgttgagccatgattgtttagttggaactagaagcttacatggaaatcatcatgcattacatttattcaattgctctttgcagcttagaaggcaattggggtcccgccattcccagtgttttgttggggtatattcaaattttcttccaactagatttgtgcgacccatttatttgggtggtttatttttgatccttttcttttacgttattattattatttttatataatataggcttatttatatttttcactaggctccgagaagaataacagagcagatctcccaattgcttttttttttttttttttacctcttccaattgggcatctcaaaaatctttttcggatatattttcttcacattttttttggggtcgcccctcgattgtggaggggtctccagggatggtgcttgggctttgccataatgcaggctgcaaagtacgcaagtgtatctttattgattatattcagcagcgaagtgttatcttcaaaatgcaccttgtgtgataagggactttacggttgataaaacaaccacgaaggccatattggtggtgagttagttgttttatttcattctgaaaggtccgttgtttttcggatttggttgttacattatttatgaatttacaacttcatttagattgtgttgtgtttggaaagtttccctataattgaaattggagtaacattggaagtgagtaaattttcggagtgtaattattgagtttaatatgtttgtttggttatgtaatagcaaaataattatgtaattggatctatcaaaaaaaaaaaaaaa

SEQ ID NO: 219291 - DNA, 5202 bp, Cannabis indica
aaatgcgcatttagtgcagattagatgctctcgtatatataggggcatgtttgcgtttatgtggactttaatggttgcttattataattttatcataattaaaggacaaatgcgaaaattgaaaaactttaaggaggtaatgtgaaatataagatagttcgaacaaaatacacagatcggtgaaaaagggagactcatcaattgacaactacggactgagcagagcaatacttcttcttcttcaccgaatcacaccttcatagattggagatttctctgctcgattttgttttacagtaagaatttgcattctgtttacatttattttcattaattttattatcacaaattcctctatcatgaatttgcatcgcaatcaccttgaatccgaaacttgtttctattttttggtattatagcttgaattttgagtctttttgggttatggttatataataatggttactttattccgccattgtttctgagataaaacagttatatgtttttcctctcacactcatcagcctagccgctttccattctgccagtcttgtggtttttaacttggaagatccttttctgattataattagttagtggatttcgctttaaattttattctcttactggattctacttattcgctggaagattgaactttgtacatttcaaaacctagtttgtttgtttttatatattattgttttttatgtcgcttggtaattgtgttcacttcacttctgttgtttgagtactgggcgaattgacatggaaaaattggggtatgtatgatcgattttgtgttaacagatgagatatgggatatatctatgtatagggatacacggaattatcttaaattgtagttgagaacagagtgaatatagtgagatcaatgataatgatacaaaggaactcaaggaaggactgtattggagttggatatgaagatccagtcatctttttagacaaatttatagtatttgagtactaactgcttcagttttttccttctaatttattttgattgtttgttcgttttatttggtataggcccctattttggtttcaattcagtgatattaagttagagtgtagaaaaacaaatctgtagtacttcaattataactgaagagagaaattctttatacaaaacaatgctaagaaatttaaactatgaatttggtatgtaatgatacatttcactttagttgagcatgaatgtatacattggctcaaccctgtgctgtcttgttgttgaagaatttgtgctgcacacttctatgtattgtgtttgtgtggcaagttgaataattttttagataattaggtttggttgtatcaatttcgtgttgggtcatatttaatgtttgtaatcttgtgtttgggtcacacgacacgtttactaaacttgttagtgtgtcatgtcgtatttgggttttccacccatttaacaatcatgttgtgtcataatcgtgttaaccggaatacaacatgataatacaaattgtcaaccctactcataattagagtatctattgaacgtaatgaagaagtcagacccatggcttcatcatgcttttgtagatattttattgctttccatttgattctgtttcaagtttagattttacaatttgatgaatacttagttatagattgaactgcgcctttcagtaatttgtgctgatatattctattataggaggttttggggtgatcttcacaaatgacacctttttgaaatgtgatttattgtttggtactgaagagttggtcttcatataatttttgttttgtgaaatgggaggacctgacattacataaatgatgtgtcgttatgatcttgatggactgcaaaagactaataatgccttctgtgtgatttgttttaaaaattaattatttgaatttctccattgtgtttgtaatatattatatattatcaattattttttgtgctgtaaatgattactcattatatatagtgataaacaaatgcttgaagcatgagcttctaatatatatgtgctctgtagtgaattttgaatacactagtatgtgagtgagatgattttcttacaactatgttcttttagtagctattttacttaacccaacccacctacatcgccacttaattgggcatttttggatcccacttttaagaacacaccatgtaaaagaaccattcaacccgtttgatgtgcacccctatctgtaattgtgcttttcattgcatgaaacgcttatggaaaatgtgttccttgcagccaacataagcagaaagaatggctggacatgactcaactggaaagaaatcatgtgataccattaatgacttaccaactttcaacactgagaatttgcaaagtaacatgaagactatattttacaggtttgttaatggaagtcctaatttaagctgaatcattggtaatctcactacttgaaattggtgaaacgtgaacatttttttgatatctagaatagcaatctaagagaatatacttcatatcttcgttattataagaagcaaatattcaacctcattgacaaaagtctgctgcagacaaagccattgcttgaaatgattttgataattttctcttttatttctttattcatatatttttgttgactattttatctattttagccgaacattcatggccatcattgccggagttgttgctggaattttgggattaacaagctggaaagggtttgttgtttattttcttgtcatggccattacttcagttggacttatagccaaagccggattttccatccattcgtacttcgattcctggaatcaaattgtgcttgatggtttctttggtgggctattggtaaatgctctatcatttagtacttcctaatttcatactcttcgcctaatcatttacaacactcaattccttcattaacgctcacctgtttttgactttttgcagtcattcgtgctgttctggacgtatccttataattgtttcattttttttttcttaattgcgaaaatcatatagggtcagtaatgtttggactaagtcaactgtttcttgagttatagtgtatatagttatagtgaaaaaaaaaaaaaacttttttatccaaaacagataggggcaaccgaaatggtcaggttctagtctatagtttctcagtttccaaatactatagggttggcacattttattcttgccatgattatgtgctactaagttttacaaatttacctgtacatatatgcgtatataaatgtttttatgactgttgatattattataagttcattccttgacataaatgaatagatttgcctatgacattgtgcatatattctgaggagtgaggcgcaatctgcttgtgaagtagggaaggaatcatctatgatcattagttgataatggtgtatcaaatacctgaatgaagcaaattatgtagttgataatgctgcctttgaatagctaattatttatacccattttttctcttgggaaagattttgtttaggtttttaattatgaatgttcattgttgttttcacgacttattgttaatgttactaaactttaatgatggggttaataagattaatttttcttaaacacaatctcaattctcaaatttaaccagcattgatgatttttttttttttttgagagaaccagcattgatgattgattgcatataattttaataagaaaaatagtcttgtttgacaaactaatgaatattgtattacacttgtaatgaattttactattatagttgatgtaatagtaagaatgataatgacaaaaacccaaactctgtccaatccgatgatcacaaacatgatcacatcttttcctatacatatcctaccaaaaaataaaaaactaaactaagaacataatagggtatgctctgaactatttgacttcagtgcaagttgcttgcaaatcaatcaatattttagtctgcactcgaagaagctcgatctcaatctcgtacaatggaataggatattccttgtgttcgtggatagaagccaaatgactccactaccaacttcgacgtatttcagttctcaaatctgcacattttataaaacagagaagcaaaatcatgagtgttcttcaatgtaaaaaactgagtttcaactaaaacatcagtttaagaaatgtaggtaagtaagagttcttgctcgatttaatgatgggaatgagtaattgttcataaaattagtgagcttaccagcattgtgggcacattcaggaatacaaacgacaaggtgtataaggcgaaagatattgcagcacccgtgatcatgttgtggataagacgcttgtcgtctttactagggacaaatgctattttcagtgtatttgttaggtcaaaaagtctgtacgagatctgcaagaaaaaaaagtttgatatagtgagttaacagcagctttggctatgttcattattgcataatataaattttaacttacggcaacgtatatggatgttgtgagcatgaagttcaacattggataatttggtatcatggacagcaacaactttggctgaccatcgggaacacctgatctgtaagtatcaaataatatattacaaggatgaaaatatgtgatgatgtaaatctaatttataaagattcttaaaaactccagagacagaaggtttatatgtgttatgtttaggagaattgtctttctttctttttctttacaacccatcttttcatcttttttagtgagcatgtcaactgctgctataaaagtcagctatgtctacatttgtttatacagatttgaatttgcatgtaacctatgtatctagcaatgtaaggcatcaaatttagtttctatgaaataagaaacaccggcagtagcaaatgaattttaaaagaaaagaataccttaaccagatatggatttgtgaaatgtacgtctctagtgttattttcccgagccatctgataaacacgagagtgttaataattcatgaataattgaactacaatcttctcagaaaaagtacactaggttgttcacggatgaagctttgaaactaatatatgagaaaatgaatcaacgaaagtatgagatgacacttacgcaaacagggtcaaagaatagcatcgaaactgttgggtaacatttcgcaaacatatgtacaccctgatcaacacagatgaaatat

SEQ ID NO: 219292 - DNA, 4619 bp, Cannabis indica
aatataataatagggatatgattttgttccgtgatgtacttttacggaatgtatttcgtggtacattagatggatttcaaggtgtattaaatgagtgtcagggtacgtttttactttttaatcctaattactcctagatcaatctcaaccgtcagatcaaataactccctcatctgacagctgccgtacatcacggattacaatccgtaaaaatgcaataacataacaaaattatatcccgataataataattgcctttaataaagaagagtatgtattgaatagtctgtggactgtggttaaaaatctgacaccttactagaaaccatgtgattatgtcttaaaatactagatcatattgtatagctgtctctcaacaattagtttgtactaccaagtactaaaatgccaactttgctggatccctccagctatgtttggttaaaggaaaggaatggaagatttaaaaggtagcagaaattaaaaagatagaaaagatgtattatattgtaaatcaaaatcaaaatttaattttattatataaattatttcgatgttaaatatagcttattaaaggctttcactccaaatttgttgagacttgagtttttctttctgttcatttgtcaactagccaactgctgattaattttacaaaagctaattccaaatttgatctttaagtcttacatttcatagtaccattaacaaaacttgtttattgcgaaagtaacattattattttttgaaatgtccctggaattgtgtcatatggtatctgtattctggtacagataggtatatgcctttaattgaaatacccagtaggaaaaggagtaagaatcatgtatactctagcccaccacaagtgtataactttcactatatcttattactcgtccatgtacaccacattacattgctaatgttattaaaacatacaattataaatatacatctataaacggcacagcagatacatcacttaaggcacataaacttaatttattactgccaaaagccagaaaaaataaaaaataaaaaaagaaattaaataaaaaataataataataaggtgctggtgttgtgtatgtatgatattatgaggagggatggaagaagctgctgttcacgccagctctgtatagctgcaacctagaagcacttcttatattaagctcagtgtttgcaggtatgaatagaacatctccttcaataattacatctcctcttggagaattggaatacataattccctcaccgagtgccaccaataaaatggaaggacccgggaccgcaggaaacaccgttgattcctgctcgggaagattacaactatcgacctcgaattcatcaaatggcgggagatactttcgcacatatggatttagaggaattccttgtagtatttcagggaatccctatagtcaaaattagagtgtcagatccaatgctagttttttgttttgttttaacatagtgcagaatgatgcaaaataggaaacaatactataaaggcctaatttaaagttttctgtagggccaaatacagcagagtcgaaagctacaacagagcaaaaatatctttttgtttttatcactcaatacaagcatgggcacgatttcagataagctctccataataatcagatcaaaatataaaaatacaacagggttaggttgcatagcataagaaaaagaaaacaaaaaaaaaaaaatagaaaaagaaaaatgacttgcattagagggctttctcctatccttgcattcatggatagtgcttatcaacaataaagcaagtgctacctcatctgaaaagttgcccataaggggcatcaaacagagaaccagaactctaataatattctgtcctttttatgttttcttttgttacgtaacatatccaattcctttttataaaaaggaaaggcaaaagagtgtttgtgaactttacacttaccacttacgtgtagcatagattcagcagtgaataattgaaaatgcaatcacaaaatgtaaatgactatgtacctgcttatacgtgagcatggaacaaagagtgttcacatccatgtgcttaggagttagaccagccctcacaacattgtctgaagttgccatgcattctatgcactctccgaataaatatgcatggggctcgttggctccaagatataaagcttcacccggattaagtttcacataattaaaaaagtaggctgttatcacaccgacatcagatggatactgcttttctagctccaaaaccagccgttccttttctgtcaactgccgaacctgatataggagggaaaaaacaatttgatcaaagaattaaacagaggatggcagtaataggaaaatgaaaagaaaaaaaaatcaccaaccagcaaatgaaaaacaaaataaaattacagatgaaaacactagagaaatcaacctatcttacatacagtgctcagactatttgaacctattgtgcctccatagagttttaacatcctaagactacaaagaaaaaagtcaactgggaactcataacttcaaaaataaaaataaaaaacaaaacttttttcaaaagaacgctctgtgaaaactaacaaacatccttgcagcctttaagaggcaagaaaaatgaacaaaactgaatcttctacaatgggatttaagaaattcagttaagaaataagttgaaaatcaccaacatacctgactttccgagtgtaggcgatttatcattttggatgtgacttctgtaatcatgtctttgctagctgacatgagttttgtaaaaattgaacgcagagcagactttactttctcctgtccatcttgctcagtgatctccagaattctttttacatctgagaggccaactacttctacaatctcaggaacattctgaaggacagacttgagctcctgcaaaaacatggcatgccaatacatacataagagtgagttcaaagacaaataatcagtgctaacacataacgatggagaccaactgaaatgttactttaaaatttaataatcattttacaaattctgtatattcgtatcaggtgcaacaaatgaacccaagttgatgttaatcattcaatttaacatcggtttttacaaagatgatcgataaagactgttatggttagcttttcatggcttgctggagtcctttactccacaatgaaaatcttccagcaaggcagagggcctaaatctaatccaacagagctccagcatcttcttttttttttttattttttccgttcaacacaaaaaaatatacataaataaaggtctactaagtgtatgaccgatttttccaaaagtcagttgtccagtttttcatggaagaatcatgctcctaaaaataaaaggggcttaaacatagacccctggccccattaagatacaaggtttcagcagaaaaactcataatggatacgcatgtaaacagagaaggttaaaacataagtgaccgacagccagccacatccctaggtggaagttagagaacgaaaccatccaaagcacaaaatcattattgtacaattttaatgaaatggccagattttgtatcaatcactacagagatctgtttattggtccattcttaatattggcaaccacttcaaaaccaagcaaataaagtcaaaatccaattttggcaatttaaattataaattcacatacggatcagtagtgtatgtgtgtattatatacatacctggatactgataaacccacaaagagcctcaaattgagttatagcaagagccatctcaggtttgtgattatcatccttataaagacttggaagtaacttatgcagagccttggcaagttccttatcaggatgagcctgtattgacaatgctttgccaactgaaagtacctgaagatcattaacaaacaaatcagaccccaagaaacgggaaagcttcgatatagaaatcccatcgaaattcgattaccttaaacaggaaggggaggtcagcaccccatttctggataactttctctccaagcacattagggttcttcgaaatccatgacttgaggctttcacactccgactcaaacgagagatggccattcctgtcttccccattgcaaaccagaaaggacgacccagactcgtgggtgcccatccataactcagcgtaaggcttatctgggtcgactggggagtcagatttgagaccaaagagcttggcgacatgagagtcgcgacccttttgaccccaatcgtagttctgtacggaacaccggagccattgaacattctcacggtgatggtgcttcattggagtagtaatagcagtagtgatattaggcattagaatggtcgtagtatcgtattcgagaacctccattaagtagtgaaagatagaatggaaagaagttgagaaagggtatcggaatcaagcaatttgagggaatttgatagaggtatatatgctagccattgacaatggcgtggacgcgtgggtaaaaaataaaatatggaagagaaggttctgagcgtggttttttgtgctgtaattgctgatttttcaagcgtttgaaaaggcacaggcgagagagggaaatgggttagagagagagagagagag

SEQ ID NO: 219293 - DNA, 7967 bp, Cannabis indica
gtttgggaggggaaagaagagagagaatgtagttagagggaatgtgggaagtttgaaatgaaaagggtatttttgaaagaaaatagaaagattggtatattttttctatgtgttataattaggtataattaaacactatgttcctttttttagcatggaatgtcaaatttcccatctaattttcagtggtaaaaccctccctccctctctctaaatattacataaaccactaccaaaatggcccttaagtgaggtatttagacggtgggaaaatgagcaaaacaaaagtaaaattcaaaataacttactacaaaaaaattagatttgtagaattaagtgtaactaaataaatgtgtagtttgggttagtatcgccgtcaagttcttaataaagaaataaaacataaaacactcaggtttatctctaacaaaacttggaattgaatgacatataaaacaagtcttacagttgccatcttctaatgtcttgcaagtaagcttcatttctttttacttttatacaaacaaactatattgccaataataataaaatactcaatactacgtttcttggacaaggacaaaaatggctatttatctttctacaccgaaaagaagaagaaccatatttcaagaacaaataaactacttgaaattaaatcaaatgattggaaggacacagattacagtatattccactttttctccaatgcctggcaaatcattgtagtacaatatgctgcactcagaggaaacccagaaactgcaaaaataaataaacctataaaattagtacataaaggtcagtgttaaaatttgtaaagatacatggtcaaatcaaagaatgtagtttcaacctttctagtaatatatttgcctgatcaataaactctgttgataaacaataaaaaggaggaattttcatacaacaatcaactactttttgaaatacttattcaaggtagtaatgtggctcctgctactcttgttcagggcaacaatatcaagttctttacaatgcaattagcgtagattcattattatatgtaagtttctctcgagtagtattcctaatcgccaattgtagaccttacacgttctgatgctttaaacagccacaaggggaagagttatttctttctttttttacagttgacagattacttaaaaatggcacaaacacaagatatacccacaacacccatatctataagtcattaataacatatttcatatcaacaaattaaagggctaatgtttgttttaccggctacgtggtcttcaacatagtctggttcaaccttcccgtgagccatcgcaccaacctgaaatttaaatttattaagaaatgaaagttcatcttcaaaaacaaatatacatagaacttgcctactttcttaccacgaaaacaaggttcgcatcatcgctaagtgtagtgacatagtcttgcattctcaccaatttctttgaactgtatgataggcctgcaatccaaacatattactgtaactactaagaataaaagaaaaaacaagcaaacattcaaacaattggaaagtatgtctgagtttaaaactcacctattttgcgagaatcgacaggcaaatattgggtgacaggattcttgatcacccttaaaagtttttcgcgcttaccaccggcagttatgctaagtttctgtaagagttgcactgcaagtttttgacaagaattgacaaacatctaagagggtgacacaaaatgagggaacaaacaaatacaagtaaaacccaatttcggctaagagaaacttacacatgacaccactgaaccttttaaaagttcttggtaaccgaacatatggtttaacttcaataagaacacctttctctgttctcacatacactgctcgcaatctcccagctttattaagtgggctatctaaaatcattagtagagcctacaggtttcaaagttggagattattattaaaaggaagaaaataaaaattctaactacaagacactgcaaatattgctaatttcagttgtaatagaaagagtatttataaattggtaacagatgaaactatttatgataagataaaatcacaaatacccagaaaatcagaaaacatcatactcataaaccccccaatattactatatctcataaataaaggagaatttttaggcaaacctgatgagtaatatcaggtctgtaatctccaggatttttttattcttcattaagaaatgggaatgctcgtcagagctcagaagctggtaagtctggaaaaaaaaaattaacagttaaggatgagaataaatagcataaaaacatgatacctctaaaccgattaacacagacatattagactcaagaaaataataacctttcccacttttgcaacttccaatgaagctttctcaagaataaagataagcccaggctggtcctttggcttttgggtagatggggctaatgggattccctcaagttcaactgagtcaccatgttcttcttcttcttcttctttttgtgcttccggttcttgttgttcatcttctaactctagcgcatcgtcttcttcttcctctttgtcatactttctctactgtcttctttctcttcttccccttcactgcatatggccgcaccattgttaagaactagtagagagataaaccgtgtgttcgtattgggctaggtcacaactcagctcaaagttaactgctcgcacttttaaggtttatatatattgtattttcataaaaaaaaaaagaaaagaaaaattatagggtgattctagtagaaaccctgacctcttaaaacccttttcctctttgaagcttcgttgcatactatttgtatttgcacatcggtccttcacttacttactatttctaaaacccttttcctctttgaagcttcgttgcatactatttgtatttgcacatcggtccttcacttgcttactatttctaaacatgttgatgtgtttgattttcttttcttaaaagccctgacctcttaaacccttcctctttgcagcttcgttgccgccattcctaaacctttgcccaaagggctttcatctctttctctcgctttctccatactcaccattaaaggcatctctccatacaatctgtcttcctccttgttgactactcacgacaaaattcctaatctttgttcgctaatcgttccctcactcaactccataaccaagcgacaatggttaatatactgaaaggacagcgtgggggtgtcaagggtgagcacctcaagcatgcttccattaatggggtcgatatatacaccataacttctcagcaacgttccatccccagctggattggtgataagaatcaaaaagttccacgcagagttaaacaaagtaattctcctaaactttgctcatggcgtcctctttttctttttcgataattttaatttcgttaatcactgctaattttggagactttgaacggaatttcattgaaaatgttgaaagagcaaacgataatattgtattgcttaaatcctaaaccctaaactttactggaatgggaaaactgtgactttgagctgattggttgtaatatatgtatctttcttcctttggtttgttagaggatcatgataaggtgtccttgcttcaggacttgtggttcgaaactgcaacaaccaagattaaggcaacccctgatggagattatttgatggcttcaggtgcttacatgttattgtttttcttctatatctgatattttgtgataatgtcgttatagtgagtgaataagtacataaataatctaacatgtaataattctatataggtatctatcctccacaggtgaaggtatatgagttaagccagctttcaatgaagttcgaaagacacttggactcagagataattgattttcaggtactttatttacataggcaaaaactatgctaatttagtaatcttgttctttttaacttaccatccatatgtgaatgtcatattataatctcatcctacaaattcctctcatgttattaactttttgttttgctctttacaatgtgcagattctaagcgatgattattcgaagattgcatttctatgcactgatcgtactgtatactttcatgcaaagtatggaaagcattgcactatgcggattccaaggtttgttttcttttttcttcttgattttctcacacgggcttgtactctgtattgtgcctggttcttttaaaagtgaaagtcatagtaaaattatcggttgtgtgtgtgttttctccccatattgtaataaggcatgatagcgatgtgtgaattacatttatttatttttttcttcacaaagatgtcccgtgattagaaaataaagagataatatgttagtcaaaagcatctggtttatatatcatttcacttttgccttttttttttcttttctttcaatacatcaatgagatgattggcttctcatgcttcacaactaatccttgtctaagatacttagacaaggctactaatgggtgcttttttttagcctttgaaacaagtatgaccaaactgtggtggactggtacatcccagaagtttatgcaccattttcagacccttaaggtctcatgagtctagggatatgtcaatcaacattctttttcataagggtatgtcaatcaacttttaaaactagttttcttataggaatttcccaatcaaagatgaatgttgaatagaatctgaaatcccttctcttattgcttatgaaaaatttgagatacaaataaagttccaaactttcgagaggtttggatctctcccagctagagcttttgatctcccaaaatctaaacaaatttgactaagttagagccttactccactatttataaattaattacaattcataaagaaaaataaccttatacggagattcctagttattgcttaaataaggaagcctatttattgtaagtccctcctcttattcctatcttttcgagcattagtatattttagtacgggtctatcatttcctctcctccaaacttcatcttgtcctcatggtgtatcgaaggaaattggtgttttattatttaaggctctttccaaatggcctcaaaagcttgtagatttctccatttgatgagtacttcttgttctccctttgctatttgacatctaagatagcttcaggctctacaagcatttccaactcggataccaattgagttggtatagttgatccaagcgctgcaattggggaactatgagggtggctcgctctacattctcatgaattcttgataaggcatctcttgctttattgctagctcttgtgcgatattaaatgtcgaattcaaattccttcaactttgaaatccatctttggtaattggctcctattactcttttgtccaacaattactttaggctttgctgatctatttagcaacaaaccgtttgcctagtaaataagatctccatttttgaactgcaaagacaatgattatcaattccttcccgcatactgatttttgtcttgctcgagtaaccaatgtgtggctgtagttggtagctagtctctgttctagcaatatagttcctaaaacatagccaaaagcatcaagcatcaacttcttctatagtacatggcttgaaaaatctagactgcaaggatagatgcttgcatcatgacctattttagctctacaaatgctaattcaactttaggattccaaccaaacttttcatttttgagtttttgagtgaatggcagagcaatctttgagtagcctgctacaaattcatgataatagctagccagccaagaaatccccgcaatctttaagtgttttagagttggtcaagccttcattgcataaatcttactaggatcaacaacaacccctcctgctctaaaaattatttggcctaaataagtgatggtaccaaagtcacactttttataattaatatatatggggaatgtctccttagtgtttctaagatagccatcaaatgatgcttatgtttgtccacattagaactatatgctagaacatcaaaaaacgctgagacaaacttctttaaaaatgaacgaaatatggcatttacgagagattgaaaagtagagggagcataagtgagaccgaagggcatcacaagaaattcatagtggccatcatgctttcgaaaagtagtttgtttgtggatgtgttttgatttcactcgaatttgatggtatctcgcttccagtttagtaaagatggtggcttcatttagctcgtccaataactcggctatcacttcactggaattgggtaattctccgagatggtggctttatttagagcacgataattgacacaaagtctccaattgccatcttttttttttcaccaattataccgtacttgaattctttttcaaaaaaaaaattatactgtacttgaacaagggctacagtttggctctatgaccccattctctatcatctctagttgttttttcaaggggaggggctacaatatataacctcaataaattaatagtcttggtttagttatagttgctcagcctgagagaaaaggtctaatttaacactcaattaattaaaaacctcgattaaattgtacttttgtttggtgtaatgttatcaatttataaagattttactaacatgttggaggatgaggctgttctatgggattgctaattattgctcaacatttctacccataaagagtaaaatatgttcaattgttggagcatatgactctaccatgtgtatttgtttttttttattttatttatttatttcatctttttttcattcttatttttggaagcattgtgttctcttgtatagtcttattgtttcttttatatgtttgattcttatcagaaaaaatgggtagagtacttctgatttattttaagctttaatcttacacgtcttattcaaatatagaaaaggtggaattatttggtgttgtttgtgtctgcgttggtcttcttctcctccttttaatttttatttttcatttttctgacgacctttttttccccttattgcctttgacgacgaaagttttcttgtttcttactacaaaccagtggaaagagttgtgtcctttttttgtcactaacaaaatgtatttttctttcattcttggttggttcttatttgaaatttgtttgtttacttatttgcattttttgcagaatgggaagggacattgcatatgattactggtcttgtgatttgttttgtgctgcatcctctccagatttatacagaattaacttggaacaggtttgttcaactttaactagtttccttgagtagttccttagtccttcagaattagctagtgtccttgtgcgtgctttgtatatgttgtagatttggacccaaatttaattacttctatgtttaaagtctcttgtcatttttctgttcactgtttcctaattagtttaggccagtggtcatcctatgaaatttgttgaatggtgatgagatgtttttggattttgggttttatttagttgttttgccacctctaacaattatttattttacagggacgttttctctcttctcttaccactcaatctcctgctctaaatgtagtttcccgaaggttgtgggtgatttgcagtgttttttttttccttcatgctcctagcatttcctttgttcactactcttgggtattgatatgttgttctacaattgcagcaaggtccatggactagttgcttgcggcggtgaggatggttctgtggaatgttttgacatgagaatgaggtcttctgttggtagaattaatgctgtttcacctgctagtggtgcttatgaggtaacaatatattgctttgtcttaaataatgtgcagtttttgatccaattactatgacaatgaaaggttcaaggtcatatatactattgatctctctctctctctct

SEQ ID NO: 219294 - DNA, 4386 bp, Cannabis indica
taaaaataaaaagttaattaattaattagtaattaattttcataagaacgattccctattttattattatattattacttgatttaactaacaattactattgcatcatctatctaaatttaactctgcccctaacgttatgccacatgttgtcgtgtttcacatcttaacatttaattttaacataagactttcatcagtactaactacgtccaattaaaataagttgacatagatgataatgatcatcagtaatcagtacgtatatagtctgtactcgattcgatctatattctaatggtgatacttccaaagtctttcttacattataatatgtgaacacacacgaccacccagtacttccacttcaatctaaatcctctaaatctcaaattggctatacttacgtaataacaaagtttaattagtacgtaacattgtgttataatggccaaagaagatagcttctcttctctcaaaaccatcgacaaatgccaatcaaccgatcgtgaaaacaacattatcgcagtcgatatgaacggtactttgcttacccaacaaagccctttcccctactttgcactagtggcatatgaaattggtggaattttaaggcttctcttcttgctattgacttacccacttgccaaatttttctatcacttcgtctcagaatcagctggtattcgagtcattattttttccacctttgtaggtatgaaaatttctgatattaaatgggtagccaaagctgttcttcccaaattttactctgccgatgtgcaccccgacacatggcgagtcttctcgtcatgtgacaaacggtgcgttttgacaacaaacccaagaatcatggtggaacctttcttgaaagaatatttaggagctaatttagttattggtacagaaatatcttccattaaaggtttcgccacgggctttgttaagaagcccggggttcttagtgggaagaacaaagctgaagcgcttcgccacgagtttcctaacccaacacctaatataggtgtgggtgatagtgaaaatgattacccatttatgaagctttgtaaagaaagttacaaggttgatgccaaaaccaaagttcaaccactcaattgcgaaaagctacctaaagtagtgatatttcacgatggtagaattgtccaaaaactaacacctttcatggctttaattgttattatttggaccccaattgggttaatcttagcatgtttgcgaatcctagcttcaataacaattccttggtccattctcacttacgtgatatggattttgggggttcgtatcaaagtaaaaggaaatttatttccttttactaaaggccaatctgggcttctcttcgtttgctctcatcgaacggtcctcgatgcaactttcgttgctggggttcttcaccgtcggatcacaaccgtctcttattccatttcacgattatcagagatcatttcaccaataaaaaccacaccactaagcagagaccgagtcaaagatgctgctctgattaaaaagactctagaggaaggtgacttgatcatttgccctgaaggtacaacttgtcgtgagccttttttgcttaggttttcagctttgtttgcggatttatctaatgagttggtccccgtggctatatctgttaaaatgggtatgttttatggtaccactgcgagaggttcgaaatggatggacccattttacttcatgatgaatccgagtccgtgttacgagttgaattttcttgataagttgccttatgagttgactcggcgaggtgggaagacgagtgttgaggtggctaattatgtacagaggttgattgcatcgacattgtcgttcaagtgcacaaatttaactaggaaagacaagtatatggcgcttgctgggaacgatggtgttgttgaaaacaaaaagaataattaattgggtcaatattttgatgtttaaggttagtgtcaagaccctcctacaaattttattgcttttattattaaatgaagtatgtactactgttttcgttttcatgcattgatgatgtaataaatacataatatgtgggaaaataatttacacaattgcccacaaaatttcaaataaaaaagtcattttcctatttctcaaaaaataaaagtaaaataagtagattctaggacaacatttcctatttctcaaagtaaattatttacaaacttataccgtaatataaaaaagtaaaattgattgagtaatataaaaagttaaggtaaagtaaagaaattgataagagtgctctatgtcatcgaccataatttatctagttgatagagcaagtgctttatgtcattttttttatttcatttttttgtttggttgtagattaaagtattagaatgttgttccaataaaatgactaatctacttttttggtagaatgattattccattttaaaatgaaaggaatgactacttaggaatgactatagagtaggagcgggtatagacatgcccatgactcgccttggatttctgctcaaaggtgatcactaataaggtaaattacatacaaaatgagagctaactattgtatcccttagaaataattgtgcctgtgcgtgccgcagctggataattgggggccatttatatgttgtggacacgtgtctctaaaggtttaacctttaaaagtagagggcatgtgtcgctcaaagatttctcctttaaaagtagaggtctgatataaccgtcttgtaaaaaggtggacaaggtgcgcgcactaccatgcctggacacgggggacaagatctgatcctatgtctgaaaaagcgtaaccgtcacttggtgatctggattgcacaaaaagtaaatgtctacgatactcttaggcggtaggtatccgcataggcccttcgagtactcatccgggtatcaattgggtaggcttccacatttggaccactccaagtccaagagacaacatagcttttgtgttcgggaagctaattcatcgtacctcttcactactactcaggcagggagtcttatcctaagttaaaaaaaagtaatatgaatactttaatttaactaaattataatgggtatataattatttgttcgtctaaaaaatgtaattatctaaaatgtagtatttaaattaaatggattaatttggcgctgctggtaatgttcttttttttatatatatatataaataattcaatatataatttgcggtataaatacttaaatttaacttttagttacaaataaatacttaagtttaatttttggcaataataatacttaaattatatttttaaaactccgtaagtacttagtcattaaatgccaagtcattatctacgtgtcattttttattgatatatttaaataattttttttataaaaataaaaatttaaggactcagactaattaaaaagtgacacatggcaatttacttaacacttaaccttagagctttatgccacaaattattctaatgttaatactaataataataaagaatgaaaaaaaaaattaacacttgtactaaataaagtaaatataaaaaaaaagtcaaatatcattttaaatttaatatattgcaaaagttattaattgatatatgacaatttagatttattttgaatggtccttacactcaattttaagtaatttattttcttaatataaccgattggagtgtccaacatcaacaaatataaaaaatataaccagttaactaataatatttataggtaaaattattattaaattttcatttaataaaaattaaatccataatttatgttatactattttaaagaatatatgttgttaattatcatttaacaaaaaaaaattccagttgcaatacaaacctaaactaaaaatatttttaaaaaaacatatatatatattattatataatttagcctcagattgaacctcaggtttatccctgaccagtttggtattgaaaaccctagaacctgtccttccacagaaactggtaattattatttttttttttggatttgagtttgttttttgtttagtggtactgtgaaccaagcttttggggctagccgtatctatatttattttgcgtttcttgaaatttcttctgtttttttctatggtggttttcactaattcataatgcgggtttttgtaacacaaggaaatttagagtgagcggaagtgttaataatggctgcgaaggaggattacagaatattcgtgggaggtttatcgtggaatgttacagagcgtcagcttgaggatgccttcgatcgttttggcaaagttctggaagctcaggtactttcttcttcttcttcttctcttatgaaatatataagttgttcttgatgatttgaaggaaaatgtga

SEQ ID NO: 219295 - DNA, 2659 bp, Cannabis indica
ctataaccactccttccgtttgtgctttcttgctcaattctaaggccctcacatgaaaattgttctgagcataaccagcaatgattgtcgtccatgaaatgaaatccttgacagccatcctatcaaaagcgcgacccatgaaattcaaacaacaacacttagcatacatatctacaagtgtgtttccaatctgtaaattagaatctaatccctcttttattgcataagcatgagcttcctttccatacaataagtttcctaatcgaccagatgctgcaatgacatttacaattgaaacatgatcaggtttttcaccgtaactttgcatataacggaacagctttagagcttcattataaagaccgttttggacataaccagatagcatagtgttgtaagagaaaatatccttgccctccaggttgttaaaaactctcatagcctcaaccatcttaccaaatctgacatacatagcaagtaaagcattcaccacataaatatcaagattgagacttgatttcaatattgcagcatgaatctccatgcccaacttctcaaaaactgaatcttcacaggcttgaagagcagagaccaaagtatatgagttggatgaaacattcaacttctgcatttctctgaaaagctccaatgcctccagagcttttccattggcagcatacgcatatattattgaattccaagacacaatatcatcttttacagtaatattgccaaataacttccttgccccattaagattattgcacttagcatacatagaaactaatgcattcacaacaaacgacacagaatggcacccagttttgatagccagaccatgaatttcagtgccacatctaagatcgttaagagaaccacaagctttcagtatgcacagaaatgtgcatgaatcaagagaagctcctgaaacccgcatctctctataaagttcaatcgctcttaaagactcaccatttgaaacacatgccccaatcattgcattccacgtgaaaattgttctctcacacattctatcaaacagcttctgggcattcacaatagaaccacattttccatacataaacaaaagcttagtactcagaaacacagaatcagatacgccacaagattttgtgatatgggcatgaacttgttggccttggagtagagctttcttgctagcacaaagttggagaacagttgaataagcatcgtcaagacaaaactgggcgtgtgaagtttggtctgcaaacaaactgtcaagtgattgaaaagcttcacggagctcagaaatgtgtttgaaggattgaaggtgggtttggtttcgagagaaattgggtagcgataatgaacaagatttcttgagcataatggagtggcgttggtatggtagatttgaggaagtgaagtaagagtaactgagtgggagtgaagtagccattagagagtaacactgtgagggtggccgtaccatcgaataatatcatgatttattgaattgctgtgatttcataatgcagctacaaaaatatataacaaactaaaaataattattcttacataataaattttatatcaagttttacaattgttaattagaaaatcactgattttgattacagaaaaacaacatcttccattcaatctgaactaatccaaaaaaattatccaatacaattatatatttaaagaaaatggtgtagaatctttgatcaaatcttccaaattgaatatatttgcaccttaaatttgtaaagagaccaattcatatccaaacaacaaaagaaaaaagctaaaaagcttcaatgttaagagaactcacagttggaggttggaggtaggaagagagtgacggagacactgccagaagtggcaacggttggcgaaggtggggatagccggcgccggcgtgggaggagtagaatgttgtcgagactagagagagagagagagagagagagaagagttggatttaaggattttgggctagaaagaaatagatgagagtccaataatgttttcatcgcttcaacccaatcaagcttttcggcccaatagtactatcacgtcattattattgggcttcagctgaaaataggcccagatttaaaagttcagatcacaacccatgggattgggaatgaaagccaaacattggagccaaggtttcggccatagctacataacaactagggaaattttcaacttttatggtttttaaagtgtaaatttgcaacatttttaaaatgggtatatataaatttacaaaaatattttttttaaaaaaattattttatgagaaaattttagagaaaaataaaaaagaaaaaaaaacagcataaagtatctggttaccctcttatggtaactcgttacccttctggttatttttccatattttttaactttgggaaattttatttacacttcaaaaatttctaagtacaccccattttaataatttttattttatataaaatttatatctttaattgtactaagtatttttaacttttttctttcaatttatattcttaaaaaatatacctatcaaacaaaattaaattatattttaaaaattatgacaaaaaattacaataaaaattatatgaaatttttttttaaaaaaatatacacgagttagaaaaattatgaaaat

SEQ ID NO: 219296 - DNA, 1787 bp, Cannabis indica
aaaattccataaaaatataatcttttttgttatttttaagtatttctgaaataataccattttttttggataaagaatttattgcctaaccaaacagaaatgtaagtatttaaaagagaaaggcagacaacttaatatgagcattatatagcaacttttttattttattgtgtgtccaacaacaaggtagacaagaataaactaacagaataatgcattggtgtactggccgaaaagcatctgcaaaatatcagcaataactaataaacaaaattctatcgtattatataaatcacaacaaaattaacgagaaaactaaaaagtatcagagatcagagttatcaaacatcagaaatagcagtttcgtgcataaatataaggaaatagttttggctataatatgtttatgtctaagcttgttaaccgtcaagtgttaagtgttgagcgttaccaagacaacaacaatctttatgaacaaaatttcataaaacttcattaggcaacaaaatttcccactcttcatcgcataagcccacaccagagcgatataaacgggttattacttctcttctccacatgtattcgtattaatttagatcaataatatttatttttttcaaggcaacaaaaatttgttatcttctgctcttggactctttccgcatctctgcaaagtaggcctctaaattggattgttcccataaacccctctgaagaagatcttcctttgttgcgtcgtctgcaaacaccacatacacagcctcatttactaaagactatacaaagaataatctcagaacaaatgactatgatgtgtaatattatatgctgcataagaaaacaaggtagtggtctgggactctggatccttatttaaggagttgataataagcattgtaaagcaaaaaatagaaataaaagaagttgaactttactcacccatatttacccatgaatcaagatgcactctaagggctctctgtgtaaggtaagagacgtcatcccaagtatatggagctttttttaccttgtatctcctgaaccagtgaccacaccaaagtaaaagctagatttatcaaagaaattgaaaatgtaagtcttcccaatgatatgattctaaaatcatcaacttgacaaaacaggctaacaacatttaaaggaaaggcaaagaatctaactttggaaacagtgtaaggtagaagtagaaagcgaacacagagaagttcctagagagaaggtttcccggcacccgttatctgtaggtcaagttctttgcttagatcttcctctgttttcctgtcataaaaaattggctcacctcagtttaatcattattcatcaaggataatgaacacaaaagacaaatcatattagatgtctttaagacatcaactcactaaaattgtgactataacaaagatttatgtgctaaataatcacattagtcgaagctatcatcaatagcttgtccattccaaacatcataaacatgcactcaatttctaagttgaataagttgaataattatagctcctccattgcgctcaagttccaaagccttcagtctacttttgtacgcaggtgtcttcttgaccatatctatagcctaaaaaaacaaaaacaataaaaaattaaaagaatcacgccaaaagaaatccaactgcctttccttatcttctatgtcataaaataacaaatctgcatatgaagatttcaaaaagtatcaactgaatttttcattccaaagaggtgttataccacaaaaagaattgccatataaatggata

SEQ ID NO: 219297 - DNA, 2393 bp, Cannabis indica
cgtctaagaaagaagaaaaaggatttattgttttcctttaaagttatgcacatgctcaaacatacatacgacatctttggccaaacaaactgtatgcttcacaacactgaaggccaacatcctactaaagaattgagcacccacacttgaagagtttgaaagaaccattccatctttcatcatgaataatgatcatactaagattaaaaagccagtcatatatatgcaaaatgtatatgcattaataaattataatatctcagatagatacctgctcacgccttctcaattcagcttcttttgcttggagttccttctctttctttctcaaatcctaaattaaataatatcacaaatattaaacaaagcacatataatagtgctattacgcatcaaacaatcaaagtaaggatttggccctaccttagtcgaatccatagggatatcaactgtggaacctctgccataattgaaatcaacaggctcaggagggagaggagataaccttgagttattggctgtagcagcagttccaggattctgtaaaatgaaaaaaatggatttacacttacaagaatttgtatgccttccattttttaaccctttcttctctgagaagggacaatgagaaaactagcatatgccagtagggaaggagccacaacaaggtaaaagaaccaaaaaaacatgaactaaatttgtatcggcttcagaatggaagttaagttttttgatcacataataatcggtaacggattaaacatcatgtataacacgtcccattgaaaaacttggcttaaatacattgttaagaagaatacaaaaaaagagtcatgactaataagtaaaaattagcatcggtttctgaataagaaaaggaacgttaaatggtattctgccatcaggcatgcatttagatattagtaacagctaaattcagtgtctttttctaatggtaagtaaatcctctaccctttttatccggcttctccactccacatgggttttggttacacaaactcatatttcagactacaaaaatggcatttgatcatcacagtgcttgctgatcagattaggatacccaacccttcggtataacagaccataaaaccaacataaatatataattcagactcacttaggtattgcagcgtgaaaattgaggaccttcgtagttattacataatttctatgaaaaatttcggcaacacgaggatttcttgtatatgataaatagcatgtaaaatttcaacaaacaggtgaaaagtcaagtcttttaacacataacccagtttaattaacatatgaaaagaaccccagaaagtaaaatcaagttcttaattaataaatcaaacccatttcagtggtgatcagggatagtcaaccgccataatcaaccaaattcacttagctcaaagcccagttcaaattcaaaagtttggattatacagagacttaccgagaaagggttgacttcttcttcttcggcaaaagggttgtgatcatagcgaccagccatggttacagaggaggttaatcaattctagacagatgaaaaaacagaagtaatctgagagaccaatttaacctaggactgtacggaaaggtaaaggattagaataagcttatatcacaaaatttatttatttattaaaaaaaaaatgatagctttgtcttggcagtaaaggaatgtgatataggaacagagacaatgaaatgttagagagagaaatataattttatttatgattttgttaattattatttagatggagaaataaaaaggttggacttttggacttgtctacggtctattaaacaaatttaaaaagagaattcgaaaacagcgggagatggaaataaagtcgccttctccagtccacgcggcatttctttttttcttttatttatttattttaaaaaatatactattttctttttttgagagagagatgttaaaaaatatactattatggttttggttagggggtcaaatattaggtatacttattttctttttccattatgcacattattgattctggtttaaagggagtttttctatttagtattttttttttggtacattagagtgagtgagtagagaattaattaatgagtagtagataagatattgtcatcttttaacttgtttttgtttatttttaagagggtccaaaattgctttcggtggttgtgtgatacttataattatcattttagaaattacaatggttttttttattattattattttgttgggagataaaaaaagagagagaaagcaattatatgatgacaacttggcataaatggaatagtcttttgttttacaccttgtttttccttcttgttggctcattcatctataaattatttatttattatat

SEQ ID NO: 219298 - DNA, 2851 bp, Cannabis indica
gtttctactttttaaccctaattacccttagatcaatctcagccgtcagatcaaataagtccctcatctaatggctgccgtacatcacggaatgcattccataaaagtacaatcacatgaccaaatcatatccctaacaatgtatatgtattgtattactcttatcactttatatcaaaatatatattatataatttagagtcggtcctaaagtatattggattaaaggtaaaattaaattttagaacctttatatataatttaattattattaaaatgataattttagtattttatagtgtaatggtaaaatttttaaaaattcttaaaagctaatcctttgttgttatgtattaaaatatattctttaaaaaaaataaaaatagagattgggaatatattctataatttcttaattttaagtaattaagatcctttactattatatgaaataaaatttattatattttttattccttaatattttatttttatattatttatatattaattttttttttcataatttcaaaaccttaaatatttcggatccgagacgcacatctagctcgggtagccttgaaggctggccctgtttcacaatatattgtaattactcctagtaattacagattgatcgattttattaatgtatgtgttcttttatacccctttatctatatacagatatattaaagtaaaaaagaatttgcatggtagtggggtcatatttatactaaagaaacagaagaatacagctgccactaatttaatgtttactgggctgccactgtcaatatgagtgtggatatattatatatacataaatttagaatgattataaaagataaatgtgattgcattctgtaaaatgtaaatttctactacgggaatcaaaatgtaaaaagtaaaaatccaaagtagaagaatatagcctaggcatgtacaagtttgaataatttattaatagtaattgattatataatgtttagtataatgcgttgtgtttagtgtaacctggaaaatctcctacaaatatagtagattacagctttgtttaattttttttttaacttcagatgatggtgaactgtcaaatgatatatattctttttctttatatgtataaaaaatagaataaattaagaagaggagattctttgtgctttggttccagcatctaaacatacctcggataacccaatctcatctcccaaacagaaacatacatacaagacaaattaaacaaaactctttccctctaataatctcaactctgaaatcttagaagaaggtaagtacagcactcgccggccattagcttatttatttaattttggtggaatgaataattttattatttatttattatttatttatatataattgaagcctccataacgtggtacggtgctgagagttgacacgtgtgtcagtctgttctggcacccaaatattcatatttatgtttgtagcccattatggctccacaggtgtcaactacatcaccggcgtcggctccaaatctacctataattcatctatatttatttttttcatatgaaatttgacattttcaattttacataattaattcattgttattggttatgggttttttcttcttctttttcgtcttagttgattttagtttataattaatgaaattggtacgatttttatatgtgacactattgttattccaagcatctcaagaaaataatacccaaaggaaatcgtgtaatttctagaaatatttttattctccacgagaaaactcagaaacttggcttcacaaaattatgagacttagatttttctttttataacaaactctagcagaaacaaaagaagaaaaagaaaactctaaagctatatatactcgactattatttatagctctgttttttttttttttaactattatttatagcttttgttaaaaataataataaaaatactattatctatagttagttctcaccatctttataacgtcacacttcatcatctacctacataacaaaattagattatagatatttaggtttttttttttttttatgaattaatattttaggaacaaagttttatatatattttggtgaaatgaatttagaccaacttaaacaaaatagaaagagaaaattcatttatcctatataaatatatctttccttttttttttttgtatgaagagaaaatttaaatataaggacacgtcattgaaagcttgattgatattttctacaaaaaaaaaaaaaataaaataaaagaaaaatcgtcaacttgaaatgaaaagtagaaacttttcaaaattaaaaatttaaagctagaaaaataaaaataataaagaagtcataatttgaaattattaaagaaaaatgagaaaaaaggaaaaagaatgcatgtgttagacttagaatggcgtttgagagtgtttgacccgtccaacccgtagcgagtcttcaccacgcctgggcaggcgcataattagatatatccaatccaatcaaaattcccctttattttaattttctctaattactatttattttttattttcctataattataccaaattaaacaacaaaaacatacacgtaatttgctacatgacaagacaattttttcaatttgaattattttattatatagttggcgttattatttttaattaatgttacaattaataatatttatttatttttatttttcaattgaagcgctttgtgacaaagagaagaaataaagacgaagactttctctgagaaagagaagaacagtcgccattgatgagtaccgaagctctttcccgcgaaattaaaacttgcccatttcatttccgagt

SEQ ID NO: 219299 - DNA, 5351 bp, Cannabis indica
cctatattgtgttatatgtaaaatgttaatcaattactacaaagtcacccttagacttcgcggtagcagctgtcgtcgctaatgttatgggtagtttaatcatccctttcaattcaattgtatcttcgatgaaaccgtagttacttggtgttactggcctcaaatctttttcatgtaaccccatctgcttaaacgcttacagattcaagaggttaacataacttccattatcgacaagtacacaatgtacattgtcactacgaatgttggcaaccactaccaaagcatcggtgtgtgggtggtgcacccatcttgcatcactttccatgaaagtgatgtctttgcgtttcttttcaaacaacttctctggtctttcacttaaattattcacatttgttagggtttttccttagcctccttcgcgtaacactcctgcactttcctggagtctccaccattgtgtgggcccccaataaaggttaaaatgttgcaagaggctctagaactacttgcatcccctgaattttttgtcttatccattcggggttgacttctttgtttttcttatattgaccaaactttcctcgtttaataaattccttaatttcatcttgaaggaaccagcattcaagggtagtgtggccaatatctttgtggtatttacagaatttattgggatcccttttattgtaatttccttagattggtggtggttttcttaaaaaactgttgtgctccttaatcgcacaaatttgattgtgggggaccaaaagcatggtatagttgacaaaacgtgggcctcccttcctcttcggggatgtatacttctttgttggtgattttgcgagttttaggctatgtcgcctagttggactgcgtctcttgtgattttgtcctctaaaattctttatttatgggctccgggatcgcaatcttggcataggggactcgtgcttatccttatttctttcttccaccaataaattctcaatcctcttatgcggttcaacatggccaagagttccacaagcgacttaggccatcgtgcttgcaatttcttccaaaagttcatccttggcaagacacctgtgattaatatacaaactagaaaagcctcaagggccctctcgactttggttatttccgcgttaaaccatttaaaatagtcatgtaatgactcaccaaagtcccgcttaatgttggctaaagtcgtgtatggttgtttgtatatcatcgtggcttgaaaatgagttagaaataagtccacaaatgtctccgaggtcgatatggacgcctcatgcagctggctaaaccagtcgtgagcattgtcctcctaagtcacaatcagtatttgacacttgttaatcgaggtggtctactcttctataatcatattaaatttatcaagataatcgattaggttagtggtacctttatatttaagcaattttgaaagcctaaaacctctaggaattctggcttctcgcaattcttctataaaaggcgatgtcccatgaaacttataaatgggctttctctgctgctcgatttgtcttaatgatcacaagaggctttcttaatcgattccccctggcaatatgggattggtatggtttaccgtaggtatagcgactactgccgctatatttgtaagaattaccacttctccggtcctagttggtgctattggcgggtttgctggattagtcacattatttgtattttggatgcctcgatcgctacgaggctcctcattatcatcataatttcttggtgtttgagatagcgcccaaaatattttgttgaggtgatcacggagatcacctatatgcacgtgacatctccctccatgcctcctttgcactgaccctgatcttttataaacactagtagggtgactattagtagaggatcaatgagaatcactttcatttacctcggtttgtggttgagctcgactctgtgagtttcgtcacccagggtcctcttcctgcgacattttgtctctccgtttgtgctgacgacccatgtttggagcgataggatccatatttcatatggagtcgcacatagactggttaagtctagcccttctttgtcattcctatttactcattccctacaattacgagcattgttaggacgttcagtatgacgtcaatttgtattagttacctgagtgtcgtcttgacatcaacttgggacccagggttgacattgggtttggactcgctccctttcatcgatctcttgcaaagcttgaatctgttccttcatggccgtgtactttgcagttgtgagctgggtaatgccttcaggagccactacttgcgtgattggtggaaagtgccctaccattgctgcatgtgtggaagtctctcctacatggctggtagtttctaggaacagattgagaggctgacattggtccatcggctcataccacttgtgttggatttgttccatcaccatggatagggatgttcattattacaacattaaaagaccctgtgttgttgttcacgtttgtttcattggcaaccataataattttcctccaaaaatgttgataaaagtttccctagacggtgctaaatgttgttagaggaatttggacaacaccaaaattcatgcagctattaaatgatccgaataaaacagtgcaaacactcaattagagtagtgagtattcaagaatgagctaccaagaacaaaagaataactggaaatattaaggacacaaggaaatatagtagttcagtcagatcttggtctgctagtccactattgcaaatgatttctgcttagtttattttatttagattattcctttatatagaaagtaagtgtccttttagttgtacatgattgatcggttttagaaacgtttttacaataaatgataatattaacctagaataaacgtaaaaaaataaatgattttttttttttaatctgttcttgtattaagtgcagtaacatatgtgacttattgaacgcgagtttcctattcatattcccgcacaagctcgcagattttaggtgcgttctatattcgctaaacgattaatggacctatcatttagatgtttgcgctcaccttaaatcgcattgacagacatcacgcgtgttgacaatataggacatgcaagtgcctgtcgagtcgtcgaacacgatttgtcattaagaccagtctttatgtaaagaagcagtctttacttagtcgcgagcgaagactacttagtcatcacatatattttcatatatatgcgcaacttgtataaaatcctctcggtcccacttatctaacacttttatactatgcaagacatagtatgcgattagaccctatcaagattgcatcatctctcgagttcggatcaagcgaggctgactattcgagagttattaattaacaggtcatcatttcctcgaggattgaatccacgtatcaattttataagagactactcttgagctttttaggcaaaaaattcgcactataacaatttcttttatctttaagtgtttgtgaaaaagtagtgaacttcattgaaatcacaaatcagcatcactaatagtgctaatacaactatcccaggcaacaaacacaatcagaactcttatcaagagccaacttggtcaaaccatgaccggcctttcatagcattaaggatccaatcaatgtatgataccatttagctcttaaatttgtaccatgtattatataatatcccacttaattataatactaatactaatactaagaatttgaatcaacccttccacctgctctgaatcattattttaaaaactactctaatcactcggataagatgtgacaacaaacttaaaaagataatgcttaaagtttcggttggttccaaactttgagttctctaacattattatgattattgttatgtcagtgagacaagattgtcatgagagtaaacatttacttttttgaaattaatacgagagtaagcctagccactcaatttttattattattatttttttctatataaaacttgtactagttctttttttttcgtggaagctaccttatttgaagtgttgagttgacttagttttagctccaggacaagaactaaaatatgaagaacttttgaagttttgacttggtctttgtcaatagaaaattcaaaaaccaagaatagtagagagagatcgggacacaccaccctctaacattgtcgtttgtaacccattttaattctactgagaacaaagcttaatcataaggataagagaaaacaccaatcaatatattccatattgtttaatttcaatttacaaatcccattccctgttcctgtaaacttcatattgaatacaattacacaactctgttctaattaccagtacacttacatatatcaaacaacctaaagaatgaaacagacatccaataaaaaatcgatcactgaggtctcccggaaagatgcaaaaagcttaattgattagcaccatctttgaattttactttgaatgtcaaaatagaagtcctttttaatcttcaattcttaggctgcatgaattataaactagtccagcttcagatgaatttgaaaaatggccacaacccttttgtccctactgttttgaaatatctatgaaattacataatggaacaagcgggggagggttcctggtagggtatgctgtaggacacgtacccagactgagaaacttggcaataagatgcagagcttgagcaataaggttgataataatagtacttagcattagctgcgagttccttcttcttcttttcttcctcttccttcttcttcttttcctcttcttccttcttcttcttctcctctgcggccttatcgatgacagtcacgcttactacttcggcgtatttcatggtctttctgagcagagtggtgagcaacaccacgtcgatgtcctctcctgttacctctattagattcttctcttgctgaagtgttgcttgtatcactcctgtatcatataaaacaattcatctaattcactttagtttcttattcttggaaaaaaaagaaaaaaaaaccatgtatttgaatttgaagtggttgttaccatcaattccaactgcagtcttgatggctttggtgcgacacttctgttcgtttagagaaaccttgatgaccaccttttgctgcaaacattaatcaatgaataagatgagaaacatggtatatatgattgaaagagttggaattatgaaacttgaattatgatgatggcgatgagtatgtaccttcatgattatgaagatgattgttgttagagtgaaggtttatggaagagtactagagagagagagagagaga

SEQ ID NO: 219300 - DNA, 2659 bp, Cannabis indica
ttttaaaaaaaaaaaaaagacatcccagtgtaattttccaaaactaacacttatgaaaacaaggaagtaggggagcaggagactggcacttaaaacacaaggtcaccataaataaagaacatagcaccactgcacacccgccagtcaccttgaccatttttgctccctgcctcacagaggtctgggattttaacccatggatgtaccaaatttcattgcatagaaattagaagcatatgccacataagatgaatgttcaagtgcaccatggatcaaacttgaaccaactttgacattgatttcatgagatatggtcacattcagaaagtccagaaaccaaataatattgaaatatgtcagaaaaatccatggtttctctggggttagaaaactcacagatggaatactacgagaatctctaaagatttgaaacattataccagcacctgaaccaacatattcacaataactcaagagaactttcaaaggtgtgacaagtaaagcattatgtattttacaaatcattattgaattttttttcttaagtgtttatttttctttaaaaaaatataactgataatttaggtctaagcataggtttctaatcccttctgaataataagagttgacacaaattttaagttctcatctaaaaaagcagtaaattctccatcatttgcctctatcagtcactatccaaaataagcaaaaacaaagtataagaaaaatgatctttacctgaagctctgctaacttctctcggatttgcatatagcctaaatgaagcttccccccaaaatggtcagctaatcgtcggtcactgaaaaacaaagcagtgttagaatgctccacttatttaaaacataaaaaggttccagtatctgagtacaaatacagatgccccttaattctagccaacaattgcatgatctactagcataaaacggaaaaaagacgcacattctttagctgcaaaagttatcctcgtaaaactgggcacaagagcctgctggtacaaggaggtataattattggatcaaaagctgaagtacttgaaccccaaatgctatttctatgcatccctcagaaaaaacaaataacaagcatccaaattagagatgcacatgataaaattttacctgtcataaacacttaagaatgctccacatatgtcacatacccttagcttttgatcagtctgaaatgccatcaaagagggaaaaaaaataagagaatgaaaatttgcccagctatcataaattaactcaacataaaacacccaatccatgcatgcatgtactacaactcaattagaattttaatgagaatgctaacaattagactaaataatttttttacataagagggtagaaggaaaaagaaaaagaaagtagactcacaatgcgaacatcagccgcagtgtacttagtggaatcaagaactggctcctgcctggcaggcagctgaaaagggagaaaattgtcaatatcaagaaatgaaaatacaagtagcattaaccatattacaaaattcatacatctgacaagagatattatttgctccaccacaataaaagattaactgtccataaaataaggaagacaacaaacttcctggcacacctttttaagggcttcagcctcttccaatgctttttgtgcttcatcaaccatcccttgctcacctaagaaggtacaaaacttgtaataagtggataccaaaagtatttggaaaaataaacaagtagaaaaaaatacagaagcatattttagggtataaattgactgaagcttaatcttcactcaaatcaactgtattatgctgcatatttgcatactcttatctcataagcctaactttgaacataaacatcacatgcgagttttagaacgctatcattacaaaaggtcaataaaagaatggcataacttataacataactttttatacatgtatatatatatataaatatatattcataaactaatataactttcataatcaatttaaagaaaatagaaaactgataatattttaaacaagtaactcaacggattaccagatcttctgccttcttagtttttcattaatcatttcctgtgtacgaggatcaagcgcagctacaggcaaaggtgccaaaggtggaggatttggcaagggttgaggtaaagatgccctatctttgttgaaggcatccaaaagaagcatggactggaagaaattgagtatgaaagcaagaacatataaaccactttggactgccaacaagataaaaaacaatattaaaaaaataataaaagcaataaagtagtacctgtttgtctgctcgttgggttctgagttcttctatcacctctagagctcgaatcttaagatctgtcttgccttcaagatctgtaaaacacaatcaaattaatggatgcagctatagcacttaacataataacaaatgacaattgaaaataaattcaacaccctagaatatggggaagaaaaaaaaatgaagacatattgtagtatggatgtataattttagtcatatgaaagactatcaaggctactagccttttaattccattctatcatctttattttgcgacaatatatatcagcccataaaggcaggagcaaaaactgtatccaattattatatgaaatg

SEQ ID NO: 219301 - DNA, 1908 bp, Cannabis indica
tcactaatttcttagcaatttcacaactaaataaaatggcacacatttcaagtaaacactttgtgagttgagtgagtgaagtaatataataaatgccaattccaaacggttcacaattttcagtagttccattccatctccaactccaacaatggcagatcttcataccaatacccaaaacccaccaccactatacgacctcatcatactcggagcttcaggcttcacaggcaaatacgtagtcaaagaagccttaaaattcctcaacacaccatcttcacctctcaactccatagccttagccggtagaaacccagcaaaactcactcaaaccctcaaatgggcaacccacccaaaccccccacctccaattcccatcctcacagccgacacaaacgacgtctcatcactccaccacctctgttcccaaaccaagatcatcctcaactgcgtgggtccatttcgcctccacggcgacccggtcgtcgcggcctgcgtcgagattgggaccgattatttggatattactggagagcctgagtttatggagctaatggaggctaggtatcaccagaaggcggtggattcgggttctttggttgtttcggcttgtgggtttgattctgttccggctgagatgggtttgttgttcaattctcggcagtgggttgacccggctgtgccaaatcgggtcgatgcttatctgagtttggagtctgataagaagattgttgggaatattgggacctttgagtctgcggttttgggtgtgagtagtgttcataacttgagggagctaagaaggtctagacccaaaagaagtaaaccagtggtaattagcattttaaattcagtttttcaatatataattatgcatgaaatttgttgatgaatgatcaaaagtattgtgctttacttgaatatatttatatatgtatatgtatgtatgtatatggatatacatacacaaatatgctctgttttagttgctactgcatataatagtgcatcctctaaaaataggtgtattgatgtgttttctatatttgaatagttatattgatgtgttttggatatttaaatagttataataatgtcctagtaattatttgagatatcttgcaaagtttctaaaaatttagaataattgaaagtatggtttaactgtctgaaacttacttttgacacgttaaacctttttaattttttttttaaatttagttagaattttttaaattaactatattatcaccaatgcaccttttttgaattttcaaacaaatataaacagtacacattgacagtgatgatttagtacatgttagtatatgccatgcttattagtacaccagatacccaacaattaatatgaggcgctagttttgctagatgttgttttgggaagggttaatgatattctataatagttaagttaaattgtatgtgatctaatacttaattcaactaatagcgataagatattttaaagggtgctagaaactattaatattctttagcgatatgatagttatttaattttttaaattaatatttcattaatttttgtatatagtttcaatagaaaaattaaaatttaatgactgttgactttagaggttaatttgtccaagcacaattgtaaaatttgggcattgaaccatcttttgagttaaatttgttatataatttacactaggcattggagatggtctcatattatactccgttgctgtgtgaatcaagttatggttattatcagttaacagtattaaattagttgatcattgtaatttgtaatcattgatgattagaaattttacctcaggtagactatgggatctatgaatttctttcaagatatataattagatgtttgacaaacattcttgcttgatttcagattcctgg

SEQ ID NO: 219302 - DNA, 3305 bp, Cannabis indica
gcgtataaaataaaatagtcacatgtgcaatacactattttgaaccatattttcgacattgttaaaattttttcgaattttcttaaaattttgtaagatatctttaataactatagcgtacatgatcataaaaaaaaattgactaaaattatttcggatatcgaaacaataggagtacattggtctatccaatgcattatagaattttttaatattatatatatttaaattaataaattttataaaataaattaaaaagggcccactgatcgatgcactctatctgtttagtttatttttttttatggttgtctacgttatagttatttatgatattctgtaaaattttgagaaattttcaaaaattaaacacaccgaaaataaagtttaaacaatttatttcacatgagtataaaataaaaacgtctagcgcgcaatagactatttaaaatttatttttggcgtgtaaattcttttcgaatcttttaaaattttgcaaaatatatcttgaataactacaacctaaaaattgaactaaaaaattcactcaaataccgaaataaatagaggtaaatagtggacccctttgaagggtacataatgttgaaacacccaattttatattatataattatactatatgtatgtaaaatgtagagcgaatcccatattaatatatataataataaaataattattttgttttttttgtatttaatcctttcatattggaataaatgtcacatggaaacatgaagagatggtcagaaatttaggaaaataataaaatataaaaaatgaataaaagaaaaataactttaattatttcatagaaataatattaagcctctatataggcatcatttgcggtaacacattgcctcaaaatatagaaaaaaaacttaattagttttaattagattcttcttaatctcatatcctaattaaaacctcccaaatctctcattggatatgactttgtgatctttgatttgactaaacccaaaaatattaacaaattaatgttacaatataattgaaataatattatggataaagacaaaataactaatccccaactccaaattaattatcatattattattgttgttataaagcaaggcatctataatattttgtgatttgtaattaagaagagaataaagctaactatagtttattgttacatttactaaatatagttagaaactctataataattattttaaacctaactaaaaacaaaagaataatactattttagatctattatttgactaaacatacccatttggattctatttcaagagatatattttgctggattttaatttttttttgttggttaatggttaaaaatagtcattacaagaaaagaaagattttactttgcttttaaatttagtccattgatgttgaattcagataaaatagttttttcttagcgcattttcttaaaaagggatgtattgatgtacattttacttgtttcggcatccagaataattttttagtctaattttttttatattcatgtatgttataactatttatgattttctataaaattttgagaaatttggaattaataatttacaataaagaaaataatattgaaacagtttattttatacgagtataaaataaaatagtcacgcgtctattacactgtttgaacgcattttttgacaattttatagaatgtcttaaataactataatttatatgaccataaaaaaaattgactaaaaaaatatttcggatactcaaacaaataaagatgtatcggtacatcttttttaagggagtacattatagaattttctaattttatttaggcggttattgattgagaagcatatggattggtgtagataggttatgatctatttattatatttttaatcaaaattaattaggctcaatagaattttttaaaaagataaatagaatttttttcttttgaactatggtcctaagtgtgaagttttactctctttgcgaaatttttcctaaaccataaaaattactataaataatccttgtagttatattctactcatttttaaacaatttattaatgtaacattaacatgattaatttaactcaatttaagagttcaattttttttgaataataaatagagtctatatgatgaattataatattatgtatatgtattcttagagttaatatttatttttaatatcaataaactaaatttcgataattttaagttgttataataaatacttatactatacatgcacacctatttaaacaaattgttttaggaaataaataagcataatgtaaaggagaatatttgcaacaatttatttagttcgagttaagggtaatttttgcaacaaattaaaatcgttcattatttgtttgtttacaaattaatctacaagatatatattggttcctaattaaaatataagggataaaatagcattattctttttattaaagtaacaattttagtatattgtttttttcccttataatgaaataaaagaaaaagaatatataaaaatatttttgttttaaaatatagtattattacttgtagggtttgtgatggatttggaagaagcatatatatataaaataaaggtaaggtatcattaattgggagaaagaaaaaagggtcatgggtgacctacatatataagaccttgcatgtgacctaatcaagagtaaacttagactatataaaattatatataatgactttttatcaaaaagaaaaaaaaaaaaaaactcagttggtacacaaacagttcaatcatttgaacctttttatttaatatttaattaatttatttatttttcaatatatttacttttattaatgtgagcatatccggacaatgatcatttaattgcttaagatttctaattaatatgttttttcttccattttctttttgttttttcttccaattttctatatattttggtggggtttatcaaaaataaaccctcaacaagaaaaaagaatctcttcttaaaaataaaaaaataaataaaataattaatagcaataataacaaatgatgcatttgagagaaagttagtattaatataacttaaatataaaagtgggatattgtatatatataaaaattaaaataaattaatttaggtgggggggtttcgtcgtttttaatttctttgatataataaataattatttactattctcatattaatatgacacagattcccataattattggattcgactataatataaggtcggtcccaaaatttgatcgaataatcaaatgtgtag

SEQ ID NO: 219303 - DNA, 2659 bp, Cannabis indica
aataattttaaaaataaaaatagaacttttttaagtctaaacaattatagtttgaagcaaaatatgcaattaatttgtttataagttataactaattgaaagcaactttcttccctttaattgttcaaaaataaagagaattaatttttttccttctatagaatttgtttaaatagatagcttactagcttactaagagtatttataatctttatttaatcaaacataattgagagactttggatattttaattgataaaactcgtagatatgtcttaataaattaaataattttgtttgtctttttataaaattagaatgaataaaagaaggaatggtagagtgaattggagaggtttgactttttgtaagttggtaaaaggaatattatctgggatgactgagaggctgagacttgttctgtgaaagttgaaactcaaaaacatatttcaaaaaataaatatatattattttttgcaataaaaaatggcttagggtttacgaaatgagaaggagaaagaaaagacagagaataaaacaaagagctaacagccgaggctgaagaagacaaagtgagtgagagaaaactgagatctcattctcatgtgagtcccacgtacgacttatcttctctctttcatatttctatattaacatttttttattattattatcatataatttacacattatcctaaagcctatatattcacagccacatcaaaaagcttattactaataaataatttaataataataaaaaacagatgccattgaagttttatctttttatattgtactgaaacattatgagaactgaaatacatatacatatgttagatttaagataaggtgtgattagttttatgagttccattttaaaattaattggcaaccaacgagagtaatagtttatttattttatatataataatttatttttacacattaataatgtataactaattttaatacactctcctcacgtttgaacttgaaaagtgtaggtaaggaacaacttttaagagactataggatcaaacataacatttgaaataattccacaaggcaaagtcgagaaatttgtgggtgtatatattaaaaaatttataaattttgaaacaagttaaatattccaatactgaaaaatagacacacattgatggatactaaaggagaagcaaaagattttgttttgctcgtctttttggattgatggcactttaaataacggatcacaagcaactcttttatagctcgtctttttgaatagatgatactcagctcgtaacaaatcacaagcggctctaatactatttaagaatgaaaatgtaattaaggtttatgagttttatcttctattactaatttatattcttgcatcagtaaaatgactaattataataatatgtttttgttttgaaattttaaaatatatacacatatttttttctcatttatccgtaacatttaatggagctagagtaggaggaagctatgtatatgattgatgataataaatctggtttttaaagattgaaatgattagtatgcaacgtggaataatggagtttgtgtttttgatatgatattttcaatatctatcgaaaaaaagattaaggcccacgcttgtctggcaggtcagatcactaaatatgaaatttccaatacacttttggccttttacactttaaagttaaacatcaatttttcttttctttctttccatattatcctaaacaattcagtgctacttacttgtcttaaaactccattcttttattgtaaaaaaattaaaatctcaatattttacgatttttttattattattaatacctctatttaattatgacatctttattaagatataattaggtaatttttgaattcacctatctaaattgagtacttgtcactaaatcattaaatgtgtgtcatgtttcatgtgatttatgtgtatatttttactcattttaaatttagtgaatgcttaactaaaagataagtaataagatagtggtggagtcccacaatgtagttattatttaaattatttaaagtttgttagatataattatttttttaggttctgtattttagagggcaaataaattctttttaacttgaataatatttttttgatttttatcaaaaaatctgctaatcatgttgttcagtatttgactatagaaattcgtaattaaatacgggttgtacccatttaaattctataattctgaataattaaacggatataatttttgaataatttgagttaattaatgaacttgcatttttctattaaaaaatgaaagaaaaaagatgagtacgaagagaaaagaaaaaaaaagtgagaatccttcttaaaagaattatctcaatctgccgatctatatttaaatgtaaaaataatatcatttttaatcacattatataattttgaaaattagaagtgaacaataccaatttccaaaccacattcaggaatggatgtagatggaaaatttcaaataaagctctatctctatgtgctcttgaaatatatattacagaaatggaatcttcgatttctagaatgacacttctgttaaagaatatgcaacaggccttttttttaagctaggctatcagctcagttttctttttttaagaaaaaaaa

SEQ ID NO: 219304 - DNA, 3199 bp, Cannabis indica
aaaaaaaaaaaaaatgagtgagtaactacaagagaggactccgtacattttccttttgaactttctataagattaaattaagctaaaataaaatagttaatgcaacaataagcaggaagtttcgtaggatttcgttttattttttttctaatatatatgtcagccaccaaagattttttttaatgaaaaaaaagaagagattttttaaaaaataaaaataataaaataaataaacaattggtgagtacagaaggaaagcttccatatatagttccatgtagtttgactgtgattttaatcatagaaaaatcaatgtgttcaagagtagtctctatataaaatctacgactaatagtagtgcaagatattatgggaaacacttgaaaagattaatggtcaaattttcaatttgaaaaagggtctaaatatatggtcacaaattaaacaaccccaaacctatggccaaaaatcctagatatttcaacgagacccgtcaaatgtaggaccccaattatcattttcaataactaattttttaatggttcatctttaatattatatattcaataatttttaaataattaataaaacaaaaaaaacaatgataatatacttgttaggtgctctctcttaacctacacaaaagtcagtttgtcttatatattgtttgtgttatatatatatgcttaaattaaaatatacttctgaacttagaaacttccaagtctatgtagctaatagcttgtttcgtccgcctttaattatgactattccttttcctttcattttcacaacttcgatttttaaaatagtcaataattaagggtcgttatcatgatctgattttttttatccagaattataattagaaaaattagacccttcttatgccccacacaattgtgttctcacttatttttttttttttttgaataaactagttattaatactaagtttagaagaagagagaaaaaaataatgattgattaataaatagttactcgaaaaaaacctattaattgtgacgtgccgacttcctagagtcaatgtccaatcattgtcaaaactcattgattttcagtaattaaatcactccttagcttaattaccataaataataaaaattacgagtggtcataatcacatgcttaattgtcatttcattatcaataatttagaatatccaagtccaatattattgtgatttttatttccctaaagtagttaaaaatctatctttacatttcaaactctttatttacctatagacttttttttttccatcacgtggttttagttgtaggactgaatagagcattaggggcgtgtgaaaatctaagccgctgatttcatgattggttcctatcacagccgttcaacttgattgtgatgggagggatatttatgatgaggctaatcatcattggaaaagccaacgctatcagttcttttactataaggaaagctatttttgcaaaggcagcactcagaatatatataaataatataatatacacgaattcagcaatatatatttatataatacacatatgtaaatcaacggccaaaaagcaagagccttgtctccctaaccaacggttctaatttagccatgtcgccaattttttcttctccataaccaaaaaaaaagcccaaatctcatgcatacataccatgtcatgcacacaaaaattgccaacttcaatgtaacgactaaagcatgacatggatatcatggttattatatgatagacattaattaactctttgtacgcacacctgagtacttaaaaatccatgcccatgccatgatgttgatgatgatgatgaatgtcatggtttgatgtatcatgtatatattgtatgtatgggatggtgtgtgtggggttaagtcgaagggatggaagaggaaaaataatagtaataatgattacaaatggggtcataaatggctcttaagaaaataaaaagaataaaaaaaaagtaatttattttattttatttcgaaatagtttatgaaagaatcacaagactgcgcagccatagccgccactttttctctactcttactttttgctatgatcagtttgattttattttagtttgtttcattcatttatatttctttgtaatgttgttatttactagtactattatacaatccactagtcctattgctgtggagaaaaataaaaatatttattaaaaaaaaaattagtaatagataaacgaaaaagaagagataaagacacaaaaggaaaattgaattaattagatcaaaggagagagaaagaaagcaaaaaaaataaaaaagtggggcgattctagagagagaaggacacaaaaagaccccccaaaaaacaagtatttaaagccaccacaaggccactcgtaccactgcaatgatgaactactcaccacctaagaagcagaagaagaatcagcttaaaggccctctctcaccctaacctcaacttttttctttgattatatacatatatatatatattcctatatatattttctttttctcgtctacccaatacagcttttgatcatttatgagctgggttctttctagtttctcaaatttcgaagcctatatatgagctttttagctttgttgcttacaacacacgttatttaagctgtttcgcggccttgaaaaagctgcgatttaacagttaacactcatttgcctctctctctctctctttctctctccttttctccaaagtctcaatcattccctctataaaatcaccaatatggtttcgttcctttctgcacaataatcacactgccgatctctctaaactactttcacataaaaactttctctatatatagctcatcctctttttctcttcgtattccttttttcttcttctttttgttttatatagtctcgttaaaacaaaaaaatggatggagaagagagaaaagtttcattagtggttagaaattatgaccccaaaacagaccttttgggagtggaagatgttgagcggcggtgcgaggttggacctagcggtgagctctccctcttcactgaccttttgggtgacccaatttgccgagtccgtaactcacccgcttacctcatgctggtaatttaaatttaattactattctatacacacactaataaatattagtacaataaaagcttcttttctttgttactctgtttttgtt

SEQ ID NO: 219305 - DNA, 4505 bp, Cannabis indica
caaacaagctctaagcctcccaatttacttacaagctgaaagaatctgaaactagattcaagacagagagaaaaaaaaggaaaagaaggaaagagatgaaaatagatttttgctcaatcaaaatacggaataagcttccatttatatatcaaagactgttacaagaggttgttacaatagtaaaaaaactaacatcaaaatagtaataactaacttttgtaactgtctaaatttgttacgctattatcccccctcaagttgtactggtcaagaccatgtgctaacttgtctttaagaaaatggaaggaggatacaggtagaggtttggtaaataaatctgatatttgctttgcagagtccacatatctaacatcaagtttttttgcaaggactttgtcatgaataaaatgtagatttatttcaatatgtttggttcttgtgtggaatactggattgaaggccaaagaaccagctctcaaattgtcacaccaaagtattggacactgaggaactggtatgccgagttcagtaagcagggactgaatccaaaccagttcaaagttggccagagcaagagccccatattcagactcagtgctcgatcgagcaactgtagtttgtttcttggagcaccaactaaccaggtttcctcttagaaaaatgcagtatcttgatttggactttctgtcatcatggcaccttgtccagtcagtattagtgaacccctgcaactccatcctgacagctggtttgaacactaaaccagtatccaatgtccctggtaagtacctcagtattctcttacaagcactccaatgctctgaggtaagggcctgaagaaactgattgaatttattgacaggaaaggctatgtcaggtctagtcattgtgagatattgaagagcaccaattacacttctatacatgatgggattttgcattggagttcctgtttaagatgacaactttgttgtggagcacataggaattgattggggttttgagtcactgagttgagttttatgtaataagtctcaaatgtaattcttgagatagatgttatgaccatccctagtaatttcaaaacctaggaaatagttgacaaatcttagaaccttgagagcaaactaactgtgaaggacaaatatgacatgttacacttgggatggttcttcccttgttatgaggatgtatatcatccacataaattagaagaatgagaagcttgcatgttgtttggtgaagaacaaactggtatcagacttgctattgtgaaaaccccactacagtagctggcttttgagcttgttaaatcaggttcttggtgatttctttagcccatagatgaccttgttttacttacacacatgatgttgatattcagggttgatgaaccctaatggtagatgcatgtagacagcttcttgaagctccccattcaagaaagcattattgacgtctacttgttgaatgtcccaaccatgagtgtcaacaagagtgaaaattattctaattgtgcaaggtttgatgactggactgtaagtctcaaaaaaatcaataccatgaacttgttcaaaccctttggttaccagcctagacttaaattgatcaatagagtcatctttgttgtatttcactctaaaaatccacttattgtgaactattgtcatgtcggatatgtaggaagagccaaaacccatgttttctttttggtaagggcaacaatttcatgattcattgttgcattccacttagggtcagcaagagcagctttaatagacttaggttctagttcagtgttagtgctcacaatgtaggatttaggtttgaagatgccatgtttagatctagtaaccgtgaggtgattgtttagagtttggggttgaggccctgttgaagtgtagttatggacagaagtatttgtggctaaatttaatgacatgggagaggcagtgtcagcctcaggaacaataggggtggggaatgagactaccttgcagcctcagagctgctagaactattttagggagtaagagtagtggtggttttggagatatgaggaaataaactagaaggaattcgaaagtcaccagggtttatgactttaggagcacattcactttgcttttgagggaattgttgaggataggtaaatttagtttcattgaaggtaatacttcgagctacatagactctaccactaggatgtaggcatctatatcccttggcaggtatactttagccaatgaatagacattttgaagactagaatgaaactttgtgagattcataaggcctaagtaaagggaaataagagcaaccaaagacctttaacatattgtaatttgggggctgttgaaacagtgtttcatatggtgaaacaaagttcagtagtgaaagtggaagtctattggttaggtaagcggtagatgtgaaggaatcccaccaaaaatttagtggcatattggctttggctaacatggtaagccctatgtcaacaacatgcttgtgctttctctcaactttcccttgttgttgatgtgtgtggggacaagaatttctcctaacaagccctaaatatttgaacagattatataaaggttcatattcttttccagtgttagattgaatacttttaatcttagtttggaaatacctctcaacaaaggcattgaactgttgaaagatagaattaacttcagatttggctatggaaaatagccacacaaacctagtaaaatcatcaatgaaacttatgtaatacttgtatccttcactaaaagtatgaaaagatggtccccatacatcaataagaacaagttcaaaaggaatagaagttttattgctagaatttttaaaactgaaatgattcattttgccaatttgacaggcatcacaaaactcagactgactactcctagcaaaaggtaaaactgtggaaagaactttgcttaagatagcttttgagggatgtccaagcctgcaattccatgtagaagcgagttgacacttgtctttgacaggattgctagtggtggtgaagttgtaggcagaggaactaggatgagcagacagcacaggactgtttggtgaaacttgagacttggtgtgagaaacatgttgcttgtaaataccttcactgagatggccctgaagaagaacttgcttggtgttcttgtccttaataagacagcaaacatcatcaaatttaagggtaacgtgattgtcttttgtaaattgagatacgctaaggggattcttggtgacattaggcacatgtagaatgtcatgtaagattaaaggttggtttggaaaatttgtaagcattgaactatgacctatatgatgaattgggagagaagagccattaactacaataactttgacttttcctttgtaatctgagatagagttgagattctaagtgtcattggtcatgtgatgtgttgctctactgtctaagaactaggttgttgacaaatctgaagaagaatttgattcagtaaggaaggcctgaggttgttcagttttagaggtggtggatgaagtgggtggtggaggtccagtgaaagaaatattgaatctgtgataacacttaacagtagcatgtcgaactcaaccacagagttgacatgtgggtttagaacctcctcctcctcctcttccattgttggaatattgtctaccgcctctataggctcctcaatttccatgattattgtacaaacccctacctccattgctgtaatttgagttagccaaatttgcttgaacattggcgagggaatctattgtgagttgttaaattcgtatttcttaattttgaagcatgaattgaacttcttgcaaagtgagaggttttgtgcgtaaagtgagattgaccacaacagattcatatttagatcctaagcctccacgaaaatacagaaccatatcatcattagtcatgggttgatctgcggctgcaagagcatcagcatactgcttcatcttcaaaatgtaatcttcaatggacaatgagcctttgttggtggattgaagaagatttcacagctgaagcagtcttgctctggacgagtggcaaagagttgagcaaaagttctctagatctcaacagatgtttgacaattgatgacatgacctagcatatttttagatacaaaattcattagccactgcattagaaactgatcaaagtgtaactattattgacgcgtagggttaaggacattacctgcaataacaaatagaggaagagggtgttgcctgaggatatatcgatcaagatcatatgcacggacagtaacaagaaccaaagatctccagagtatgtagttatttcaatcgagacaaaggttgagaggaaggacattattgtttgggagagctacttcaacttctctaatttgttgattattttgtggagctcattcttcaagtggaggatcaactcgagctctttgagcaccattgtctacattgttagacatggctctgataccatg

SEQ ID NO: 219306 - DNA, 2493 bp, Cannabis indica
cattggaagtaaccccagcacttgacccgaagaagttggagggcttaaagcttagcttgtctggcgatcatcagttaattaacgccggtcttgctgtttccctttgtaaatgctggcttcaaagaacaggaaactgggaaaagcttacgaaaaatgttagttaaaaacaccaaagctgcacatcctaaaaaccttaactttttggaaactgttctaacttttgtgaattacaaatttcatcaggatgatttagaagctgctgatttaccacatgcctttcgtagaggtctggcaagtgcgcacatttctggaagagctcagataattcatgatgcttcttcaaactctaatgccaccgaaggctcacgtggagatttgatattctatttagatggagcgcatagcccagaaagcgttgaagcttgtgctaactggttctctagttcaattaaagaaaatgaaaactcttctgtttctaattttaagcttgataagatgaatggtgttccaacaaatggtcactttcaacgtgagaaagaggtcggttcttgcaaaatatcaaagcaggtaaagttgacaaaccgaaatagcaagatttcatttttatatgttaattggcttctcattcagtgtttgttctctgttttagattcttttattcaattgcatggacttgagagaccctcaaattttgcttccccggctcgctaatacatgtgcttcctcaggtataaaataacataaaatagcttttatcattcctcaccgaaatttaacttccaaacatagcctaacactttgagattaactataatctttcaaattaggtacctatttttctaaggccttgtttgtcccaagtatgtctgcgtataacaaagttacatccggtgcctcggccattcctaccgacatctctaaaaaagacttatcctggcaattcaacctacaaagaatttgggaaaagattgtccagggaaagggtaatatatactctcatctcatcttccccgaaagaatgtatattattatttgttttgctattcttagttactctattaagatcttcactaaatctttttgtttcgaaagcagaacttgattctggtagtgagaaaggcttcaatatcgataatgcaaaaactttgtcacacgagtttattcaccaggacgcttctcgtcgcaacactacgacagataactatatcggttcaagtgcagtaatgccttctctaccactggcaatcaaatggttaagagattgtgttaaggaaaacccttcaataagacttcaggtaagaatggattgcattttctcaatgatgaatttatagttatttaagtcctaaatttgtattgaaattaatacaggtacttgtgactggatcattgcatttggtgggagatgtattaaaggtattaagaagatgatagtgatacaattacaaactcacaacaacagatcattcattattattgattacagattgtctgcttaaaacattcttttaagttcattttcttctttcaatccaatattttacatttattgtcactctaaaacatggcttgaatattattttctcagtggaattctgatacactttagtttgtgatgttatttgttgttgtaatatgagtaaaagaaaccatatttggacatttttttttacaggaatcattttttttctcataatttgcatttttgttatctcttctttaatcatataatttcaatttgcgcaattaaataatcaatcattcgatgagatcgttgatgcaaaaaatattcaaataccaaatttgccttagataagctctcatagtaggagtgtctattaaaccgttcacatcgtacaaactgtttgtaccacactatatcgtatagagaatacggtttgaaattctttgcggtgcagttgtagtttgcatttttactgcgctgtacagtggagtttgtggttttgaatataataattacggttcaacccgcactacaaagttgttaaatttttaaaatattgatttttattttattttttcatataagaacaattatatttaatgtatgtgtatactatattattttttagagacaattcaatataatgacttgattagtatgtatattatgatgttaaagttttaataatattttcttttttttgtattgtttaaactttatttgattagtttttaaattttcattataatgtttgttaatgatgatagtgtaaaatgttcaaactgcaaaactgtaaaaaaacaagatttttaaacgtaaaaatatattttttttttacaaaaatagtgtcttatgtaattatcctttatttttaaatgaattgattattcggtgtaacgtaaagtttactttgatgtacataaatttttaattctgaaaaaatagttgcaatagttctcaagtttgagattcttataagttcgttggtcctctttttaatagatttgttaattcctccataaaatatc

SEQ ID NO: 219307 - DNA, 2496 bp, Cannabis indica
attgcttcagagagatctaagagaaaacactcagagatttcattgtgagagctttgagagagggaacactgtattatttgttctcaagtcaatacaatctaagaggagtaggcaattaccgaaccaaaggggcaaaacctctttaaaatcctatattctttattgcttattgatttttgctccgtcttaattacatttattaatcgcttattaattgactcagtgtcgttggctaaaagcgatgtcaacacttctaataaatttcattctcttggcgaggccccatattgactagtagcaattctaaaggattgttgatataacgtatactctcgtgtgttctttacttaatgttcatttttactctttgttggctatttgtttaaatatatctctattttgctcaaataatcactatgtctgtttaaacatctggataatagtatagtatttaattaattaatttagtaatcatagaaacgacaattcaattgatatcaaagtagttaactaaactcttagtgagatcatgtggttattttttgtctaatcaagtttgtgtgaaatttctttctttccagaaggtagttcggtatctcgtcccctacttcttaatgacaaactatcccaactggaaagtgaggatgagggtcttcattagagcacaagataaaaagacatggaaagaaattttatttggatggtttcttcctacagagaaaaatgaggatggtagtacaaaggtaaaatcttaacttttgtggaatatagaagaagaagaagaaaagttatctagttataaccataaagctcttcatgctattttcaatgatgttagagaaagttttattaaacttgtatctacttgcatctttgctaaaaatgcttggactattcttcaaactcattttgaaggaactacaaatgttaaaaagtctagatttatgattgtttatcgagatttctggaaactgattataaatgataagaactgaaaaacaaataattaaaaaaataaagagtaaaaagagacacatagttttttatgtggttggagcgttcattagcattagtccacgagtcagtattattcaatagttcttagcttgaaaaagccttttggaatacaaagaatatgcgttctcaagtttgcctgagcaagtgttgcaagagaatttaacccttaatccataggatccgatgggtatttatagtagtttgagaattacatttcatttcccttttctctattgggcagtgttgacctcaaaaagagatcaaatgacagcggggtcatatgaatttgatgcttgccacgtgttatacaaacagaacgaagaagtagtaaagaaacactactacaaatctgggctttagaggcagtttttaaggcctttcagcgttagttttggtgaaattcgctaccaacgctgatctaggtgacgctatagggtctaaaacaactgaccctgaatggtaccctatggcattagttattttatagtaactgacgccatagggtacatatggcgtcggttcatagtatataatcgacgccatatacccacataatcgatgccatataccctaacaaccgacgccaaatatgtaataattatttttttcagttaatttaatttattttaattatattttttattaatttatatattatattatttaatttaaatttaaattaaatatttattttcttaaaaggtaaattaaatattatttaaattaattttatgattagccaatatacctaatttcatttcatagaaacaattaaataaattacaattctatattacacaaatattgtaaaattagtccaagtattaacaagttaataaatctaactacaagaacctaaaaaaataagctatggaaaaaattcttaggcctttcagcatcattcgtccaagccttcgtgaatcaccgccatcaatcgtttcatccacagtcgttgtaatggtaataatttggtttttcgattgtatgcttgtttttctctaaactgtaaaaaaaaagtaaacctttatattagtttatatattattatttgttattataataaatactataattaataattaaaaattacagctttttatcttgtatataacgtttggagtttgcacatgcgacgatgtcagtcatgtatttcaaaatataaaaaccacattcttggtttttaggttgtcttggacaatttgctagtgaaattcctggccacggcccaagatacgcatttgatgcctctatatattcgtatgctctgtttgaaaaattatattaacatttcaattcattagttaattaaataatttgttacataaatagtcattaaattattacctttccaacatttcaataatttgttggggaactttgtgtccacgtatagggtctaaatggataatttcccctggccaacgtcttctagcatcaaatgcgcactagaaaattatattagaatataagtaagatagt

SEQ ID NO: 219308 - DNA, 3739 bp, Cannabis indica
tttttttttttttttttagaaaagatgaaatgaaaataatgttgaactcttacattatatacatacaactcaatagtaattacttattcaagacttaaatcaatatattttacaacttaaattaaaatttattttataaatatgtgagttattttataaatttacaaaaattagcgttgtagttttttttttatgagaaagtttcattgttattataattaaccatcgtttacaataacagagaaaataggagaaagaatttctcctctccaacaagtgtctacatccaacccaagagcatattttactaaaccatgagcagcttgattagcatttctcctaacatgagaaacaactatacctgggaaaaatgaaagaagacaacggacatctaaaattgaatcagaaaaagaagataaatctaaggatgcattattaactgctgatgaaaagcgaagagcatcagtctccacatagtcaattttcagcgagagctgtataatccaatttagcacatgaaagagagtttttgcctccatttcatctgatctaaagcattcttgaactggcttagataaagctgcaatgacctggccatcatggttcctaacaattgctccaatgcctagtacttttcctgctgtattgacggctgcatcgacattaagtttcagcttgtgtggtaacggtggcttccatgaaactccttctgttggtcgagtgtttgttgcagcagtgtttatgggagttgcagcagtgtgtaatgaggttgcagccgtaggtgaagatagagcagtaataagggattgattattgttagctttattgtaattgttcatataatttgtaaaagcataaccatccttactcttttttccatgtatgaatttatttcggtcagtccatatcacccacatgatgcatatcatcatttcaaactcctccttgctaagcagatttgcaatatagaaaagataatcaccatctaccaattgttaagtgcctttccataatcaatagggaaatgaaattgtttccatacttctttcgcatgcctactacagaataaggcgtggccaatcgactctcaagtttgtgtacacaacgagcatgccgttgaactcagaacttttttttggaacagagcagttgccacgggtagagcattatgaatcactctccaagccaagaatctttaaggccaatttgaggtttcaaaaaaacttccaccattctctatgtgagtgagaagaggagtccatctctttatcatctaattccgaagctagatggaaacctgagttcactgaatatgttccagcagttgtgtaatgccaaattaacctatcttgagtacgaaaaaaactcaaagggatggacaagattctatccacatctatttcaccgaaatgagtctttaacaaagatagattccattctcttgtctctgtgatgaaatatgagacaagcagcgtgactggaccaacaaaatttattgggtaaaagtttgaacatgcaagtatccacgagtctgttgcagcagaaacttaaaaactattcccaattttatatctaagtcctttgatgagtaattcacgtccctagcaaattccttaccaaattagagatggcgaatgaccaagattggcatccaaaaatgtagattgagaaaaatatttgtgcttgagcaacttgcttaagtaaggagttaggcatttcgaaaattcgccaagtttggttggccaaaagaacttggttgaaatggataaaggatctaaaatcccatacgtccttcaagttttgacttgcataataaattccaattcttaaatcgcaacacaaactaacaatcgcactgtgaagtattcaaactgtatttttatatgatatgatgagacacatgtgatttatgagttttggacggttttatgaacactttctcgagctcaattattatgacttattacattgtattgtattgtataatattgtattaaattgtatttcatgtaatatttttatttaaaactatatgtgataatgatttttatggacacttaaatatataatattttaatataaattaaaatttaacatagtattatataaaaaatataatatataattcaattgaatataatacaatacattacaataggacataatatatcgtactattgagccctaataggtactaatgcgaatactaccattttcttcaaaagaaaatatagaatttttattcataatcagctaaaagacagactctacgatcaccctttaatggaaacaaatatgaatagaattctcccacttaatggaaattaaacaacttgaattactattttcattctaaaattgggtttcaaaataggaaaataaattaaaacatctgtctcgacgtctcgatcaagcaaaaaaaaaaaacttaactgtctcgtggtcaaaaaaaaaaattctaaaaactacctatgctatagtagactctccattctcatcatcattcgacgactatgcaaccacagccatggccactgccattatgaattcttctccgtcgatccaaaaacaccggttattcttaccgctgcacttcccattctccttgtacattttcggaatatttttctcaaaaaactgtttaaagttgattattggaataagcccgaggttgcgtacgctgacgttttgatttaccagaggaagaagaagaattagtagcagtgagttttgggtgtatgacctctgaagctgcacacccctcatcctcacatttatacagattgcttcaattaacattggaattagattttgtcataataattctacaaagagccattgctattggtgtctagcacctcttgcgaatggttgacgatactgaaattattacattaaattatattatatgaacacatacttaattttacacttctagtaccttttagaattaaataatgaaaattaattaggttataaaaattattataccttaaaactcttccacgagtttctcatgtcagcaatgactttcttggcatgttctttcttgggcacagacagcttcacataatcctcttcactagtgagcaaagcttgtttcaaagaactcactcgaatagccacatcttcaagcctctttttatgtctttccttattcgcctttctttcggctaattgcctctccagcttgactatttcattatcatgaacctcagcttgttttctaaatcgcaagaaatccgaacatatttgcctcatacaagttttaagatcatctattgatttttccttctctttgacctctttcatctcttcttttgcaatttcatactgctcacaatttctatcaaaattagccataaactctgttacctcatccaccttctgctccttataacctaaggaattggtacttagcaagattgaaaatgaattcttgagcttgaaatatttctctaactggatgatatcatcaagatcaagctcaaggtattctttccaggtatgttttgctttggcaatttctctaacgctgcaagaagaacttaagctaaagctgcttatgaatttgtctgaatcaaaagtatctccttccaaaagattttgaataccaacaaacaaggtgtcatattcagataaagtagacgtagtttttacgtgtgttggcttctgaaacgaatttaaaagaaatgaatactaattagatgccttataataatgtagactaattaaaata

SEQ ID NO: 219309 - DNA, 3552 bp, Cannabis indica
accatataattttcctaaagaagtagtctttttcaaattaaaaataaaaataaagaaataaatagtggcatttttaaaaattgctattgaattggagggtacctaagcaaaattcgctacctttcttctcattcaagcgaaaaaaaaaaacaaaccaaacattttctctcttaacaataaaatcataatcttcgttggtttgttctattttctctctgcaacaaaaacccttctcttcagttcacagctttttctctttaagtttttcttttcttttacttttctctctcttagggttttcgattcaacgctgatggggcagcaatcgttgatctacaccttcgtcgcgcgtggcacggtgatcctcgccgagtacacggaattcacaggcaacttcaccagcatagcttcgcagtgtcttcaaaagcttccggctacaaataacaagttcacctacaactgcgatggccacaccttcaattacctcgttgacgaaggattcagtatgtttttcgatctgttccgattattacttctcttttagctttgatcttattgctctgattcttgatttggtcgcggttatcgtatatttgtatttgtgtttatacatctatgggactgaatgatttttaggttttgaaggcattctttgatagtaaggtttttgtattttgaggaaatggtggatgagaaatgataaggagattgagatggtaattttgattggtttgatgcgcttaaatctgaggggatcattgagtataatacatgtaatttgataagagcgtcttactatctaaaagattataactttgtaagattaagctggaagatccaatatatatttgaagaaaggaaagattaagtactaaatctgaactaaagtaccaaactatagaaaaggtatattaggtaaataagatcagaaatatcttatttacctaatatgaagtgctgctttaacaaaacgaaaaataaaggaagtgctgttttgtgctatgaatttcataccaatacaggaatttgtacgattttgaaactctatttttttttttggattttagtgagccttgctttgctgccatggttgttttaattgttctaaatttaacattgcttcttttgtattaagtttgatagcatactatgcatcaccaacgatctcatagtattgttgtttttattcttgggtgaatattgtcatagtattaaaatagacatgtttgttcgaactatggtgttactaatatgtaatggaaacaatgtaaagtgtttctctttcccatctattcatgtctaatgcatttaggaaatatgttttgttaatcttttgtaaaattagtaaattaatttcaaagcctttccttttacatctcttttcattacctattcgttgatgtgtatgtattactaaaaaggaatgttatgaccaactatattagttttatacacttctgttacagtacagaatatatatgatatgaatgaaatcaaacaggtgtgggcgctaataaactcgttgcgtattatctgtgagagatcttaattgatataatctatgattgctgcagcttactgcgtggttgctgttgaggctattggtcgacagattccaattgcgttccttgagcgagtcaaggaggatttcaccaagagatatggtggtggaaaagctgcaacagcagttgctaatagcctgaacagggagtttgggtaaatcatttctctttgctaatccattaaataaagttaagcctttctaatttatgaactaacatcaaacttttggcgaactatatttttagatccaaattaaaggagcacatgcaatattgtgtggatcatcctgatgagatcaacaagcttgctaaagtaaaagctcaggtctcagaagtaaaaggtgttatgatggaaaatattgaaaaggcaaggccctgctcttccctcttccttctttgctatatttctatttgttacctgtagtcttctccccgcccttttggtggttagggtggacagaggtttaagttgtcgtggttgctcacaacttttaaaaatcaggactgttaagaaaaaatctttgttctgtgcaggtccttgaccggggagagaaaatcgaacttctggttgataaaacagaaaacctacgctctcaggtcagcttttcgatattatctagaagtattattgaaccttttttttttgtcataaggaatattgatgactgggagtgttttctttgggtgtttagatttatggttttcgaatgaatatgattcatatttcaattgtatgctttttgtctcatttcttggttgcattaaatttaacttccatttaatcaaacctcggtatgcaggcgcaagatttcaggcagcaggggacccaagtgaggaggaagatgtggttgcagaacatgaagataaagctaattgttttgggaatcttaatcgcactgattctgataatcgttctatctgtttgtggaggcttccattgttgatggttcttcttcactcctattctattctcatcttgacgatgatgattggagttcctcttacagattcatcttgccaccattttttggtttgttatttcccactttttcattatagtctactgttaagactgtatgtatagtttgtctagtcttttttgacgtgtgaaatatcttttgtttctttactctttcaagtcattttaccttataatctttctcgaaattgaaacaatggaaaaaattgcaatttagtgtgattgattccaaattcgtttagtagtatttgtaattcactttgttgctcttcttcccatgcatttttattattattatttttgagaatcttttctcttgttttatctttccataggaaaatgcttttctcaaactatcaaatctcaataaagtcaaaaaagaacaaaacggcacattaccgagaaaggtcaaaaaccaatgcaaaatttccatctttttcattgaaaatatatacatgaagaaatgtgcccatatgaaaagaatctctatacatagctttattgatctttataagacagcctactacaaattgtgcatggcttatttgtgaacaacattgtaaacatgagcattattaaaagaagaaatgggtccaaatttcttgtcaaaaagttgggttactatagatcaccatttcgaatgaagatctccatgttgtctatcaatctcactacccaaaccatgcagcaacgcaaaacacaacaggacttgtaatttcttccacagcctttgaactttcttggtcaacaatctgctaccacaaaaatcacatttttaaacccttaaggcttcagtatggattacatatcatcctagtattaaagaatccctttttggttcttgagaacgaaatttttaatctacagggtaatttgaacaagtcaaagcacttgaaaattgacttttatttttggggtttacctcagcataatcgaattttccaccagcttcatggattgctttgatgaccatatctcttaactcttgacaattaacatgacctttttctg

SEQ ID NO: 219310 - DNA, 5896 bp, Cannabis indica
attttactttttttttggattggatagatcaaattcaatccaatagatattggatctaaaatatcggatggatccgattcgatctaaaactaaaatattggataaactcaaattaaacaaatagatatacttgaaatacatccaatagatagaaccgatccaatccaacatccattggatgttagatcgattagatgactgaaaacattggatccgatctgaataggtctaaaaacattagatatgatccaatgaacacccatactagcacccttctatatgtcaatattgctattggtccaattaagtatcgagtcccatatagtttaatgtaacaaaattttagagagtatcgctagccaatcgcaagacgacatgtctagaggtgctaggtaccacaccattggtgcccaatagcaatactcattaatattacgtgaaccactaaaaatttgctacgtttacatttgtgtacacgtggaagcaatccactgtgacacttaactgaagtttttggatagaagtgtaatgagcaaaatgaaacctgcatttagtagattttaccgtcaaaatttcaatttttgtgattaagtgttaaaagatgtaaaattcaagtagttttgctgcgaatatccctattgtttctgattcttacagctaagtaacatccaagttacttgatattcttacaattgtacttaaaatgacaatataaatctagttctacaatggagaaaggcaaagaagtggccactggccagtggccagtggcatatgtgagcctcagagctctgtttaatgagttattttctgaaaaaatcgataaaaggcactgttaaaaacatggcaatggctctcattcacttcttccactggggaatcctctgaaccacaacctgttagcaacagaaagagccgtggagtaaagaataaaacacaattaaatatagaacaaattccttgatttttttaaagctgattaatccactaaagaacacaacatttctatatacctttccagaattttctttatttcccacaatagtttgacaagcaagtctccatgattcgggtttctgtaaaatattaaccaatgtcaaaaatggatgaccccttttaagtaataaatatcaatgaaggggaaaaaatgaaaagggaatgctcctattttgtttatctacacaattttaattacaatttaagtttattacctttttcaaatatttgagttcagtattggttctttcatttaaaagatccttcccatcaagaatctgcactaagaaacaggaaagatagtcaagtattatgatacacaatagtaatactgactgatagacaaggaagaagaaagtgagggagtgattttaactgaaataggaacacaactgaccaggtaattcgagagacctggtttctctccacaagctacatttctcatatacataaaactaattctaggacattctagagtgattaacaaaatatatccagggcatgctgggatgattacattgttctatgataagtcaacattccatgtacatcctatcacccactgccagtcaactacacttcacctagtcttcaaggtgaaaatgaggaattttttttgaaaaaggtgaaaatgaggaaattgttgctgcaagtaattgtaacttttctttgatgcttcaaagagggctaaatctttccttttgattagcatccccattccccacctctcctaggccttctgagttggtattgtggacccctcaacacttcttcaggctgcacagtcagctctaaatccggactcaactgtcgcagcaccaatggagaagaattagatgccccatgagctcgtcgcagcagtgaaacatgaaccaccagatggacggaagaagtgttaggtaagcctaacttgtaggccattttgccaatggaagcaagtacttcatacagaccatagtagcgcggatagagcttccattgcgtctacctacgattgtcagcttaatcttacattcattgctacgctcaaccagattgaccgtcagtttgaggatggtatgttatactgtgcttcaatgtggtgtcatgcaatttaaacaattcatggcgaaaaatgactcatgaaaactctatcctgatctaaaatgatagaagctttagaaagatctcaaccacacttttagcagtaaaatgatgttttaaaaggagaaatgaaatgagcttacatactcaactgattaaccacaacgagaaaagtgtccttcccatcagacttggtcagccactcataaaagccattgttattgaagtgcgattagttgcggtagctcagcaggagaagcctttgtcttgttttgttggcacattttcacattcacgcacccactttgcgacatctttttgcgcgctcacccaatgaaactaagcaacaatttgttgaagtgcgtggccccaataggcaaggcaacattagtcttcccatgtaaagcaacatgtcattcttaataccaaacccgctagccattgtgcagcgacattgaaagttatacgtcatgagttgaagaaaactaagtcagccaaatgatcctaaagagaaatatatagactttgagtaatgaagagtgatgcactaagcacagttcgtcatactaagtcaacattctcaaacccaaatgatcctgatacaaagaaagtatggatagtgctttatattacacttgagatggttttcatgttcccaaactaagctcgagtttctatggccaagaataaaagactcaaatccaaggtagaaccttccgttcagaagacatttgatggatagggaagttagtattttaagtctttactgagcatattagaacaaaatcacaaaatccaatttatggattactagaggtatctagtcccttgaaaccaaactcaagtggaattttctcttgcaagtgtgccttcagtagtcttgtttctagtcacatagcagaagaaaaatgggccaaaatagtgtggaagagttgtgcttcgtcccaggtaaaagttttcaattggttattagtgattgataagatcaatgttcatgaggtattacaaaggagaagacctatcaatgttcatgagtttgggatacagtggtgcatgccccaaacatgtagtccattgattatgtgtaagctaaaaggggtagtagaactatggagtcaagatcctattgaatttctataatatacaatgaatgggtacatcaactataaaggtgtagaaccttctaaccaagtctagtcaacttttacgctatgtttggtaagagggagagaaagtggaaggatggagagtatgataaatgggaaggataacaactctcctccaatagcaatattacacattggagggtgctaggcaccactagtaccttctagcatttctcatatattttaattgtttaaaggataaataagacatttaatctactttatttcgtcttttttgttttttttcccttagatttgtgagttgtttccatccctctacatccacccaaaagtccttcatgccaaacatagagttagagtagtctggaacgtctagttccctcttaatggttctagatgcttcgaagtcttttagaggcttccacatccttcttgcaccattttgcacgctttagaacattctagaatcttccaacgcccccaagcacattctagtgtactctaaaactttctagagttttataggcttgagttgagtccatactttggctccctagtcatgggccattctaaaagaaaagtctagatcctttagctaagcctcgaagcaaaagagtactgctattaagcagcatggtgttcaacaccaccatgaaatagcgtcctataaatagttagcgattttctataattattataaaaataaaataagtgggaccaaatattgaattgcactagtagagatatgataccttatagtggggttcggcaccattggtgcactttaccatttctcacaaagcgaccttgcttgttcatcgttcatcgtccttcgttgtggtgtttcaataattcgtgtttctaggttaggttgttggaaaagtccctgaagtattagaagaagcagaaaaattcgtagatcttaaggcaagaaatgttagcctcaaactcgcgagccaattccatggtttccacttcacatttcgctttgagaatccatccttttgggctgtcaccatcaaaggttgtaagttcaagtgttcttggtaacaaatctcatcgaacaaccgtatctcattcgaatgttgccaaggccccttgaaattctaagtagctgctcatgtcttcatgtccaagggactattccgtgttggaaaaagttgggatctcgtgctcctggttaaatggcgcttgagctcattcttgttctgcacgaataaattgtttgatgatatttaccaggtttgcaatgctcttctccaaggctgttaacttcttgagttcttcatcttgaacataactcattttgtcctccatggcttagaaactaaacccgtggacaacaaccattgatacacaataataacacagacaataaaatagggaaaaaagaagtgagggaatgacttttattgagacacaaacacaactagatttcacttaagccctattaaaattactctcttaatttatttttatatactttccaaataaaactaactcttaggacattactatgatgattcaactttccatatacatcctatcagttacatttttcttatgtcgtattggagggtcattcataataatgatttggccactaagttctacgcctttcaactttcgaaaactaaagttgtaacatgttccaaagtaaaaccaaataaataattaaaaaaaatatgagaaagacacaaggacagctactcttacctccactatacaagttccacagcttccaccaccaccacagttcataactttcccctgttaaagataaaaatgctattaaaagaaaacaatttatatacctatttgattcaaatttaaatgaagttttagaaaaatatccatcatttcatacacaatgatgagattaagcttttttttttcttccttaaatttaggtataacagtcaatggttactaaggaagtgaaatatgtgctctccaactattattgtcctgaaaaagacctactttactacatttacagcctagcaagcaacctactaagtctccttttgcctctaaatttaacctcaaacttagctatgggtcaataggtttatgagtaggaaataactatattaaaagatacaattatcattcattttatgattttacttacaaatataaatattaggcacatacacaaataataagcattaatgtttaattaaattaaacattatggttcgtttgataagctgtataaggctcctattacattaaataaaaaaatactatgtttgaataaaacactatatagtatcaatcaattaatatgtaccaaacaagctcttaaagtaatattcttataaaattgatgtactaatacataaaatatataatatataatatgtgcatttgagaataccaaataggaaaatttaaggataaaaattatttttgattttctttttgtattttttatttttatttttattttataaaagttatcaattagacttgttagataataaattagaccctatattttttaaaatgacacaaattagtatcatgagctcaatttttgtaattttttttaacataaccaatctaaaactaaattctagcacaaaaatataaaaaatgtaatgagtcaggttataatactttctgaccaagttataattaaattttattttaacaaaaaattacatggttcaatttattattta

SEQ ID NO: 219311 - DNA, 3375 bp, Cannabis indica
tccagattcagatcattccgccattgatgaccatcttcaagctctacgatctgacctgtaatcacaataacaagaaacaagatacgacactatctccacagacaaccgaaataaccaactgaacgattttttggataaacttttttactaacagaaactgactatttatatatccacaaacaagtccacctggcactaactaacacttaacagaaactgacttaacagaacgctagtgcagataaaacagacttaaaacgccagacacgactagacattgaacagaacaaaactgtcacaaaataaagacacttacagtttgaatgttaaattattaatattttatattaaattgttcacccaaaaatttgacccgattacatgaaaaacacttttgacacatggcaagaaggaaacaatggagggtcctacctcccaaaactagggtggtcgacttgggcattagaaactgtgtcgtcgtcctaattgatatcatggggcgcctaggtaggcaccgagatccaacgaagatgtttctaggtgccatccttcgacaaagtgcaagtgaataggtcctagcgaccataaaacaatgaactcttaagttgaggatgtcacgtcaacttcacagggctcaacatgggtccaacattagtgttgggcgcccaggttgacatctagtgcgccgtctcgcatcaattttggttcctatcaacttcttatgggcaatcttcttagccattgtcctaggatacatgagagacatgtctcagccaaatttcaaacattggagataagtctacaagaaacgaaaatcgagcataatcaagccctaatgggcatctaagttgaaatttagttgatctgggcccaccacaataacgatttatgattctggggatattcttagacactgattcctcaattccatcatggagaatgtcaagacatgatatcatcaatgacatcccaaaggaatccattctaactatgagcccctaggctgacattttaaccagggcaccgatttcgtttcaccaagtgacgcccgtgtaaatttgatgaagatgacattcgcggagtaattttcaccaaaaagaagattggacatcaatgagacaaattttggagatgtcgacccccacctgggcgcctagtggagaccctcaagccatcttgagccctaaagttgatgtatctcaacctagggcactccggaacttctttctagagaagtctttcaagattttcacttatttttccccacaaggaagataaacattcttttgagaaacaaataaagccatatgtagccaagatgaaaagatgggcaccaagggtgattgctcccctaacattgggtgcccaggttgacgtgttctacatgaacacgaagtttcgtcaatcccattgtgattatgtctcaagcattattcttgtttttctcccaaaaaaaagatatgagacttggaataaggagaaaatattgtccgagtagtgattcatcccccaggcatcacaaagttccagcacacaagcacaatgggaacccaggttgacatttggcctgggtttcaatgttctgttgatcaaatggcaatttcgctccaagcatcgatcatattttgccctaaaataaaatttggttactttcacaagtcaatatctcatgtatatgtgtcacacgaaactccactgacacccatgtgcagtagtgattacccgccggttgtcacctagttgtcactagttatttaccgggcatcacctgtgcatatcaagtaaaatttctagcttaagtcatttttgctgctaattgaggagtatttatttatgcaatgaatacttgtcctagaccttttttgcataaagaatttttcactacattatatttttcaagatgatacaaaatctcacaatcataatctttcaccaattctagcctccatggttgtctcatattaaatctttatgaataaataaatacttgagacacatgtagttaacgtaaatctcacatttctcaccatacatgtagtatcaccacactttaagtgcaaacattgttgtatctaattctaaattataagttgaataacactattaatactcaattaactaccgaaagcttttttttatctgatgggagagctagtaaaagagttgtaatcaatctttgctttaactcctagaaattatattcacacttgtgagtccacacaaactttaagttatttctaattaattttgtcaaggttgttacaatctttgaaatcctttcaaaaatcgagaataataattccaaaaaggattctaacttttgtttctgttttaggccttgaccagaatctaattgactcgatattagttagatccaccataatgtcatcttcacttataatatgacccaaaaaagatacttgaggtaatcataactcacattttataaacttagcataaatttatgttacttcaatcgttgtagcaaatgtctaaaatgttgctcatttttgcctctatttttgaataagccggaatgttgtcaataaatttaattacataattatctaagtaatctttgaatactttattcattaactccacaaatgcagcaaaggcattagtttgtccaaaatgcataactaagaattctaagtgtctaaatggagtatggaaagcaatattttgaatattttcttctcaaattttttaactggtaataactaaatcaaagatataaatgaatctctaagtacatctatactgttatctctagtatattagatgaattgtatcataaaatatgtacattaaacatgtgcataagtgaagttgtatacttttcttacctagattccaaaacaagagtgcaaatcgacttgtgtggaattctcattcccttagtcacaatagttgtaaaatcattatttatccataacactactaaattctagtctttattctaaagttttcttatcgatctttatatttgaaggatagcatttgactctttaaagtaaaacctaaatatttcctaaaaaacaaccctatcatagaaatgtattctaatatccaattaatataccatactttagatcttctcacacattttctaattatgtatagaacgtttaaattggacatccaagcaaaaagttatggcaaaaatatgaaactacaaaaactgtcaaaatggcttgcgggaaaatcggttgaccaatttccgttcaacatcaaacacaaagtgtctctcccatttagtttctaaatgatcccaaacaattcctaactggttttaaacattaaaatagttctaaacagagtataacatcatacatgcattcattaaattaatccataactcaaaattatacc

SEQ ID NO: 219312 - DNA, 5928 bp, Cannabis indica
tgtttagtttttttgttttttttttttagaaaaaatatgtaatgagtgttattttgtttttgttacaggaaattatttctatccacgtggacttaatattgtatgggggtaacgactcacgctactggcgaatacctaatgaagctaagcccaacaatggaaagtaaggccatccatattgatgcataatcttcccatttcactcttgcttactatatataaaaagaaatagataatgattatgtaattaataatggttctaggtctacctctataaatagatatacggatgcatcttcttagtattttgatatgcttacaatatagacataattatattttttcatgtgataatgtttattatagttatttaacaaattttataattttgtaagaaactctaattaattagccatatagaaaatagaagatagaattcaaatagtttatttcacgaaaaattgtaaatttgtaagatagtttaaataagagaattgctaaaaggcattagtagtgctaacaccctccttagtgtcatactgctattggtttaattaagtatcgggtctcgtataacttaaaaaaaataactttgagccaatatcgctgaccaatcaaaagacgccatttatgaaaagtgttggacaccactcatgtctaatagtaatatactctttaaataactaggatgcacttctttcttaaaattttccaataaaaattaattgaaatataattaatctattctttttttccagaaatcctacagcagagctcatacaggtgtcttggctagaagtaactgggtcaactgcaagcctagagactggtaaaaagtataagatacaattctttctttctcttaagtcggatgcattcggctggaatggttgtcaagtttacttaatggctaagattggtaaacgaggcaagtacaaatggtcgaagatagtgctaaaggaccaaaacactactaacagtggacaaggcacaccatttccttcagaggaatttgtaatcgaagttccggataatgttactgatgctgataagaaactctattttgggctctatgaagtttggagtggaaaatggaaaggtggtcttcagattcacaaggcagttgtttcaaaagtaataaactaataatttaattccagctgcatgcgccatcatcatctatatacaaaaatacatatgggtttgttattcatatcaataattaagcaatgtttatatataccttctaataagtgggacattgttatggttgttacgagaataaaagattttatataattaatttatgtaagtttatacatatacataatgtttcgtattttaagagatctcgtgatcaataaatatgagcaaataaagatgtttttatttgatgaattgcccaacataatttaggtgtcattatactgttgttggttccatttaataaataactaatgtaaaaagttcctaattacgtgttacatttttttattgaaagaaagtatggatttcattaaactgaattaacagttaaatgagaactaataaaaagtggatagtattctaaagaattagtaacagaagtaactagtgcatgagaacactatctgcagagcgcataataacattgcaagaactactatcaacagctgctaataaataaataactcaaaaaattattggctcacaagtgttattagagtgaggactattgatccagcctacgactactgtcgatcacttccaagattggagatagaaaaacaaaattgtcgatcgagcaatacacaacatcaatctaatcggtagtaactctgccacattcacaccaaaatctctagccaatcccacgactagcacccaaaccacccccttaccatcccgtatcacaccgtccaatcccacaaagcctctacctgacttcaatgaagcgtcgattgtcaaagataagtgacccgtcggcagaggacaccaccatggcgtggcttgaccaacactagcggtaattgtcgtatttatatcgagcccttggtgttctcgaaaatctcataaggcctactgagcttgttcgggaataagtgtcactcttgattgtgtcttaccaaccaaaatagaattcttatcataccatatccaccacaacaacatcatcatcaatccaaactcatctcgaaaaaatgcaaaaaatagagcagtaagaatatctggtatcaggccattagcatatctacgaatagacgatagaaatcctatattctccaaaatcaaattaagagcgggacaaaaaaataaggcatgctctagggtctcggactcctcatcacatcttgaacacatgggaactataactttccaagtatttaactacagggatggcatagagaaataggcgccatataaaaacctttacatttggaggaactcccacattctacataccattccaccacttcaccaattgagacgagtcaaaaacccccctcatcaaattgaagggaccatggcacataattgccattttgaccgagtaagtactgtccctgtcatagtgccggcacccttaaccagtcacacctctcgccaaaagaatatataggatacaaaactgtacttagacgacatgcatgagaatgtttttgtaaactgtcttatatcatgttaaaaatagacacctaatgtagctaataggttaattgtcgtaccatacaatcgagagcacacatgcaatgacagctttatttacactacaagaaaagagacattttatccaaaaaaaatttgatgaataaggatactttctattgctcaaaactatcagttacatctcatgttttctgtacaaaaactgactgctatgtgctataaaactaggactttacaaaaattacaatttcatcacccattgcttgtccacttcctttgtcttgcttggccatacccctgctattcttctcttactctcctgttgtgctctgttgacaattactttgacttgccattaattgttttttattccacaacacatcatttcgtgcccccagatctgatacaccaaggcagccagcatagtaatcatcatgcttctccttgttgctgatatttccttaagtttgctgatatattgcagcagcttctgcaactctattgctttcgttccccactgcaacctcttcttccattctgcgagacacctgctgctatattcacatttaaagaataagtgctctatagattcatttcccttcccacacagcaagcaggttaagtccacctgcatgtcatacttgcttataaccttttaacacccttttgttttggaacaagggacacttttggatggacattatataataacctttccaccacggttatttagtgttttgccaaatatggcccttacacttttgaaggacacttattcacgcggtttttaattttcaaccattatcatcattaattttttttttaacttttaagacatataaaggctttagctttagggtttcatcactttctctaacactttctctctctttcgcccaactatctctctattcttctcaacttgaacgattgcactctggcctgaacgctccagcctcgcaagccaaaatgggctctgtcatggccttcctctccgatcttcgtgcaacatccagaccactagtcttttccagtgatgaaaaagaccaaccaatgtcacaccactattgccaatatatctgtccagactcaaaactctcatcacaataacatcaattcaggtcaaaatggtaaaagactgaacaacgacagtaatcaaggtaatggaaagaaaggaaaattcaactataagcaacaacatccttgagagaaagctcaaagtttactgcctttacaatccttactgaagaaatagaaaccatttttacagcaactcagtctatggtgccatataagagaccccaccaatgaagaaagatgtaagcaagagaggcactactaagtactatcgctttcatggggactacgaccatgataccaacgagtgcaataatcaaaatcaagaaatagaattccttatcgggaagaataaccagcacttacgaaggtacataaaggtcgaccaggaccaaagggtcgcctagccagacaataattagaaccagtttatgcccccacccatcgcaaataatttacaagtgattattgggggccctcatattgcaggagactcaaacaaagctagagaaaggtattctcgaacccaacagtatgagcagaaagatgaaatgttggtcgtggaagaatgaaaaccaaaacaaccacatatatagaagaactagtcatctctttagtgaagaagactctgaccatgtcatctatccccacaacaaccccttggtcattgaagtacaaatcaaaaataagatagtttcttaaacaatgatcgaaaatggagcttcttcaaacattcttttcaaaactacatatgaaaatatagggcttcaactcaaagacttggttatttgcacacagctcgtaaatggtttctctggccaaagtatagctcctttgggacacactcaccttccactcactgtagggaaagctctaaatgccaatacaatcatggaacagtttttggtaattgatgtaccttctacatttaatgttatgttgagctgaccaaccttatatgagtcaaaagcggtaacctcaatttaccacctatgcgtgaaattttaacaagaaatagagtaggttgtctcaagggcaatcaaaaaactgcacgggaatgctacaaccttgccttaactaaggccaaaaaggaagatacatctagccatagttcagagaaaggtaaaagtattgttaaatagggatccgcccaaggcagggatgaagacatggattagggaaccaagtataaatgttgggttggtcgaaaagctagaagaagttaaaattgatcttgctatgacaggaaactcaaaattggcaaagcttcattgcttaaaataaaatcaactttgataaaatttgtaagagcaaatcttgacattttttcctggtcgcatgaagacatggtcgggattgacccaactgtcatttcatatgccctcaacatcgatcccaatttgtgctccatacagtagaaaataagaaggttggataaagaacatgcacatgcattaaaagaataagtaaaaaggctccgagcaaatagattcataatcgaggctttctacccatcctaggtagccaaccctgtaccggtgcccattgctgaacaaaaagtggtgggtatgcattaattttactaacctcagcaaggcttgtcagaaggacagttttccactcccaaggatcaaccaacttgtggatgatatagcaggtcatgagaacctaagtttcatagatgtctacttggggtataatcaaataagaatgcaaccacccgacaaagaacataccagcttccgaacagatgttgacatgtattgttataaagttatgccatttggacttaagaatagttgggctacctaccaaaggctagtcaataaagatactttatttccaagggagtggggcactcccaattcaagattttgtataaaaccctcaaacttgtgaggattctatatgaaatgggatttggttagaatggggcaagaccgaggcggtttatgaagtccttgaaatagtctcgcagtgggattattgctccagccctgatgtgctcgaggctccaagcgcctattccagtcgagccacttgtgctagtctaccattggcccctcagatgtttcgcttgtgagtctcactggaggatagcaactgaactcaccggcacgaaccgatctaacccaacagtctcgcctgtattcgaccccacaagccctcaaggtgttactgttggaatttattttaccaggatct

SEQ ID NO: 219313 - DNA, 7403 bp, Cannabis indica
tctttttatgtaaacatgaactttgtaggtgtacggggacgactcgttccttgaactttgtaagagcaaaccatacttgaccatcaaaattacgtgaacaggggaaagtgataaaataaactacacaactttctagacttcatttatttaccacaacactagctaacaaaaatcaggtgttactttaaggttacttctacaattcaaaggtccaataaatattattagaacataaaaactatataacgaaacaagttctacaacaccatcccaaataaggcatgacaatatgtgaagagacatatatcaagtagagttcaacctagtaagaatagaaatacttaccataacttttaaaattgcattttcatcacagaccacatctctagaggacacttgagtaggactgctaccatcttctgacatcctactacttgaagattgagtaacctggggtgatccactagaagacccgtccgtagccatctttgatgtagcaatagtagtaagcaaagaaggattggcttctttcaaggaatcaatttgtaaaagattttcaaagcgatctttgcacatttgaagtttaaaccactcattatgtgagtgaagggtagttctaattattttcataagctgcggttcttcaattccaagtctcttagcaattgcaacctgccaatatgaatatgttaataatatattaaattatgaaaaaagagaataaaaaagccttgtaaaaacacaatcttaaaaggctgttggcaatttccgagtcaaacaaataaaaattgaaggagaaaagcattcttaaggaggacttcttaatgggcaagaaacactgaaaataagaagagagaactaattaaaatattaataatgaccaggacccaaagtctatcagaaagctatcacatgcctggagtgaacttgaaagagcatgtaaaggcaagccttttctgattgcatcctcattaggctggagcaatgccaacagagtctccttcaaaggtttcagtaaagttggatcactagaagccaaaggacctaagtgggagcatgccaccctcagagcactggaataatctccagaactcaccaacttcagaaattcaacctagattgttgaaggaaaaaaaaaggcattattgataagaatgatttcaataaatatatttacagccacttagacgttaccattggcaatataaaatcagcatacctgcttaagctggaagagcaaagtaggattttgcacaaagaagtccaaatctaaagcattaacttcttcaacaacctctgcagccattcctttactagctaattccttcaccccaagcaggatctcatatctatcctccctattgttaatatctaacggagaatatctttccaaactctgcccaaaatattttgttcaataaaaccatcaggagtaagaatcaataaattgacatgaaatagcaatagctacttctcactccccataaacaaccaaacaattacctgctgttctcgagagatgtatgcattacttgtgctaggctcttgcttactagattcatctgaaaaagtgtttgaagtatgacattcatcatgtcttcccctccaccgcttacgtttactcctttctccagcactgactctgcttctttgctgaattcttaaattttgaggtcgttgagatccactggtgctacagtcttcatgaaaggaagttggttcacgagcatatcttacttcaacattaattcctagcatgttagttgcttcaacattcttttcaggtgaaacatccatctgttcatcaataatggaggaatcatcctcagaatttttactggcactacaatccacatcaccagttaaatctcttgatgagcgaagaacaagcactgattgatcaactttcaactgtttggaaacaggttgatttcctgacagaaggcataaaagatagttatagtttcataagacatgatcagaattcaaaaggttaacgagagaggaagtgaaaacattttaggaatcaataaaaaaaaaaggagaaaaagctttactcaccagatgggggtgcaacaacagaatccacaatgcccctataaacacaatattcatgtacaagctcatcaagcattgtgacatccaatttcatccgacacaattcattctgcaaagtcatgacaaggttagtgatttcagccaactaaaggcgataggttaacacatactattatgccacctcagagaaaaatcaagatcaggaaattagagggttctagctatgtacacaaaatctcgtttatgaataagttcaactcagatgaactcttattgccagacaaaccaacactgcaaacaattttgtgtgttgtggggaagaagaagacaactagggaagaggggaaaggaatattacttaaagatgttggctatatttcaaatcaggcctcagagaacacttctatgccacctaagagaaaaatcaagatcgggaatttagtgtgttatcgctatgtacactaaattttgattattaataatttccactcacatgaactctcattgtgaagataaaccaataccggaaactgttttgcttcttgttgggaagaagacaactagggaagaggggaaaggaatatttcttattgatgttggctttaattcaaatcaggcctccgagaaccagtgaccaataagaaaggaaaaaaaaaactatctgaaagcagctaaataagaattacgagaacaatgtttggtattcaataacctgaaatgcctggaataagtcaccctttgtaaatctcaagctatcaactgctccttgtcttgtaagttctacagcatgcgcaagagcttgaatgtccacctgatttaacaagcaatcatgcaaaagtagagttgtgtaaaacagatacccatacttgaaagagtagaaacgagatgctaaatcctcactacagaaatgacaaaaaaaagcaagagcatgtattgagtctctaggataatgaagttgttatcctacaacacctaatacgaaagttcatggatcaagctacattcaaaataaatcacctcatcaaatgggggggcttcatatgagctctcttgaggtgttgcaggagggtcacggtcctcaagaagcaacctctcagtaagatctgatatgggtgaaaatattccttgacgaaagcaaaatcctttatgtatactatgcggatgtagaaaagaaaaaaaaaatccaacataatcagcaaacttagtaagtttacaactgaagtataaaacaaaaagtacgtaaatcaaaatttagtgaaagtaggctaaccttatcaaatatcttaatgtcattgaaaaaagaggatcataagcatgtagatgagctcttaatacagttgacaataatccggcaatatcaaacctcctcctttcagaccactgaaattacagtacatattaagttaaacgagctaatagagaaatccttctaccgatacatgaaaataaaagaaacagttaaacgacagaactctcccaaactcagccaagaacactcacacacaccagaaaattttctctttatttctcaaaggctactagtctcagttagagactaagtccaacgcattacaaacacaaagaatcacagttcgatataaccaatctctgaagactctaaaactgattaatacggcccaacaccacttatttatacccctaactaactaactaactactgctctaacagaatgaagctactaacagaaacataacaacacttctaacaattaaactaaccccctaacagaaaataaaactcagaaataacaacaatcaactacattgaaactactaggacaattaattattcatcttgttctgcctcacataagcgaaccttatgggcggtctatcattaaaaatcatagtcgcctactggtgcaagtggaaactatgagtacggtaaaaaaaacaatactaaataaggaaaacacaaagacccatcctgtcaaaagaatgtattacaataaaatcgtcacctcatttgccactggagaagtctggtcatctttgtcataaatgaaggcaagaagtacatgcttgaattcctcgtatgcttccttaaattgcagataaagaaatatgtaagactctacaactggataaaaggatcaatcaaattcatctatcacaacttgcctgtactaaaagagagtgggacagagaaaaaaaccaagtctgcttcaatgataaaacaaaagcaagggacacaagcattctgtaatgaacttgtcttaaaggttataaacagtaaactaactcaaggtttataaactcagcccttgatttttttaattctacttagtaattttcatacaattttctcccagaaatcccgctttatacacattagaaattttaaaaactattgttatggacacaattatttaaactcaattgtaggtaacaaaaaccaaaggatagacaaaaataaactaccgggtaggcatcaagagcacaaggagcaagagaggtcctcaagcaatttattgcagaatcacgatcctccacagttcctcttctcaatagctcaataaatttcttcacagaaaataggcgaaaatgaattaattgaatcaatcaaaacagcaagagtcaaactttgaaataacaagagagctatacctctaattgtatagataaatgataatcttgattagaaataaatacatagaagatggaaataaaaattggataattaagattttatgatacttgaaatagaaaatctcctacaaagtttagtaattaatgcattgtaagtgatgtccaaaacttcagtttatcataattatagctcaaattttctcaacatccaaattgaaagtatacaagactgattacctgcttatgtaatcggaagagaagcctgtgatcatcgagaatgaaaggtgcatgtgctcgaaggagatcgatagcggtatctacctcaccagtctccaaggaccgtctgatctggcgaatgattactctggaatgataagaggacgaagaaggaaacggagatgaagacgaagacgaagaaggcgaataatgtacagacgacggcgacggtgaggaagaagaagagggagaggagtcctcgattaggttctctagatttagcaaaatcgatgactaaggcatcgagtgctttcccaattaacgggcgtggactccattgaactccgtttggttctcgggaaaattctgttagaaaagcaaagagagaatatcgcaattgtcaggctaggaagatggaatttcctttttttttaatttttttttcctatgcgaagaggatgaaaggcggcgatgtgaggtgaaaaagtggattggccattatatagttggcacgtgtccatcacgtgtggtccggtaagacccttgtcaccgtgtaaaatggatgtttcaagttttaagttaaccacttcaaacagaaaactaaaaagccagacacgacatgtcgttttattgagaataaccgaacactcaatttcatggttttcttttttttttgagtaaaaggctactatattaaaacagagagttataataaccataagcaatcagtatccaccgaaagagcaaatttagcaagagtatgagcagcagtattggctcctctctttacatgagaaatttgaactccagggaagttggatactaaaagttgaatatcagacaacaagcaatggaaatcagaaactgtagtttgagtagacttcaaaccattaaccagtaagagtgaatctgtctcaatgaaatccacttgtagctgaaggtctttaagccatagtaggctatgaaacaaagctaaagcttccataatttctggtttaaaacagccagggaaaggcctagacatagcagcaatacaatcaccactactgtttcttaaaatagcaccaaaaccagtaatttgagaagctttgttaaccgccgcatctgtattaagcttcagtcttccaaagggtggattcaaccattttggaggagttgacaaaggcctgccactatgcattgctgcagtaggctgctggttcgataatggctgctgatgcgtgttaatgacacctctggcagtatggaattcatcaagataagtcattgctttgaaaagcaatagctcagtcggctgagtttttgagccatgacgctcattattcctttctgtccaaagactccataaaatgcaagcaaattgttccaactctaaattagaccaaattgtggatacatggagaaaaatacctcttaatgaaacatgtgagtgaagtaaatccccaacagcaaaggtggataaacaccaaaatttctttggacgcttacaatggaagagagcatgcaatatagtctccttttctctgtggcataatgggcaggtatttgtgtcactgatgtgtcgtgaatgcagaacatctagaaccggcaaacaatcttggattgccctccaaagaaaaattcgaaccttaggacggaagagatagagcccagaattttttccaccaggacatagcagtagtattactggtgttaggctgctgttcttccaatgttaaggctaacttataacctgttttgacagtgtaacatccattgctttcatgatgccaaagaagttgatcaggttggttgaaaaaagaaagagaaatactcattattttctcgacatcagaagcaagaaagagagattgcagaagagtaaaattccaccttccattgtccaaaaataaatctgcaaccttcatactcgtgtcactgccttggaacaacaaaggttttaaataagtgataccaggtatccacgggtcagtagcacaaactatggtttgaccattcccaactttccaccttagacctttaattaaaagctctttgccccacacaatgcctctccaagtgagagaaggataaacaccagttccagcagccaagaagtgagagtttttgaaatatcgtggcttgagaacacggtaaagaagagatgtcggatctgagagaatctgccatgcttgcttagcgagtaaagcttgattgaaatgaacgaaactctcaaaacccatgccaccttcgactttagattgacatagagcatgccatgttttccaattgattcctgtacccgaagagttagacccccaccaaaacttattcatcatgacctcaatttgatcaatgagtgatttagatagccggaagcaactcatggcgtaggttggaatggattgagcaaccgccttcaataacacttctttaccaccaattgagaagagttgttcttgccaagaagaaagaaatttccaaagtttatccttaatatcagcaaacaacaactgtttatcccttccagaataagatgg

SEQ ID NO: 219314 - DNA, 4499 bp, Cannabis indica
tagatagaaaaaattaataaagtatattaatttaaacatattatagtagattatgtaatgaaaataatagcgacaaaatacttaagcaatttaattttattacagttaatattagtataataatacaaaaataatttgtttatactaaaaaaagataaagttaaaaggaaaaaggataaaaatagtttcatagcttattaatagttactttcaacaattcttacatgagtacaaattatggtgtatgggaaaatgtacagagtggaagaaaaatgaattaaatgatagatatttgatatatgaactgaaggaagtgcttagaagatattaatccacttataagactacgagttagattttttatgaaaaaaaatttagagatgcaacgaggaccatatgggttagtaattgttaattgatttagaaatagtacaactccacaaatcttctcatatgctgtattctattttatgtgacaatcgcttcttctacttcctaaaccttggtcttatcattcaaattttagctatcttttgtctactcttacaatttgcgagtgataaattagaaagtagcatatgagagaaaaggggtttaatccaaaacatgagtacgtagatgacttgaattgaaatgcaaagtaaaaaggtcttcttaagcaaataaacaaattttaatcatgcatttacatatttttgtgtgttttacattggtgcatgaaactacatagaaaggcctgccgtgggatggtaaatactttctttagctctcgtcatcgtaggtgcaaaatatagactttgttatgtgatattgatgtaaaagtattaagctatgtacaagaacatgaactactctactcatcactaattaataattcatgtgaaatatccattaaaaattaaatatgcatggaaatcaaaagctcataacttttattttttgatcaaaaacctaaccaagtgttgctattaacaaattaataaaggaattttctgaaaattgtcttacattattatatgttataagccttacatgattccctattacgatgtcatcttatattattgaacatatgcttgttgacaaaagaacaatcacaataaaatttctttatttgttaggtcgtccgacggctttgaaataaaattaaagccttgttcatatcctcatttgttatatttgactaacctactaactattccatagaattgtagggatccagttgattttcgatgtttttaatcaactctcttacaaattaatattaagccctattcttgataaggtatggcatcaaatattcattcttgaattgcaattgaaatgtaccaatagaccacttctaaagtaggatactgcagttttccagcattggaaataagaccaaattttcaagtagtacatttgagatgaaatgaaagtcattacattaactatgaaataggaactctggctatcagagattattttatattgaactctctactacatattccattcacttaacagctatgatttgttaagctcattcaattttttcaatgtctaaactatctcgagacaaaacttcatctttctgagctggctcaatcacttttgacttgttagatttcttcttagctgctgcttccttagttttctcaagagccttaatcaagtttaaaagatatttctccggatcatcctgtggccatttcggcatgagattctcagcaacatcagctggagtcatcttagtttccccaatcaaactctcaattctatcaaacatttgatggttttcaaggctcaaataattcttggcaagaactttgaacccttcaaagctgcaataagaaagctcaatatgcatgtccattctaccccttcttatcaaagcagggtccaacttttctatatgatttgtagtaaacactatcaacctctcagtcccacaagaagaccaaatcccatctatgaaattcagaagaccagagagagtaactctgccattgtttccttcctcttgtggcttcttatggcttttaggcctttccttctctttccctttctctttctcttgctctttctctttctcttccactttctcatcttccaaacaagatttctctaccttctccttcttctccttcctctgtccagttagatcaagagagcaatcaatatcctctataacaattatagacttactagtagtctcaatcaaaagcctcctaagatctgtgttgtccttcactgcagtcagttccagatcatacacatcatagttaagcaaatttgccattgcagcaatcatggtcgatttccctgtccccggggggccataaagcaagtaccctctcttccaagccttcccagctctctcataaaactctttgttcatactaaaagcctgcaagtcctcaacaatctctttcttcttagcataatccaaagccatcgtttcgaaactcgccttgtgatcaaacactatgtgactccacataccacttgacatcttaatagaattagcacaattagtataaagcctcctctgcctattcctggttttaatttccttcccttgcttcataacatgatccaaataagacttggtcaccaactctctatgccttctgtgaaaaatgagcttgtaatacctcttcccctgctcagcataattcgaccttgaagagtgagcaatttttcccaaaccccaccaaacttcaacaccttgaaactcatctgtgatcttctcatagtcatccatactcaaaaccaagctctctccatcggtctccaggtcagctctaagtctcttagcactacgggaagtgttacagctcaagtatgcttcaaccaagttgtaaccttcactacgtttcattctgtccccagtgaattcatggattgaaatttggatgtaagggttgagatattctttgatacttctcttgaaattttcgattaagtggcggacttcgtgtggggagtactggcaaacaatggcccatgcaaacatgatgctggctatggttgagcttattgtggcccatgtttctcccatggttgatggcaccatttgaaggttcttttgtgaggtttttgaggatttgctggttttggctttgacttttgcattgctgctgttgaaacggttcatgaaagacatgaaaagagagagcatagagagattcatggtttggaattgtaagaagaaaagggggttttaactttgggatgaagcaataagagttacaaaagacaatactataatatttataagaacgcagttttttgtgttttcgttcttttagtatattgcatattggtcccaaaccttttatgttcttgcttttaaatcctttaaataattattgaatgcttaaaatatttctaatatcagctacagctagtcaacgcgagatgactaaaacgagagcgtttaaaacatttaatatatttcagtgatgctgttgagttgaaaattacaatacttttgactattaaattattattattattatttaaaaaagacttatcattatattgtacaatttgtctgtttttgtgttttttttttttttaaaagccaattgaacttcttatttataaaaataaaaataaacaaacacatattctatatttatttgcgtttcttaaaaaaatatataaacatatattctataattgagaactttttctattttctaaagaaagtagaaatatatatgcataccagcagggccggccctgactttttttaaaaaacagattgtgtcatgtacgtacaataaaatatggatcgtaacatgtagtgccaaactttttaaagaataagtatgacacgcttcgtaagttcaatatttcatgtcatataagtttcgtggcatgctttgctcgtgccagttcgtacttcttaaataggacaatctatttttatatccgagcttaaatttatattttactttatttttacaattactaaattatatatatttcaaaactttagttatattaatataacttttaaacagaattatataaacaaattattaacatcattcgaatttaaatacttacttataaatacttaaatttttatatcaaataaattaatatataatctttatttttcatgttttaatagttttaattataaaatcagagtaatttgcagcgcaaaaatctaagtttattatctagttgtagtttaatgcttaagttaaaattttggccgtaaaaatactttcagtgacacatttagaagtttcataagtaccttcccattttctgacacgctgagtgccagatggtaagacacatcatttaaaataaggccacatccttatactttattgccacctaatgagtatcagtttactcaatttgttttaataaataaagaaaaaaatttaaaacaaaaattaaaataatacaattattatcaaaaaaaaaaaaactcaataatacaatattaattcatataaacctaacaattaaattatataaaattaaaa

SEQ ID NO: 219315 - DNA, 2356 bp, Cannabis indica
gatgctctattttgattgtatttttgaaatgtaaagtttacgttgtaaaatactttggaactagtttgtaaatatttttaaaacagggggaccccgtagtctatatcacttatcttttgttaaacagttttaaaagttgaattttaattatcaaaatttaattacccacactttttcagtataattacatattatataaatcagagaattttattaaattgcacacacgtggcatccctattatacagggcgttacagttagcctctcgcttggttatcaatggtaatagatttcggcccactgggccttattttcggcccacttcttctagggttaccctccctcttaccctataaatacactctttgtatttatcattttattcttttggcattactcccgtgtgaaacaatagcagttaataaaagagtttttcatttatattatggtatcagttgtataaaccctagcctcctttttccttcatctacttccatggctcccaaaacaaggaactccattgctgccgcctctgtcaccgagtcgtcccctcctcctaccgccatctccagcatgacttctcctttgtcgaagccactgtcgccgacgtcgtcgctccgcccccttcacctccgactgctccattcttgacggacatgatcggagctcctcctcccacgtccgatcctcccacttttggtgtgttcggctccggttacgttgttgatctccccacttgtggaacgattggacaaccatctacagctccgatcggttccaactctgccccgacgtcctcttttttggcttctcctcttcacactccgcttccgcctttttccgctcccatcccgacggttcaacagacggcctccctctccaccggcaccaccacaacatcagcgaccaccttcggccctccacccgtccacaacacctcttttcttggtggtaatcttccttatcttggacatcaaggccatgtgccttttaatgataactctgtgtttactactaaccacgacctttctcgtgccgttctttatcgaccttcccatgatgaacgtactctgtatcatctcggaactggagatcacccaaataacctcattgcttcatttctcttgactggtcaaaaaatttccagtcatggaagcgtgcagcctctattaacattgctgccaaaaacaaaactcccttcattaaaggcaccatatctcgtccacctccaaatgatccatctcgctctacgtgggaaatttgcaacaatatggtcatgtcatggattcttcagtctgtatctcgtgagatcgctgctagtatcatgttcaaaaccaccgctcgtgagatgtggactaacctccacgatcgctttaatcaaagcaatggtccccgcatcttacaactcaaaacatctgttggcaatgttaaacacggtgatcgtcaccacttatttcactcaattgcaagctctttgggacgatgcaaaagattcaagactattacacattgattgctctcaatgagtcttactggggtattcgggctcagattttactctataatccacttccctctctatccaaggtgttctccatggtcgttcaacaaaagcgacaacgctgtcttggcaatactggcgttgttgctactacttcagccaaaccaaatcccaaccaaccatctcgaaacaagaaacctcggccaacttgttctaactgtcttaaatcgggtcaccttgttgacaaatgctacttcctccacagttttcctcccggatatggagacaagaagaagaccaccaccattgctcaggcaaatcaagcctcggtgactctcactccaaacccttcggcggctggcacttcccaactccagctcagtcaacaactgatctctctactcaatcaacaaatccaaggcaccccttccaccagtgaaaacctccctgtggtttctaatgtcttcggtaatgacaatttttccctcttttcttctggattgtagatagtgcgctactcatcacatatgtcactctcttcattgctttacatttttaaataaaaataatgttgctaacttggtcactttacctaatggtcatcatattcatatcaacaaaattggaactgttaaaatttccgaccaacttgtcttaacgaatgtcttgtatattcctgaatttaaatttagttaatttttagttaatgcttatcttgaacattgtgctaataaagtcacttttacttttgatcaatgttttattcaggatccctccctgacttctacgattgggacagctaagaaagttggaaaactgtttttctttgaacaggatcatcgtcttcttactac

SEQ ID NO: 219316 - DNA, 2793 bp, Cannabis indica
gcactatccattaaatcgagacaaattcaattatgccataatgatgttatatctgtatttaagaattttttttattaactgaagttaagaaattttgattagcactatttctcataattaatgaggatgtgataatatagccccgatataagatttttggcatgaagttaatggaattccatatgtaacattgtacatatagctttttgtttattattgttattctcttattattattaacatgatcatgactttattaacatctaaacagattattaatacatcgaacttaaccacaaccttttgcatattaattggatatacttcactataatgacccatttagtaatgtagtttacttactttcatgtacataaacacactctttaaacataagtagactcaacaaaccttgatttaaaatttaagttagttggtttagattcgaatatatataaactgtttcctttttttcttaatatcaataaatgctacaatatgatgtgtacatattataacaacacataacatgttataataattcataaatttttccaattattatcctaacagtactctatggtgaatacctatagagaaaagtgtgaaatctcttcacaattagagacgacattatcagcacactctactatttttgggggaccaacctataaattaatattatagaacccataactccatataacaaagcaaaaactccacttgtgctaagtatatagtggtgatttacttttggatatcattgaacattgatttagattgtgatatttttttctataataaataagatggtgttaatcatgtatttgggtaaaatatgaaaataattaaatttaaaagaaaagaatgatgtcacgtgaagttgctatctttcatgtaggatgatatgactccaatattagaaattacaaattagaatgtctttcactagcgttgacaatttataataagcattattattcttattattattattattattattattattattacatatcataattcaaacaccacttgataataaaatcccaattcaatctcttatcaaccgcatcaattactatccatgatttatctcaacatatccatatgaatgatgcttttattttttagtttttagatgataatgagtgcgagcaaacaaacaacaattccttaaaattaggtaagtgccaatttatgatttttaaactcttaactcatttcctactcttaattcatttagccatctatattttttatctataaaatttgaatgcctaattatttgtgtggtaaaaatgattttatttctctctttttttctttgtagtcttgaaatttatctttaaaatatttatttggcattcattgttaacagttacaatcccaaaggcaatggtaatgaagttcatctaataataaatataataaataaaagtaatgtagtggaataattattttattatatttattggaaacctgaagatcgttcgtggggataatttgttggctagctaatgaaattattatttgatacacttcgtaataataattaaaaaaaataaataaaataaaaacattgacaaattcttattaatcagttgacttgttcacttgagcagagctggccggggctgtaaaggtacgtttggtggcttttttttcttcaatttttggttgaaaaaaccaatagatgtattatataatgatctatttctacaaataaatgtcccaaaacaaaaattgacggctcgaaaaataatagtatgtggaaaattcaaacactcaaaaaagtaatatatattaatagaaatgaggttagttgtggtgtgggttagaacatgggctacaataatgaataatgaataagaatgaaaagagagcatgtgatgggcataaatattagtaattaaaaagggatcacacggttggaaaacttgtaagattggaattatgctacaaaatgacaaacttgggttggggttggattattggaattggatttggaccctcctccataaatatatattttgattatttttcaaaccaggattcaagatatgtatatatattgatcttcaaatataccacgaatcttgataataatgataacgataaatgataatgtaataagtaattggttttgcagtacaactagtcagtctatatgtaaccctatagtgctgctaatggtgaagctgcatgtgcctatgaatgtgatgtgtgtgtaaatgtaaaattaagctattatatatcttacaacaattcttattgctctaaggatattaatgagagtaatattgtgttgtttgtttacatgttggaattaaattattatgtttggttggatatatatttaagaataaaatgaaattatttatattgtattgaaaaaattgtctgatttattaggaaaggagaagacttataagagcattgtgtgagtaatttgtaataatttcaatgataatttaatgtgattttataaataattacaataataataataattaaatgaaagggaattgttattccattagagaccccattgttattcaataccataaattatttatccaacaaaaacatgcactacttagttaatgaaagttttcacacattctatatcaataaaacatataatccatgaaagatagtacacatttcatatatcaaaactcttgtggtgcatatttgatatttgtaaagttgttttcaaattttttggtcctcttatgaaacactaaatatcagttgagattttttttttttttttttttttacgtt

SEQ ID NO: 219317 - DNA, 4445 bp, Cannabis indica
ccattcatacttgcatcccaagcaaattgatatattatattctcgacctaaagaatggagtgattggaagcttgtcaatatttacaccccccataatgtgtgggattttccacatgaggatgatgatgcgaccacgactatacaagaaagaaactcttcaagaatctagttagttgtacaacttttacaattggacaatgtcaaatatgtccgtgataatatcaacccaattgaagtgaccaacagggaccatgagtagcctgactgtcaagattaatatgatttcattatttatagtgatgataaagacactagtgatagtgataatgacactaatgtaactgttgatgatgatgatgatgattatgatgacttgtagacttgaaagtattgtaatatttaaacccacagttaattaaatcaaatacatgttccttttgttaataggttgattaattaattatatctagcttgtatgtctaaagtggctgatgcaagtgcaagcaacagtaagaaaaaaagagttaggggaaagtacaagggaaaaaatattgaagaaaactagccaagcagcttgctggacaaaagttgaatttaaatatcataaggggactggggctcgataaacgactatgacaacaagtttaacaattaaatgaagtttgttgttcgcaataccatttctatgaaaagttcaattttgaggacgttgacgaactggtcattcagactatctgagatagactagcggtaactttcaaatttttattgtaatagatcaaacaaaactattgtacaaaaaaaattatatacgactttaatgtttatttttttcagactaagtttgatttcatctctttttctagtagtgtctgtcactcaaaattgaaagacaccagaagatatggaatatatgaacaatattccatacagcagtgttgtgggaagtatcatgtacattatgatctgcactagacctgagttgtgtcatgaaatgactgtgatcaataggtacataagtaaacctagaagaaaatactgggaggctatcaaataaatgatgagatacctgaaggggaactgaaacctcggattagtctactgctctaacactaagaaacctgaagtgttagggtatctaaactcagtctatgcatgtgatttggatacaagaaggtctcaacttggttttgtattccaaatcaaggaatgcataataagctggaaataagctccaaacaacaatgacttttgtcaatcactgaggctgaatacatggcttgcataaaagccatcaaagaaactatttagcaaaatggattaacaaaggaacttggtatagaccagagttctattacagtgtttactacacttgagtaaaaattaggtgttccataagagaacaaaacatattgatgttaggctacattttctaagagatgtcataaaaatggtaaggtgaaactaggggtgagcgtaaaatctagaaaatcaaaaaaaccgttcaaaccgacctaccgaacaccgttggaactgaaaccgacgaaatcaaaaaccgaaaaaaccgctaacggttaaaatcgccattggacggtcggtttttttagtaataaaccgaccgaaaaaccaaaaccgaccgttatacatatatatatatattaatttattaagtttttaaaccggagaaagtctcagcagctaaaactccatatgatatgcttacaaaatccgtgccatcagtcaagttcaatcaccgtctcaaaagcttctctcattggacactcatgactacacttcaagtacacgcaactcatgaagattacatgtgcaaggattaaggttcaagatggagaattgttaaatgtgttgactcctaatcctagctggcattgttatgaacctaaactagttgttagttacatgttagagttgttagtgtccgttatagttagttagagttgttaaataactattatcaactcattatactcggtctaagaccaactcttgtacaaatttgatacacattcaataaagaaacaatttttcttctttctttgtttattttgtttatttgaataagagctgtgaatttggatcaagctcaagcgattctcatcaagtctctgttgacaacaatattgtctctccctacggacgttgctttgtgaggcacggacaagtcttgttttcaaattgtgggatgtgtctatagtaagtttttatttttatgtattttttttagtttatttattagttttgtgttttaattgttttcttcaataatggtgggttcgcaccagattgttgttgatttggaaagagatggtatatatatatatgttttgacttctattgggttattgatgtctcatcgagtgatcccattcggcccgaatctctattggcctatgtttattccattcttcaataatgatcatataattaatcttgttatttttcttatttattattagaataattaatgagattgtttaaattttggatacatcgtgacactcctattatatattacttcttataatttaattcaaatttgggttgagtgttttgtttttgttttttttttgggttaaaaaaacgcatggggttattgagtttagtagagtgtacggatttatgatatgatgaggaggaatggggttggtttttaaatttatgtagttgagattgttgttgtgggtcaagtgggagcacctgcaggatcggggtttgggcgacgtacgtaacctaatcgaagatattttcagaattttatgtccacttctacttggagtcttctagtacttggatatgccattcaaatttatgactggtagtatggtgccaaaccatatatatatatatatataaataccttattagatgagtagattacgtatgcctatggaaattggaagctacacagtacacatgttcatgtgacatgcatataatgaaagattccctttaccttttgttttcaactacaaatgttttgataatataaaagatttattacaataaatatgaaatagaaatattagattttatatcaatgtatcttcatatatttatttgaggagacacgtaataattgtaagtaagtaagccagcttccatgaatcataaatactaaaacaacagtactacttgctttctctttatagatgagatgagtttgatatccaaatatatattgatgggacgtttcaagctccaaattcatttaatatataaaatctaatatatatatatatatatatatatataatttaagtgagagaaggatatgctcaagcccacacatgttcttcttaaataataatagtaataatggtgaagggcatcatcttcttcctttcggcgatttggcttgtaaggctaattattgggcggacatcatatgatacccttctgaatctttatgaatgaacgaagcgtggcatatatggtctatggccctagctaagctagctatatagcctatagtacatacagataacatatacatatattatatatatatattattgattaattaaagttcaaagagtcaggaccccatatctcatgtagggtcagggctactatatattaacaatgtatattattaagagtaacatgcacaccatgtaaattatacgtattcaaatagttattaattcaactaagaagagaataagctaataattgaatattatataaaaatgacgttattgtgctgcaagaaaattgggaaattaagaaacaatgatgaatgtcacaaaccctatgtcaatggaggactataataattaattaataaaggcaataatgaaatggtaattatgataaaataatatcaaaaaaagagtgaaaccaacaagaaaaagaagcaaaccacacgtcaaaaaaaaaaaaaataaaaatagaaaaagaaatccaaaggcagtaaagaaaagtggtaaagtggatatagaaaatatattgtttatagatttttgttagatgattcgtgggtacaacttttttgtcagcttcaactacaaggcaagcttaaatcacggagttttttttctttctaagattccgatactccaataatatcttattagattggataaaataattaaggtaactataattttggaggtccctcttacttaggttgtgtaattaatacttggactcatatcattaatcatgctaattttggtgcagaaattatgcacaataaacaaatggttaaaacttccatattaattagtatatatgtgattagttattgaagataaagtaatattggagcaatgccaaactataataataaaattaattttagtaatgttgagttgattctcgcttcattcgtttattgggaatattaatcagagctatttgtaatgttaggagtgtcaatagactcaatacagagtagtctttgctatgacaaactctattat

SEQ ID NO: 219318 - DNA, 2982 bp, Cannabis indica
catttttattattattattattattatggatccaaaaacaaatcaccctgattcattagaaaacaacatcaggaagctacatcatgatgataacttaaaataattatatattttctaaggttatataaatatatattattttgctttcactcaatttactgaagtatacgaataaaataatttatacatttttattacaaacaaacatccatccatctaactacaatattcattcattcattctttctttttttttttttttttttttggatgaaatacaatattcatttatgtttaggaatgtcttttatctgattgatccacgtgtcgccacatcaataatattttttatatttttgatctaaaaagaaacataagttctaatattattttttattggatgttctaggatgaagacgaccctccaacaagttaaaaaagagcatgagaaattacgaggacgaattgaaccttatttccaggtctatattaattcttctcttttattgaaacaatataaaagtagttataaatgactgataatgaggtttttattcatttcagctactgcgacaagttgggcctgttgaaacagctcagaggcctagttaatcaaccgaagtaatagatttactaacttacagtagcaagcatctcagagactctcacaaaagtatcccatactctatcaaagttgggcctgttgaaatagctcagaggcccattacatcacaaacttcttgttcttctgttccataaaaatagttgttatatcaaagtaaagattaatcggaagtttgacattaatgtcgagtaaattaaaatgtcattgtaaattcgtttttatttatttattattattatttttttttatggttgaatcattgtaatttcgttttgtttgaggataatttatcaatgtattaagtcattatttcacatataattattgtaatggttgttggcaataaaactattcaaatgtgagtgcaaaaatccttgattttgaagatgataatagattgattgatcatattcatcaaaactacatttcttcttgggctaataaacaatagttactatagtagttggtctatcttatatatagcttaaatcacttcggccataacatcatttgggcctctgtacataaaatgaggctgcatgtcctcaatgttagaactaaactccatcgtcgacccaacttttttctggctatactatacgacaacattacgattatatatatttatatatatatatgaaagtgtttaatttttaattagttggacctaacctaagtttgaaaggctaacaaggttgaagaaagcacccctcttgttcttaaggtgagcataggtcccacgctctacgaccttgccatcagccacaacggcaatggagtccaagtccttaatggtgtttagcctatgagccaccacaattgtggtcctcccaaccatgattcggtcaagcgcttcttgcacaacttgttctgactgcacgtctagcgcacttgttgcctcgtccaacaatagtatggttggatttctaatgatagctctcgctattgcgatcctctgcttttgacctcctgataattgtacccctctttctccacattctgtttacatacccatctttcaatgaccttccaaaaacaaaaatcttgttagagaataattccaagcaacttaccatacacacacatactattctactctacttaaacatggggtttggtctagttttaataattatttgtaaatattattattcaacaaaaacatgctacaaaaacaaatgaacaaataaacaaaaagataggttgattacttacgatatgaattcgtgagcattggcggacctagcagcttccaccacctcattctcagaggcatcaagcttaccaaacaagatattgtcgcgtatggttccagagtaaatgacgggctcttggctgactagtgctgtgtgcttcctataccattggatatttagttcccttatgtcaactccatccactttcacccatcctccatttacatcataaaacctttgggtcaatccaatcaccgttgatttcccacacccacttttcccaactagcccaatgctcgtccctggcttcacatctaagctgaactcccgcaacactagaatatctggcctacttgggtaggcaaactccactttcttcatctctattcttcccattactttctccaatttgctaccactactttcatccgagtccttaaaattatcccaaacagaaagtgtcaattataaatcatacatttcaaaagtaaacatattatgtgcattagttagtttactcactgtgtgagatactggaatgagtgactggcggtcgagaatgtcgaaaaccgaggcgacagcggcagagcccttggcgagatctgaagtcatactcccagcgtcggctataaccttaccagtacttaccaagatgaagaacgtcttgaacacgtcgccggctgaaatttcacccttctcaacaagagtgccgccataccagaaatccaatgcccaagacatgaacgtcaagcactgagcagaacccaatccaattccggccatccaagacttttttctcgcctctttcctaggtgcctcttgagcttcttcaaatagctgcaacacttttcccacgctgccaaacgaggtcacgattcgatgattgtacacggcttccacggctatctgggtactcttgttctgggcattgacgaagtttgcggatgtggctgatgcaggaccttttcgggtgtagaaaacagaggatcgtcaatggctgtacggcaatcatgaccagagctagcttccacgccacgattagcccatcaccatggcgatcgtcacagcagaagcgggcctgaactaggagagagacacgatcccgccaccaggggattttccaccatggaagcctcgttgctgagtcgtgagcacaacgcg

SEQ ID NO: 219319 - DNA, 2425 bp, Cannabis indica
ttttttatattaaatattaaattgagtatccatttccgattgagatggaaaatcttgtatttaaatattaagtataattatatatgaaagataatatatttttataacatgttaaaatcttaatacaataacaaatatatcaataaataacaggtaaaaatattaaattgaggtacccattttatgacaactatcagcaattaacccattatttttgttcatttagtggcccaacataatgaaggtagttaatcaatatagattgatctaaaatctgattcatttataagaaatttctagttaaccttcttgaaaaatttcttttttaacatcaagtatgttagtactacataaataccaattaaaagtaaccaattcaatctgtactcttgcggattgaatttgagttattatgcggattggattgaattcaaaatataaaatccacacttagtgggaatcgaatgcactatttaagtaaaataatactgattggattggatgaatacctctagatcgaaattagtatgaaaacacagttagtcgctcatccaacaaatttaactatcgcatataacctccttcaatggtgtataactgcaattttcaggtggttagcttcctctttgtcccatacaagtagcaactatgtggatagaagttggcaactcaacttgaaagtttgaaagagagagggggaaagaatgtgggcaaatgggaaattcaatatatggaagataagggtaataatacactggccgaccttgagatttggtaggccttagaaaaaaaattgggtcattattaataggggaatttttattgggataattttacaaaaataacaaaaaaattacaaaaatatagtttcacagaattttaaatatttttacgatatttttaattttatttacagaaaatacagtctttttatgttgtactcttgttaatttgttgttgattttttgttatatgaaaaaaaaaaaaaaaccataatttttgcacaaaaatataaaaaccataaattttataatttcatcttattaataaaatatgtggtatttttaaaattattgaaaaaatatgtgtatttttgaaagatggttttcttaagtctatgaactggtgaaccctaaacgcagacttaacccgtcttagctccatatataaaaaagagtaatttacgggatacatatctaagtttaacacatagttgtaaataaatacccaagtttaatttttagcagtaataatacttaagttatatttttagaactttcgtaagtacatgcctgttaagtatctacatgtcattttcttattagtatatataaattaatttttaaataaaaataaaaatttaataacctgaaccaaatagagattgtcacgtggttgttgacgtaacacttaacaaccaaatatctacataaatttaaaaaatataatttttatagaatattattaccgtaaaaaattaaatttaaaactacacaatactctatagaaaatccgacaataaattgacttataacaatatatccattagctatatctctctatgaaaaatataaatattgtgaatagaatttcttaaagtaaaagacaaaattatgaggtccactataatggagtatggaccaatggacctgattctatatgggcccatcttcatatacagatctttgtattattggtacctaattggtaggtagctaatatttaaagatgcttatttaattttgagaaaatgagatctaaagattaaaacattccattttcaagtacaaataaacactaccttttactaaaaaaaaaaaaaaaaaaaaataagagtacaaataaacactcataaatacctttcatttggatttgaactcaaatatgcataacttatattttaagtacacattttattgtttataataataataagataattattatggatatatgcaaattgttttgtaatagaaatatttacgataatttttatactttgggaaagaaatttataataaaaaaaaattaaagaacaaaactctataagagctcgtttgatacgctgtattgtattgtgttggattgtgttgtattgtatggattgtattagtattacttaatacaatacaatgtttggtattgacttgtattaattgatcgtgtaaagttataatatattttcaatacacttgaccccaacaccaactacgtgtcagggtcccaggtcctaggtccgggttcgggtcagtgtcgaggttcgggttcaggttcgggtctggctttgggttggggtcggggtcggggtctgggtatcctaaatcctttataaatattataatacaagctaatacatatcatttgttatgtattaaataatacagcatacattgtattaaaaattattatcgtaataattaataca

SEQ ID NO: 219320 - DNA, 3437 bp, Cannabis indica
attgcatagcaacttcagaggcgagaatttcaaagccaattagaagtagcacagacacagagtaaactaaaccctaaatataaaagaatcaacaaacttacaaacatcctaaactgacaaggaactttaacttgagagaataataattaaaaacaaaatgttacccaagtaacagatagaaatgattagtattcttgttttcgtagagcaacaacacaattcctaagcacagaacatagtttaacctgaaacttggaagagttcttgaggcttttgaaaatcatcaaggtcacacagatttcacacgtgtcctcttgaaaagattgtcccaattatcatataaatgataatgaattaattagtgatgagaatataaaattgctaggcatcacagaaatgatagaaatacaatgtaccaaaagcccgctcccaatgaaatggagtaaggagaggccaatgagctaaagccataaactaagtaaatcaaattggcactaggcgaccggaaagaatctggctaatccaaatagatactcagtatcccccggaccatattggggaaaattaagtctcaatatatctgtttggaatcgaaagcactgttgacgagacatatttagatgtcatggcatgacagtcaaaacgaaaaaaaaattattaaatgatagtttagaaggatgtcatgaaaacctactacaaatgggttgggcctcaacagttagcaattaaacatcatttagacagatatagcacaaataaattcaagtcatacctgttgtccacatatctcatgagacctccgtgccacacgttctgcgacaccatcttcagcaaatgttacaaaaccaaaacctctgtggccacttcttttggggtcctaatattagacaatattttattagttacctaattaagagttttatttctacactaactgaagatacatgctatctcaccctgggaacatagacatccattatacggccaaatcttccaaagtattgccgaaggtcttcaatagatgcctctggaggtagcctaccaacaaagattttctttcccactcctcgagtagattcacctcctaatcaaacaggacaaagaaagaattgatttcatgaatcatttttaccagcataaattacagattcgctgcagcggcacttacttccatacataggtcccggatgatcatataaggtaggagcaccgagcgctgcatatctagttgctgcagaaatatatgcattatatgcgccatatccaccctgtggtactctgcttactggtggtggcctaaagtcatcttcctgataacatgacataatatttcttaaattaaatagtttttcatataagaattattcttgtttatatatatataaaaagtgggagtgagaaaatgttctgaaaaattactttctatcaccagacctaccttaggagttgctcgatcaacaactacagttgaacctcccaactcatgagtgtcagccatcaaattatcaacagactctgcaataattaagatcaacatatacttccttaatattaataatcgaaattaaaaatgatcgtgcttctgtttctgaatgcaataaccttaaataattgaaaatcaggataggcaataaaaataccacaaagttcatactacataattacagcaaaatgcagaatatttttttctatattgcagaagctgtaaattcaccataaacatgaaatgaatggccagacctgcattcgcaaaggtgataaacccaattccacgatgtgtagccgagccttgatcctgaacaacatttacaaaagttaaacatggcattacaagccttagaaagtttacaagcaaccaatgagcctatgtcagtaaggcaccgctacttgtaatattactgaaaagaatagtacaaacagaaaaaggtgtacaaagattgtacaaccagcctctgtcagttaggaatatttttatgaagctgtatgtacacacataatcaacacatctactcagttacattttctaaagctaattctccaaatgtaattacatgagaggaaagaaagggcacctttggcatgtataagtcagttatctcaccatatttctcaaaatgactgcaaaaagaaaaaacaatatatcatgtacttccacatcctagttcatcaattgattacagaaaatataaacgcttacgaaaaaatgaaacacaaattacctctgaaaagtagcttttgacactgattgtggaatccttgccacaaaaattctggtcactttttttgcaggtgctctcatttcttcctgaaaaaagaaaacacaacaatcctctttcatagacgctttaatactacatatgtccatacttagcattctaaacgaaaattaaagcattatgagttatataaaacctttggagttgcgactttaatctcaagcattctgctcccaaggaagtgctcccctgataaagcactctgaaagtagacccaagacacaaaatatcaactaatagagaaagtgttatgtaaaagtagactatataatattttcactagggaactaatgtttcttttttgctgaacattgggaactaatctttcaaaaccaaaataaagcgaaacgaccttcaggattgttcttccatccgaaatttgtgtaaattcgaagttgttatttcacatgttgttagtttggtaaatttctccaatagaatcaagaagtgactatagtgataaatacgatacgaagacagaatattccaagcactattaaccgaaatccgcacatacaacaatttgaaatcaactatcaaaaattgtccaaatttaaaaatcacccaccttagcatcttcttctgacacaaatgtcacatacccaaatccacgagaacgaccagttgaacgctcctaggaacataaagaaaaaaaaaatcaaatatcacactgataaagccatttttttaatataaaattagggacatagctaaccttcatgacaatacaatcttccaattctccaaactttctcatatactctctcaatccatccgtttcaacgtcccacggaatacccagaacctaaaatccagttttaaatcaaacaacaataacgaaaaagaaacaattcgaaaattttcaaacttgaatatccaacaagagaaattacggaattatttacagaaaaacttaccacaagcttgcgctccatgagaagatggtcaaagaaaaaccagggagaaaccctaacactcaaaaacccagaaagctctcacagacagacagcgctcgcgctctaaccacaccctctctctctctcgctcgctcgctcgctaaatctcacacactcgctccctgcacataataagaacacctctttctcacacacaatcgtcaaataccaaatcaaactcacctattttttttcttttttcttt

SEQ ID NO: 219321 - DNA, 3177 bp, Cannabis indica
aaaaaaaaaaatacaatgaaattaagagatagaacaaattactttggactctaaacttgctgtttagaatggaaattggaatttaagtactatacatcaagtaataaaatgaatattgttacttgcaattcaggatggaaagtactatacatgaagtaataaacgaatattgttactaataattatgagttacggatatattttcaatcaaataaaaaataaaaaattatttgtatatactattactctatcgtcatcaccaataatttattgaaagacctaattgattgatatgaacaaaaagggagacaaggcagagaaatagtgaggcagtgaagaaggtgaatccaagagtacctccaacgattgtagccaattcaagcaactgctttaacggcgcctcatgacctgatctctttctgtaattaccatttccattgctgcctacctcataattattattattattattccatccgtaatacttatcacttgatgaacaacatctctctagtttttctttcactttaatttcttctattctcgctcctagaatgcttaaatttgcatccacaatatcattatttcttgatcttgatgatggttctgtagtcatcacaataaggtaatatatttataattaaatcaagatgaaatatatattgtacaatacttattttatttttcaaaaaaaaaaatataactacttaacataatgctgaataatagataaacaataacaacaatacttttaccttcacgatgatgatgatgatgatgatctctgtagctttgagctttaatattaatagattggatgagtttcttattagatgaatatttcaacattggagcagtacttaagaaagaagatagagaagcagtcgaatatgaatatgacatgattaattaagatttattagatatatatttatatatctggctaaatcatctggttttatagtatgaggtagtttgttagatggtcttttcaaaggtggctgctggtgtttggtttagtactctatatatatatacaaaattacaaatgtgagataagatgtatcgatcatttcctttcacgagatgagatatacatacgttattatatcttattattatttatttatttattatatatatatgagggagtgtgcaatatgtgttgaaatcatatgaaggcttgtccctttacatgattgaatgagtcttcatcaaaagagggaaaaggtttaagcagacaaaaaagccatcgtctatataaagatttagtatcctaatattattgtttagttagaaaagaatatatgtatttttgtatagttgtgcaggccagctaatagagaggagagcatacaaagaggttcttatcttacatatatttttattaaaaaggttgattccaaagtctaatccacgcgttaacaggcaatacaatgtggagatttgtgtatggatttattacaaattcaacatctcatttcgatttataagggaaaaaatggaaaatcacgaagacaagattaaataaggttaaatttatatatattcttcaccattgactaattgttgacgctcaaaaatagtcaatatcaactcgatagattggaagacgaataatgaatgtaagtatataacttagagagactcacaaagtttatagtaattcatttcccatgtcgccatagtaataaagttacatctacttagagtttatatttctcaagatggtattacagaaaaggctaagtgtttaagctctagtttttagagagaagaactagagagagatgctctgactttgtaggtagttttttgaatgtgaaaaatgagctaagggagttctccttttataggtgaagaaggaccacaaaaaaaggaataaaataataaaaagtacaaattaggtattttagactgtagatgatgatccaacgatcaaaattaatttatgaagttgatagtcattttcagagttcgaatggacccattgcaggtaacccggagcttattttcgtaactcccttggggtaaaatttaaggtcgataacttcaaaattgtgattgaagtgtgagatatgaattgatggagcattgaaatatcttcgaaacgcaagttgaatcgtgtcaatcaaaccaatattgagtgagttataactgttttactgaaggttattcatgacctagcccctaggttgacatcccaagcccaagttgacatctcgtgccacatctcgtgcccaggttgacatcccaacgcccaagttgacatatgacatcaacctggatgttggataagtgaaaaactatctagggagtgtactttatggtgcctatgtgatattttgacatcacttagtctgtttttgtattctggcgaacttggtcaccagttctcggagctgttgttgttctgcagaattgaaagactcgaaactcttcatttccaagtgagtttcccatgttcgaaatgagaaatacaaagttatgaatttgacttctctgacttcatggatcttagctattgtgaaaaactagatacacaaacaaaatagaatcaaaatcagataagcagaacccaacgcactaggccattgataaacctgggcactgggtactcatttagagcttctaggatgtcattgcgatacttctaagtttctagaatattaggacgagatctcctacactgtttttgaccatttcggattccatggccgaatcaaatttagcatttgtgttatcaaaaccagcgcaccaggttgattgtcaacctaggcgctgggcccagcactaggtcaacctaggcagtggaccctgttttcagggtctcgggtttgtggttttctcactgagtttgcttgaatctttattattttttataatgaaaaaaatgcctagaacactattttgttaatttgattgtaatgtcaacctgggcgttgggcctagtgccaggtgtcaacctagacactggctcccctttatggccatttggaagttctgtttggtcgtcagaaatagtcattgccagaaatattacttttgccagcacagtttgctattgtgctagtaaaagtaacttttaccagcgcacatttacagtggcaaaagtttaacttttaccagtgcatttatgtgctgggaaatgtcatttttttccagcgcttttcattt

SEQ ID NO: 219322 - DNA, 4101 bp, Cannabis indica
gatatgtgtattagcaacatgttgatactcttgatgtactatctagattatattctttggtttggactaaaatatgcaacattaattactttaaattttttgttaacaaattcaaaattagttgattacaaattcaaccacatcctgtctcacatatttgttttaaatagtctttttatttaagccatgatgagaacttagactacttgatcaaaactgaatatatatccaaacaatacatattatgaagtaaagtcagttgttttgggttttatttagtctcagaaataaacctcctcatactgatgatggatatataagcaaaataaagttattgtatgttgattaatattgttgtatctattttttgagaccaagtagaagcaggagaatgccaaagtaattaagcctgtaagcaagtctgataaacttcatcttaaaatcagtccatggtggataccttggctcaatctcaatcaagaaacttccttgcatgatggccttttcatggctgaatgtgtcaaatgaatacttcccatgataccttccaaaaccactctgatccacaccaccaaacggcagcgtatcacataaaaactgcacacataattaattaccaacaacaaattaaaacaacttgattcacattaaaacaataaataaattaaaactctatttttaacaacgtaaattatttgaaattttctgaaaactaaatggaatttatgttataaacacaatctatatatcgtcatatagattcttagacaattttcctatatattcttagacaataagtatatgtatatttaaataatttatgggataaatacttaaatttaacttctgattgcaaataaatacttaagttttaatttttgactataataatagttaaattatatttttagaatacctcaccgttaaaatttaaacttatgtatttatatgcagccaataattaaacttaagtatttatgccgtaaattactctatatattttaaagtagaatattgaagaaggtaatgtatagtacttgaatcaaaacatcgttgaacatgacagttccagaagatgtttcggataaaatccttctcttgaatttttcatctttggtgaatgcatagatagttagaggttttggcctcgactttatgaactctatactttcttcaatcttattcaactgtacaaaaaaaatacatttttttgttagaataattggtaacaaaaatatattacttttattttattttcttaagaaaagtattttgtgaaacttatattgaatttttttagtcctcacagtgattataggaagaaatggaccaaatatctcttcattcatgatggcagcgtcaagaggaggatctaacaacatggttggctcaatcatcctgaaatttaattcaaagaagagaaaattggttttttttttagttgaagcgtctatgtacatacaatatattgtacaatttggggttcgatgatctcggactccccacacatacaccccaatactttctctggctacttgagctaacctcacgtgattaaaagagaaaattggcttctttgaagatactacgtaccaaaaaaatgtcacttttataaaccaatcacatttatctactaaagtttaggtgaacatgatatcttcattatttgtatatagataatgtaataaaatttggaaaagaattaataaagagacttacaagttatcttcatcgaaagagccaccatgtataattgaagctgcaacaagagggtccttgagaaagcctgttagtctctcaaaatggcgttgatttactattctggctaggctctttgactctattggtttctcaccataaaatctcttgatagttttctttaacatttcaatctaaaatacatacaataaattatcaaaaatttcttatgcatataaagccaaaaatagttaattaaaatgagaaaattaattaatatgttaccacagttggagcaaagtttgcctcgaccagaagataatcaactgctatacatgcttgtccactacaaggcccccactttgctcccgctattcttttcactgcaacctttatggaaaacaaaattcatgtatatatataaatattacaacatgatgaattcaaaattaaccatattgtcatttctcaatttgtgtgtatcattcatgttaccttaaataagaataattgcttcaaatattttgtcatagatatatgtgtaatttatgtatatattatttgtgtgtctttcattaaaacaaaatatgagcctatttagattttatgcctaatttgcttcatgtaactagttttagtcgcaagcattacttttttactgccaatataggaaaagatctcatggcaagcatcctttgagtatagcttatataattttcgctttgggtattcaaataatttagattttaaaagggcatgtcaattaatataaaggctataatatttattagacctgtgttgttactcgtcctcgagatttaaaggtcttaaagtaaagttatgaaggatttgaatttgaaccttgagttaatagagaaagatgcctaaagaaagtaggctttcttccctattaagcccaccctaaataaacgcgggtcaaggctacgtttagaatcaacacttaaagtagttaaaatggttaataggtaaaaaaaaagggattagctaagaggtaaaaatagtgttgcatcaaatgatatattatagctcaaaaatttaatttatgaatagtgcttataaagaaggattatttattgaatcataaatattatattattttttcaaattttttaagaatgtatgtgtgtaatattattatatttatttatttatttatttttaaaaaatgaataaaatatattaaaataaataatttttaaatgatataaaaaaaaataaaaaaacggatatatggtgtaatgtaaatgtgtaaggtaaaataaaaaaaagtaagatttttgtaatattttaaagaatagagtaaagaaactgatgtaagtgatctaattagactctttgatatacaaaaaagtttcaatttttttttaaaaaaaataccattttattttatataggtaaccaaattaacaaattgtgtattgtatctcatctcatatattattggtccttataaaaactgaatttatttatgtaaataaatataaagaaacaaacctttaaatctgaagttgttgaaagggaatctagtatggtgggacattttcctccaagctccaaagtaacaggtgttaaatgcttagcagccgcagtcattactatgcgtccaatttgtgcactcccttgtaaagtagacaataatacatttcaaaataaattcatttctagtatactttaaaatcacattaattaactaattaattaatagaaaagaaaaagaagaaatcttttaataccagtaaaaaagatcttatcccacttgtgaagtaggattttttcacagatttgaggtcctccctcaatgacttgaatagctttggaatccatgtaaagagggataagattagcaagaacagaagaacaagctggggcttgatctgatggcttaagaaccactgcatttcctgctgatattgctccaatcaatgggtccaatgccaaagctattttgtacgaacaaacatgtatattcatattatgctcaattctctatcttaagaaaaataaatttatacatataatggactcacatacatataggaaagttccaacaagaaaatattagaataacgccaagtggttcaggctgcaattctccttttgcagggaaaaaaaccagtgaaattggacactgttacaatacaaaatgcccaaagtcaacaatataccttaatttcactactaaaaccaaaaaaaagattcattggcatattcaacagattaattatgattttttatcctcaaattattgagatggttgatttcaaagtatttcaatcaattctgtttaattttactaaccaatatctaatgtaaaaattttctaaacactaaattctacctctcaaactgtcttgtacttgtgttagtaaaattaaaaaaaaa

SEQ ID NO: 219323 - DNA, 15455 bp, Cannabis indica
agatttctgagtatttttcagggaccctttcatatgagttttttcgtcccttttttgaacttgtctgccactatttataattatatagtgggcagttaattacaaagttgaccgaaataattttacagcaatcatccctaaaattgtgggattttattacatattatgttgtgtaaatgcggtttatgatttcaaaaccgtatagttgtgattttctcgcttttattgggtcaaaactatcgtgtattaaacacgtctttaactgttgaatctggagatgtctcgacagaaacttgattatggtgatctcaatagggagctggggccattcttgcctccgaggtcgacaatgtatatcttgtgtcgatcaaggttatttataaagaagtcttctaactcgccagggttgtaagcctcgctcctgttagttggatgaagctataggatgtcttcccatagcgagatggtcatctcgcttacttgttctttgagctgatctgacttttatacttagcttgtttattgcatgctaaggattttcacggttaatacgtgtcgctttctccggtgcctcactattcatatttagcgacatatggtttctcgctaatacactaagtgtcagtttgtacattgatttcttgcctaagaccttacagtcagcgggttataaatatactctgatacttacgtaatgaatgacttatttcgtaaaaagatattgcaccgattctcatccccttaatcttgacacgtgtcatccagccaaagttcgggtataacatttagaaatatttaagaagttgcacattaacatcccctttgcaaaagccttggaacaaatgccaagctatgttaagttcatgaaggaattcctatccaagaagaattaaaatggaggattacaagacagtggcattaaccgaggagtgtagtgtaatattgcagaagaaattccttcccaaacttagagatcctgggagttttaccataccttgtaccatcgggagaatagaggggatgaatgttctttgtgattttggagcgagcattaatttgatgtcgctgtcagtttttagaagattgtaatcgagagaagcaaagcctactatcgtaactttgcaattggctgatcgttcattagttcatccaaagggggtcatcgaagatttctagtcaaagtagataaattcatttcccattagattttattgttttggacatggaagaagatagtaacgtgcccatcatcctggggagaccattcttgggaacagaccaagcattgatagatgtttagaagggcgaattaaagctgagggtgcaaggaaaagaagtggtttttattgttcttaaggcaatgacttttccaaaggctagtgataattgtttctttggttatctcgtggacactatagtggaaaagaagaaattgattgaggattagttagaagtgagtctaaccgaagaggacttgaatgagcaagacagaagtgaggtgatggaatatgtaaaatgtcttgactcttatgggtcgttgaatagaaaatactttgaagagttgggggtcgttccaaagaggcatgtgtcgtctgtagagaagccaccagagcttgagttgaaggttcttcctgatcatttgagatatgaattcttgggtaacaacaagacgttgccagtcatagtgttagcttcactttttgatgtggatactgataagttgttgagagtacatagagcacatacgaaggccattgggtggacattagctgatatcaagggaattagtccctcaatagttatgcaccaaattttaatggaagatggagctaagccaagcatcgatgcacaacgaagactcaatccaccaatgaaagaggtagtgagaaaggaagttgccatgtggttagatgctggggtggcctacccaattttagccagtaaatgggtcagcccagtacaagtagtgccaaagaaaggagggatgatagtgattaagaatgaaaaaaaatgagtggatccctaccagaactgttactggttggccaatttacgttgactaccgaaagcttaataatgcaactaggaaagaccattttcctttggctttcattgaccagatgcaagatcgattggctgtacaagagtactattgttttttagatggctattctggctatcatcaaataatcatatcactgaaggaccaggaaaagacaacatttacatgttcgtatggcactttcacttctaggagaatgccatttggactatgaacgctccatcaacatttcaacggtgcatgatggctatcttttcagatttgattgagggttgtatagaaatttttatgaatgacttcttgatttttggttcatcttttcataagtgtttgaggaacatggagaaggtactaattaggtatgaggagtcgaacttggtacttaattgggagaagttccattttatggtgaaagaagagattgttttgggacacaagatctcaagggcaggaattgaggttgatagagccaatgtgtttatgattggaaatctaccccctccaatttctgtaacaggggtttggagttttctaggtcgcgcaggattctaccagagatttattaaagacttctcgaagatttctaagccattgtccaatctgcttgtcaacggagtaccctttgagtttggaaatgagtgcttagaggcctttcaagctcttaggagaagctaatctcgacacccatagtcactaaacagaattaggagttttcattcatattgatgtgtggtgaaagtgactacgccattggagctgttttgggtcaacgagttgacagtgtatttcataccatctactatgctagtagaaccctgaatgatgctcagttgaactatgccactacggaaaaggaaatgttagccattgtgtttgcatgttacaagtttcgaccatatctgattgggaataaggtaatagcatatacagatcattcgccaattaaatacctagtaaccaagaaagatgcaaaaccaagactaatttggtgggttcttctgctccaagagtatgatattgagttaaaaagaatagaaggggaccaaaaatctagttgctgatcacctgtcaagacttgaattggaagagagtcaaaacacgaaggaggtacaaataaatgaagagtttcccaaacaactctttagtttgagggagagcttgatggtaccttggttcgtagattatgtaaatttctttgctgccaatggtacacctctagagatgtctcgacaacaacataaaaagttcttttcagaggtgaagcactactactgggaagagccaacactctacaagcactgtgctaatcaaataataaggtgtgtgcctgaagaggagatgtactttatctaaaccattaccatagtttacaatgtggggggcatttcagtggaacaagaactgctgccaaggttcttcaaagcaatttttactggaaaactcttttcaaggatgctaatgagtttgtgaaggcatgtgatcgttgtcagagaacaggcaacatttcatggagaaacaaaatgcatttgactggtattctggaggtagagttgttcgatgtgtgggggtatagatttcatgagaccttttccatcattttttaacaacttgtatattttgttggctatggacgacgcatcaaagtgggtggaagcaactgcaacacacaccaatgatggtaaaacagtcttgtctttccttcaaaagtacattttcactcggtttggaactccttaagcaatcatcaatgatgaagggagtcatttttgtaattaacagtttgaggcattgctagcaagatatggagtctgccatagaacaaccttaccttaccatctacaaagcaatggtcaagctgagatttcccatcgagaaattaagttgatattggagaagatggttcaatgatctagaaaggactggtcaaggaaattagatgatgttttgtgggtttaccaaacaacgttaaaaatacctattgggatgtcaccatataggttagtttatggaaaagcccattatcttccagtggaattaaagcataaagcattttgggcaatgaaaacctcgaacatggatctgacaacaacaggacagaagagactggtacaattagataagctagaagaattcaaaaatgaggcatatgagaatgcgaagatctacaaaagaaattgcatgacggaaatttagtcaaaaaagaatttcaacccgtacaacaagtcttactttttaagtcaaggttgaaactttttcctagtaaattgaagtcaagatggtttagactgtttaccgtggtcaaggtatttccatataaagatgttgaactgaaaggcaagaattcaaaaacttttaaagttaatgggcaaagattaaagcttgacttggaaggtcaaattgaccaagccaagtccaccatcatactgacgccactttgaagaagaaatttagccgttcggctatatgatgataaagacaacgctcttgggaggcaacccaagttagtttatttactttaattacttttgagacatttgcatttttatttgttggaattttaatcttttttctttagaatttttagacgtttatttttactttaaaccgtgcaaagcgtgaaaagtctaaaaaaagaatttttttcgtgccaagtctcagtagtcgcgactagcctattccatggttgcaaccctttttatggtcgctactgtggccacgactaggttggtttggcaaagagtagtgtttttgaccatgcacagtagtcgcgaaaaattttcatggtcgtgactatggttgcgactttgaagttgggcggaatggggggtttcgagcattgagctgtggtcacgactagaccattatgtggttgcgaccactcaacaaaaaaaaacccctaaagcctttaaacagcctatttcacccacttttccctctttaaacctatttttcaaatccacaacttcttcccacaacctcttagccgaaccgtctcccccattccctaaaaattttaatgtctttcatcgtatcactcaatcttccatctaaatctcttaaaagcttaattttcctcatcaatcttctatttcacacaaatcacacccaaatttattcattctcacctgaatccaaaaatacactattcatcttcatcatcaagcttttcaaggagattcaataatggaggtacattaagagcattatcaattagtaagttttatctctaataatgtatattgattgtttgattaagtgaatagttggtggcaagattaggtattgtttaatattgtgtgttgaatttgtgatttcttttgaaatttttgggattattctttgattattggtgaaattgctttgttttgtgaattggttaatattgggaagagaagaaattaggggaagtattgtcaaaaattcccaagaatctttggtgtgtgaaattgttatttgattgtgaatatgggacccaaaagaacaagggtgaatgaagaggggggttcgtcatccaacctgactcgatctgtttcgaggccaccatttgataagactcaatttgtgagcgaggaggtagaagataggtttctcactttgaaagataggccatacattgaagaccgggggattgatttgagattatcaagtgtcaaattgagagtatgagttagacaatttttgtggatgctaaagactgagccaatgtcactatggcttgtaaattcttggctaattggcgcgaaaggaagaatgaaatggtcaaggttcgcaataaggaaatcctagtcatgtttgttgctattggtaggctttactagttaccggatcattctagagatgaacaatggttgagagtgattgacgaggacgaggaggaactggactatgctgaaattgctaaaattatggagttcttggggttgagatttcatgaattggatgggtcgccaaacttgctttataggtgtgagaagtgagaagtgataaagatggggcaggagtctgggaggcaaagctaagagcggttgttgtaggtgttggtgctgaagggactccaaatgcttggatgtaggaatcctcaaggttaattatgccctgtcccttagacataaattcactcagcgtctcagctctctttctctacatatccccacacaataaggaacctacaacacatcccgactacagagccattagcttgagatcttcgctaaccttggtcttggcggctacctccatcattctttgaatgaaagctttcaaactttcattaggctgctgcttaatgctggttaaggatccaacttccatgtgcttctctcgtgtggcaataatttgtttacggaacgcagactgtaggtccttctagctatcaatcgttcccagagctagtcatttccaccagtcttctgcggacttagttaaagtcatggaaaagcataagcacttagcatcgtcactaactcgagcgacttgcatcatcttgttgtacttggctccatgtgtttgcagatcagttcttccctcatacaatttgatgtgaggcatcttgaagttttcagggagacgggtctccgcaatcctcttgacacaaggttttgggtcttcatccttagagtatgacaaggctccactttgctttttcaccaacttagtcagggcaacaatctgttcttccaatctcttggtatcactttttgggaggtcttgccccctcattttatcatgcaaatgatttcttaggtcaaccccacatggcctcgcatttttactcttatatctcttatacttcgcttccaactattgttgcaaatctgtcatggaccaactatccccagaatgactgatggtagtccgcccatcttgattgacggaattactagggggatccacttgtcttctaggcctagggacctttgttgctggtcttttcaatgcaaccctatcttgagggtcagaaggatgtccaggctcgaaagcatcggtggtcttctgcgccctcgagggttgcccgactggtggcacgccattttggtaagggttaggagcagttttttgcaagggttcgcctactttgcctttacccttgttcgtacgaggattttgggctcctgtgttagtctgcacatgagctcgcccttcaatcatctcttccacagacggttcccgatctgttccaatcaaaccattaaatttgattcaatgttgttccattgtctctttcatcttagcagtaagcctctgttactgttctagggtcgcttgtgttgccgccaactctttagttactcacaccagactagggttatgttcattgtacagaccatctttataatatccatctttatagtggtcgccatcatcatccttgtcataatcttctgtatcttggccatctccatgaccttctttgacattttcaacagttttttctaaattctcgacagtggtattcctctctgggttctcagtagcggctatgccttctctaccactttccacctgtgcatcagctgcacgagaggtaccttcctccatgaccatatctaacatagtgcctttgtcggtagccttttgcgtcttcaccatgatctaaggatgatgaacaccatcaaacttccttcagctctcaatgaaagtaccaaaatgtttaacgagtttttcgaaaaccaaatattttgagagtttaaagaagataaacgataataaacaataaacaaatagatttttacgtggttcaggcattaactatccttagtccacgagtctatattattggcctctatgggcaagtgctttaagattacaagttcttacattgtaggtttctcatctactttgtagcagaaggtttaatctggggattttagtagagtggcagtaggtgaaaaaattgtcctctttgccttcaaaacaatgaggctatttatcggcacacatggggtaaagggcataccctttacctacttagggttttgtcttccacacgctactaaggtatgtactacttaaggacgatctgaccatcacttagcaggaaccttcttcatcgtgtggtgtacagtagctagcaaggattttcgtacgaccttggacatgtttcgtgcaaaggtctctcttttacaaaatagtctctacgtaggccgttgagcaaaaatcatgctcgagggtgagtacgtgcactgccatgatctggcacaggggacaagatctgatcctgtgttagaaaaaggtataaccgtctatggagcgatattttgcaaggacctgacgagtccaacgtctccaaaacccctactaccttccgagatcctcattgaaggatgttgctcccaaaagccattacctctcgctaccttctagatccgggagttatttcttttagttaccctagatgccttatgtagggatcgtgttctcctcttcgatcgttccacgtgtctcattgatgaaaacttggataacacgtaacacaaaggcccaggtcaaagttgtgacaagatattccaacaccccaaatgacaccacaacgggatcaatgagccataaaagaccaaggctcagggtttcttcagcctccccacatctctggcgtaaagcatgaatatgtatttacgtttaagaagttgtgttttcgcttgtatagcacgataatacatatgccaaatgaatattttaaccttttgaggtacttccaaacaccataagtcattccaccactctctcaaatttgatgaaggaacaacctgttcatcactcactaaatcaagagccacattatacccacttttaaccgaataacaaccatgtgaatcatagtgccaacatcacaaatccaccaaagtcccaactgccaaaggaacacccataatagccttcacatccaaaggggagaagctttgttctagatttggtatactcaaagctctggtaccatcaaaaaaatcctttaccatcaactcttccctaggccaacacgtgataggacaaaacgatcttggtctaggaatccacaggtctcaaaagcttcaatccagctcccatcacccaccatcaaacgcatacccctcttcaataagccaagaccccaaattaaactagaccataaatgagaagacccattcctttcctaagcatcccagattgacgaattagggaaatatttacacttcaaaacacgccgcagcaacgaatcgagatttcacaaaagtctccaaatttgtttggctaccgttgcttgattaaacatctctaaatctttaaatcccaatcccctcttgatttgggttgacacaccaaatcccacttcacccaagcaaccttctttttaccattctctgttccccaccaaaattgcaacaagatcgatcatagtttatcgcacattgcactcaggcactgttacaaaaactgtagacaactatgtaagtgcacgtaatcaagtaatactcacacatatgaggttgaacctacggggaattgaactgaataccactaaaatagacttatttttctatttggtagacaataattttgataaaaataaaagtaaagaataacaagaaaataaaaaacaataaaagtatttaatcaaaggatgagaaattagagaaaccaatcttgttatctcaattatccaattgttaatgccaattactattcttctttctttacgtgaatgacaaattataaaattaacctaacacttttcagatcttttatgccctaaattttatattatctattgcatctctaagataaactggcatacaatccacaataaataataatctaaatgtcacaaaggttatgcaaatactctcttttcacatcaaaacaaaggtttattcgattttaccattctcaatactcacttttaagattttgtattgaggtcatgaatcatgcctaaggtgatcaatctcaaacatgtcattaagcacaaatatgaataaattcacaatcaagaaagaagaaatagaaattaacataaactcatggcataatttcaatcaacattcattaaatctctaaatagggagtttagttcataatttccataatcaaatctaaatcaaacttaaaacgaaaattgacataaggaaactaaaagagagaagaaagaactaatggagaaattgtttggatcgccacaatctgctctagtggtcatcttctttgtttttaggtctaagtttctgaataatcaactcaaaaattgctacatacccccttcaaaagaaccaggttttaacttaaaactctcgaatctacaaaacttcccacgacttcacactagaggcgtcaccgtgatcacgaaaggtctagtcacggtgaccgtttaaagctaaaaaaaatggtggttctagaaagtgcttcagcgcaatggcaaataaggctcgtcatggcgagaacaattagtcgtgactagggaaaagcttgctgcggcgagcttgcaattttagcttaaaattttcatctcgcttctcccgactttgtcctttcgaactttaatcaactttctctttaaacacctcaagaacatgaaacagagaaaaataagcataaaaccgtcctaaaagtagaaacaaagagcgaaaacaacactaaaaattgacctaaaacttaggctaaaactagcctaactaatgcccccaaactagatccttactcgccctcaagtaatattaaaaactaaaagcgaacaaacaaataaacaaagaaactaacagattaccaagcctccatataatcaaactaccgctgccacctatgaaacttcaatcaataagttaaaccagaattaaaacctaaaaactctaacaattaacttacatttcaatattcaaaaacatcacatgcattctacccttaccaacattccacaaaccaatgttcaatatgcttacacgacctacctctctccactaatgtcaacaatccttgctcggaatcaataggtcatcctgggttataatgtcatggcttaggtaaaaggtagattaaaagttatttaggctctataagcacattataacgaaacaagtacccacagaaatccacatttctaagtaattacccaaagaaaatttttaaagattgagaatttctaatttcgagtccaacatcactttttcactaattttttttaggaaggaataactatacaactttttttgatcctacgcctataaataccaccttgactttgtcatttgacaacacgagatttagtactcagatcagatgagattgagagtttgagggagagaagattgagaggtagagagagaggtgcaaagaaaagagagatttgttttgagttttgtaagaagaatcttctatagataaagaaaattcttggatgtaaagtgtgagagttgtaacactttgagatgactcaacggagaatctcatctcgacagttttgtacttattcttgctcaatcaataaagaaagattatggtgtattccaaaactagagtagaaccatagatcatatcgatttatcagacttgaaccagtatatattttggtattatttttttattctctacatttattgttttttgtttttatttattctatttgcccatgtgttcattcaattgttgtttttggtttaataatcttatcattgctaattgtttaattgttcaaaattttattaatttgattttacacatttagtcataattttcctacatttatgttagttaatttgtgtctctttgcttcagtcaaaggagctagaaagagatatatcgatgcttttaaattttattgcatgctaatgtgaaatttaagtaaaacttccaagcctaatttattacataaagagtatattaagtcaaaaagcaaaagttaggcatagctaattaaagaaacattagggaggtgcaatgtttggaacaagccgttatggctaggttaatggaatatataaatatatatatatatatatatatttatatatttatatatttcaaacgatcgagaaatcttctttttctttcctctccatatattttttagatttccaactataggtagttgtcttatggcccaaggaagagagattatagggatagctagtctgtaatatatatttatatatatatatatatatagtacgtatactaatactatttattaattattaggttccaggttctttaatgactcgtatgtcagttttttttttcttttacagtaatttctgcttgactactttagaatatataatggacattggtgttatatatataaatagtcatgatgctcatgatcatacatatgcatgcaccgaaggaaaccacaaattttatgtgtgtgagggaaatttaaaaaggagaaagaagaaaaaataatgcaagtaaaataaagaaaaatttcgttttgtcacattagattctttttctactattgcaaagaggaaaataaatgaaagattcttctgttcccatcacgaacaatttcttttaattactgaggaatcgaatattaattttttggaaagaaaaacaaagtagtactaccgaaattctctgcatatgcatgcgatcgaacatttgtgtttaatatataacaacgaaagtaattgataatgattacttgtatgttatatacctaaaacataaaatcaaattaaatatttacacaaggccttttgttgaaaaaggtgtggtaggatgtaaatgtttgtattatgatggactacaactctctcatctcaaaagatatattatatatataaatatatatataatattttttaataggtactatccattaatggttactaaataatttaactataaatattaatttttttcttgagaaactagtggtgtttttcattattccaataatatacttttacaacatattcaacaccctttttcataatcctgaaattagctatctataaatattaattttaaaaatattaaattattagattttgatctaatgacaaataataaaagataaatttaaatttttatgtttaatttaactatttaattaaaaaaatatcactttttaccgtatataaaaatatgcttatatataaaatacttaagtcaaatttaacttttttttgccgaaaatttctttttcttaattttttttagctgatggaacaaccccaactcatataatgtaaaaatgagtgaattttttaattagatagaaaaactaagcataaaaactcaaaatttcataacatatcaatgaataggtataatatccattaagagtgcacccatatgaatcaagatctccttttaaaaagtggtgtcccatactgtgttaaaccaattaaaatttgactttaacaggagatcttgattccacccagatatatataaataaatatattaatgagtgtaaaagaggaaataaaaaaaaataatatttattatagtgtaaaattacactaaataaatttaacttatgctatattttgtactgatacaatttttagatatctccaatggatggtttaaattttagattaaatttagctcaaaaaaatgagtcaatgttatatttagtccaaattttataattatcctcaaatacattaagggtaaattaactttattttttaaaaaaaaagtgtaaacaaatctgcaaatgcaataaattttaattgaaagtgtatacaaatctaattaaacatataaataaaatgtaagaagttattaaagatactaatggctgacaaagtaaataaaaaagtagtatttatgtggtgtaaaatttagtccaagttatattttgtgtcaaatttagcacaatttttaatatgtgtcaaatttagatcacattatacataattagagtttaattttatgaatatgggctaaaaaatacatgtacatcacatttattatatcagtctattagagatgctcttatgattattttcaatggatagtgtatagtttaggttaaatttgacttaaaatatactataaagttatatttggcataatttttgtatttgtgctccaatacagaaggtaaaaattagctataaaagtcaatattatcattaatgctcattaaaaatatacaaaataattaattttatttatattagtttaatatcttataaatatattttattgaaagacaatgaataatattaataagtgacaaagagataattagaaaatatagtattcattgtgagctaaaatttggcctatagtattttttgtatcaaattttacacaatttttagcttaggctaaaattttcacacacattttacatcaataatagagttaagttttagcaaaatttttttaaaaaatagcaatacattacatttataattttccatattagagatgctttaaggtgcctagcatcacactaatataataccctgtaattagttaacggtattttatatagtttattaaattaaaatatgtaaaacttaatattaaaaggcacacaaacaataatatatcacatcttatgatgcttaacaacttaaggtgcttcatagcatttctcaattataaaacacaatcaacgtacgtgcatgcatatttaattattatgggattttcgttcagctcacgtaattccaaaattaacatgcatatataaatacgtgattagttacaattcaaaaattaaatgcaatcttgtcataaatagcattacgatatgtttcttgttcaaatgtatctacctagctagaccttatttcttctttactttctttcttttctttctttcttttttgggttattgattaattaggttaatatagctaaccctagctagtgtgcttaataacacttgtaactaacgtcttcacatgcatatggtcgggtcctacaaactttccaccaatcaaatttcaataaattaattttcatataattttttttatttagtttatttttaggatagaaaaaaaaagttaatttaataaattttttaatataacaaattaagaaaatattaatgtttaccaattaataagcaaaattccattaataaacgataactagcaagtaatgttttttataaattatgtaatatatattacgtacctgctcaattttttatttttatacggggtagggatggccctggaggaacccacttttaatagggcaagaatttcccatctaaattggaagggcttgacgattatttttgtcacaggagggggacgaggatgacactccccgcctgatggagacccatttaatatattttttttatctttttaatagtattttatattttataatttatgtttttaatatattagtatttgtttataaatttttaagttatatttttggatgataataaatatatattgaataataaataataatgtgtaatattttaatt

SEQ ID NO: 219324 - DNA, 1837 bp, Cannabis indica
aatgaaattagacaaaaatccttaaaaataacaatctcaatagttcagtgagaatttttaaccgccaaaaaaatttaagtggcacgatttgatacattttgaaattggggaaaaaattctaattaaccaaaaataaataaagtaaataaggacagtacttttataacttgtcgtatttattataattgatactataattgagatttatgagtacccatatctatactagttttctatatcaataccaactcttctgcatggcattgatgattcattatcatgtacaattaacattcttagggtagccatataatataataatttaaatatatatggactttaatcaaataatcgtttatttttgcttttgataaaaatggttggagtatttaaatatacaataataatagaaggtggtggatgagccgaaaattcaaagaaatggttgaaacattattactaattagtgcttttaatatttggtgatgaatttatatcctactttttttttcctaggcaaataaaagaccaatatcattgattgaattagtaaaagatatataaatgtacagttttacttttatatatatacaagcaagaatttaataatccgtcactttttctaatgagtaattaatcattcatcatcaaaataagatctgtatacaaaacttctgtgtaaactaaataatatcatacgtattaattgggatgttgaaaagagtgttatctaaatccaattcgatttttgttagttatagtgcatcagattcgctattaaatttgaaagtagtattttggatttaatctccgtttaattctaatctaattcaatctgcaataagattagttattttaaatcaatatttttttaatataacgcgaaaaggaaaaggaacatttaattcagaaaagaaaaaaataaaattggaattaaaaattgcagagtggtatgtacagaggtatatatacaataggagagtcggtggactcaattagttagtgaactaactaacttaggaaagtaaagatgttgtaacaaccaatagactaaacggtttaattgacataacagttaaactaactaacaaactaaacaaagctaatacagagtgaaatacagagtgaatgagatcttgttataataataatttatttaatcatattaaaagcaatttttctaaagatacaccaaaattaaataaatattgaaataaaatttgtggtatagatcttccaaataaaaaattctccaatagctgttttggttatagaaagttagatgacatccagaagggcattcccggaagactaacttgtccatctagaaaaagtctcgtagaatgatagatgtcatccagaaagacgttcccaaatgtctatcatgtccactcagaaggagtctttaggaaaactagtcttcctccagaaaggagtttcagatggttagttgttctcttctggaagggagtcctgaatagtcgactctagttgacacctaaatttcccatccaagaagtcccttcaaggtttgctttagtctttcttccaagaagcgtatgttacttctcaaagctctttatcttatgctaacgtgaagatattgttacaaggagttcgttaagtcgtaactaacttaacgacttaacatttgcagccactaactttgggatccatatccctaatctataaataccacttacacttataattttaagatacaatgagatcagacgagtttcgagaggtgatcttgagagagaaagattgagaggtagagagagaggtattgagaaaagagagattgggttctgattttttatgaagaatcttctgt

SEQ ID NO: 219325 - DNA, 4255 bp, Cannabis indica
aaaaaatattatcaaacgatattaatttataaatatatggcattctctgttactacaccaaaatttatactgtttcaaaaaataaattgtaatgttcctaaacacacatcaatgtcctatggcatttcacttatcttaagagagtaaggacaaaattaaaagattcccttatacacttagatagaaataaggcatattacattgacattccctccaaagaagacaaagtcgtataaaaagaacaaaatcaaaagattcccttatacgaataaggcatactacattgatattccctccaaagctctactcaattcttatactccccaacatcaaacaaacaaactacaacatatccatcaacttttgtttgttttaagatcaaaatcttatactcaaacacaccatgacaaccactctcacagaaaattacaactctacaaccctattcttcactctatcaaccatcatcatagtcctaatttggtacataaaatctaagaagctcaaccagtactcaacaccattgccaccaggcccacgaggcttaccaatagtgggcagccttctaagccttgaaccagaactccactcctacttcaaaagccttgcacacacctatggtccaatcctaaagctccgcttaggcagcaagctcaagatcatcatcacctcacctaccttagcccgccaagtgctcaaagaaaatgacaccattttcgccaaccgggacgtgcctagtgtaacccgaaactcggcctatggcgtgagcgacattgtgtggacaccatacggcccggaatggcggatgttgagaaaagtttgtgtcttgaagatgctaagcaatgcctcattggactctgtttactcccttcgccgccgcgtggttcgacaaggcgtgagtcagctgtcaatcgggttgatcaatcgcctgttgatgtgggggagcatgttttcttttgcatactgaacttgatcatgaacatgctttggggaggtacggttgatgttgaggaaggggccagtgtgggagccgagtttaggaagattgtctctggaattactgagcttctttctaaacccaatgtgtctgacttctttccgggtctatcctggtttgacttacaagggatgtctaagaagaatcttcagttaacccaaagttttgataggatttttgatagaatgattagtacaaggatggagattgagaaaagtggtgggaatggaaataatgatttcgtgcagtttttgttgagactgaaagatgaagaagattccaaaacacccttgactttaacacatgtcaaatctttgctcttggtaaccttatattatatgcttttctttcactatattttgcacattttgtaaatgtgattgtgaatcatatttgataagtttttctacattactgaacaggatatggtagttgggggaactgatacatcatccaacgcaattgaatttgccatggcagagatcatcaatgcaccagaggtaatgaagaaggtccagaaagagttagatgccgtaattggaaaagacaacatagttgaggaatcccatatttctaaattaccatacttacaagctgtaatgaaagaaacactacgcttgcacccaactttgccacttttagtgccacattccccaagtgaaacatgcgttgtaggagggtactctgttcccaaagggtgtggtgttattgtcaatgtatgggctattcatagagacccttctaactgggaagatccattgaagtttgagccagagagattcttacaggacagtcctaagtgggacttcactggtagtgacttaaagtatttcccatttgggtctggtagaagaaattgtgcaggcatagctatggcagagaggatggttatgtattccttggctacccttttgcattcttttgattggaaaatccttcatggccaaaaattggatctttcggagagatttggtattgtcatgaagatgaagacacctctcgttgctattcctactccacgattatctgatccatccctttatgagtagacctgtgtatactttaaattatgttttgtattttaagttttaaaagttatatataagctaacttggttgtaaaacaaagcaatggttgttgaatctctgattaagcctgcccactatattatgaattaagaagcaaaaagttagctgattcaatttttgttcattttttcttccaaaacagttttcaatattggcaattggaaccaaaaatgctgccctttctgtcaaaaccagtgtgaaacaatattgcactgacagctatttaagtttgtaccaaaggaagaacaaaaaaaaaaaaaagttttgtaacaaagtaaagagtgtaatcagggttattgtttcttttttttttttatttttgaaaccaagtattgctcatttgttattacaacatcaagtataccaaaaaaaatgatacttggagctgatctttactaaacagtacatacacatccaaaagtaagggcatcattcagatgattgttcactgcgttagttccttttcgtatttatttcaattttattatttatttttaaacttcacttcccaaattctgttcctttaaagttgaatttgatgttttgaattcacaatttcatatcagtattacaaatacaaaggaaaattatgatgttaacagatccaaataacaacacggagtttaattgaaattatcttgttttaaagaatactgcaaaatgtaaaaaacaaaataaaagataaaaacacacttgtttttaaaatatgaatagccctcattagataaatactagtgtgattaaatctataaataataataataataataataatctccaaagatgcacaaaatatttcctcattaaattacttaaaacaagaggcattcactctacaaatcttacggcattctaagagtttcaacatctagcttttcattaataacttaactctctaacaatcttatcattctattcattttcttttggcataccctttactccagcaaagaaaaaaaataaagtgatgaacaaaaatgagccaatcaggcaaagactttattgctccatatgtgtgaacttttcactgtgatacccacttcagcatatcaaaatacaaacttttcctcctcggctccaacagcaagaagtctatcacccatctctccaagggcggctgccgttgagtcacttataccgagaagatactgcaaacgggagagcttttcaggtgcttgttcactattcaggtatatggaataaagatcggcaagctcctctggcacctcccacgaaaggggttccgaaggtactgccttgtcacaagccagcaaatcattgagagatgaaacctgcaatagcaaaaaaaagaaagaaaataacagcttcaaacatcaactcttatccatttaaatctactggaaaattcacatgtaaaagtataagccctgtaacaatcaaaagaagaataaatgaaagttgtatgcgttatgaagtcataccactccttgacgatttctctgtctcagtaatgaaacagcctggatcaatgaatttgataacctgctttgggcaagctcttgaacaacaccccttgccttctcagcattaatgttaagatcaagtgggattttctgatatacttcttcttcatcgaactctcctgttcctgatgagaaaatctcatctacagtctttttgaaaaggttctctctcaagctctcagatatcatgttgtccaaatcaacactcgcttccttaagttctctaatctgcttaatgttcagccttccctgaccgatggctgtctcaatagcagctgccattttcgtagttgttatgttcttaattatcttttgtgcgtattgagaaggcaaaccaacttgtttctccaacgcagtaagctgttccactctggcctttgtcaattgtccatcagctaaaatcacctctgcttgttgcctgaaagcttgctcagccaagcttctatgtacttccactatttctttagcatccaaacccaaaataccaccaagctgatttaagaaaacatattctgaatcatccttttttgtagtgatctgagcaccaaatggaattctagtcacttccccagttagacagaaaagcaagtacgtcttgtataggtcagtcctatctctttctggcagatcatccctaagagttatctcagtctgcccaggcttccccatctttgcagcaagatcct

SEQ ID NO: 219326 - DNA, 5341 bp, Cannabis indica
ttttcagacatatgaagtcttcttagtcttttgagatcacctatatctgcaggaattttcccactaaaattatttttctcaataactagctcagtcaagttaacaaggctgccaatcccttttgggatgttaccactcaatttattgctccctaatctcaatgtaacaagtgatgggattttgtatatagaactaggaaatatccctccaaattgattgtcacttagatcaactactcccaactttttacatttagctaaagactcaaagaaattcaagtcatcagcttcacctgtcccaagagaattagaggccagaactagccaccaaagattaggtgagttcccaaaatcaatgttaacttttccagtgaatttactcccttcagtatctaattcaacaagatttgaagcattagacaatgatgatggaagttgtccactaaacaagttgtgaccaacattaaagactatcaaattaggaagagtgaagcctaagtctgaaggcaaattcccttctaattggttataaggcacagtaaaccttgtcatggatgaaagattgtaaacagaggaaggtatcataccggatattcggttaaccccaagtccaagaaattccaagttctttaacctcccaaaagattctggtatttttccatcaaaattgttgacagcaagtgacaaagattttgtagaagaaaggttacctaatgagtcaggtaatggtccactaagattgttgtagtgaagttgaactctttcaagtagttgaaatgatccaagttcaattgggattcttccacttaagttgttgaatcccaatctaagccttaggagcttagaacagcctgaaagattagctgggattgcaccagaaaatgagttgttggaaaggtccaaatgtttgagcctgaataagagtccaagctgttgtgggatttgattctgaaaatggttgaaagtaagatcaattgttgaaaggaatgtgagatttcctatggagggagagagtgaaccaactaagtcatgagaactgaggtttaaagtggtcactctatgatgaaggtggccacaaatgacaccaatccaattgcagaaatggattgaatcattccatgatttcataacaccataagggtcatctattatttgagcttttatggctagtaaggcttgtctatcagtctcatttccattggagtaagttttggtggttgcaaaggaagagaatgatgatggtgaatacaatagtatggtgagaagaaaggtagtgaaaagaaatgagttatggtgagaattgaaaggagccatggctgaatattgattggttgtaagagagatcaagtataaataagtaacaattatataactatataatgcaaatatttattttataacatgatattgttgcatgtaaattaccttgatatttttttagtttaggtctcatttactcgattatattgcaagtaaataaaaagttattaccatttttaaaatgataataataggattattattattggtcacacaaaaaattaatcacaaattatcaattttataatcaagcaataatttatgataagacctagtgtaaatttaaaatttaaagtttgtaagagatataataatttttttaacggcataagtattaatattaataaaattataatttttgcctaatttattttattagtgtcttaaacaaaatagcgtataaagtctatattttaaattattgagtggacataaatatgtaaaatcaattgttttaaaattttcttttttaaaattgaacaaaaattataattttaataatattaaatatttatgttgctaaaaaaaaaaattataccgttacaactcgaaagttagtatttatgttaaaattaattctaaaacttatataataatttgtggatattgataaataattaacttaaacatattgactagctacttattcttaagtacaatcgtaatcaaagttggtcaaatgaatggatctaaaaaagataaaataaaatcaaagtacttacaatgataaagatatttatgtactactagctaacattctgatccttcccgatttagtaaggcttgaattcaaatctttactttgagtttagatttttctcttttattaatcacttagacattaattaataataagaacaagactatggtagaccaagactttgtggaaagatgaaaatcatgttatgatattaatttatatatatatttaggtccgctctatttgactataaatgggaaaaaatgatttccatattagctcaattattattgggttgtttcttttttaagaagttttgactttgacttgtttatatatatacttttgataatagccataaactcatgcatcgtgtaatttcagagaaaagaaatacgaaaatgtagctttgatgataaattgtgtggggtttagattagaagaagactacaatctctcgaagttgctagtagttagagtgtcatcatttcatttctgaaatataattcaaagttcaatattttgatatgaatatttttggagtcacttgtattatattggagagatgatcatatctttacttcaatggtgataaacttaatactaattaatgcatgtgtatgcctatatctctatgtttagtggtgaaagtagtgtgtgaatttgtattatttaggggtgtttgtttataaaatagttaatttaatttaatttaatccataaagtttggattgaattgtattgaaaattttaaaatttgtactgtggactaaatgttaagtgacatttaaaagtaatcaatttcattcaatccacacatatatatttatataaatttttgaagagtaatatatagaattaataatttaatgtaaaaatagtaacttgaaaatgaacaattactaatttcgcctcttgaacttttgacactattgattttgtcatatacggtttgctaaaaattctacctaacttttacatttactgagatttagtcattctgttaggttctatctaattattcagtataaatgatggcatgtctttgtaaattaataattttaccccctaaactttgttaactattaaatattaccccctcggtccctctaaataaaaatgagaaagatttaatatttttttttattaaatcttgaaaaattgatttagatcttaaaacaaaaatcattttgaataatcaagaaaattaaaaagaaaccaaaattttaaaacaaattaatataaaatgaattatttattattaaaaaatctgtttagatataaaaaaaagtatatttttgtaaaaattaaacttttatgggaactaatttgagtttatttttttactccaaaaatctagatttctttaaataaacataatattttttttttcaatttaatttctacttttttaaaaaataattttatattttgttggatttccaattattttctttaattcttaggatatgaatttgtaacacaaataagtttggtttttatcttcacaaaatattaatttgtttaaattatttattacattttttaataattttagtttgatttttaagatatgtgttaataaataaaataaagtttgaaaaatattcttttaagagtaatttaatttttttattttgaagtaaaatatttttatcaattttttaaatatatttttttaattttttcaaaattaatagaaaattataatttttgaaattaacttttttttgataaaaggggcaaaatttattgttggtcaaaattcaaagggtaaaaatatcaatttttaacgcttaaagtaacaacaaaaaggacatggtcatgtaactgttatattttaaggagaattttcaataaatcgtatattttaggggcaagaacatgtagtgttaaaatttcagggtttaaacatactaattattctttaaaaatctaatacatataataaaaatatatttcaaaacttaataaaatcaaatttatatatatattctattcttatatatgatttatttttgttttgtacatacaatttaaattaaaattaaaacctttgtttatatacaatttttttttcctttgaattttattatttttttaataatattaactaattaatattaaaaataaccaatccagaataatcgatccaatctgtatttttgtaaattggatatttgaattattctgcaaattgaatcggatactaaaatatgaaatctgcacttagtataaatcgaatgtattgtgatcaaaataatactagttagattggacaaatattagcatattaaggaagctagcttattttggttagaaaagatgtcttatcagtatgatatgtggtattattatattggtactgctgataccctttaaccatattttttttaattaaaaacaacataattgattattgaggaaatactatttaagagcttgtattttgtaaaagttattaattggaccctctattttgttaaataacaaaattgaccctatattttctaaaatagtaaaaataagacctgagctcaattttcaataatttatttttttaatataaccaacaatttctaacatgaacagatacagaaaatgtaactagttttgtcataacatttctagatcagattatttattgaattttattttgacaaaaaatcagttcatgaccctagttgtacaattttaaaaaatacaaggtccattatgtcatttaataaacagaaagtctaaatagtaacttttacaaaacgcatggtccaaaatagtatttactcttaattattcgtcatatctttataaataaggagattagttcataattctcttataatatttagaaaaaaattgtgtttatgatgacaaggcgtaattttatatatttaaattaaaattaatattagtgtgattactatttaataacatcaatattgttgttgtgtataagaggaagaattgtgtgaaagaatattttggtttcttaatgaaacaaaacagctttggatgactttggggaagttcattatatgttaagaaatcaaagaaaccttcaaaacaaatttcagtggacaattgacatgcttatcattatcatctgttagatctataataatatgcgttttgaagaaaaaaaaaatgcaacttctgttttctttttcttttttcaattttttttatcacttattttctaatcatataccctttataaaatttaaattaactaataccaattttaatttggtataaaattatctttttatataaaaaaattaaaaaataatatttttttggaaaattttacaatacacccctt

SEQ ID NO: 219327 - DNA, 3014 bp, Cannabis indica
ataatttccaacaatattttcttaataaatgaccaaataatttttttttgtaaggcttacctaatctcagggctggccttggtcaagattgggaagtttggggttagttcaccatctgtgaccatttgggtaagttgattgaaagtttatctctctataaaattggttatgcccttctggagttggttgaagctcttggtgttaaagtggttctcgagttgattgcttagtggtggtgcagtgcagtgatatgttttgcagagtattgtcctcttagggttcgtttagaatattgtgttgaattatattctattgtattgtgtggagttatattatattaaatggtattgagtataattaataggatatgcaaagttatatagctttttaccatacacccgatcttggccctaaccccgacctcgaaacctggacccccgcctcgaaccccaaactcggcctcgaaccaaatcctaaagtcgacctcgacctcagaccccggactcggccccggcctggaccccgatctcggcctcggcctttgtcccagccttgaatcccaaactcggaccctgccaagaaccgaacacagaccgaaacttggacacgaacccagacctccaaagtcaaccctagacccctgacctcaaacctagacccggacaccaagcccttgacccaaacacagaccctagtcggacctcggacccagacacggatccagacttggacccaaagtccagacctagactcagaccctaaaccccgacctctgaccatttccatttctaaatattataatataaactaaagcggacaattttttattaaataatatgatttgtattgtaataaaatttatagtcgtattaattaacacaatactaattttaatacaacttatataatactgttaagcaaaaatttcacaattagagtattaaaaattaatgcaaaacataatttcacctatgccgaatttacagtataagagtttcttaattttagttcgatccatccaagattataagaataatcatttaattacaatcctcttttcaaaggaaacagccttttattccaattacgatgatattaaataattgaggtaatttgagaaaaatttggggtgaatttagaattgtagctgaactcaatcaatttaattaactgagctgcctacataccttctttgtgaaggatcaagccatttgtagttcagttgacggtacttgagaatttagatataaggattccggtagatgatcattttcaggaatcctttgctatttaaaaatttagaaaaattcctaggtggatgaccttttatagaattttaagatttgtatttttataccattttgcggtatcggcaactgcacttagtcttagcaactaagttgcctacgtatccttttataggaatcaagtcaaacgtagttcccaaaaaaaaaaactttttgtgaaaactgaattcacttgtaatttttgttgaggtgaatgacctcctttaggaatgtcatttaatttattatggctttgaattttagtgcacttttaaattttgttaggtaaaattgtcattttaagatttttgtgaggttaaagacctctttggaattttgaaataatatttcatcatttcaatttattttaatgagctcatttggaattttgtgtcattttatatgactttagaattttactacttgttgtgataatattgaactttgaaatctttttattatttttttataaataaaaagattatttggctgacattttaattatttattccaaaatttaaaaataataatttatcttttattagatactatcttgaattccattttaagtaagtcaataaaaatttaagataatatcaaaaatatttattttataattcaaattcatattcttgtttgaattatatatacaagatacaacatataatataagaccatttaactttgatccttgaaagtcatatgtatatttaacaattaatcccaatcagagtgctcccttttttgtgaacaggtaaggcttccttttttattttactcactgaaaagaagattaatttgactcttccttacagtatatgcatatgagtgagaccctcttgaaatttgattcacaattttaaagtgtaagccacctattttctcacctcttcaccactcatgtgagcaatgtgtctatacatcacacacaatttaatgtcattattgaacatattatatatatatttgacaattgaatacatatataaaccatgctcattcttcaaacaaaggcacatgattggacacgcataaatctgacttcttgacttcgtttctttcatcagattaattcattcatttttttttaatcatgagcatatctatatatttataattttacatctgaatttagcagagaggttcatgcggttgaatagatcaatcaactgaaatttgcattttacccttttgtagtgactgatcgattttccttaatggtaaagtaaagcttgtcttaaggcctgtcatcgaatcttcgatcggtgtcaaatctttttgccctactcctcatcgacttttagggatatacttgaaggttcatttttggttagataccttcaagttctcctctttgggctgaggagatttcacaggggatagttccttaatttgcagagagttttgtgcggttgagctttcatgacgtttactctcctcaggtttccctttcagaatggtaacattagctggcttgtaaaattttccatcagcataattcacttgttccctgtaaaaggaatttgggtctgcaatgacacttttgactttgccttccttgcaaaacttaaagcattagtgaagtgttgaaggaatgactccatatccatgaagccatggtcgccctaacaacacattgtaggatgtatctaaatcgatgacataaaataaggcttcagatttaattcgcctatttgaatttttagtgtcatacttctccttactttt

SEQ ID NO: 219328 - DNA, 7557 bp, Cannabis indica
ttttttaaaatacattaccaaaactttactttttaaaaaatatattttattattttatggattatacttcaagaaatcaaaataacaaaaataaataaatgtttttcattccacttaaaattcctacttgagtttatttgacaatttttttattggaaaaattgaactaagtttttaagtattaatgaaatatataatttttattagaaaaaatacaaattttgtaagaataaaaataaaaatacaagttttaaaaggatataaataaaaatatgtaaggacacagataaaaaaaaaaagaatctatttttatgaggtcaaattgtacaatacctaaaaatttttatataaaatttatatgaacaaaaagttaagggaaataaatgatcgcacatatgatatgaccctctgctattggagaattggactagattgaatttgaggttttgtgtagattagattggatctaaaatatgaaatatgcacttagtgcagattgaattgaatgaacaaccttagtactaatgtactattagagaaatgttaaaatacattagtgatgtttagcactttctaaaacatcacatcactattggtaaaattaaatatgaaattctatataattaaatataatagtttttataaatattactaactaattgtaaaatatcttgagttaggaatctaataatattatgtagacataattaatgaggtaagaattgagagctatgtactatatttaatatgccatgacgtatttgatgagcatataccataaaataaaatactctttatctttttaggggacatgtaattaaaataatactaattaagttggtcaacaaacaaagattataatatgttgaagatctttgaagttatggagttccacttcatattaaaaacaatattctatggttggaccaaacaactttgtattatattgggattaatttggtaattttaaatattaattttacttatgcacaaaatgaagggggctataacaatataagccatgacgtatttgatgagccataatatccactaaagaacacaaaatattaatggtcccattattattttgtggaacattttaatcaaatagtatattaataaggcttatgttattttgaattttatattttgtaaaaattattaattagaattattattttgttacatgataaaataaatttaatatttttttaaaatactacaaataagaccttagctcaatttgtagaaaaacgtaatgagttttgtcataatacatctgtatatggttattattaagtttaattttacaaaaaaaataattcagtatactatttaatactattttagtaaatacagagtccaatttatcatttaacaaaacagaaagttcaatctaattaataacttttacaaaatataaagatcaaaattgtatttgctatataaataaagtgtttaatgtatatttgtaacaacattatctactcggaaaacataactgaaaacattgaatgaagtaatgaaccaaagaagactttccattattgtatttttctttgaataaatgtacatgaaatttgactctttggactataaaaccttgcatttacatatcaatcaagtcacaccatcttccaaatttcacaaacttgctcaattattcttattacaaatcttgagtcttggaaaaaaaatgggagaaagaagagtaattggttgggctgcaagagacacaactgggcttctgtcttcctattcattcaatctcaggtgatttttgtcttcataggttaaattggatattaaacctaaaaaataattaatgtttttttcccaaatgaataggaaaacaggtccagaagatgtagtgataaaggtattgtactgtggaattgatcatacagatcttcatcaaatgaggaatgagattcattcaactaattaccctttggtaccagggtaagaactcaccatttttatactacaaaaaatccactatattaccatctcactatgaaaattaacttgaatagtaaaattgcttgttctttgtatttgtagtcatgaagtagtgggagaagttgaagagttgggttcagaagtgaaaaaattcagagttggggacaaagtgggagtaggctgcataattgggtcttgtgggaaatgctcttcctgcaaatcaaacaatgaacactactgcgccgatagaattttcaccactggcggcacctacccagatggagctcccacccatggaggtttctcctctaccatggtggttcaccaagcgtaagcaaaatctcaaacaaatcatgtttcttgttaggtatttatcgagactaagagcatatctatgtgtactgttctcgcaggtttgttgtacggatgccaaacaaactagcaccggaacaggcggctccactattgtgtggcggggtaacagcttacagtcctttgaaacaattcactaaagggtattcaaatgaggatgtgttgagagttggaatattagggttgggaggagttgggcatttgggggttatcatagccaaggcaatgggacaccatgtgacagtgataagctcttctagtaagaaaaaggaggaggctttagagcatttgggggctgattcttacctggttagctccgactcaacagagatggaggcagcagccggtagtctagactacattctagacactgttccggcacatcacaacataaaagcctacctttcgttgttaaaggttgaaggaaggctagtgatagttggggcatctcctcagccacttcagtttatagccagtgacttgattctaggtatgtctatctatcttgctttcacacatctttgacaacaattctagcattgaaaatcggttaaaagtttaatcttcttgtctatataaaatgaagggaagaaaactattggaggaagcttcatcggaagcatagaagagactgaggagctattagagttttgggcagagaaaggtttgaagacaatgattgaggtggtgaagacagattatgtgaacaaggctttcgagaggatggaaagaaacgatgttagatataggtttgttctagatgtggccggaagcaacctccattgatgacactacaacatgtcctttcaaaatctcccaaatcgccaaccaaaagtgcacgaatctctttagtagagtttgtgcacctcttgtaggcgattttgaccatcaatattttggttttgtcaaaaataaaagcattaaattctcaagtacaataataaaggatcaagatttggctaaatgcctaccctaactaacctaacctaacatttatacatgggtactttgaattattataaacatcaagcttaacacaaatagagtgaaatttaactgattagcttactagagtaaaatactaagttgtcattcttacagattcaactattcaagtcatgaattatacatacaataatatttccaaatgttatgcagcatataacagtgagttacttcatcattgtgattatgagtaacttaatgagtgaatctcttttggaaacaaaagaatgaactaatgctactagtacaacaattggaaggtatatctacctggatttcgagttccaaaaaaagaaaagacaaaaaagagtaagatggtcatcaaacttgtcaccggggactagtttcagattagtttcagtcgtctttccccttgccctttccttcaacccctttaatgctatcataggttgaaaggaagaatgtactctggtttttctgcaaaaacctgcacgaagaagatcaagatgaacattctggaataacgaaatcaattggaaattagaacgagtatgaaacttgaaaagtgtacgtacttaagaaaatcagtcagtttctgttgcaagcgtgtcagtgtttcctcctctatgcttacatacgccaataactcaggcaacttaactgcaacaccagaaatcttcataatcagattaaaattctaaatgtgaagtacacaaatcaaagacatagtttactttcgggaaacccatagtaacttgaataatctcagtagtattgcatgcaggacatattttgaatccatttgaagcataccaaagagtcttagcaaatgttcggcgccatatatgtttgatggagacatatcatctaggacaacatcctgaaattgcttgcgctctttcttatataagagcataactggaagtgctttatcaaagtaacatcttattcctttcaagatttctgctaaggaatcagacgtcctgtattcaagagaaacagagtacttgaatcgttagtattgcagggtgaaactccaaactacatcccaggatccaattataccgaaattatgattcacatttaagaaagtgtgaaaatttgagagattagtagagataggagaaaacaatttattattaacaataatgattgggcaattagtactagaaaagatacttatagagaatctaaatggaaaactgaataatggaatcaacaagtaaaattaatgggaatgtgcacaaatagcacaagagcaaaaacataattataatgcagccctacaaagtatacttacgtgttttccttctttgaacgataatcaaggtacttcgatagaatttcatcaaccgttggcgaacgaggaagtttgacaagctacagaacagtaaaatgcgtaaatgaaatgtgaaagtgaaagagcatgaagagagaaaaagaagatcagaactttgatagaaccaactacagaactggctaaataattaaacaaataatcagcaaagtaattgaaactgcaagtcctacttatctcaggtcatgtaatattagtcgagtaaacattcataattactagttagacttgacactaagaagtgtcctggcataaccagctccaattagaatgaatttgcagaattcaaggcaaaaagttatagactgatttagatagctcaccaataacaactcacttaatatgattatgagttattgacaccatagtgggtaagataatttcaaatattaatgaaaagacaatatgagagaagtggttcaacaacttgaaacatactttatcctgctgattaacaaagtcccaatcatctacaagctgttttctgagtgttgatggaatttgaatctttacagacttctccgaagaagcaccctccttctaacaaccatcaaaccacacttagttgtgttaaaaaaaagctagatcaaaacatttagaaatagctaaaacaatagcttaagtttacaggtaagacaatctgtttattatcttgaatatgttttctttcttttttcagctctccgatgatgtaattgtacatgacaaactaccattgtatacaaagaaaagtctagacaagacaaccaataaaataaaaagaactaaattctaaatctaaatcaaaatacaagccggacctcagcaactgattcagtcttccgtttctttgttttcaccactgcaaaaatattaacattaaaaaaggaacctctttagtatcaactttatatgtttgtaacacaaataaaaagattggattcttgaggataaatttaatataccaaaaaaaaacagtaaatgagatgaaacttctgtgataatacataccattggtcttagtgtcctctttctcagccttaacatctaacacagaaaaagaaaaaaaattataacacaactagcacataaggaatgaaacaaggagactaagaaagttgcaacaatagctgcaaaacatagaatgaactcctacaattaacttttaaaagaaataaataaaaatttcactttggtagaaaaataaagatgtaattgaagaaaacatttcaaaaagtgttacctctagctacttttagaataatgaataatatcatattaatagacaaaaaaacaaattaccagcagaacttttaggtctcgtatgtgcagaacgtcccgattttacattcttgtccacaccctgctttttgtcaagctcttgctgcttcaacacattctcttcagtaagtttcatcaatcgatcagcccctacccattcgtcccaactgttggcaagatgtccaagccatagtaatgatttctgtatccctttccgaaagggtataattatcaaaatgaaagcaaatatttccatcgaacttttaagcgtctaggtaccccctgctctctaatatcataagttggtagctctagctttctatgacaaggttggtaatatgataaagagaactgttttccagctatagatatatgatggatgaatcaattgcctgagtttaatcacatttacaatctccattgttatctaatctacccaccattgtctacctcctctcccatctaaaattataattccatcgttcatgagcaaaatatacaccaagttcttactaaagagtaactaaaattaaaatcccattaactccttgtagagatagagaaaatataactaagatatccaatgtgtatccatccatatcattcaactatgaatctgagtcctgaactttaaaactaaaaacatttgataacaaagatgacaaacttaccttttattccaaccctgcaaaatagcaaaaccatacccaccattaatatcaaaatcaaaacccctttagcaaaattcatttactttcagaaagaaaaagaaaaggctttacaagatagtgaacgaagaatttccattcttttttcatgagctcagccttttgaacctgtaacaaagttacaaaacctaatcattgcttaaaacatataattatatcaaaatcaacccctaacatgatgaatttcacttgaaaaattttaaaaaaacaaacttttcaaaagaaaaacagaaaccctaagtacaaaacctaaatcaaatcccgagaaataataagtcaaattcaaaagtacccctaattaacttcaacatagaaaaaagcgaaccaaaagaaaatgaactccactgataataatactaaaccaacagaagaatcaaaagttagtgaattaagaaaagaagagagaagtggggtttgttgccttagcttcgtagatgcgaggaccatggtaagcgaggaccttctcaccctcggtgtaaaggctggtttttgagggtggagcgtcgccgctggaggcgtcaccgtcggtgagggagtcgtctttggatgagtttcccataacagttaggattgagttggaacgattctcctgctctgatttctgactcggctcaactcagtctctcagttcagttcgactcgactcgtttcccggtggttttttcctttatctcaaatcaaacaactcttcaaattttagtttcgttttgggccttagcaatttctttagttgggccttagctacttctttagttgggcctcagtttcctacttgggccttgatggtgtattggggaatttgaggaaattacactctatacccttttcatattgtcctctttcatttttaccctcttttttaaagtctatcatttttacctcttttttttaaatattgtaccaattttgccc

SEQ ID NO: 219329 - DNA, 2889 bp, Cannabis indica
taaaataatttccaacagatggagaatccctatctttgtgcgcaatttgaacttgtaacaacttactgtttaggcgtgctataatgatttcttaattactgtgctcacctttgctaattaaagagtttctcaaaaaatgtgtcaaatttcaacttttatttaaactttaaacttttataactatatacttatatttatacacaaagtcgagatcctattttcaaaacatttgttcgaatacaaaatacactttacaaatatgtcgtacaacaactacgaaataaagtccaagtcgtcccgagaccaaactttccaagtcgtaccatcttcacatgcacaatcatccccgagctcaggactcactgttggtcagccctagcctttcctttacctacacatgtaaacaatatctgtgagtcaacatactcagtaagaaaagcatacaacacataatatattgctgatatgtgtttaggcacccgtacacctatccactaggtttaacatatgattaagaacattcttaacagaagtacgacctctataccacatgcactaagtaccgctactgtactagtgttggtatagctgaaccgtaccccgaggactactaagtgttgtaccacatgcacaacgtacttaaccatactagtgttggtaacaccagattatacctttaaacatcatatgttgtaccaatgcactcagtaccactaccgtactagtgttgatagcatatgaatcacataaactgcatgtatataatacatatacacatacatatatattatatgataatcttactttgtttccgaattcaagcgtgctagtcgacctgaatagaaaattacgtgttgaatggaggccctatatcattacgtaaaacgggtaaacaactttctaagaccttttcggggacctaaactcaaaattagaagtttctctatcgataaatagcatggtaacgccctgaatattgaggaaacacaagaaaaatgactatatgggaaaactgcctaaaaattagcaagccgttttttttttttgggttctctgccagtaaaaatggtaaaccatttccatagaatttacttgttgtttttaatgcagaaaaacaataaagcctccaattaactcaaaatgattccaaatcttccaaaactctctaaaatacctattagaggtccaataaacaaatcccaatcaataaaactagattaaacacaaaattccacaatccaccattattgagtcaagttttcttcaactcaaacttactcaactgtacaataaccaacaaaacaaccttaaataagctttaaacaacttcaagaaactacagaaatcaacccaactaaacctaggtttagacataacctatacttcaactttgcatgctcaaaattaaggaaaaattattaaagcttaagaaaagaaagttctaaggcttttcttttgattcaagcttctaattctccttaattctctactgaaaactacaaaaaatagctgagcaaagtggcttggttctcttgattcttctagggtcgattatggtggagagagagagaaagataagtctaggtttttttttttctatcttaatgtttaattaatatcaataacccttaattctaaaatggtttagataatattaaacacaattccactaaaatcactaaggacaaaagtgaatttcctaggcaaaatttcaattttttcctttacttttaagcttaggtcatctttaggtttagggataaaatggtctaaaaccataactgataactctatggtatagagttatttttatgctgttaaactgaaattattgtgagaagagtagtgaaaatgtgtttgtttgcttaattttagctagtattagtttcatttctatttagtgatctaacttttaagtcttgtaaaaattgatattgttaggtgtgctttttctaattaaatgtgtttgtttgttgttgaaaatgaagaattaaattggtaggaaaaagaaaaggaagcaaggatgaagtgggaacaaaagctgaaattggggcaaattgctgaagcaatgctgaaacaaattcagcattctggccgtgacgtgaaaacacgagatttagctatccacgtcagtaggagcatgtttgttacttaaaatcagaccagctgaatgatgtgtaggaggagggctaaacctagtgggccaatgtgcaaaaggattgggcttctatttttagggtgtgaattttgtaccctaagaacccaacaacaaaaagaagagaaaagctaagtacacaaccatcttaaatctaacgtgagcagttgcatttttttggaaggagaagtaaatacagaaggaaagtacaacagaggagaaagaaaggggggccaagctttagtgtttgattttttcttttaccctctcttaatatttttctttctctttctctttctattttcttgttatttgtacgtagttattaaaaattttgttgaactgtaaaaccgggcagcagccatggaagatagcttttagcttggattttagtttttaatttgaatatgagctagacttttgaggcttaaatgactataaacttctatgttgggtacatgggcggagccacatgcagcccaataggggctgtggcccccccacaattttgaaaatttattgtagagttcttatatataatatcatgtaacactttactatatattaaataaaatttctacaattataataaaataataatattataattgtatataaacttactatacttatttatattaataaattctttaattaatattaatgaaattaaaatattacactattcttaatttaatatgacttttttttaaaaaattataagcataaattaa

SEQ ID NO: 219330 - DNA, 3211 bp, Cannabis indica
aaaaattactgatatacagatcaccatacaaagcaaaggcataataagcaaggagcagtacaagcattcgtcaaaatgcaaagcaaatgaatgagatgtacatcctccatcaaatcatctgatcatcagctttggtacagctcaaaggttaaagaacacatctttttaagaaatgaatacatacccaaaaaatcaaatgaaaatagtaacatacataaagtactcgagtgatttacatgcattcataaatttgtgcacagaaaatacaaagaatagaaaaacacaaatgcacagtttcttcgtacataagtttaacagaacagaccattaaatattgcataagcataaaacttcaaacattgacatactgaaagccaaacggatatgtatatcattgtagtacaagtatgcaaagagtatgtaaaggctataataagtcaatcaacaatgatacttgcactcttaatacttgaaaactgcatgtggtcctctttttagtctaactaaaggctacataaaagagagtatcgttcatttctcactataacccatttagcctttatgtttaactgttgctaatctgcaccactttgagtggtttttatctacgagtaatatgagtatctttgtaaggaaaacatctattaaaactataatctattttaatgtgcttaaattaaatttcaagccaggttcattttctaataaaattctgtagagattcacaaacctctggaagttatcatcaccatcaaaacagctccactcaggagagttaaacacccaacaaactaccaaaggttaaggagaaataatttgtcgctccaaaaactcataatgttatgtaataaatgtcaaatttaaacacattgaacaattatgaaccatagttggaatatttcttgtaaccatttataaaataacaaatgaggtacgaaatgcgtacatgttcttttcataattacaatactataaagttagcagtaaggtaataggacttagatcaattaaagcctacaacatgatacatacaaaacccttggtatttaaaaacaaaaatgagatagaacatttcacggttacgtaataaaataattaaagcattagataataaccactctttactcttctatgggaagaaggatacacaactgcataaatcttttagcccaactgaaccaatgccaaaaccaacaaacgcgatcaaactgaatcttgcacatgaacctattgcttaaattaaggcaaagaacaagaacttaacaaaagtacatttctaaggttagatatagaatggcatgcacaatagaaagaatagcttctcgttcagagtaaggagaacaaaaaagagggttttacttaaaaggataacactcactctaaccattactatcaggaacttataaatgttttctctcatcaaataacaatacgaagtgagctaaaggaaaagtttaatcattatgtaatgaaatatagaagaatttcatagccattagcaggatacgagaatcacaaaagtagcgctaacagacctcaagcccctcatcttgctcccaagcaaggccaggtccactatacatattcttgataagcagagtgcaagatttatcagggtagaaatggactctactacaacgctgaccaaaccgacaagctccggtctttaggtggaaaggacaatgagctttatcctgtcatacatacaaagacaaaagaaaacaagttagaaaccagattcctcctaatcataccacactcaaaaaatatataagacaaacaaataaaagatcccactctttgatttaatgtaattggagaagactaaaccttccttcatggatgctagtgaacaagaactttgataacaaatagtgtaggagaaacacatgatacacaatacaggagattaccagttcagttccaaaatttggcacttgttcggcaacactctcaatcaactgctgtcctgacatcaatgagtttctatactcagaaaaagtttcaaactctggtgcaagaggattagatgtgggcctatcaacatcctgcaaagatgaaaacaataagatgggaatagaaatcttggccgaacaacaagagaaatctgatattcatatccagacctctttaatacttgaatcatctaggtgactgtttttcttcgagaccctgacccttttcttcttgaaaatgatctcatttccttgccagataatttcagcaggaccttcttcgtattcccattcatcgctctcatctacctcatttgcagtctcaacctgccataattttaatttaacaaagcaaatccaatttgcttgctaggattacatattctctctggccaatgagcaaaaactcaaaaacattctatattaagataaaataagttcttctttccatttcaaacattaaagtgcagtatattagtttatggctactttctcatgctttctaagcaaccaaacagccattaaaaccaaaatactccgagaaagtaaagaaaagaagaaaataagtacctgctgcttccgagactcttcgtccagtgccttcctacgttgctcctcctcctcctcctcttcttcttcttccatcttcttcttcctttgcatctccatggcctcgagccaggccttctctctctcctcgaactccttcctctccctggcggacctctctgcctcttcatgctccatcaaactgatcctcttctgctcttctggatcgttaagccacgcctctacttcctcccgctccttcatagctacctcttttcttatctgcttcctcttcatcttcttcaaggccttcctcttctccttcctattcattccattctccaaagctaagccctcaaattctggctgcatttctctttcttcttcctccaacccttcggctttcgctatggctgttacttcttctgccattgtttcctttggtcccttcccaaagcccaagccaaaatccatttgtaatccgggaaactttcccatctatttgtaattattttttatttttttagaaattagactctaaaaattataagagtttatgagataaataaatagggtgatgaatggttatatttttattgtaattatattttttttttacttgtaatagcaggttactaataggtaaatatttatttttttagaatttaattaattataattaactattttttaaaaataattaatta

SEQ ID NO: 219331 - DNA, 6801 bp, Cannabis indica
tctccaaaattcgtactcctttgagtgcttctgatttccttcggaattgcttgttgaaaaccattgaagtccacttctttatagccaataataaagggatgaaaaagagagaaaatcataacccacgctaaaaatcatattcttccttgaattatatgggcaggccgcagcatgcacttcctatgtcgcggcccgtgttgcaattcctcacatcttcaaggctttcattgacacgtgccgcatcatgctatttccatgcctaggcatgactcccactttgagcacagttatcttttatgtgatctttttatctttttttttcatcttattctttcgatattttctattcttcctatattttaaatctgcaaaaataaaagataaaaagcgtgaaattgctccaaacaagagtaaaactatttagaaacatattaaaattaacctaaaaatagtactaataacaacctaacaaaatttcactttaatttcattttgttttctttttcaatagattttaaactccttttctcaattattattgtcaccaaatagaattaggattttattgtttggtaattaatatactgcttatgacatcgacctcactcttgtgagtctattacctatgaaggatacgtatacttgcatgttggatttatcataacatgtttttggcaccgttatcagagattgtttttagttaatattaaaacaattgaattttattctaattttgttttctctttctgctttttgctaatttgtttgtatcaatttttatctttactcagaagcatgtagtttatgcgtcgtccaggaccaactacaagagtacttgtttatcttaaaattgagaggacatgtaggaaaacagaagaaacaagaggtttgaaagatcttctacaagggttgagttagaagaaaccatggctaataatggcaataatggggtgtcgtataagactaggttaatggttacaatgcagttgatagaagcttgagggattatgtggtacccaccatgacattgaagaagataattttgagatcaagccaagcattcttgagatggttcaatccacaatctagttttggggactattgccagaagaccataacatgcatttagctaacttcgtggagctttgtcaaacattcaagatgaatggagttagtgatgatagtattctcctaaggttgttcccattctcactataggaacgagctaagagttggttagtgtctctgccacctaactcaatcaacacttgggatgaattggctctgatgttcctttccaacttttttcctccaaccaaagctgccaaactgagaagggaaatcaacaacttctaccagcttgacaatgaatctctttatgatatttgagagagatttaaagacctgataagaaagtgttctcaccacggaatagaaaagtggatgctagttcataatttttacaatgggttgagcgctactacccacactctcattgacattgtagcttctggggcattcatgagaaggagtgccaatgaagcctatgagctcttagaagagatgaccatgaataatcaacaatggcctagtgaaaggagaaatttaaagaaagtagtggggttgcataaagttgatgcaatcacaaaactaactgctcaagttgaagccctaactaaactaatgatagcccaagtaaaaaaagctcaacatgttaaatgtgagttgtgtggaggtccccatagttatgagcaatgccaaattgttaatgttgatgacctgcccatgaagcaagctagagctatttggaactaccccctcaattgaaattttcctcaagggaattgtcagcaacaagggttttatcaacaaggataaatgcaacaacaatcacaacaaccctaacaaacttaacaaccaaattttggtggaaattccagtgttcaatctgactttctaataaaatttatggctgaaataagggctttcattagaactctagagacttaaatgggatagttggatgctcaaatggccaaccgcacgcaagataatttgtctagcactatggaggtaaaccaaaaagagacttgtaagacattagcatttaggtgtgggaagaaatatgaggggctaagagtagatcaattaagtgcttaaagagggtcaggatcaacaagtacaggcaaaggcacaagtgagaagaaggctagaggtgagaaagttactaaagatctgccaaaggaatacaaggcactacttgtgagcatagaccacaacataaaaattccttatccataaagcctccgcaagaacaagttggataagttgttttcaaaatttcttgaaatattcaagaaactacacattaacattccctttgcaaaggctcttgagcatatttcaacatactttaaatttatgaaggaaatttagcaaagatgaggaagttggaggtatatgatatagtggcacttactaaggagtgtagtgcaatcttgtaaaagaaactactgcttaagcttaaagatccaggtagttttaatatttcatattcaataggtcgttcggttgaaacaaaagccctacgtgacttgggagcgagtatcaatctaatgtctctattaatttttcgaaggctaaaactgggagaagctcatcctacaacagttgctcaccctcgagatataattgaagatgttttgctgaaggttggtaaattcatttttcttgttcatttattaattcttgacatggaggaagatgaaaacattcttatcattttgggaagaccgttcttcgccacggggagagcgttaatagatatacaaaagggggaattaatgttgcgagttcatggtgaagagatgagtttcaatgtatttgctccaactgacattgctacctatcgtaaggttgaatttgtgaaggattgtcaagaagaagaaagggaagcgcaaagaaatattttgaactgttcgacatcgtatgaaaagattgatctgtgggaattgtgaagttgaatttagtttcatggacagcttcaacattgccaacattaaaggagagttttcttaatttggtaggagggccttattggatgcacgagtttttcaatttcagaaattttattaaactctaggagtattatttatgttaaatatgaattatgcaatttttatgatttttgcttggtgacgatagaaaatgcgacggatggccgtttgagtcatatgggtaagtctagaatctttttgttggtgggataaatatttgagataaatagaataccgagtttaagtggggttatagttttggaccattttacccctaggcttaatatttcttaagtttcaagtgagaaggttattttggtaattttactaaggggattaggtggcattccttaatattggcagctggtcactttgttatactcagccaaattgcgaagttaatggataaattattttgaaaggaattaaggaaaaagcaagaaaaagctagaattctttccccctttctctctctcttcgctccacccctcaaaccagcagagccaaccctaatctctatcatttttctggaattggacaaggaactaaggtgttatcatggggaggtaagccctagcaccttaatcgcttagttacttaagctttaagtttagctctatcttgcaattttatgaattaagggttgttggggttagaattccttttggatcaattcttaagtttattttgagttgaaattgtgttcttgatgctagttttgatgtttggtgtgatgaatgaacaagtttgagtttgaaaactcaaacttgggtcattaatggcatgtttggattctaagaatagttattactgttttttgttggaaattactctttgatgttgttataggtgatctggaaggtttggtaagatttgcacacgaattggacaagttttgaacttttttgggttacctggtgcaaaccagttaaccggttttacaggacctataaaacaggttaaccagatcaggggcaagtttcccgaaaagttcgatttgtcgatccgtgttatttttgatgccttagttggttaattccttgatacttaggatattgttataatagttaccaatagaagaacccttagttgggggtttaggttttcccgattaaggttttggcatgttatttatccgtttacataaatgtgacaagggcatccatccaacacgaggttttccgttcaggttggccaactcgcttaaaataaaaaataagataagacaaacatagaacatgttatatatgtgattatgtgtatgtgtgatatatatatatatgcatgcttattgtgatttgtacactaccagcactagtacggcggcggtactgagtgcattggtatagtgtatgatatttaaagagaaaagtacggtgttgccaatactagtaccggtaggtatggagtgtatagggtataacacttagtggtactcgaggtacgggacaaaccctactaacacttgtacggtagcagtacgtagtgcatatggtatagtggtcgtaccctagtaaagaacgttcttacttaccttataagtcttgtggataggtgtatgggcgcttaaatgcatgttggtaatgtattatttgttatatgcttttcttacggagtctgttgactcatagttgccactttcatgtgtctgtaaaggaaaggcgatggttgtacaagagtgagctctgagcttggatggtgattcaacatgtcgggattgcgcgatctggagtgctcgggctcgagacatcttgggcagtattttgtagtagcggtgagacatgtatgcaaaaatattttggttctatttataaaagtttaaacacgagatcctggcttatgtaaaatatatttatttttataaagtttaataatgttaataaaagttttaatttggctcaatttttgaggaaaaccctttgactagcaaaggttgcaagtcaatgagaaaataattgtagcgcgcctaagtatcacggcgttacaattttggtattagagccgccaggtttgtctaccaaagatcgtcaggatatgtacaatcattgtcagagaaaagctcgactcacggttcagtaagcctttacttgtttagtaatttatgtgattagaaaagcatgttaagaagcataatagtttataattatttatttgaatgcattgccttaaaatctataagtgcggtatatagagtttatgtgatcactgtctgacccacctgatgtatgggttcacaggcatagtcctattagatggacgccaagcgaaatacaaggagtcggggtaacaggttcgagactagaggcgattagggaaatcaaattccccagaatctccatggacgcgacagaggtagtggaaggttttagggtggtagacatgaaaacccacctcaagctccttcaaaatgggatcaaagatttgcggaaatgcaagctcagatctgccagcaagacgaaaagattctgatgttgagacatgagggtcttcctgcagtgcctccaccacaaattcaggctactttggtccctgcggtgccagcagaacaacttgttactggcaattttatggagtcactgtacgagaggttttgcaagcaggcacctccagtttttgtgggaggcccagacgttatgaaggccgagtaacctgcactacattttatttccaggaagacacactcatgtggtgggagttagtgtccctcgcccgagatgtcactgttatcacctgggaagagtttttaggtttgtttaatgccacatattacaatgaggttgtctgcagtgctaagtggaaaaaattcacttaactggttcagagtgatggtatgtcagtaacggagtataaaacgaagttcgatcgtcttaccaaggtggcttcgggtatagtgcccacggacttcagtaagaagaaaaagtatttggtggatctaaatgcaaacattagacacgatctggtaatcaccactagtgaagcaacaacttatgctgaaatggttgacaaggctctacgagctgaaggtgtagtaaagtttcttcaggagccccgagtgactccaagtggtggtggaacccccgcttttcctactcctgcatttagtagagatagtggttattccactgtcgatcaaaaaagaaaggctaccccagatctggttgttcgagatagattaagcagttctaagggaaccaagggagaggtggacgccaacattattcttactttgagtgcccaggttgtaagaaacatcatctcggagagtgctaccggaaaacatgcttctagtgtgaaatggttgggagttttaagaagactgccctcaggtgaagaaagaagagcagaagtaggaagcaaagccagtacctgcttgggtgtttgctatcactcaagctgatgctgcacccagtccttccgtggtgacaggtcaacttcttgtgaacaactcctattttactatactatttgactttggggctatacactcatatgtggcatcaagagtaatcaatgaattgtgtaggccttgtgattttattgaaagatggtttggaaccctactacctagtggggaattggttatctccaaaaggcgaattaggtctatgccaattgttgggttttatgccctaaataaaactcatttcatataatcagatttacttattaataaagagcagaaataacattttatgttgcatggttcacatgatttatttcatgattataggtatataatgtatga

SEQ ID NO: 219332 - DNA, 5550 bp, Cannabis indica
agctagacacagaagaatgggaatgcaattaaaactatgtatcaaatattattgtagtcacgttacacccgaaaaagaaaaaaaaagtcaatcaccgaatcataaccagtccaagttgtaattgagggtattcaaataaaaattactcatatgtgaacaagtaaattaaactaactcttcctgaaatcccagaccaaccttaacaagatatgtcacattgtcatggctaatagctatgcatatgagaggagaaaaagaaagattatttaacaaagtctttacggttccaaaagtctcgttcataaatcagcagaaaagttactgaaaatggaagataaataaatttaatacgcacctgtgcagatagagcaggtttttctaggtttaagatttttaagggggaacatgagcttgactttgactttcttgtgtttgagcagcttgctgtttagagagaaccaatgaagaagactgaagcttgtggacagcagcttgctgctgtctctcctttaactgttcctcaaacaaaccatattccttgggcttgtcccactgcagattaattttcaagtccttatcctcataaattacagatacgagtctaagaaaaataaacaaggatgagcaaaagagcataccaagctttcacgagtgatacaattataataatacttatgcccatcagggcaagtatgctcactccaatcacattctggaagttcgggtgtctgaggatttgcaagcactgcagctctgggaatattgtaagcaacttcctgggaactgcttgctgttggtagaggctgcattaaacatttcgttaaaataacatataaaaagttctgatttatttgctttttaaaatgaatgcaaaaggaataaatatgacattctactgaataaaccccttcagatgctgcagcactcttctggccacactcaaatgaacaccaaaatggggcatatagatagaaattactataaattaaaaacctcacataacatgcactactaaaaaaaactgtaaattaactagccaagattattgttgatttggaataccgattgtccgctagcctgagacagcttttgctgctctagtgtttgtttcgaaggttgaatcagatgcaactgccttggaaaatcatgaacttcaccttgaaattgttgagtggatgtttttatattttgcatctgcgacaactgtagaggttcctggtttgccaccaaagaaactgcttgtggttgtgtcgttaacgagaaaagttgtgcaagataaggtgcattaggccggttatgccccaacatggattcacccaggttggttgttgtcctggtacatatatccacaaaaataaaatttaaatgcattcaacaaggaaaaatttataaaaggaagtaacatgaaaaatgttacctaacaactggttcatgagaatgggggccaaagggcattccactaaacatcttattgttcctggagggaaatttaaatggaacacttaacaccgagtaaaaagataagttaagaaaacagaggaaagggtatgaagaattcaagttcgcaaattagttgaacagaacaagaccttccttctccattcctaactttcttaggttctgcaaaacgtacggctaatggcctatcacaacccttcagccacaccaaggggaaaacaaacagaatgaatagaatagatgactttgacaaaaaaaaaaaaaaaataaataaaaaaaataataaaaagttaccctcatagtgtaagttccatttaatgctttgattgctgtggcggccatgtctgcatgagaaaatctaacaaacccgcatccttaaaaaaagaggaccagatgtcaacatatattatataattaatcaactctttacactcagtaatacattcaaccaaaaatctgtatagaatgtaacaatagaaaggaatggtaaaatattgcaccaccaatgcactcgggcaagagacaattttggaatttgaactcatcatttatttataattgactatcctctacagatataacaaattactaggtatatcgtgcttctttcagaattcattcccccctataagaaaagccttatttaagtacatacacgtattagattggagcagataacttccgaacctaaatgagcaaatcgaatgatgctatgctgactttattattttaaatccaccactgccgtacattgcaaacatattgagccacaaatatctattctcaacatgggaaaggaattcaagagctacttcgttttaaaggcatgaaaaaaaaaaagagtacttcattgtagtgaacataccacgactttgcttcatttcatcaagaataatgtagacgtcttcaacaaaaccatatggagaaaatatctggccaaaaaaacaaattaattaataaaaaacagaactggtaacatgaaagcgcaaaataattaatattgaatttaaaagtgaatgaaaatatgtattccacatgtgagacagtggtctcatcagtataaatataaagagaaaaattatatgaattttttaagacattttgatgttttaataatgaatacagaaatgcgcataagtacaaaataattattttgtggaaaacattctatagttgttgagagcatacctccataatttcctcccttgaagcttccttgtttaacatcgcaacgaacactttattatcaggtgcccctacagaagatgtattttaagatgataaacaactgcaaagagtaatactgttgcaatgaaaaatcaagaggcagctatactaatccaaatgcgcccatattactgaagaaaatccaaatcactaatatatggaaacaattctttacggaaactaggaatcctgaataaccctggcttaagaaattatatctagtgtccctcccagggagggtgtcaaacctcatagcttgtgggactaaaccacatgtctgacaattagagctacccctccaggatcctactggatatgcatttccatcaaatatacaaaatccagtaaagaaccagttgttcgtacattcatcaggaagccataaaaaaatatttttagagcactactttataatcatatggaccagatttctctgcatcaaacttttagcacctcgcaaagagttgattgtataagatataataaatgttgattaatgtgatatacatgagctgtgcaagacaaaagtagttaccgacatgagatccaatgcctactcttaactatgaaatcatatataggcagtactatggaattggtctcgaaatgcattgcctcaaagataagaaatataccatgacgttctcgttctctttctctttctctatctggcttgcctgcatacttcaccgtaataggtacttgttcctaaaaaacgtaagcacaaaaaaactatatcaataactaagttaatgtgaacacaggcaacaagagtgttcatatcctacatgtacagtaccattaagctttaactcaccccaggaaaataatgttgattgtttagagctgcaattgccttgtccgcttcaaatgttgttgcaaatttcacaaaacagcttcctgtaagagaaaactacatccatttcattcctggagtaaccatatgcaacatcaatacaataatggcagctacaaggcatatcctagtccacgactaatgaaattcagaatgtgatgaaaaatgaaaacaatagagactagcaaaatcattgctttctaataacgatttaatttactttatcctgaataaatggtgaaacatataatttaaaataaaattaggaaactaaatagtgctcttaaaagtctcactaaatataagaaaataaaaaacaatactaaccaaggcatcaaagatgaacactaatataccttgttgttggcctgtactcctatccttcaaaagaataacctcagctacatttccatgttgttcgaacaggggacggatctaaaatacagtgacaaagtccaaacatttaatagttagagcagagctagtagcacagacaacagaatttgaattaaagtcttcgaactatagcctggtatcaacactaaatggaagttcaaggtgaatcagtatccagaataaattcttcaaaaatcaatctttatttagttataacttacatcttgctcaactgctgttcttggaatatgagaaacataaagttttgcaagaccataaccatctactcgatcttaaaaacataaacaaaaacaaaacaaattaaaggttttataacaacataaatcaacataaattccaaatatagtgataccacataagctatgagttctaagacaaaagtgaaaaagactatttgcagtatttctctcattaagagttatggaaaggagaaggcaaaagagtagatggaatgtagaagctatgaactatatatatatacaaaacctggcgagtttcctctgttcgaatgagaccaactccttttacgttcagacataggcacgtgatgacccgaaccataggaatggcgccattgaagaggcctgagtggtggtcagggcgaacggaatggtggtagtagtgggactggtgagtgttattgtaattgggatcattaaaactctggtcttgatagtagggttgatgattatggtgaaagtcaccagaagaccaagacgaagaggaagtggaagtcccgggatgcaaattgcggtgagaatcctggacctggtggtcgccgaatcctctttgcctctccagcttcgctaactcttgagtaatttgagctattacgaaaccctaaccctaaattacagagtgaagcagagtaagattgggatgagtgaattcgaaaaacacttgaaaggaagaagacgagaactctttctccccaaagactcttcccgcttcctattttttcttaatcactagacgacttgtcgtttttgtgttatacttttttcttagggttgtgtgagtagtgcagctttttactattttttttaaaccaacccgcaaatattgtttttttaatttctcaaactgaactcgtaccgtgaaactaaaaaattacagaaattgcattgaaaaaatagtgtggttgcaatttctgtagtttggactattaccaaataattaaactatcacaaatataacaaaacttgagcaacacctgtcaaaaatactataaagcttaaaaataaatataaaaaaaaaaaattaattttaacaatacaataattagtgggctttagactgagccttcaaatattgcacctaaataaatataaaaattgtcatttttataatatgtggtaaggtacgatttgaatcgcatattaacaattcaaaaccgtaaactgcaccatactgcatcgcacgatttaaaaaaaaattcaaactacgaccacactctaaagaattcaaaacgtattttttaacgatgcgggcggtttgacgatttaaacagtttaatagacaacctcactttttttttcttttttatttttgccttcatatagtaattaaactaaaatgacaactaaatgttt

SEQ ID NO: 219333 - DNA, 2914 bp, Cannabis indica
agtttaggtagttttgccgccaaaattttggtttttgtggttaacttttataaactataaagttcgagtagtttagccgccaatatctctttaattaataatctgttcatttcgaaaaaaaaaaaaaaattaataatcttgttgcatatactatttagttggaggttataaaatagagtggaaataaattatatttcattttttatttatttatgtcattctaatataataatttttctacaattctattttaaaatagaaaaaaacatcatttttccaatacaagattaaaaaaaattattaatctttttataaatattttgtatgaatgttaaaattaatttcatttaatttccatccttattctcattattatttttattcctaatcatttctacgccacgttaatgtttgttatccttttttaaccttgaattcttgtaagatgcatctgtgcaccacataataagacatcgaaaaagagttattacatgagtatgttgtaacagtgagcgaacgaagaaaaaacaaagaaacgtactcagcaataaaacttttgtgagtgaaagatatagtttattaccaattacttattggtcaaaacaaaaatctgcacagtaatagttttactagagaaattcatcatcagtacagccaaatagaactgaaaaaaatccaaacacaagtttcaactttcaaggcatcaatcatataaaaaagatatagatatatttatatatgtatatgattaaaagtgattagttgcagtggttgatgatggagtggtgagtattttgtggatagcatcagcgtccatcctagccgattcttgcttgacccattgaaccaccttctccgcctctttagaagccttgtcttcttcctttaaggcctttttaagccttcgttcttgttctttcaccgaaaaagtgctcatatctgacaataagttctctttcttttcccactttgacgatctacttcctttaccattagatttctttgaggagaaacaaaaacagactgttactctttcatccattttggggttttggtttcaagattactattattaactataagctttcaaaatattctagctaagacatagttgtctattttgactttttttttgttagtatgaaattgtttattttgactagcaatacatactagttaataggtaggggcaggtaccgtgataacagtttgaaaggaggaaagtgtttaataatgaatggaaaatattaactatttatatttataatattgacagtgataacaaaacagtcgctttggccgagtggttaaggcgtgtgcctgctaagtacatggggtttccccgcgagagttcgaatctctcaggcgacgtttttaatttttgatactattttagtggtgatattaagacaagagtaattttggttaaaaactattaaaataaaaactcaattatttatgttttattgaaaggagcaaaaaattccaaggtaaaaagtcacgagatcaataaaaaataaaataaagctaaaatatttattaatttggtctaatgttatatcttatatataaaaattagtaaacaatctgcgctgggaatatttaaaaaaatttaaaattatatatatgaaataaattgattataattgagtaataaaatttattgaattttaatcataataatttctaattattttttctcaaaataatatgagaagctttctttattagaaaacttatgatatttttggtataagattagtattcaattcggtgtttgtcatagtataagtatttaaaaaaaaaaattgatgaatcatttatttaaattcaaatctacgtttagtatatagaaattaattagatataattagttgatatttgcatttaaaaatttcaaactaacaaaaacaaaaaatctatttattagaaatgtgttgatcataacaaataacagaatttatgctatgtgattaataaaattaaaatataattaatgcaaaaactatattttagttatataaattgaaagacaaacaaaaaaaattaaagtcgttgtcattaccgtatttcactttcaccactatattcaaaatcattatcgtatgtcacttatagttaccactatatttaaaattatggaattattttacgaatatataaaaacaacaaaaaaaattacaaaaatacggttgtacggaattttaaacatttttacgattttatttatagaaaatccagtcttttatgttgtagtcttgttaatttgttgttgaatttttgttatctgtatgttattttttgttgttgttctgatgttatgtggatgttattttcttgttagttttatgtagttttcttgttgttttcatgttatttctatggaaaacagtaaaaatgtaaaaaaaaaattctttaaacgtaaaattgtaatatttttacaaaaaattgtaccttatgtaattattcctaaaattattgtcattaccgtatcttattcgtaatagcaactacatttaaaattattatcatcattgtatctcatttacatatttatctcatcttcattaatttattttctccactttattctcttatgtgtcaatgtttatataatgaaaaaccaaactttataatataatctattacaaaaatatatatatatttttgtaatattttaaaaaataatagataattaggtttaggtgtagattttttgtttgtaaatatagaaaaaaaatttaataaaaattagaaaataggtaaataataacaaatattttatatatactatatttttacagagttatgtgactcttttatatctcatatttatatatctttatatataaagagagattgttaactttgatgtttttttcaacaactggcctcagagccatgataattgatt

SEQ ID NO: 219334 - DNA, 4362 bp, Cannabis indica
aagaataagaatgcaaacctgttccacaatgctagtaagagctcctgatgaaactttatcatactgatagtcatgcccttgaatgtcagtagatttcatacgaacaattgtcatagagtttaccctaatttgagatataagaatgacaacctgaaaccatagagaaactgaacctcacaaacaagaactgaaacataagtcttaaatttatatggaccttgccaataccatatatgtaaagatatatttgttaagatattgataaagtaccacaaagaatgattatgatataagattatatacaagtatttataaattagtatccttgctcctgaagttcatttttcaggattaggtctcttcccagctgtaataaactagttttttgcagtatgaggaaaaggagcatactgatgaaaggtattctgtcccttcaggtgattcttggaattattttgattttttcttttatattttgtgttgataggcagtttagaacatatataaaaagaatagagaataactggtgatagtcttaacaaatttgagcacactgcatacatgaacaagggaattttttagaagacagacctgtgctatagcgaacccatttatctgaatttcaaagtcactggaatgctgaagacagaataacaatacagtggaatatatatgcgattccaatttgctttcaggagacatttgcgaataatggtgcgaaagctcctataaaaaatgacacagaccaggagaaggcatatcagatctgacaataaaattgagataagttcaactgaactgaactagttattgatgaatatagtttggactaatgagatataccagaatttccctcagattagaaatctcctgggaacctctctgcattacagacttaacaaataatctaccagctaaaactatctctgatggcaacactgaaggccagtgtgcacctttacactcatgtttatgctcaggaatatgctcactgtctgtttcaggattgtaatctaacgcgatctgggcaacatactgttttagcgtgtccgataaattttcaagaatgacacgatccctaggataatacagtcttccccctgctagcagttgacaattctgggaacagtaaaatggtatagagcacgatgtacaaggaactttatcaactggtagttcattcaagcagtaatgacaatgagattctcgacaattcttcaacattacctgcagcatataggccaaagttcatatcatttgccatgaatatgagaaaagcaagacaacagatggccaaacaaatttcttccccaaactacaataagatggaaatacatttttatacccaattaggtgtaggtggtacttaaatagtagaaacctatatctacaatgctatgtatttgcttttaaaatgatgattagagctaatcgtgacagcactataaaaaggttgttcatacaattgcaagaggttcctcagtatgaactaaggaggctcgtggaatgtcacttgtagaagccataccccttgctttatctggtgtgttgacacattgtagctttatttggtgtggttcatctgccacgtagtatccatatcattttaatatttcaaagcttttaactataaggaaaatcttcagagctggtgcaatggtatattaacgggaaataatggtaactatcttaccgaaaatattcaagttctctaaagaaagttgtagtggtggatttgttctactatgttgatctaaaagtgtttgcagttcattttcaatctgaccccttccccctgctgacacctccacactcttggccacattcaagtcattgactgcatagtcataaactcccaaagaagcatttgccaaacctcgtctgtaccatgcctacaaagaaattaagtaactaaaggagaaaaatgaaagccaagttatataaactagctatctgtaacattcccattgatcagtagcatatcttcctgacaatatccatcaaccctgatctgaaaatcagcattgacacatcaaatccgatgataaatgaaactttcacgaaatatattccttgaaatatgcaagtaatgctgagaacatatatcttcttcaaagcatgataaagcaatgatgacacctaaggcattcaggatgaaagagcataatcacccaactgggaattatattctctgttattcatgttacatattccatcttaaggttgctagagaaattggttaattggaaaaataaacagatattataatctgaaccaccttatttttttttttttcatctttgtaattcttttccaaattttctaatacaaccatacttgctgaccaagaaatcatagatgttccctttgtacacagcaatatataaatgcaaaatattattaaataaagcagctcacctttgcatagcttggagaaaattgaagtgcgcgatcgcagtctcgtacacattctgttaggtgattcattttctaaagggaaacacgagtgcataaattaaccgatccaccaatatgcagagatgaaattatcaggcagaaaacttgaagttgaacctttggttaagagattattatctgacaactgcatgcttctagctactattcaagtcagttctaaagaaaataagaaaaggaattgatgcacaacatagatagttctaactcttagcttctagataatgactaattcaacacttactttattgaaacctccggggcatgtacaaatctataaatgtcataatatacaatacatgcataattatttacctattatagtctcttcaatgattttgcttatgtataaatatgtatgtacgtacatacatacatacatatacacacacgaatctatattcgattatgcatataaaagggcaagagagtatataaaaaacgagactcacataaagaacgaaagcccgattcaagtacaaagtagcaacaaggttattatccatttcatcagcttgtattggagcaactcgcaatgcctgtatcacataacaaagtaaaaggaaaattgcagttggaaaatcatttatccatactaaatatatgaaatttgtgtttaatattaaagtttccgtttcttttttcttcttatactcttgtgctgaaactctagcaaattactaagtaagctggcatgagaaatcgaaacccacacctcgtaggagccgagaaaataacaagcttttcaaccctactctcatggttacattgaaatttaaagattgatattcaacattagagaaatcgaaacccacacctcgtaggagccgagaaaacaacgagcttttcaacccttctctcatggttacattgaaatttaaagattgatattcaacattagagaaatcgaataaaagcaattaataagtaaatgattctaaagagagtaaaaggacctgagaataggagtccaaagcattgggataatctccggtagcgaagcagtgattacccttggccttccacttcaaagcgtcctccttgttcttcccacacaaagccctatctgagccagccaagtctttcaccatctaacaacaaaatcctcaaatagttagaaattgtttgagagaagaagatggtagtacagagagagaaacgataccaacttggtgaaagagcgggaaatgaagaagaaaatcgagaagagatgaacatgtttgaggaagattgtgttcagtgctgtcccacaccattcgctttaagctctctggaatggccgatttcagcttctccattttcggttacgatttccaaactcactcagtggaagtgtatcggacaataataaccaacaccagcgggaacttccttgagcaatttcttttcctttcagtttgctcctttattttgttttgccatttttggtcctttattttgaaatttcctattttagcaattaaattctacttttatttcaatttgatccctatccactctctagccccacccatcccacctaatagctatttggggtctcgatgatctctatttatttaaagagaaatgcttagagcacctcgtggcaccaaagatgacaagaggtggcatattattattgctataaattaatatcgaatctcatacaatttgatttaataaataatataagaaatcactaactaattgcaacatgccacagtatggtgtcagacactaggaatgttcataaaaattgataaaccgaaactgaccatcaaatcgaccagaccgtaaccgaattttcggttccacgtcagcatcgaatttggcggtcggtttcggttttttggacatggcggtcggtttcggtttttgaaataaaaaaatggttaaaccaaaaaactg

SEQ ID NO: 219335 - DNA, 3765 bp, Cannabis indica
ataaggagttgcaattcaaattagctttgctgtggcctgttaggactgggttggaaagctggccatattgttagaggacaggtgacaatgtagtttgttagcatagagaataatgatagggatgattctagagtctgttaggaatattctagtacagatgcattgaggaggaggaggagggaataaatagtgaaggggagggtagacaggtgaaaattagtaaatagagttggagctctcttgggaggtcccaggctcctcgaattgcatgtgttatctttctcttttatttcttatcttaatattgcaatacgatatttctttttgcatattcttcttagttttctctactgttacgtgttctttctatttggattgctatcatggttattttctttctttctttctttctttctttctttctccatagcaacaaaaaaaaaaaaaaagaaaagaaaaagaatacctctactgcacataaacactcacacatgttttttctatgctttgctgatctttttacactttttagattcgatgcatttcgtgaatgattcaatgtccttgtttaatatgatgtcttttctcatagatatttcattttattctttgcattctgatgtttatgatgttacttctgtcccatttgtttccatgttacatcttgtagattgacctgaggagggcaaacaacactgaaataatgctcacaaaagttaagatgccacttcctgatatgatggtaaacttttactaaaaaatcttatttgttacttgaataatctggagctactgattattttatctcttcaacgtggatgcagttgtttgatatagaattcttacatgaaatcctgtaataataaagaatatgttggttaatttattttaatttgtctggttttcttttattacttataggcagacatcagtaattttcagcatgggactggaaacagtacatatttttgcaagatcaaaacttaaatgactaagtagaacatataggataatttttatccaattttaattcacccatttttgaagtctttttttctcttgtagctttttttcttcttctcatttttgaaatgttttaggatatatggaacaataacatgtttggttactcttttttatttacttcacaccattgggatgcatcttctcaggctgcagtgctagcgatggatgaatcagtattagatgttgatcaagtggaaaatttaataaaattttgtcctactaaagaagagatggaacttctcaaggtaagaatttaatgcaaactacattgtgctccttaccaatttgttagctagtcagtaattcagcttaatatagaagaatatgatcttaatattcagtgttgtgacttttattctgttactggttatgaccgctgtctgttaattatttagggttacacaggtgataaagagaccctgggaaagtgtgaacaggtaagatacataattcatcttttcattttcatgaatgacttgctatgattaaggtatacaacagtaaaatgttttaactcattgagttattgatttatttttttagttatttgtttataatttcatatgagtttggtaatacataacatttttgttttaccaactcctttattcttttaattttcctctgtatatatacttaaaagaaaaacaatttatgtaaagtaatagaaacttggaatttttactgttgtacatcattcttttcctgttgaaatcgtgcgatttccttgtatatttgagagcatgtagataccttttaaattctatcatggctggagtagttcgaaaaggtcattttttgttttgttacgttttaaatatttcagtattttatggagttgatgaaagttcctagagtggaatcaaaattgcgagtgttctctttcaagattcagttcaactctcaggtttggtgacatatttcatgcttttcattggtaattatgtgattattattattgttgttattgtataattcatatcattatcttacagatttcagaatttaaaaagagtttgaacactgtgaactctgcatgtgaagaggtaagcagctactgatgatgaatttttttcttgcagaatattagtatctgcattgatagatccttgtgttatttaataactaccttgcacttttcacaatttgttttgacttgggtagttttatgctctgcttaataggtccggaattccttcaaattaaaagatattatgaagaaaattctttttctgggtaatactttaaaccaggggactgcgagaggtgaggatcttcaatagttattttgacagatttattatttgctcattgtgcattttggcgagttccgctttttcatctgatgttgcaagttcttttaaaagaagacttgggttcttttatggccataaaaccagaagtttattagactatacaaaaatccaaatacaatcaacaaatgaacatgattaagctacaaccttctaattaaagtattgtgtgagtatcatccacaagggtaagcttatgtgacttctcaattttaggatagaagaaaaggccattacagtgtcatgccaagtactattcagtttcattatgttaagaatataagaattacatggtcatactgcctatttctgattattgtttccatatactcaactgtggatttacagttatagctaacttgtggttgtggacttatgcaaaagaaaggtgatttttcagttttacacaagaaaaaaatgcgattacttgatttttggttttaataagaaatgaaagccaaaagggttaataatgacgataaggtttcatcttctacattggaagataacaaatcatcttaggttgcaaccaaaggttgcactctctatgaacagtcatctatcacatataggcaattacttgattgctgaatagcgatttaaatgtattgttcagctatcaaccaatgaggaataggaaaacttttttatttttcaagttaaattaatgattatatattcttgtggaatgatatgggtatctaatgcttttttaataatgtacaggttctgcaattggattcaagttggacagtcttttaaaacttagtgatacacgtgcttctaacagcaagatgacactcatgcattatctttgcaaggtatgttctcgattaatgtgaaggaaaaattgatgttattagatggagaacctgaagaccttttcataataagagcaattaaatcaactagacttgacctcaatgcaagttcaaaactattaaaagttggattttgtttacaaacccagataaatacggtctagagagcgttgcattttataaccatcaatctagggtacaacatgagttggcctaagtggccacatttaaattcttatttgtctagtagcaactctgttacaacttggacaatcatctttcttttttaaacaacggtaagaaaaaggtttctcaaatttctgtctgatgtaatcatgtgttttgactaaggaggcctttaacatacaaaattgtttcttctcagccattgaaccttgttagagaaaaactctcggtgtacatattattttcctgttgctaaaaactaattgaaaattcagcagaatgaggaataaactactgacgtgttttacgcctggaacctgtttcaagttttgttttttattttcctaattatatttccaccgaaaacgcagaaagtttgttcttcggtgattgagttttattgttggcgtgataaaatg

SEQ ID NO: 219336 - DNA, 3414 bp, Cannabis indica
ttattataggaaagctagaatataataatactgtgatagaaattaattgggaaaaaatatgagtatcacaataaaatattcaaaaacattcaaaaagtaataaatagaagagaagagaaattacaaaaaaaaaaaaaaaatctttaaaaacaaattatagaaaataacataaaactctcaggtagaatgaaagcctaatctaatcacatccacgtcccgaccaaatccaataaccgtttcaattgttaatcatcatttcgactttggtttcaaccttttcattatcattttttaagttttggtctgtggtagaatagtttgattaatccatcatcaataaacataatttaatgggaaaaaatagctataacgtcaattccaatgaaagagacagaggtctcttctctcatcttggtggttcatactattcccaacaattgcactctggatcttacccactggcaccaacacctacatatccattgccaccatctcatcaagcctaccctcctcctcctggctacccatctctcggatacactcctctaccgcctcatgctgcatacccaccaccctatcctcctcctagtggatatccaccttctacttatcctcctcctgctcctgctccatacccacatcctacagcaggtttcttactaattctttcatttgtataaatatttcttctttgaaattctatagtattcttggaaaattatggtagtcctatttgtcactcatggaaaaaataaactttataatttttttatcaacaaactaatttttcaaagaaaagtacttattaggagattaatgtgatcttcctcatgtttatttatgcgccttaatttagacttagtgagaatttcttagtgtgttaattaaattcataattatattttgttagtttgacaaattcttcttattaataccacagggcaccaccatggtggacatggtatgggaatggggcccatggtagctggcggtctaacagctgcagccgctgcttacggggctcaccacctttcacatgggcacatgggttaccatggtggctaccatcacggcaagttcaagcatggtaaattcgggaagcactggaagcatggtgggtttggaaaattcaagagatggaagtgattcatagaataccatggccaaattcactatttgttctttcatgaagaaaagaacaagtacaaggacaaatgcatgagaataaatatattactttgtttgttgtttgtttgcgttctctattattactacaatatatataggataatgcttggataaaattacgaaaaacgtacaaatattttgtttgattatgtgtcactctattgttttacaccaataattaattaattcattttatattttttttatttctttttttttaaaaaaataattttgtgacccctaagaaaaattactatatgtaacaaatgatacccctaataactcccaaaaaaaaaagttactcttaataaggagaagtattataaatatcatttttgagagattttggtgaccacttcttcctcagaattttcatcaaaaagaataaaagtacttggggaaagactggttggtttgttggttttcattgatgtaattacaaggttttttctctcattagatgattatcgattggagtttggaaggaacactatctcataataaactctccttatagtttcaacgagcagataggctatctcgctgcaaactgtaaggtatatatatatatatatctattaatatatttgtgcatttgtaatttaatctttgtattttatttattattaatatttttatttaggatttttctttagtttgattgtacgacatggctcttttttttcttcaattatcagatttgcaaggttgttgtggtatgaatcataatctatggtacatattttgctaattgtgaaagatttgttcatattttttttggacatttccttatgagaattgaatatgaaaagctaaaaaaaattgaaaataaaggctttgctttagctttggtttctctgaaggattttgataactaggaataagaattttgataactaggaatttatacctttacattgctcttccaaactttaatttattacatagtgctttaacttatatttattaatgtatcaatttattagtattttttgtgtattttttggtaggttattttggatccttatagttgtttgttttgtgtatgtctctctttccctcaaaaaaggaagacatgagagaagttggaattccctaactgcatttagagaagattgttatctttatctctatttgtttattttttttctcgttttgataatgtaagctgatatttttccaagatgtttgaacagataaatttgtcacaatatcaacaaaattattgtttttaatttacattggtagatgatcttctgcatgtcttgggtttttattatgttcttattttagtatttttactaaattgtagttttgtgtttggtgatattcttgaaattcacatttgtattgtgatttgtgattgagattacttttctttttcgcaaaaaaaatgatcactaaaaagaaatttgtagttgcgattattaagccacacatgtaaactattgccaagtttcatttaccgtaaattgtcaatgttgtatctgaactgaatagataaaataaattatgttaatcaaccttttctttctgaattgtttcatttatatgttaatatcttctgatgaatttcacaacataacatgaaaatgacatatatatatatatatttatataagtaacaaagaaattagtggaaatgcaatttttgtttcaaatttaattgtaccaataaatcaattgtgtttcattaactatttaaagtttgagtgtattattattaaatgcttttgtgataagcttttatgattaattatagaataaaagtttataattagtatgtgttgtcgatttatttctttgactatgcttaacgtgaaccttcttaatcgtgacataaatgaagtaaatggtaaaacaaagacagtgtagtcatgtatgagtgatgttcagtatattttacagctgatttttgaacataattaagaaagaattatgtagtttggttgtgtagaaattaatttcccatataagctgacctgtcacaacgaacacataaaacacttagttaaaatacagttagagcctaactaacttagaacaatccaagatccaagacttcgttagttactcctcactaactcactctacaacacaaacactatgaatagaaaggagtcaaaaaccagaagacttacagcttcattacaactcctctaaccaagaaagtagtagattcaggaggaacagacctagtgagagttgctctcgtgttcaagaaaa

SEQ ID NO: 219337 - DNA, 4625 bp, Cannabis indica
atgaaggaatacggggttaaagaatggactaagctacatacagtcgtaccatcaaatttaactgggtcttttacatctttgatgcctcttaagtatttcaatagggaccatttagttatttttgaccaaggacaatgagaagtttatgatctattatggagaagaaggaggctaagattgtgaagaagtatactaaaagttttgagaagagtgcgagaagcctcgttggagttgataacttgatagagttgatgaacccaatacagggaagaaggcacgggaggacaagaacaacaaaaagaaggagaagcagtaatacttactgacttttctcttttagttattttcatttggctttattttgatgattatggaaatagctagctagagttataggcgcttttgtttaagaatatatacatcatcactaataattgactgatcattatcttttttcatggtattatgtattgtttgggcagggatgatttcttgtccaagggatttaaattggtgcttaaatggggttgtgaagaagaaagaaagagatatatatactgtaaaccgaggtgaattagtatcctaatctaaattcaaattaagcttaacgtttctttatttttattattactgccaagtaaaatagtttatttctctgcttatctgactaattaatcttggtggctttattttttcaggttggtgctactattggttgactatagacttttttagtacttttaacgttgtaacctttttcctatgtttatatacttttcgagtactgtgactgtctgtcttgtgagataggaatatattaacattagcgatggtttgatggcaatggcattattagttaggtcgtgttattatacatgctaagaacattatgaaaacctcaactatattataggaaaaccttgatgatgttgtttttcgtttgactaaatatgcaatagctagatataacacgagatgaaaattagagcgatctacttgtagcaaagtgaacatcgattaaatctttttgaagaatatttttttagcattttatttctactcttcagagatgatagaattttgtatctttgtattagtattattagatttgattgtaatctttctaaacaaagaaccttttggaacagagagaaaaacttaatatttgaatcttcaagggtttttttactaaaaagaaatttattggttaatgtttacttataggagcattgttattagctactaagcattataatgtggcattttataaatgattagtattattttataataattatcaaattaaattataagagatttaatagcattatcacactttaaatggtgtctcttgtagtatttctctatttatagtaacatgttgtacgggtgttcaagaattctaacaaagaatggttagagattagctttgggaataaaatcttataaagttcgttaaactgtaaacaaactagaactccattgattctagttaagtttacttttggtgttacacgtaaatcccatactaaataaataagatgtttgttgcttggaaaaaaatataatatttatggggctaaatcccataggaagtgttctgcaatggcttgctcgctctggcgatttcgaatggagatacggtggttatctgtaacccatcaactagaaagtactgcccatttctggtcttattgggtacgatcctgttaacgacgatcataagttggtaaggatggtacatcatttttacaaagatattaactgtattcactcattctatacactgaggtcaaagtttatagcctatatatatttcaacagttggaaaagggttggtgatttccatattaacaatttttacaaagaatttcgtgagttgccgcttctggatgaggacggcggtgttgatgagcaactcgatgttgatatctggatgatgaaggaatatggggtagactcttcttggacgactaagatgttctcattgaagcccacaaatctgtattccaagaatggccatcaggttctcttgcatcaagatggtgagacatttcttttgcatgatctcaatacgaataagaccatgaatatgggcaacatttctggccttcctagaagttttgatactagggtgtgtgtgtgtgagataagccttgtctgatttggggttggtggtgaggacaatactaattactaagcaggggttaacaagaacacaagaaaacttttggagcttcacatgtcaacaatgctatataccacaccttttgtgtaaggatgattttctctctccatgggatttaaactggtgttataaatgttgcacgaagagtggaagcagaggtatatgttaaactgatagcaagagttgaatttactgatatgatatggataatggatggttgatggttctatgctctttacttaatcactcttggttgtgtctgtttgtttgaggttggtggtattggagggtttgtgcttatgtaataattgtctcttaaattctgggatgtcaggaattaaagttgacaagttgactagttgattcaacaaaacatagagactaagtcaaacttttgatgtatcgtatattactttttctagttctaatctaggttcatactactaatgttatggtttaaatagacaaacgtggaggttttgatagtttggttgtgaaataataagacaaagccatttgaactgttttcacatgagctcgtttcgttgtattaagtcgtattatattctattgtattatattaaatttttaaattatatatcatatttttatatatactatgttaaactttaaattatattaaaatattatatatttatgtgtccatacaaattaatactgtatataaatttacataaaaatattatataaaatataatttaatataatactaaacaatataatacggcgtaacaaacgaactcataatatattagctcttacttccataatttgtaacttaagaaaagcccttatctcaatctaccaaaaaattatttcaaacgataagctattcaaagagaaaagacaagaaaaacctatttagaacaattacaaagtacgtatcaaactgaaaagaactagcccaattctatttctatagttacttcttacttgggtattatatttttttaatgcaaagatctattgttgtattataattagttaaacattacttgtctttttattcagggatttatagtagttagagttgagcatccaatccaatttaatattttctcttcatccgatttgatcaaattactaattggataataattagaatatattggatctgtttttttaattaatatccatacacctaattttaatattaacttaaagatataaaaatacgaaaaaaaaaaattaaatactactatttatttaagtttaatactctataaaaatattataattgttacaaatataatgttactaaaaatttaaaatagctaaaacaaaaatattattaagtaataaaatagaacaaaatatcattaaaacaaatatacacaacaaccaaatattacaaacttaacacaataaaaactcactaaaagtataattaaaatacattttttattttacataaatatatatatatatataaatattttttaatacatatgaatgtaattagatttaatcggttttaattatattttgagaatgacttctgataaccgatctaatctaattagaatccaatttttaatatctaatccaatttaattgtaattggatatcgatttttttgtaattgaatttgattggttagattcagtttaattgaattagattggattattatttgtctaaaaatcattctaaattgctacattaatatacacttttttataaaattaaacaatatatattataaactatttatttattcgtctaaaatacaaatacaaattattttagatttgttttatatttgcatgatgacactataaatcatttaaaattttacaaaaatgaataaaaaaatttaataaacaaccatatataatttatattactattcaaaaaatgaattataagtttatatctcacatgctaattttcctcctattattataattattattattattattattatttataagtttgtaccataagttattgtgtgaaaaacactgacctgggttggtttagggtcagggttcggggtttagattcgagtgtggggttaggttcgagttcggggttgggttcgcgtctggggtcgagttcgtgattcgggtcggggtcagggtccgcatttagggttagagttcgagtttgctcgaggtccgaatttggagtctggagacaaggtccgagtctcatagtttaggttggggtcgaagtccaaaatattgattaagaaaaaaaaaaaaattgttttaaaagaaaattggaagtaatttttttttcaaaatttttaattaaaaaattaaaaaatgaaatagttttataaaaatatttttagaaagtattttaatttttttaattagaaaaataaaaaattaattaagacacattatatttacataaagagttgtaacaaatactaacggttatgctcattgatggcaataaaact

SEQ ID NO: 219338 - DNA, 3315 bp, Cannabis indica
aattatgtatcagtatgttctgtagtagcagcttcttcactttgttgtatggtggtttttaattggtgtaaatatcaccagcaagcttaattttctgtgtatattagggtcatttgctcaacaaataatataatcatttgaatctttatattgtgttaatatactacagctttcctctttcgatttcagaaagagaaaaagaatatatatgtttcgtattataataccacaatcaattttgttgtacgataaagttttgtggcgatggttttataaaatatgagacttgtttagaatcaaattttagatgagtggcactatcatttttagccatttaccattggaaacagacaaagatgtgttactgaatttaccaagattttctgaggttgctaccattgtgcttttgtgaaaaaaaaaagaaaaaaaagactaagattgggctatctatgtcgaataggattaaggtttatctaatctttagtttttacgtttgaatcatgaaaagatgagatgcttccaaaaaattaacaactacagagtaattttacacatatatttataaaaaagatgaaccgtgaaaataaaaataaaaaaactatctttctcatcttgtgctccatccacattggcatatgcattagcctgcccttgtatatatatacaaaagaaatttgtattacaatatatctacgttgatgatcccaaaaatataaaaaccttacgagttatgaggaagaactagcctcaatgctagtagaagaaatctgctgatcagcaagcaattttggtttttcttcaacccatttgagaatctcgccaccatatctaagagcttcatctacagtatcgtactccaatccattaattaaagagacaaagagctttctatcagtcaaagaatggaacaatcttttgaacttcatggcaacatactgaaatgctctgtgagccaaagtggtgttattagtgttagtgttgctgctgctgctgctgctaggattggagctggtcactggctggaagtcctgaaaccattcgcaggtggaaagtgggcaaatcgtggcacactcaatcttctcctctagcagatcatacttgttgagtagtagaaggaattctttcttctcaaatgacgggtgagttactatgctttcgaagaggtgcttgctcgccatcatcttgttaaccaggtctccatttccatcatctacaaactcatcgtagtccgatagagaaatgcagaacagcactatgtctacgtcttcaaacatctgaagccacttgcagttttctcccaagcttcttggatgaactcttatgagttggcacctgcagatgacatgcaaagtgtggctaaagcttaagattgcgacagagtagagttaagatgtctcactcctgattaccaatattggacatgggcatggcataataggagaactaacctcatcgtgggatcactatgtgaaagaccgtccaccatgctctcttgctccatcttttgacatgaaaactctaccgaagcgacaccgttggatggggtcattccctcagcatacaagatatccatgtcagagggagtgtaatctgctcttgaaatctcagcagcctgtagaaaaagagggcaatattctagattaatgaaagataagtttgtgctaaatatgtggggtaacactatcaacacataatagagaacagccaaacggttttttcatgctagccaaaatgtggagacgtttgttttaactttaatctttggctacttgctgaaactaaaggaaagttgtcataggagcgtaatctaacccggtttaggaaatatgaagcattttggggaagcatttcgagttcatttcttcggttgtatgtttcttgaatggctgggtcattccacagatcctcaacgaactgtgcatattcacgagtagcagctggaaatatggcgtccaaattacctgaagccatcactttaagcagccaatctgagaaagctttcaatcgtttgccaattgaatagatggtagtttgctcagtctcccctgtaacctctgtagttttaactagataagttcagatattactccaaatttccaaaacttagatcaagtgtgttttttaagtttgataagatgaatggtactaaataaaatcaaagaaaaatcaattgtcattgtactgtacctgaaggaccgggttgattgagcttttccttttccatctcaaacaaacattcctcttcgaatctgtctcgtccctctagcagtatgccaagatagctgtacaacttggcttgaatcatccatttaatgctttgcctttcgtcttcagtgaatggaacattgtacagaagcttagcctgcaataagaagttgatattagcttccattagttctagcaaatacaaaatcttgttgttctttctagtagtaatcttcaaagtgaactgaagaaagagattcttgattgttctacttctgaacatgagtttatatttatcccggatgcaaatgaaaaagagagttgtattcatcataaccaaggatcttaatgacataaaccatcagactagcacaagcagagagcaacaactaacctgtttaaatattgtacttgttccactccgatcagaacccactaatagaaacttgtaaactattttctcctcaaactgatttggtgttgtgagagcggtgtccttttcttccgttgatgagttagaaggatcagaaggaattggcaaagacaagacagcacaagctatcttgactgtaacctgttgagaccattatgtaagctccacagatcattaaagtttcaatgtacaataaaaaaaaaaaaaaaggtttcatgtacaggattaactagcgaaaacaaacatctactgcgatgataataagaatgtactgcaaaagccttgtcatttcaaaagataaacagcatactttatcccatattttgcctaggacattgttcattccttcttcttgataggacccatctcggtctacccaatagtgaatatttccctcacaaggcacacctgccaactgcaatgaaaaccccaaaacgagatcattattgcaatggctaaagatgttgataatccaatttagacagcaatgatattttgtggatgaacgaccatacctgcagtattcggcgctctattttggtaatctctctattgtttatcataatattggtgttcccattgctagcatttttgttaatatgacccccaatgttaagctggggactaataatttggttatacactcgtccttgctgttccataaagacacgtaatgt

SEQ ID NO: 219339 - DNA, 2502 bp, Cannabis indica
ctttaaagaatatcctattacttaacaggatattctttattaattttacaatattacatatatatttaaagatataaattatgtaggtaaaaattatatagatatttgtgttaattactcctaaaatgacatgtgtcattttctctacggtctaattttgaaaaattattaaaatatatttaaataaacaactaattatataaatttagaaaattaaatttaaaattaaaaaaataaaactaacaatttcttttaatactctctccctccattctagatagagaatgacatgtgctcttttagaattaattaacaaaattattaatagatgaacctacataaaaatagaaattgggctttaggtatttttactgcaaattttaacactcggtgtttattagcaacaagtaaaagaaaataggtatttatgccacaaatttcgtattttatattaagaaatttaaatttaaagtacttaaaataattttatattagacaattctactcaattggatacataacgattcataagatatctcacttgagttttgttgtacatatataataaatatgtgtataatcacatctaaatggcacactaatgtaaccgcaataactaaaaaattatcaaagatgtaaatattttaaaaaaattacattacttaattaaaataagttaaacataaatgtattacacttagtatcacctaatcaaacttaattgaaaaaagcaaatgatacgtacatttgacgtaatatcaacctagtatacatataactgaagagaatttctttaaacgacacatgtatatatatataatttagtaataacttaattcaagatggagcttgtggtggaattaaaccatcgccccttagttttagttttctataaataaaagatcatagtttatatcatgtatcatagataaaagtattaagcttacatcattttcaaacaaatattattattaagtagcagggtgtaataatttcgctgcgaatttctagatattaattaacagattttcattattaacggtgaagcattaactacaccaaagcactgcataaaggcttttacagtaaatttctctagctataactatattaaaaagaacaatataattgtagggacatatataattgagttttggcagatcatatctctataacttgttttcttttttcaaaaataataaaaaaaattattttaatttgttactgaaaagaaaaggttaaattattcttcggcttagttctgtccagtaactgagtgacttcaatcatgggaagatttactgcgagaatgaaaccaaaacacatgagtgtttttgtctagtgcttcagtactactaccgatgcaaaaagaaaacttttccattatatatttttagcagcaaatcgacaaatgttgtttgtttttattggtaatgctgtcattaattattaaatttgatatttaaaaaacaaatattaaaatcacactcattcaaaattacttatgagggacgataaacaacgaaacatcaggaaagataatggaaaatgtttataataaattgcaattttttatccaatccttacatttaacttaatttattgcagtgtataccctttcaactaaaactatttatattagaacccttggattaaaagatcatgaaatcatataaatgtgcataaatcgattcaatctagtaacaatcgaccgccaaatatattagattttcagagttagttttgagttagttaggatattttggttttgtccagctgtcatttgttaatccagctgtcatttggttgttgattgttgctgcattatttgcttctttgttactgagtataagtaacaaacattggtgactgtattcattgattcattcaatccaattgatatttttcattctgtttttctctgttttcttcttcttgttgttctagctcactgagctgttatagatgtctaattgttatctgatcggattagatgttattttagagaatctaattggattggattagatgttccatggggtatccagaaattaaatacattcaacatctaatcgaatcaattaatatttttatttactttgagtaattagattttaaatagtgtatatacatgtattaaaattaacattaaaattttactctcttttttgggattagatggatctattccaatccaatacatactgaatctaaaatattaaatagatccaattcaatctcatcaaaaaaatactaggtttaaaagattggataaacccaaattaaacaaaataaatatacatgaaatgcatctaatggatataatcgatcgaatctaatatctaaatagatgctggatcgattgaatgactgaaattaatttaatcagattagatgacaaaatctataacacccaatatataattggatcaagatatggtctaatgaacacctttgtttgaaagttaaattttaagaaaaaaagaaaaaagataaaagaaa

SEQ ID NO: 219340 - DNA, 3185 bp, Cannabis indica
ttttaaaaaacactaaccaaacacgacttgtacgttttgaaaacttcaaaaactatttttttgttcttatttctaaaaatacttttttgaaacaaaaacaaaaaacaatacaaaacaacgctctaaaatattcttatgtcaactcatctcaaataaatttcagcacctagaggatttgctctctctctcaacttcatttttgtctctctctcaacttcatttttgtcctagaaaattagagtgtgaaggagggttgtaataattaaaagggtttctacactagtctacataagtaaatctacatatagagatcttacccaaaagagaaaatgatactttagaacacttcattacatgaatgatcacatatcaccttcttatataatttgtaatatataggtaagattaattaagatcattaacaattatataattatcactgcttctttctttattacataaatgatatatgatcccattattaaagcattactactaagtttttttttttttttttttgatatttcagtacgtacgtatcttaagaagaaagcaaagtttcattgatttcgtgcaagaattaattaatttgtgaaaagcctgaatttttgcattatggcgttattagcacttgtttatttatttatcctttcttttttaatttattcttaaagaagcacctgtttttttgggtttaatcttttgcattaatttttttacacactttatatttaataaagttatatataactgatgagagcataagatgttacgttaaagaccaagaatgtatcacgtaaaaccttatcatcattttagtacgtaatccattcatttttactaattaattaataacacactcacattgaacgcatgtattgctatactcatcattaattcatcatcaacaacaacaacatacaaaaaggaaaactttacactaatgttatgtaactaagaagcaataccatcctttaggacgtcccattagaaaaccatcaccaaaagccctaacttagggggtacaatacaatctcctatgacaataatgttcacgaaggacaagcaccaagagagcatgacccaccactataatcagtcaatgttcaaaactgaaaaagaaaaccaatttaaaatgtcggttcgaaaccaatgctacttgtgtcagtttaatattgatatttctgactttgtcatcaatttaaaatggacgcaaaatagcgtcattttaaaattgacacaagtaattagttataataaaaaaaaaatggaaaacttacaaaaatactggaatttcggttaatttttacaaaaatactgtcacacggaaaagttttcaaaaatactgtgtttttataaaactccggtaaaacacaaagcagaacaactctaaacaacattagaacaactaaaaaacactagtagaacaccagtgaaaacttaacacagtatactgcagtatgaaacttataaaaaaatacagtaaaaaagtaaaaaataccgcctgacagtatttttgtaaaaaaatagcaaaagttagtataatatgtaaacttccctaaaaaaatatatacaaatgggctaaaaaagcccattaacctattattaagcctaaccttaaacttacataggcctgttgctccttacttttctactcttgcatactcttcttctcatcccattctctctctctctcttaatgtttcctcccccaatctttctttgtttttcatgcggccactgttaggtttatttttaagttattttagagtttagttttaggattattcttaatattttttatgttttattgttcaagtttacgcttgttttttgcttttatgttaatttcaagtttaagatgaagagagttgccctttttggtgaaaatatgttgtttctcgagttttttagtgatgaaaatgatcaaattataaattttgcaaaaaggaacctccagattgaatttcttgacttggtgcatttcggaggattaaaaattcaagttttaaaattttagcatcaagaatcgcgactctccaatcgttacagagagaaaatttgagaaaaattggaaagtcacgatctttccttaaaagttgcagcgcttgaatgaaataaaaaaaaaatcattgtttctggataaagtcaagcgtcagaactttccctagagttgaagcacttgaatatttttggtaactttccaattttaataaaataatgaattggggctaggtttaagggttccatatgattttttctagtattggcgactaggagtggcgactggagaaaggaggacacttggagactccacattgtgttttatctcttctatctcaatcttttatatttttgattgaatctttagatgtaaaagatgattattatgagttaatttcagttttagggttgttacgtgactcacttgaatctcttttatgaattaatctagttttcaatttcttcttcatcttttattcaatttcatacaatctatgttaatttagcaattatttattggccatttatcattgttgtttatgattttgaatcaaatctgaaaagtgtgatttgattatgctatggttgttatggatgtaatttaatttagaacgaaagtatttaagtttattgtatgattattatgagttgctatgtttattgcttttttagtaattaaacttgttatagaaatattacatagacgactgagtttataagtcttaaccaattataaactactaaaatcaaattttcaattgattagaaggaagtataatttgggaagttaaattgcattaaggtattaaaagagagaatatagttgataaacataatctccctaattaatttcttattgttattttcttgattttttattgtctttttgctattatttttcttgctaaaaatatttaatcaaatagaaaaaaaaattagttgattagtaattaatactcaatcattgtgggacaatacttggtcttacaaagatttattataaattacgactgtatgcacttgcatatacaagaaatataagttttagctactacaaagttggtagcaaataatctatatttggtagctaatactttttttgctaccaaattttttggtagcaaattggtagttgtatctcggtcgctgaaagtaattttgctaccaaatgtttggtagtt

SEQ ID NO: 219341 - DNA, 3142 bp, Cannabis indica
caaaccttaaccacatatatacccctgacattggttctgctatcaatacacccattcctattacaacctattccccaaatttcatgcctaataacaccatcagtaatagcttgctacatgcctcttctacctttacgccttcacttttaaccactccaccaccacttatttccacaacttgtaacaaaccagaaactaataaagaaaatctcaatcccaataaaaatttcaagaggcatacggatgccccatctatgagacaaatacttaagagatgctgcaaccaaaatagcactgacgccttcccttcctcgtcaaaaggggacttctcaaactagattgtttcctccacttccaaggattcaaatggtgactctaatgactctgcggagattgttttgcactcccgcaagggattatgaaaatcttaagctagaacgtgcagggattggcaaacccgagagcattaagacgtctcaaattgcttgtttcatagcaatctccccatgttctctttcttatggaggcaagactcaacaacaattctttaaaccgcactcgacaatccttaaaattcactcatagtctgaaggcaccttagataggactaagcggaggccttatgcttttatggaaagatggcattgatgtaaacctcaatacctttggttcttgcttctttgattgctttatgactgctactggtagacaacaattccatttcacaaccttttatggttctcctgtcgtacaaaatagaacagattcatggactctactccgtaaactcgtggatgtggctccattgcaaccatggttaattattggagacttcaacgagatattatcaaatcaaaataaattagggggtaccttgcgcagtgaatcacagatgactgcttttaggaatgcccttgatcattgtcatctttttgatcttccttttcaaggtgataactaaacttgggcaaaaaatagaataacagttaacacattaaaggaacgtctagattggtgctttgtcaatgatgtgtggaactcatcttttaaccaacctaataaagtgtctcacctggactactttaactctgatcaccatgatatatcagtatatgtctccaacgatttggcccctcagcagcataaacggcacaacagatttcgatttaagaaattgtggttatctgaccctgaaagcaagaccatcatctctaattgttggtcggctgatcactcatcaaaccctattaggagtgtgctcaataatttggattcatgtgttaaatctttgcaaaattggcacattaaaaaatatggtcgtatgaagaacaatattctagttgcacaaaagaaagtcgacactttaaacaattctcattctctgagcaatgaaacagctgctgctctaaaatataatgaatccattcttgatgatttgtcagaacaagaggagatgtactggcaacaactctcttgaattgattggatgcaattaggagataaaaatataaaatgctttcactctaaagcctcgacaagaaagtcaaacaacaaaattgctttcctcaaaatagaagatggtataaaagttacttccaaacacgacatgagcatagttattcaagattatttctccaacttgttccaggcttcttcaattgacaataacgctcttgctgcaactttggccactatcccaatctctgttactttggatatgaatgagactcttctcaaggcattcacataggatgatgttgaactggctctccattctatggggcctaacaaaagctcaagaattgacagaatgtctgcaatattctatcaaaacaattgggatgttgttggtaacatggtgaccactgctgttttaagtgttcttaatgatggtgcggatcccactccttttaactccactatcattactctaattccaaagataaagaaggcacagtacatgaaggatttcagaccgatcagtctttgcaatgtcatctccaaactgattaccaaagttctagttgctcacttcaagaatgtcctaccacatgtgatctcaaaaacacaaagtgcattccttccaaattgacttataattgacagtatcttggtggcttttgagctaattcatggtataaaactcaaaacattaggttgaaaaggagtggctgccatgaaattggacatgagtaaggctttgatcgggtcgaatggaattttatgaaggctgttatggaacgaatgggatttgttagttggatatcccttattatgaattgcttgacaaagaaccatttcactttcctcttaaatggagagcttactggtttagttacaccaacaaaaggactccgacaaggctgccctttgtcaccttatttattcctaatatgttctgaaggtctatcatgcttgccgcagaatgaggaactactagggcatctccatggatactcactcactagaagagctccaccaatttcacatttgctttttgcacatgatagcttacttttttgtaatgctactgacagttcttgccatgctatcaagagatctctagacacataccacaaagcttcgggctaggttttgaatcctgacaaatcagttctatctttctcaccaaatacgactttggcgacccaaatttaattccatagagtgttgtctatgcccatccgagattgccatgaaaaataccttggcttaccagcatatactgatcgagataaacaactcttatttagtgaggtcaacgaaaagatatggagacttatgagaacttggaatgacaaacttttctctgttggcggcaaagaaatactcctcaaagatgtagtgcaatccattcctacttatcttatgagttgtttaaagttaccaatcaccatttgcaatcagcttgaaatgatgatgtcaaacttttggtggggatcgaatgagaatggcacaaaaatccattaacgtatctggaaactctttacaaaaataaatttgatgggggtatggggtttcggtcatttgtacattacaatcaagtgttactagctaatatctctagatcgaattattattaagttttattttgataaaaaaaaaatcagtttaatgtcatatttgcacaatttgaaaaaaa

SEQ ID NO: 219342 - DNA, 4628 bp, Cannabis indica
ccttaaactctttactttacaagtttgattatatactatcattattgcttgccatattacttgcatttatttgattaagtgtctaattgcttagttttgtgttaaaaattttaatttactgagctctaagtaatatcataaaaaaataacaaaaattgagctctaagttattagtttgtactattttgaaaaatattgttgacctcaaatttggccaaccgactataaaattgtatttattacaaatattaccatgtgtacacaataagaacaggaaagtaaagagacataatatttttacagaggttcaatcctcttagttaatgagtaatgacctattcctcttttggttgtatcaataccagagataataccacttagatcacaaatattgtagattctgaaatggctttcttaagattacaatatgatatcagttggcaaatctcaagtgaaaatgatgaagagacttaattattctcttctacaaagcttggggcgtgtagaagagagggagaaagggaattagggtttcatacttagagtttgagagctttagggtgcttgagacttagcctctttaaggttaggttaatgctctttataggagaccttacaagagaatataacctaatatccctaaaaaattggaaatataactatttgtcatataaataaataataaacaataaataggttaattgtcccctaagaattaataaatagttgatatttatcccttatatttattatgggctgtttaagcctaatatttcgtagcttattggatggcttgtcctggagaatataatctaataatcctaaagaataggaaatatataactatttgtcatgtagattagtaataaataataaataggttacttatcccctaacaataaaaaaatatttgatatttatcctctatttttatgggttgttgaagcctaatatttcgcagcttgaatggttgtcccggaagcaagttgcatatcaagtgcttgtaagggtcaaggctacacatcaagtgcctgttgtagggtgcaagttggccagccaagtgcttgccaggagatatgctagccgacccttcctttgctagaggctgggtggctggcctatgctggccatagggccagttagaggtccgaccagacctctccagatggccaaatcattgtcccttcatcccgttgaagtattcagacttctagtcagttaatatgttgtgtacgatgacttgactaagttgtactccacgtgaaattaattgatcttacccacacagacaagtcactctcaaagaaatataaaagtaaaattttccaattttctatttgacaaaactagttgctctttttcctttaacctacaacatatagtcataatgaaaatagtctattatgactatgtgtacctagtttggtatcatgttgggtggttttgcatcaataaatcactatatattatacatttgtttttgttttgatgaaagagaactaattctggtaagttaaacggtggtcatcttggagaattgacaaattgggttgacatgtgggctttatacaaattcactatatataaatatttaaatattttttttcgacaatatctaatctatacacatcctataatataatctacggtatggtattgcttctacacctgattaattaagcaaattaagtgtctctttcatgaacatataatatatatttattctaattaaatagttacatataaattacaacacgagaggatcactgttaaattattaagaacgatacaaaataaaaactaactagttatcaagtccagtcaattcaacgacctaattaacgagattgtaaggtattaaaccacaaacaatacaaacaattaattataactaacttactcagttcacaaaccattatatccattctataaaaccctattccccagttatgacatgtactcactcaactcaactcaacgattcttaattcttaattcttatttgcctttctcatatcgagttttcttttattcgaatataatgtcagatattgagaaaccaaccaccgatgaaaatgggccggagtctgatgagcccaaaagccgaaaagccttgattttgaagatcgtagcagccgtggttgtcgtcattggactcaccatactattcttctggatcgcagtcaatcccagaaagatgaaattccacgtcaccgaagcctccttcactcagttcagtctctctaatgacaacacaaatcttctgtacaaccttcgcctttcagtcaccgtacgtaaccctaacaagaggataggcttccagtacgacctagtcgagacagaagcttattactacggcgagaaattcgactcggggaatcttgtgtcgttttaccaacccccgaagaccacgcgggttgtcgacacgtggctttcgggacagggaaaggtgacgttagagtcggaggaggttgtggagtttaaggagaggaatggtaattctggggtttaccctgttgatttgaagattcatttctatactagtgtgagattgggaagcatgaatattggtgattttaaggttaaggttaaatgtggtttgaaggttcctttgagtggtactagctctactgcttttaatcctaccaagtgtgacgttgatttcaacccacttctcgtcatttatactgactgatgagatcatcaaatgtttctctccctcgatatggaatattattattatctgagtttttctttatatatttaaatgtttgtactaggtaatttaataatgtgttgtttttactttgtttattaattattgatcgaagattcattgtaacggtttatatatatggtacaaatatcatatatatatatatatacatgtacttgttgttttgtatttataatttatcatatattgattattaatgttactgctgggtaattaggaagtatgttcaagttcaatcatactggttttttttttttttgaatggatactggtttttcattacattaaacataatatttattcaataactagctgcatggttattataacgcgttatttcatttctatataacaaagttatattaattattcacatggattaattagtagtacttttcccatcatctctgtttttcgttgttcaaatcaaagtttgtacaagatccctttgacaagcacgctagaagtttggccagcgagactgataattcgtgtattaattatgttaatgaacatgattttaattaagcggatatacttgcatatatttatatacgtaattcgagtattcttaattttctttcaatatactatagcagcgttatgtgttgtctaaattccataaacaagaggagctcttggctctattgagttgagaatcttaagatttcaatatacatatatattcatagttttattgtttatttggttggtattaatttagttgaaatatatatataattataagttactattttgttatataattaattaattaaataaaaaatatttaattttttttaatactattttttcagtgggggctactttctttactgcgtccgtccctgattataagcaacgtgcatttcacattgctacacgtctatataaatatataattcaatatcatttgatcataatatatacttctactaatatctatatagctagctaataaatatttttccaacaaactcaatttgaccttctctttctctcacattcaaatgaaagatgatcagaaaaacaaactacaacttcaattctccagacccacacaccaatctgtcggcaaaactccgtttaccgcccaggccgcggcgcaaactccgaatgctgcagccgttgctgctgcagctgcttaagactactcttcctcatattagttgtcgctatagtcctaacaggcctcgccataactatctcctgcatcatcataaacccacaccagatgaagttccacgtggcccacgcagccttcaccaaattcgattacgtatcagccaagaaaacccttcacttcaaacttatcctcaacgtgaccatcagaaatcccaacaagagaattggcatccactctgattccagcaccgataccaatatctgcgcttattacgacgacaagtttctcggagttggcctgtcgaatctgttgtcgttgtaccttccgccgggggcgagtagtccctttgactacagttgggtgtcgtttgaaggcatgaaaacggtgtcgtttgactctggtgagatgaagaggtttaatcgtaggaagagtgatgggattttccccttatttattaaggtgaagatggtaaatagttttaaagttgatcagatgcatattggggattttagaagcacggtcaagtgtcgtctgaagattccctttgtaaacggtactaataatagtaatgataacaggtttaaggccactaaatgtgtgtatcatctaaatccattgcctataatttataccgaatagaactattatttgtcatgtctacatgattttgaaattgagatataattgtattgtactctaatacacatttgtataacttatgtttatataaaattatgtgtatgcaaaaaaaaaaaaataaaataa

SEQ ID NO: 219343 - DNA, 5751 bp, Cannabis indica
gtttgcttctcttgtggcttcgaggctccttactgttggctatagcaccagtgttatcacatagtaaaaccagtagtttttccattccaggaacaatgtcgagttctgagaagagctttcttagccagactagttccttagcagcctcagaagcagctatgtattcgacctccatggtagagtttgatgttgctgttagcttagcacttctccaaacaactgttccacctccaagagtaaataccatcccagatttagacttcctgtcatcaagataagcctggaaatccgagtctaaatataaatgcttcctaaagtatcctaagttatatcaaaatataaatgtttaaattgtaaaataaaatgcaataaacaaacatatttagttcaagcataagatacgaggcattaaaagtaaagaaaaatatataataaagcaaagttggccgtcctacaatgtaaaagtatttacaaaaataatgccactaggggcaaccattgtctcggccaaatgacaatttttctaaataaaaaaatatataataaataaaaaccaagtctacatggtgggagacttggatggatcttcttcttcttcttcttcctctgagtccactgcttcatttttcttggtcttctcgcagtaagccagtacctccgtagcaccctcaccaaggaagctcaagtccatgttaggattggctagccatgctctgtaaatggatcattttgcaacattgttgcatctctccttagcatcagcctcgacaccctcaagctttacctttacttcattgagctgttcctagagtttttgggctcgtgtttgtctttggcttctttttgggtagcctcgagctcagccttgtggttcctctttagttcctcgcatcctttgttaagcgtgtgttctccttctgtgaatcattccattgctttgagatgacctcgcgttgctcaatggatttatagagttcaatttccaattgttggactttctgaaggccctggtgttgtgcctcatgagacagaaaggatgcctacaaaatatatatataaatttgaaagaaagataaataagaacaaagagaatgaagaaaggaactagccaaaagactaaagttgagactcctctcaaacaaactcctcgaagctgccattgttaaccgaatccctatcgccagaataaaaggatttgaaatggcaccaactagaggtggcatgttgcgagcagaattgcgagccgatacttcctgcttcactaggcaaggggcaagaagattccagcaagaccatttcaggtcctttactcgaagacttagcctggtgagtcaaaccttgggcttgctcgtcaatatgtacgctagctgaagtttgagagtgaacctgatcttcagctggctcaatgattatcggctgcgagacacgtttcttgttagtagtggtcttcctagatctcttcatgggctctggatttattcctgatgaagtttctgatgcaacaatcctcttttccttttcttgtctgaggtattaagaatattttccaaatccatatctacgagacaaagaagaagattaatcatcattcaacaatataaaatagaaaggtggggaataaactcccacttaaagaaaagttaccataatcatcagatgaagaagaggaagaactatggtaattactaaaactccctagaccccggtgatcatgtatatatcgtaagggtttattggagacaaatcccaatctgaatccagatgactcgccctatccaagttggtaccatactgcttggtaattccaaagtaggaactagtgcaactaagttggacatgaaattgagggtaccaaatatcaaacctttgtttgcgatctatacaaaaattatcccagctataaaagttttattggctatccttaaaggttactaatgaggtgtgtgcggtcctaagtacagttggtgactatccacattgattacctgggggtgcttcttcttcagcttcccgagggattacttttttgagatagttagtgcgagccacataatctttgtcttccttgtagacaggaactgaaactttctgccacttagagtatttcggaactttgtactcgtaagtatattggtctgagccaaggaggttgacggtcctcagattggtcttattcaatataaaatctactgatttaagtccaaatggaagacctagcaaaattttgtgcccctcagccatctcgagggtagggattggtcttctagtgaccgctgtcaacacaatcagtgaaatatgtaagcaacctcaattttacaaatcccaaaaaaaaattgagaaagagaagacacttacgtataatgcaaaacgcagttgtgttgatgggggagagaccagtagtccagaagaaatcatccttgaacttggtcttgtttggtaagctcacaataatactaggatcacttgtgtgagtaccgaggtaataaaaacctcctaaactccgcttccttacgggaacagcttttactgggtaaaagtatacaatttctaggggagtaggacactcccaacccaaaatgtgatataagacctttaggcaggccagaattctgtaagaactcagaattaactggaaaggagcaattatgagataattacagaactccttaaagtattccctcaagggaagtactgccccagccttgatgtgctgcaggctccagtcgccaattcctgacgaggcactagtattggcttcgccacattcctcttgaatcaccctttctggtggaaagcagatgaattcccctggagcaacagatctaatgtgacatcctcgctcttctttaaggccataagattttaatacatttccgatataacctccaatggtccttactttggattcgatgagcttggcctcaaaagtgatggtgggatcttggggtgtctttcatgtaagagcttgggtagacatgatctcaaaattcaggtcacctggtgaaaaaacaacaatgactcgaggtaaaaataggggtctcgctaaagggatagaagttacaattcgtgatcctcgccaagctgcatctcgcaaaaaatggcgtttaccccggtaatctcttgcgaaaaccggctataacagctgtaaatttcagcttgatgggtttctaataaatgatccctaattttggcatcatttatttcaagtttgaatttaggtttttggattttgggtttaaatggaaggtctaattttttaggacatctgttagtaggaagtctagggttggaatttcataatcaaattgggacatatttgctaaaaataatcccaatttctagaaaaggtaaattccacttaaaccagaaatctttgaatctaataaacctaaagtttttccttaaccctaaaattatccaacaaaaaaaaataatctaacaaaaataaataaaaaagacaatcaatcgcaaaaatcaaagtgtaaatatcaaaaataaaggtaccaatcacttactgctttgatgaagattatcacactaagaagaaatctgtgactggagttgagatgaacgaattgattatcctgaaagtttctgaggttaaataaataatctgatgaaacatacaagaagaaagtcaaagatagagagggcatgcaaaatgatgagggatcacatatgattttttcgcagaatgatttgaaggtttaaaaggcagtggaaaagtgggtgtttatatcctcgaattttatatcttgggagcaatcaccattggatcaaagcaaataagatcaaacagatgagaacatggaaaaattagaaaagacgggcatttaatgctaatgatatgcctcaaaatcctaaaccgccaaaacccaaagcatgcaatttttaaaatttgggttaagacaaaaatacccttaaaatcatttaaaaagctctttttaattaaaaaagaactttttaaggggcaattgttatacccaaaattcggctgcacttgaaaagtcgatacgtgtcctgcggtggaatatgaaccacttgatataataaagttatattattaaatgcaaaataaaatagctcgttgtaaatgtttaatagaaaatatacacaactcgctgactatatagtcttaagagagataagataaaaagttattaaaactgatatgaatgagacatgtacctgcctcggagtatatagtcaaaaagaatatattcatctatctgagtagagtaaatataatcacacggtgacctcggattacatataacaagacgggaacctcataatcttaactctaataaagaaacataacgtggaaaatcatctgctaacacttagcatttttttcacatcacggtggacaagggagataactcatgttaagcgagatataatcgtccaaatcagcattaactatcaaaaacgataagaacaaaaggtagttgagcagttaagcagttatcagatattatcccacatgcaactaaatgaaacgtgaaaattgtccatgtttcatgaacagttatattttaaactgatcccaagaaaataactgccaacctatattcatataaataggggtagattccacagaaaaagaaacagagcattttttagagaaattgtccatgttatcatgatgttgtattatgtactaaaaatatcattaatgagaaagactcgcgaagtatgcatattttaacaggaaaaccacataaaaatttctgaagttattaatttctaaattatttattattatttctgtcaaatttgtattatgtaaaggctcattaattttggttgacgaaaatctgtgttaacaaatattattttataaatatatatattaatctacacaatataaatacaagaaattaaatactaatatttttaatttttaaatataataatatatatgataataataactaatttttaaaaaattattactttaacaatttaaaataatgtaatgcacaattatagaatatatatcacaaaataaatttttaatggacagtggaggtggtggttcggcaaccatggctgggatgaagaagtgatgactggcggcttaacagtagcttgggtcatccgtgtagggtgatgtggactgtggagcaggagctccgattgtggcaaaaccaagtcgtacggacttgtataacaccaaaacaagctaggcagagctcaagggctcccaaacctctccatcttctcaacatgtcgttgacatcaactgtggaaccctaggtctagttgcttgtgttggaatatattttaccaggatctagatttactaccatgtatgttatttaacatcctaaatatgaatatctaaaacaatgtaaataaaaaaatataaagtttcagaaaaccttacattgggtgcagcggaatattaatggctcattctactaagatctctaacccttgtatcatgtctgtagcagagtatcaccaagatatgagcccgaatgtccttctcttgattctggattcttcacagccttacacactattattgagataccacttgatgtgtgtgggcactcactctatcactcaaggtatgaaattatgaagaaggaaagagaggggatggttcgaattcaatagaatagaaggcttaggaaaatttgactgaaggtgaattttcatcatcttttaagtgtgagccatcactatctatttaaggcacccacctatgttgaggttacgatttattaggcattaaataat

SEQ ID NO: 219344 - DNA, 3902 bp, Cannabis indica
tcattaatataaatattcaagtatgaatacatcagaacaattcaaaatcaaaaccaataaatattcaagtatttcaataaattcataaacaaataaatcagaacaattcaaaatctcaaatcaagaaaattaaaagtttagatttataatctttacaaatatgaaaaacttaaatagatttatctaccattgttgttgccgttgctcagttactggattcttaaacaaaaaccactaaaacttatataaaactaatatttacgtggctcgccacgtaactctcatctagtatatatatatactcttacttaatacaaaatatattttgctaacaatattaacatggatgaatagacataaaattgtcaaacaaaaaaatgcatcctattttttcaaaataatttcttatatattttcatctgtgatgaatttattaattcttttataattttttaacgttttggctgtccataaaccaaaatttcccccaccctgtattaaatatgttaaataatttttgaaagcagtattgtcccatgtgattggtattgaaaatttaacaatttatggtttgacaaaatatatgtttttcgattagacgatcaactatttttatttgagaagagtcatgcgctgattgcgaatttttttatcataaattcacatgtcaaaatatatatatgttaaataaaataagttatatatgtttataattatttgctccctaaattaatttttttacaattagcctcttgaatattagttatatggttaaggttgatgataatggtaattaaaagctacatatataatggtaattaaaatgagagatggagttagttttataattatttggttttcaagcctcaacaaacacctttcttctcattctttcttacctaacctaactacactacttaacacaaattaattacgtggccctttcccaaatttaatgacattaattaattaaatattgaatttaaataaaattaagtcattaacttttgacaagtgtccctaaaaaaacaactagtattaaaagcacatgagaactatagctaaattccaaaattaacaatatattttcttatttggcttcaattaacaatatattttctttttatttttttgtattaaattccaaaatttgtaagaaattagatataatattgaaatattaatacatatctaatttattttgataaggtgacatgtttattaatttatttataaacatggtctttatttcattatttttcgtagaatttttataaatcattatttttatgacaaatataatgaagcttatatatgaattaaaaataaatatttctattgataaatttttgcgaagtaacatttctattacattctacatatattgatcttgttgaacaaactctcgataatattattacaatattagtactattttgttaaaaaaaacatttaaatataaatatacttttcatattacattactcacccttttttttaaaaaaaaaaaattgtaattttaattgaaagtgaactttactcaatcacgtagttatcatgtaaacctaatatcctacctaatgcaatatttccatgtcatgtcaccttcaacggctataatttctccaaaccctttttcacaaaaaataagatttaaatgttttcctttatgtgttatatttatatatatgatgaaattaatattataattaactaataaagcaaacccttttaataaaaaagataagacaattctcatgttgggggagccaaaaaagtccctacatatttatgtcattttgaaaaattataattcaatttcttttaatagatggtgtatatagatagaaaattttattaattttcatcaataaattaattttaaataatttatagtatcaaaaatatagttcataacagttaattaattacacatgtagaaaaaattaattgtttaaactctacttttagcacgataaattattcaaaatttcttaaaaagataatttcggttaggggatttcaaagggtataacattttactaaattagtatgtaatttttatactatatttcactttaaagatatatcaaattttacactacttttaatggtattgaattttaaatttttacagcataattttttcttttcactctaactatttttttttatttattttaaaataatcataaattatttattgacaatatacataattatattataagttagttatattattagtatactaatgtaaatagtataaattattatattttttaagtaaaacatatttattatgttacatatttagtataaattgttagaggtgttgcactaaagtaactaaattttctataaaattaataaaagaaaatacatcaaaatagtacaaccgttcaagatgatcaaagtgtcataaatagaaaacggtcttacatgataatttttctaaaaagaaataatatagggaaaaagaaatttttttaaaaaattcaataaaatcactttctaaaaaaggtctactgatgcaccccatatctgttttggtatttgaaagaattttttttaaagtcgtctacgttatagttatttgattagggtatcctgtaaaatattaagtaatttaaaacaatttaatacattgaaaataaggttcaaataatctattttacaagtgtataaaataaaatagtcacttgtaacatactatttgaattctatttttagcatgctaaatttttttaaatctcttaaaattttacaaaatgtcttaaataattataacgtaaataattatacaaaaattaaaataaaatattcttttaaatatcgaaataaataagaatataacagtagtccttttattaagtgtgtatctttgaaagccactaagactagcttagtggtgagggagggataggaaaagggagaggtcatgggttcgaacccaggactcttaagctattaagttaatatataattgtaaaatgctattacgccacactaaaaaaaaaaaaaaactagtgtgtatcttaaaagtatcctaagctttttatgggttaatatcaaatagagaggaatatatatattatgagtttgattgtgtgaacaagtaagtatctttatacagatatttttttctttttctttttccttttttgtcaagtaagtacatatctttatactaaaatattatctcttttattttcttcatacttatctaattaagttgatgacctcaaaagtgaggtgaagccaaatgaagcaacggcagcacaaaatatccactaagtgagtccacatcataataagcctatactcttttcattggttcatgccaatctggacttgtatggcttcattaactaaaaagtgatttgggattagattttctactctaatagtattaactatagtagtactactacttaattaatcatgattaggtgggcaaaaggggtgacacaaaaattaatatattatatatatagatatagtgctctttaggcttttttgttctagagatattttgtaagtaagttgtttttattttattagtttgattagtctttgaatatcttttgatgattctcttgtatgatcgaatctgtatttcttattcactatggtgttagtaatatttcttaatcaaaatatttggtggaatcattaatatcttgttgagttggtaatgatcaaattaacatgataatttaattttaagtaatagtataattagggtattgtcaagttgggagattggcaaaataatttttactagctaattggacaataaaaaaaaagtttgatgagctgaatcgatttcagttattattattattagaatattttgttcacacgtacgagcgaaatgtacaaaataaatcagattgatt

SEQ ID NO: 219345 - DNA, 3630 bp, Cannabis indica
ttttggttaatttttacaaaatactgtcacacggaaatatttttaaaaatactgtgttttgtaaaacaccagtaaaaaacaaagtaaaacaactcaaaacaacagtagaacagctaaaaaatactagtagaacaccagtgaaaacttaacacagtatactgcagtatgaaacttataaaaaatatcgctaagcctgacaatatttttataaaaaaaatgacaaaagttagtataccatgtaaattttcctattttagtataccatgggaaaatatattgaatggttcctagatataaaacataggcccatttggaagaagcaggcccatgtgaatagtgaagcccaataagagtgttttttagaataattacaatgaaatattaatttttattcatttttaaattttttttttatatttttttctgcagtctataaaaacaaaagaaaacaaacctaaaaatattaaaagattcgtaaataaaatttaaaaacccgtaaaaatattaaaaaatacaaattgtatatttgtaattttttttatgaacaaagcccaaataagagttggtaaacatatagttaaaaaccagtgtgtctcaaatctatcttctgggtctcacatcacatttggtctcactcacctcttacttccactgtcgatcgatcacattaacattaccacagctttttcttttttcttttttctttctctctatatatatctaagatttttgtttatatacataaatataattatatataaagaaaaaatgtatgactgtctcttaacttaatttttttttttgtgttttttactttgatttcatagttgctgtgaattttttcttagtacattacatacataacaattacattcaattcaacaacagagctttaccatcatactcctcaatctaaaacaaaaaacataatatcaaactctttaatttttttcctaacaaattatataatgtaattttaattatatgtggttttattttttttttttaaaaaaaaaaactccaaaaatatcagcctaacagaaaaaattaaatttaaaacctttcaccaagatagaaacgacttgagcgtgaaatttggggaatattattttttatttctatctaaaaaatatatttcatatattatatcgtcaatattttgtcaaatcttaattttaattgattttgtataaagtcaacatttgttgatttacacaatattttaagtaatggaactattattttagttactaaattgattttatttagttactcttactcattatattgttactcaatttctatctttgattaagattcctgttttattttgcagatctaaacttagcaagattcaaattatcaacattaataataattgaaggtacacactttcctttgtatctatataacagtccatttttcattccacatgtatattaaataataataataataataataataatatttaatctttcagtaagtataaatatatatatataaataatgaattgaatttgtttatcaaaaaactttgttgttcctattattacaattaataatctctctacaaattctttaaattcgaaaaaaaaaacgaaatttggaattcaaatgatattagttccaaattaaaaaaatttcacttaattaattaatattaataaatataataaaatatatgtatactttagagtgtcaaatcttcttttttaattttttcaaaggtatatcttttttaaaaattgaatttatctttacggaaactaatcataattaaaatgtatatattctcgagtaattaatggctatatatgtaatgatgaattataattctttcttcttcttttttttcttcatcagcttaattaattgtaagtttagagagaaaattttatttcttttttttttgttagttttcaaaatattaatacttttcttctaattcatcaaaattatatatatttaaatgttaacaaactcacgtaattaattagtttaaatttgcagattaagtgggtgattaaaagcagagatttatcatgggtgcatcgctatgttgctttggttcatcaaatactaacaatgaaaaaagttttgtccctaaagtatgtgaatttaattatatgattttattttatattatatttatgatgattaaagatattgataatgaattaatcacaggtttccaatagacgtactactaatgttaatactaatggccaacaagcttctagagaagagattaagcccaaaactcaagtaattgtaaaaacccgaatttcgaatgtacaagaagaagaagaaaaagaagaatgtcctacttgtcttgacggtaaaaatattatatcttcgattgttttttattattatcgatgggttacattataattttttcttatatgatagcgtataatatagctaaaaaacacaatttttctaaaatcttattaaatatttgtagtgtgtgtttgtttcgattactaaacatttaatttttgttttaacagagtacacagttgataatccaaaaattatgacaaaatgtcgtcatcattttcatctctcatgtatatatgaatggcaggaaagaagcaatctttgccccgtttgtcaaagggtattattcataatcagtttctttctcttatttattttaatttaattgttattgttcttgattttgttgcatagaaacaaaagtaagtcagattagtctatttaatggtttgtctcaattgattttttttttctaggtaatgcaatatgatgatttagagggcaaccaaagatagaagaaacgaattaatgtgagagaataagtctaaattttcatcaccattcaccattgatcacttattttatttttgttgaaactattaatatggacaatcacaaacttaattacacttagagatgagtgattttggaatagtcttttagtttttgcttcaaaaatattgattggaaaccaaagcaatctattagctttctcattttttttataaacattttattattattatttttttaaaaaatagtatctacctaattatccaatccctttattttggttttattttactgaccattataacccatttttttttaaaaaaaaaaaatttgctgcacaagtacattacaaggtggtttgtattttgtatttataagaaatagttttagtgggaaattttttaagtctcttattgctttacatgtctaaatagttagacaaagattaggaattgggaataagtaatacgaaatagaatttattatctcctgtactaatgagaatgaaatatgtgttttttttttgaatagagaatgaaatatgtgctgatccactctactcccattctttttaaaattatgaaattttattttaagcttcttttaaaattaaaaaaataaaatccatataaaatatcaataagaaatatttttgtaacttaaaataatttattctcattccaaaattccaaaataacgtaaagaggtcgtttaatgggaatgctgcttatctggattccgaatccataaacaaattattttgattttaattgcttaattcattaggtggcgtttggttacaaaataaaaatagaataggaatgggaatgg

SEQ ID NO: 219346 - DNA, 3148 bp, Cannabis indica
gtgattaaaaataaaaaagttgtgactaaaaaatttgtgattaaaggtattagtcacaaaaattacaatttattgcgactaaatgtgtttttagtcacaatacatgttgtgagtaaaactaaattaatgacaacttgtatctaaatattatattttagtcactagtaactctttaatagtgcatttataaatcaatatttatatgtgtatacatttcaggtattgctagaggatgtgggtggcaacacataggggcattcataaatcttggtgcattttatctatgtggaattccaattgctgcaattttgggcttttgggcaaatttgagaggaaaagggctatggattggtatacaaagtggtgcatttttgcaaaccattttgctttgtcttgtaactggttttacaaattgggaaaaacaggtctacccttttcttcatctctattatatatgtatattttcaattcccatattacccttttggttaatagtggatttattaataatattcaaatgttgtttaataagactctaagctttgttttttgtttgttaatgtttcaggcaagtaatgcaaaggagagattatatggggatggaacaaagaatgtattagtgcattagattagctagaaaatactatatgataatggtagcttagagaaattattagcattttatggataatgatttataaaaagaatactatatgatattttagtaacattttgttaagttttttcggttatgatttaattagctcgagatgagattattaatgaatttgtattccatgtgagtgctaagtcaagagcatgatttattagaggagtttttacaaaaatatcaaattttgggtaaaaatttataattataattttataattaaaaaataaaaatagtaccaaataccctttagtgattatactaattttagaggaagtgcattgcaaaggcccaaaaactagtatatatttaaatattgggttgacacatgttattgtgggagccaagtgtttatattatatctctctctatatatagttgttagtataaaaagggtataagaaggtgtgagaaagatgaataccataaaccaaaccatggaagaagagagatcattattactaaagccacatattagtagtgaaaatcatgagattattcattggaaggtgttttttgaagaagtgaagaaattaggttacttaggaggacctcttgtgattgtggttttatctcaatatttattacaagtcatttcaattatgatggttggtcatcttggtgaacttgctctttcaagctctgccatagccaattctctctctgtggtcactggtcttagtgttcttgtaagtctctttttttatcttcaaaaatcatcatcataataataatcctaatcttaatttctttcttctatgaatgaatatttgtgtaattatgcataaattcatgaaaagggtatctttggttttgtgttttttaattagttatcaattagttaattgtaaccacatagttttggttacacttatctttacttcaaaaaattttatggtcattaatctttagtagcttttatgatatatgtattatattttgtgtgttaattcatagaaattttaaaaaataaaaaggggtaagtttagagagctttttgatactcctttccgttttgatatttagaaaaaatttataattatttaatttaggattgtatacattataattatttaaaattatttgtaaatactaaaaaattttaaaaaatttataatattaaaaatttaaatatgatgttatacattatttttcttataataaataatgaatcttattttagataatataaattatttaaaataataaattgaattatttttcttttgaatatcaaaacaaatttaaaaatttactaaaatattcctttataaatatccaataaaataaaggagaagaaattaaagtgtagaaaatattgtgatatatataggatatgattttgtcctgttattgtatttttatggattgtaatccgtgatgtacgacagccgtcagatgatagagtcatttgatctaacggctgagattgatttaggggtaattaggattaaaaagtagaaacgtaccctgacactcatttaatgtaccctgaaactcatctaatggacatttcgacgagacaaaatcatatttctttatatatatatatgagtgccgtgaccaatggctttagttttccatgtggaaaaactgttgtgagatgtgacatgacattattaatggacaactttaatacaattcttatatgtttttctttttgatttggtcaactttggtaaagtggaaaagtaagacttgtctaggtgaggagccttgtcttttaactaataaataattttgtcctaactaaatacaaagtttaaatattttagaaataaattttgacttaaattagtttttattttttaaaatattttattaaatttcattttatttattttaaactaattataatttttgcctcctaaatttaaatatatattaaattatattcttttttgactattaaatttttttctgaactattgagattattggtttgaaggatatttatctaattttattcaattttgttaatttagtgattgtactaaatcatgtttcccagactttgatatctaccaaattatgtccctcaaactttaatatatacaaaatcatattccctgaactttcattcacattagacttttcttactaaaattagataaaattccttaaatcaaataatcttaatagttcagtgagaattttaacgaccttaaatattcaggggatatgattcgatacatgtcaaagtttagaggataaaaaatcttaattagctttttttttatcttacatttttatattacaccacacatcaacttctctatattttgacgaagattaattttatgtccttgagctgagcactcccaatagatgctctaaactcgatctttctctgaaataaagaagaaaagatacacatatttgtattctaaatgaaaaaaactaaaagggttttgcaatttgtatgttttgtacacagatggggatggcaagtgctctagagaccatatgtggtcaagc

SEQ ID NO: 219347 - DNA, 5039 bp, Cannabis indica
gtcccggttcgagtctggatccagttcctagtctgggtcccaggtcccgagtctgaggttggggtctagggatgggtttgggtctagctcaaagtccaggtcggggttagggttggggtcgagtttattgtaaacatattataattttacgcaacctattaatacaattcaaagaagtgttgaaacatattttctcagcatcgaaatatgaaatgcattatgcacaactgatagtgttggtagtaaggctagccgatacgctacctgtccaaccttctcgagtgtcttgaatggccctatgaacctagggattaacttgaccctcttcccaaagcactttgcacccttcattagtgagactcgtaggataacatgttctcccacctaaaatctatgtctctgcactgagaatcatcatacttttctgtcaacttttcgaagcaagcattcgggtcttaacctttttctatttcctcactagtctgctgaactaacccaggacccaaataattcctttctctggtctcatcccaatgaactagggaacgacatttcctaccatacaacatctaatagggagccatccctattgtaccctgatagatgttattgtaagaaaattctatcgaaggaaaatatttagtccacgaaccctcaaagtccacgacacaagctaatccttttaagggggggataattgtaatgaacgtgtacttagaatatggattagagaggcaattagcattaaataattgcattttatgattatatgtgattatatatattgcgtccctattttcaaggaataggcattaggattctaatttctcaattccaaagattttattaaactctaagtttattatatgtgctaaatgtaaaatttatcattatgatttttgctcggtaataatggaaatgtgatggatggtcgttgagtcacatgagtttgggttagaacctttgttttagcgaggtatatgtatattgatatttagaatatcaagattaagcagagttatagttttggaccattttactcctaagcctaagaatttcataagctttaagtaagtggtaattttggaattacccaagtggttttaggtttatcttttagtgaaggctgtagattttaattctaattttttttttaactaaggggataaagcttaacttttgttaagttaatcaaactaagaaaggaaaggcaaaacacacctcttgcctttccctctctcccatttcgactcaaaagaaaccagaagaactagaggattcttcatcaatctttaaggaatttcagtaggaatggaagggagattgctagccaagatcaaaggtaaatccatagaacctttttctttaagttttagaagttagtttttagttcaagcatgcaaattttaagattaggttatgtctaaaactagggttatcttgggttggtttattgtattatttgaagttgtttaaagcttatttgaggttatttttttggttgagcaagtttgagttcatgaactaaaagttgggttaaccatggtggttttggttattctgagttatacttgtgtttgatgcttgtgttatgtttattaggctcaaattagatgttctggagagtatcttgagatttggagtaaatttggggttattttgagacttattatttttctgcagcagaaaacgatagattgtttgtcaggaaacgatctaccgtttttactggcaaattatccaaaacaatagtctactatttttataaaacggcctgccgtttttcttggtagtttttctaacgtctcatttttctgtatttcattgatatttagggcatttccatgttatttatcgataggaaaacttctaattttgaggttagttccccgagaaggttttagcaagttgtttacccgatttacgtgattgagacatagggcctctgttcagcgcgtgaattttcattcagattgaccagcactgctgaatcaggaaacgaggtaagattaatgtaaaatgtgtatacgtatatgtgtatgtgtattatatgcatgttgtcttatgtgatttgtatactaccaacactagtacagtagcagtacggagtgcattggtacaatatatgatgtttaagggtacgacacggtgttgccaacactagtacgggacaagtacatagtgcatgtggtacaatacttaatggtactcgaggtgcggttaagccctaccaacactagtacgagatgagtacttagtgcatgtggtacgtgggtcatgctttggttaagggcttgcactattggatcaacttgacctgcctattgaccaacttatgtcacctgtggaatgcatagaacatcatcgagcacatagttatccatattaattggttgagtattaggaggagggttaaagtatttgtcccgacctcctcttctgtgattttgatcatctcttaaactgtttacaggtcctaacatgttgaagactaattcacttggaggcctttttgtttgtccgttatcaaaaattggttggtttggtatatccgtctaaggacagaaattatactggccatcccctccaagataatgggttggcaaaacttgctcgtctactgtgtggcccacagtctggtcctgtggcctcagattggacgacccattatcttgggtatattgagtatagttggtcggatgttcctctggcctgtattactgttcatttgggatacaggcttctctcctgtccatatctcgtatgagtggcgtatcttccactggttttagtctagttaactgttaagcacgcctgatcatctcagttgcttgcttggtgcgattatcaatagctgcttgttgggccccatgatttccatctattgatccatccacttatggaatttgagtttttgttgttcaaatgccaaattcacagcttgggtatcctcgtgatcatggtgaagagtgttggtatgatcttgcatatgccctaaggcatctcaataattttgcaactcagtatcatcaaaaatattcactcagggctctctgatagggggtcttcggtacctgacccagtctctccagcgtagtcagaactggcagttccaatttcctgtgcacccagagtgaaccttgtcagaggggtcgttattcctcgtcttactattggtggagctcgtggaggcagatgcgtgctcggataaggatttgtcactactagatctcctcagttggtaggagtttgcacattagaatccgtagcccttggatcagttggaccagtggattgggtccttgtattaacaaccattcttctgataactagtggagaatcaaaattacagaattgtgttcttttgctctcaatgaaagcatcaaaatgttgacattgcttttagccaatgatgttgagtcaattaaagcaatgagataataaataatgaataatttatttaagcaaataagaacacacaatttatagaggttcgatgtaacaccctgaattgcatgaacgccacgtgtgtgtgtgtgtgcttttataaattaatctataattaaaagtgcgatttatttaaaacatttgaaattaaactaaaacttgtcttattattcaaaatactgctagatttagggaacccctgattaaaagcttttacatcacattacaaaagtgcttttacaatagaaggttacattttcaaaacacagtcaaaagggtggatccagtccactggaagccgagacaccgcaattgatatggacatcgccgggagacctttgactcatggttggtctatatttattttcccttttacctacaccacgaagcacctgtgagtcacaaagactcagcaagaaaagcaaatgaaatataaacaacgcataacacgagaaattacaaaattgcataaccaacaaacttatcatccaatataaacatttattcaatgtgtattcaaacattacataaacaaatattgtctcataagacaaatcgactttgatgcttcatagaacatccttaccactcgttgcccacgagctacatatatcactatcattgcccgagaaaataaataagaaacctatctgcagttttaagcgagtaattactcattcacaataatagtaatgaccgtatctttactcattctcaataatggtaataaccgtatcttttccttgatcgtaatcgagccacacacgatgataattgtttcttacttaacatgcttagcagtgaaaatagattttcttaccgtatgtctaaagtcaggtgtgtgggttgacctgagtggaatgatgctcgacgatctagggtcctatgtcacgataacggtaaatcaataagggtctattcgaaaacactgtctaaaacccacataaaataacctagggttttctaccgaatcttatggtgaaaacaccctaaaataaaatacatcttttggctctaatctatgtctcatacggtaaagctcttcataagcttcgaaacgatatatagaatgtctaaaacggacacccgagtgaaaagttatggctaaaatacaaaaatcaacaattcttaaaaactcaccaaacggaatttcagttggtacaaccctgtaccatccgaaattccagttcactacaacagaaactcaaaaacttcagatcttcaaagtctcaaaacttgctccaaacctaaccaattgttcccaaacttcacaaaacagttctatatcatgaatacaatgtatacattcaataaaatctcagaaattcatcaagataattaaaacaccataattgagcaaaatttgagttcttaaactcaatttctcccaattcaattctaaatagccaattaatcaaccaaaacatacacataaaaacttaatttaacttagaaatcatgctcagaacctatctaagcctacaactctgaaatctcaaagaaaactaacaaaacctagcttaaaacctaggaaattcagagaggagaagatggaggattacctcaaggcttgagcagcacctagggctagc

SEQ ID NO: 219348 - DNA, 2951 bp, Cannabis indica
atttatgatataaacgctttttctcaaaaaaaaaaaaagcttctttgataaaatgcaaatttgcgagtactatttcttgcgagtgctatttttgttttaatcaatctagctacaatgatgttgtaaaaattcaatgtctaatgaataaatgcattgaggaaaggttgttggtactttattgttattgatcaattgtagctcaaaaacccgacgacgctcttaagcgctgatgcttagggacaaaaacaaacttcaaagcttctctctacccactaagaaattgatgcttggggacaaaacatcagaactgaggcatctctgagccaacctttcaactttccacttgcctgtctagttctttctaataacaggcaacttgtctggttcccaacaacgtcaagcactaatcacatctttgatcgatgaaagaacgacccctcattagtaaggtttgactcaccaatatgatgatgaaaaatatgatgattaatgatgaagcatcgtcaaatatcctatttaaacataccctggaaaaaatgggtttgtccttgcaagaatctcagaccatacaaacaactaatgtatggtttcagcagagctgacatctctccctatggtgaaatcagattaccactaataggcaaaaaaaccccacaatagaacactactatgactacttacatagtgatcaacaccaagtctccttgaaaggtcaacaccctacaacctccgagccatctcatctttctaccatctgtttatcaatttattgacagcagctggtattgactgtcaccttagaaactaaggaacaacatgcgaatgttacaacacatcgttgacattcaccaagaagacctcctcagctatgctaatggctgaggagatgaagaagccctcctctgttgtgcgaatagctgatgcctgatgggatgaggaagacatcatccactatcgagacacccgaggggacgaagaaggcctctttcactgtgaatatagctgaaaggatgatgaagacctctatggttaagactaaggaaaaatggagactgcacctacaatcacttcaaggtgcatctgaggcagggaagacatcacccccatcctgggtatattaattttggatttgttcatatccttaattgattaaagagcggccagtgacttctataacactttgttggtagtctacaagaagccctcctccactgtaaagttgaggagatgttgaaggactcctccactgtaaagccgaggagatgttgaaggcctcctctgctgtaaagtcgaggagaagatgaaggcctcctacgctgtaaagacgaggagatgacaaaggcttcatctactgtaaagttgaggatatgaacaaggccacctctactgaaaacacagctaaggaaacactaagaaactccaaggctacaacctaagataaaacaaagactgcatctaaatctacacaaacacataatgcgacaagaaagccaatgctaagacaacagccaaagatcagagtaagcgttgacattctgatgttgacacatttcagaagtctcctaaatcaaaggaaattactcaagaaaattggaaaaaaaagattgccaaaatttatcccacttggtagtttcaagagaaacaggcttagttcacgctatcaagtcaacctcacacaagtataatgttgacttgggggtaaatgtttacacccaaagtagccctggtaatgtggaaataattatttgacatgtggcaagaaggaaaatatcttggagttcatagcagttgacctgggagaggtccctagccctacgtccaagttgactttgggaactctagaatgggtgtttggatcccgccaagttgtttccaactcaatatctttaagtatcttgtaccctaaagacatgaaacatccaagtctaaggctcgagagctaaacatacacgaaacaacaccacacatatcagctcgggcgcctagggttttacctagtgcccaagttgacaatccaactagggttttagtttttgggaccatcttagtgaaaatggatcaaaatttgtaccaagacataaattagacatgtcatgaacatatttgaggcacacaaattcagagcactttcgtctttgagcacctggagcatcatgtgtcccaagcacccatcgcctaggttgacataaaactgaagatctatcccgagaattttattcgtcttcatcaaaacaaggaaacaagtgcttttaaggaagaaatagacccacctggaggccaaaatgagatcccaatgaccaatttgatgcctggtgcttgcctagccccttagttgacattttattaacgtcggccacttttgaggagtttctctgagaagtcttctaggcatattctttgtttttgcaaaagattaagatgaaagtgtttccgagaataaattagacccatctcgtggcctgaaattggacttagtgcacaggttgacacttggcactgggccccgcgcccaggttgacaaaatgtcaacctgggctgtttctaattatttttctgaaaaagtattttgggcattttttctatcataaaaaataacaaagatacaagtaaacttggggagaaaatgagaatcttgaggggcagaaaactgagcccagcgcctaggtttacttggtgctgggcctagtgcctaggttgacaatagttctggtgcgttggtttcaatcactcaaatgcaaaatttgttccaagaattctctctaaaatggtcaaaaacagggtaggagaccttgttctcaatttcaagaactatggaagtatcaaaacaacatcctagaagctttagaaagagcacccaacgcccaggttgacatgtgacatggcgcactgggttatgcttatccaattctaatttcttcttgagcattaatctagtttttcatagtaactga

SEQ ID NO: 219349 - DNA, 5823 bp, Cannabis indica
catgataaagcctcacatgatttcagaaacttttactttaggacacagtagcacatggtaagaatgtattgtcacgattagaaaatgataagaggtgatcaagagaacaacttggaaacatatgaaaaataagtagtttaagtacgataaacatactcatttacttcaggaagagatgattgtagcttcaccaagtacgccattagttcctttgctttaccagcatccacattcttcaagcagtaatttcaaataattagacaaagtgattatcatccagtcgctaaatgtaacgtagaaagactaaaagaagtaaagtgaaaggtttagaatttaattctctttcctgagtttaattattctattaacagttgagaatgaaattagtcttaatttctttctggtgtttaagagtctaatagcaatcttaaaaaactcaattcataatgtatccttgaatatcttttatttactagccaaaaaaattaaaagtaaatttataatttattgcaattacatgggaaaacaaagtcaaattatgtttctcacaagggagataatttcttaatatctctccaattacaaagggataaataatactatacctcatagtcatatcgagtatagtaatggcgaccatatttagcccaatgttgacgaactatttcttcaactgtcacaagctttcctccaccaaggttatccttattcttatacgcaagaatggataaccaagccaaaactgcccagatcccatctttctcccgaatgtggtcagaacctatccaatgaaaatgtggcaagcatttacagatgtccaacaatatcagatggtttaattatttgtacgaaagctaatactaaaactaaccagttccaaaactttcttcaccacaaacagagcataatccagcatccatcaagttaccaaaaaatttccagccagtaggtacctcaaagaacttcaaattcaaatgcttagctacaacatcaagagcagctgaagtaggcatgctcctacaaataacaaagttcccacatataaacaaaaaatcactaaccattaagagaaacatattcaaacacaacaacatatgagttacttaaaatcgttaaaggtctcacacatgagcaagaaattaaagataaaatgaaattgtccatctttttgatataatatatataaatataaggcatcctccggataattcaaatcgaagcaattggatgtccgactcgggcctatatgacatgaccgatcaatagaaatactctaacactccgcctttgtcatatattccatacatcacactggatagatatcatattcatggaatacgacattaagacatgcaaggaatgatagaaaaaagagaacctggcaactcccttcagaccagcagaaaagtatgggatagcatcaacagcatttgcagcaattatggcaacagaatccgaaggagtgacaaaaaacctgaagatagaaatatatgttataaataaaagccatcaacaagattataaattcactcgtaaagataataataccttttaccaaggaccatattacggtctgcatcaccatcagcagcagcaccaaattcaggaggttcaccttgagtatctgattttcccaaacccattcgagcaaccaactctttagcataagtcagattagggtctggatgtcctccaccaaaatcttcctgttatcaagaatcaatgataaagaataagtttgagttgttagactacaaaattccaacccagattaagaataatgcacaaaaaaagagtcctgaagttggacaaaccttgggtgtgcagttaattaaagagctctcttgtgcgccaagctcttccacgaaaatacggcttgcataagccccagcaactccatgcaaggcatcataactttaacatgacaacatattaaggttacaacttacacacacaaaattatattatatacacctgaaaatgaactttgggcaccaaggtcgaaaaactaggtaccagaatgtaaagttgggagatgttagaagctttcggatagcctcaaaatcaaaaattgacctgcaaagttaagggagcaattactgaaaggaaacagaatgcatatcaaggaagtgatggatatcacagatcaaaataaccatagaacaaacaacagaccacaattgctcaaaaaactaacaaaaaaaaaatcacataacaatcttttgcagcatacaagcactgatttttgcagcatacagctcttcctcagacaggacaatatatgcatattatatcaagttgagcaaaaatgttgagccatgttgatcgtaaaggggaatcttacttcatcagtttaacataatcacttgcacaatcaaaaacttcaacatcaaattgtccttcaggccccgcaaagctcgtaacaccagttgtagagatgtcaaactggcaattgtaacataacgacattattaacaactctcaactccagcagatcaattagaataaaataaaactagaaagaaaaaaaaaatgtgcttgggatgaatgggtggattacatcgggcagatcagcagttaaatactccttgattgttgttgtgttctcatatatcttgtcagtgattccctcgggagcaggtccaccattctccatgttgtatttaatcccaaaatcctgacatgaagaagaaacaaagaaagaatatcatcattattattcatgtcgagtcaaaattatatatatagacaacaagaaaactaaatcttaagttaactacagcctaaaatattattagttactaaactgcttcgtatgctaccttgtgataagtaagacctgattacaaatactattaaacttcacatctcccagatttaaaaattaaatattaaaagataaatcaccaggaagaaggaagaacaaataatgttatgactgacctcattaggaccacccggattatgacttgctgtcaatataaacgctcccgatgcctttgatccctgatattgaagttaaatagtattaattaatggattaattgtccatttcatagatatcaaatgctaccttcgaaattggaatatggaagtggagaaaggaattgtgtaaagttaatgtttaacagattataacttacatccactccagttctttcacgtataacagctgacacagcgggagttgagagtagaccattctgaccaacccatatgcgccttactccattggctgctgccatcttagtaattatctgttaattagaaaaaataaattaagtgttagattttattacatcatataggaagtaaaacatatgattctacaaaatcaaaactagaaatcataatcttagtatgttatttcacaattgtagggtatacacttaattaagaaatgtttcccttttttcataagtttataacatagacattgagataattattcttatcaagcaatactaaatcgttggacaagtttgctaatctaatgtgatacatattaagttcccgtttcatacaaagtgtctactcatacccatccattttttaaccctgatattaggtcatgaaccacagttcagaggtacaaaaacaaatagatgttatggtacatgaatagcctcctttgtgtagagagaagagagagagtgaaagatcaaccaaactctattcattttgactgcatttagatacatatttaaacttgaacaaaattacctgaatagcatcctttgagtaataccggccatcaccagatacaacaagtgttgcacctgcataaatgatcatcagggttatagtaattcaagttgacctatttaaagagcataacagttaaaagtgatagagcaaaagtgaaattcgaagagaaatgtgaaggcgttgtgcgcatatatacctctaactttttctgcagtaagggcattgaatgttgcctgaacaaaattctctaagtagtgaggctgaacaaaaaccttcacctgtcaaggtcaaggaaccatatatattagtatgttaaagagcataaataataatcattatgcttatttaaaaataaaataaaaataaaaggccatctcagttggtcatttgaacataatacaagcaaaggtgcatttatttaataatcttatactcaagcaagcaatatcaatttcattcaaattttcaaattcaaaaatcttaaatttgttggggagaaccgggattacattttacataatgatggaacagtttcaaaggcattgccctatacataaaagacaaaaaccagcagaccaagtagctattctttgatgtttaataaagaaaatttgtcaacaagtcaaaggtacccaattaaaatatttgtatgacaatcttaataaacaagcatgctaacttttaaagccaacaaataaaatacttatagtacaactgtttactttgtcataagaaacaaaaacaatactagatctgatagaactaattaatcacttatacatcattaaaagaaattggcaagaagaaaatcaaccatccatgagttaccactataatctccataatttaagtggcatgaccactctacagatatatgagctctgtaaaaacttgtggcatttttaccaagaaggcagttattttgtgatgagcttcatataaatgggattctctttcatgtccaattactgatggcttgtttgatcaagttcagcactattcaattaaactaataaagccagggagaattatagagaacaattgaatatgattttgcagggattaatttaaaatgatagacaatttagatttttcaatcaattacaaaaataaaatcgcaacatcaaatgagacagtcaaaagcattatataatacacaacagattttagcataatcatgaggcttggaagataataattcataggccaaatattaaaaatatgaaatatttcaaagatggtatggtatcatcaatagcaaaagaagctgatatggccttactaagagcagatccagaacatgagaattttttattaaaacctttctcaatataaatcaatgaatcaaccatattttccttttgtataggaagcaaaccatcatcttatgctggtaaaaaatatctaataattaaaaacaatacatcatggtcattttgcaatatcacattctctgttttatataaatatatatatatatatatgacctcaaaactagagatataattttaacaatttaacatcagaaatttttatagggtgagaaaataaggattctctatctacatcttagatctttaatattaatgggcatccacaccctgcctcatacacctacaaatgaaaaagtttggacgacccacacattttcaagaatattatcgaacaaagttcaatactttccagtctttacttcctcaaatacatactgacattcagagataataaataaatatattcaacaatgggaagtggaagtatttttgtagaataaacagagttccaacaatgagtgaatagaaccgaagaaaaaaaatcaacaaaaacaaataaattgacacatcatatatcaaagaataagcagataagatcccattcaattacaatttcatataaatccaaatccaaaaccaaaatcaaccacccatacggatcagcctgatccaatgaagcaatttcgatttcaaatcactgatctaaaaatcgcaaacgcaaacaaagaagcacgatcgaatcaaaatgaagggaaatttaacgaaagcagagtgaaaaatagaagatacggaaatgaaatgcagagaaaagaaagaacgttactttcttgcggagaccaga

SEQ ID NO: 219350 - DNA, 1679 bp, Cannabis indica
ctataacgtacataatcatagggaaacaaaaaattaactaaaaattatttcaaatactaagacaaataaggatgcatcgatgcatcccttttaaaatgtgtattgtaaaattttctctattttttttacatatatatattttagaaaaatctttctaccatcagtcgttacaagggctatttttttaggagaaaagtctcaaccactaaatatcaagagtagcaagcgctctaaaaaagtaggaacgagaatttattcaaacataatatctacactattcatggatacaactcagactttctggtcaccaaatcatatttttactagacgataaaactaatttaactaaagaatgaacaataacattacaagatctataaaaataaaaaaataaaaataactaataactcagaacccttaacaatgaatatctattgtgctttactaaatattattgcatggaataattggaagaaaaaaaaacaaagataaaaaaatatatattagataatgcttttgaattattctctatgaggcatggtacaaatgattgcaatctctttgatcaagacaaaaacattcttctcaaaaaacaaaacacattatattttattaaatactttctgtaacaacacatgagttaggaaaataaaagttgtcatatagtataaaacagctgggtactagttgttcaaaattagtgctgtaagtttcctttcatgtcgtgcgggtttagctcgtatttatacgtgctttttaagaaataaattgtatcgttatgtactacaaaaaaaaaaaaatatagaccgtgttaggcccaacatagcttgtattttcatattgtgctcgaatttgtatcgtgctttactcatgacgacatgtatttcttaagtaggtcaacctatttttatattcgagattaacttcatgcttcactttttttttaataattattaaattatatgtatatttcaaagctttacttatatttatataatttttgaacaatattttacagataattatatatataaaaaaaattattaatattattagaatttgaatatttacttataaatacttaaatttttaaatcacagtctataaataaattgatatataattttaatttttaattttttaataattttaattataaaattataataatcagaattatatttaaattttgttatttttttaacttatttataattaataaattcatatctcattatattattattattataaataaattataagtttttttaatatatcatgtcgtgcttttcgagcttgtcgcgtattttattttttggactagtttattcgtgcttacttctcgtatctttcgtgcttaattaattaagaatatattttttgtgttctgtcatgccaatttgtagtatcgtgtcatgtcgtgctacaaacctatattttctcgtgcttgtatcaatttcgtgtcaggtcaaaaatttcgacctatatttacagcactatttaaaattatttttctcaagtgatatattataagattagctgtctatcagtcacataagctatgtgattcttgccaatgctggaattgaaaactattttggtgaattttgataactttttcggcaccaatgacaaataaaattgcttaaataaataaaaatattaaatatgggctt

SEQ ID NO: 219351 - DNA, 3091 bp, Cannabis indica
tcccgtttaggggattggggttttttaattatcttgggtagcgtgcctaatagtgagggcgttacattatgactctgacctcggtcgtagatgttttatgtgaagggattgttcctgtggttgcttcgggttcaagatgcctggttgggttaaagaaaggcatgcctcctacctctaatactctgacgtctgaggcgggacgatagtttctttccaaatgctagaagagtcttttttctgagctagattctcaataactacaagtgtaggcataatgatttctaatcttctattgataacaaataagattatattgaaatgggtttttatttagggcatgaaatcccaacacatgcatgccactcaaccaagattttcttgcatatcgcttggccatgctgttatcaatgacaccaccatgccaagtgagattcttcccaagtgttgaagacgaaggcaacggaggtacgacaaggcttgcatgaaaggtgagtacaaccatgccccctacaagttctaatgttaaagaggtacaagtagtagagacattacacatgcaagtcctaacatcctaaccaagagtgcacaatagccactaccccttcaactctgaatcacctgaaactagacaaaggtacaaggcgcaagacaacgacctgtaacttgcagcccatggatatcatcttgtcccttgggaccacaattttccattagagcctataaatactgttgagattttatgccctaaataaaatctatttcaatgtaatcttatttgttatcaatagatgattaaaagtcatttaagttagcatgttattttcatgatattggtttaatatacaatttctaataaaactagaaattattattattcacaattacagtgatgtcaacactgtggaaggtaaatatgattatatgttttaaaacttatgtttcatgattcatcaatgcgcaggatttacactgatgtgataattagcgataaagtttacttacaccttggctaattgttatgtccttttcagggtattggtaaagtaggctagtatcagatgtatatagtacacattggactggaccattattgaacttgataaagatgtcataaaattaacgttatatctttctaagtgaatatcacaaagttgatcttagatcaaaagatattaatcctaatatggttaggttcgatcacaagagtgttatttatgttcttagagttgttcgttaaaacttaccaattggttcgggccaatacttatatcttaagaatatgatagtataattgagtggaagcgctaatcatagatacagaatctatagcttgtatctgaacatagaagtcaaatgatgatttccttcaagcttgacttaatagagataaatataagagatcttatttagtaattatattagtttaatgaaatatcatttataggaagctggatgttttaaggataaaatatattgaggggtagaacgataaatttgtccctactcgatgtaaaggatctttaattatttagattataacaatgaataattaatagcgtatatatatcttaaaatatatagagcgttctatataattaggattgcaattttgaatctatagtggcacaagaaggaatttataagttagagaatttacttcgtaaattctagaactacttattggaagcttgattataaaggcacatgatccccacactagttgagataatactgcttgtagactaagttaattggttttaattaatcaattataattctaaaattagactatgtcttatttatgaattttcactaagtaaaggcttaattgtgaagaaaagaggttttagtatttattttataattaagagactttgtaaggtctaattaataaataaattaaatgttaattttatttgataaataattttagttattaattaaatagttttgacatttaaaggattaatattagaaaatatgacattggtgaaagaaaatataaattgttgaataaaatggtaaaattctaacttgtggggcccattgtatggccgaccacttaagagtgtttttagccaactttttatcttttttaattccatacaatttaaatctaaccctataggagaaatcctatataaagaatatgatggctctcactctcatccaatccttcatagcctagtttttaactctgtcagacaactagagattgagagcctccttttatagatttcaaaatctcattctctttctcttcataaatttcgagctagatagagtacatgcccactcatatcaagtcaattactcaatcatagtgggaagactgtgaagaatccaacacttgaaggagatccatgctcagatcttgataatactccgcgacagaagggaacaaaggttagagatctgagtagaaggagacatattttcgctgccaccaatgtaaagttctcttaaccttatatgtatttattttcattttaggaatttatatttagggtgttagattatagaatataatcaagatacatgttagtaaatttagatacaagtaaaataacatccaacaaataccccattctcaaaggtgagagggggttagaaaatcattgtaatacttcaccttaacaaatacaagtgtttctcttcctccattgtagctctaaacacttctcaaaccttttcatatttcattcttatactaaatcttgtgtttgagttttgatttttcgactttaagttagttgatgggttttcactgtcaacttctaatatgaagtaattctagatatattttatacacgaaccaaacatatgacatggttattttaaacactttttaattgagagaaataagtttaaaacttttcatttttctgtgagaagtgagaattgaaaaaacgactttttgaacatatattgataatttgagttggtaaaatcgaaatatttgaaaattaaaaatatgacattactagagggatgctatttgttagaaaagagtcaatttatataattttgtttttaatcttgttatcattcatgtcgtctcttgctaaaaaaagttacaaaaaaaaaaaaa

SEQ ID NO: 219352 - DNA, 7244 bp, Cannabis indica
tattttttaaatggtgtccttatatatgtgtagtgtacacaaattcacaaactaattttgttgggacgaagttacacttttaagttttaagaacgttgagtagtttttactactataaatgttcaatgagtttgttttgtaattatgtggcaaatcaaaatattattattattccaggtagtatgagaacatggctacagatggagcaagaaaattcctacattcttcttaatttgtgtgtggatttttatttttttcatttcccgtccaaaacgacaaataaaaaaataaatattgacgaataaaagaaaacggtgtcgtattatttcagaatgttaaaaacggtgtcgttaggagaggttatggtctgcatctgactgtagaagcaaaactattcaccgcgaaccgtgaaaaggttcgttgctactttggtctccattatcgtttcgaagagccatagagagagagagatcgttgttcggggaaagagttaagagagagatcggatcgatatgaagtcatgttaatggcggactaacttctacagcctgctaccttcagatctcattgatctccgaaaactgatctgattggtagaaagatttgccaaaagagtcagtaagatggcaggagctgtctccgcgctcttccttctcgacattaaaggccgtgttttgatctggcgtgactatcgcggcgatgttacagctgttcaggcagagcgcttcttctccaagctcatcgagaaagaggttttaactcctgcttagtttgcaattttcttttcgttcttttctgaattagatccaaacagattgtttatggtttaatttgaaaattggtttacttactgagtgaacgagttagagttttgagttaagtggagattctatttttgttttgattgcgttgcgagtattgatttgatctggtcatgatattcagggtgatccggagtctcaggatccagttgcttacgataatggcgtatcctacatgtttatacagcataacaatgtctacttaatgacggcgtctaggcagaactgcaatgctgctagccttctcttttttctacaccgtgtagttgatgtaagaattattggtatttagaatctcaatggtttaggttttgcattgaaattgaatgttgctttgctctattgtcatttgcaggtctttaagcattattttgaagagttggaagaggaatcacttagggataactttgtggttgtggtaagtgtatatttgaattgttgattttgctttattgtaattggatagattcattcatggttgacagaggcagagaactgtagaatatcaaattaaaccaaaacaatgggaaacagttgtggctagacttttcgacctatccgtcatagaaattctttctattttcaattaaattatgttctaaccattagcctagcggatgccccatatgggtaattttatattagatttgcaacttattgaaccatgggaacaaactaggggctagactagactagacatttgacatactcattggtgaattcaatacttgatttgcaattgagctgatgatttgtcatctaagtagattttctgtttgaattaattaacccagtgatttttcctgtttgcagtatgagttgcttgatgaaattatggactttggttaccctcagtacacagaagcaaagattcttagcgaatttatcaagacggatgcttatagaatggaagttaatcaaagacctccaatggccgtcacaaatgctgtgtcttggcgcagtgaaggaatacaatacaagaaaaatgaagtatgtcttcttctcttccccttccttaaaagagtgatttgttttttagcctctggacccacgggataaaagtacttatttaacaggttttcttggatgtggtggagagcgtgaatatccttgtaaacagcaacggacaaatagtaaggtccgatgttgttggggcattgaagatgagaacgtatttgacgtgagttggcattgtgttttgggattaatttttcttttgctggtaaatgctgtctgctgattttcttaacctttaaggcatcggtttatatcgtctgtgtgggctctttagggagcttgcactaatgattgatgacttaatggatgctatttctacttgactttccactgattcaacaaattaacttaggaatctaaaatttcattatttctcagttttctgacaggacactaatatgtacttgagacaatgtttattattttatttttatcaagttttctgtttttacccttggtatatagctgaaataaactggttgcagtggtatgccagaatgtaagcttggccttaacgatcgagtgcttttagaggcacaaggtagagcaacaaagggaaaggccattgatttggaagacatcaaatttcatcagtatgctgctttaacttgtttctctaattgaagtctatttttgtcgatacaagtgtattagattctaaaattgatggttttatgcaagtcctcacacttaaattctgctttaggtgcgtgcgtttggctcggtttgaaaatgaccggacaatatcctttataccaccagatggtgcttttgatctcatgaactatagacttaatacccaggtttgactcatgcttttcttttaccttgttatgattttttggtttaaacaactttatgaattatactattttaaaattcaggtaaagcccttgatatgggtagaagctcaagttgaaaggcattcaaagagtcgtgttgagatgactgttaaagctaggagccagttcaaggagcgtaggtactttctgtatatctattttattatttgaaccaggctggaacttgtgctctggttttcttcttactcatatatctagttagtctaattgcactatgttatatcaaataaataatctgaaaaaaaaaaaaaaaaaacaaaactctaagtcatctattaattgcaatcctacagcactgctaccaacgttgagatagagctgcctgtgccttatgatgctacgaatccagaagttcggacgtcaatggggtctgcagcatacgcaccagaaagcgatgcattggtttggaaaataaaatcttttcctggtggcaaggtacacagattgtgttttcctgtaacaatctgcgactaatttgttatttttatatgtattccatattaattttttgaatccaacatatttaggagtacatgttgagagcagagtttcgtcttcctaccataacagcagaagaagctgctcctgagagaaaggctcctattcgggtcaaatttgagattccatattttactgtttctggaattcaggtatgcattatagtccttgattctggtcactaatattatatggagatgctttattgaaaatcttaaggttgtatgcaaatgcgagacagaaactttcatgcacacatttgttcagcatgcaattttgtgaatatgactggttttttgcaggttcgctatttgaagatcattgaaaaaagtggataccaagctcttccatgggtgagatacataacaatggctggcgagtatgaacttcgacttatataaacccgttcccaaaccaaattcacagctaatctttaattgacgaaagattgggactcccatgaatgaaatcagcaagaaattcactctgttttgagagcaatatttgtgctcggccttgcgctgactgttatcacgatttctgtcttctattagtagcttttaaccttatttttctgaaaaatagcttttttctgtgtattaaactgtgaatcaatcattcttttttttcagcattgtgaaaattcattaaaattttatgattttttggttcaaagcagttaaatatttatgtattttctttgtacatgttacattacagacatataatcatgactccagtttctatttcaccaataactaattcctgtcaaattaattgtttatgggcagtctcattaatcccttattcaaataaacaacttaccatatttaaaattaagtttctaaaactctttgattacataatggaactttatctatatattataactaggaatcatagtgtgattaatgagccaagacttatttatacacctttgattcagaacaaaggagaaattctgttacaatagaatttgttacagttggcacaagagtacaactacactatctacaacctaaactaattttctaaccaaaatcaagttgttggttatcattcttcctcaaaccaaaagtggtatttacaactttgagtttagttttgagatacaaaaatggatctttaagcaagtatttagtaagaatgtcgtatttacaactttaagtttagttttgagatacaaaaatcgatctttaagcaagtatttagtaagaatgtcggccacttggtcaactgatcgcacaaaatgaactgaaagtgtattatttagaatttgatgacgaataaagtgtttatcgatctcgatgtgcttacaccatgcatggagcctcttgattattgacccaaactataggaacatcagcaagaatgactttcagttcagaaagcagggatcgtaactacatgattcagcagtggtattggctaaggatcgaaattctgattcgttagaagagcgagcaacaactttctgcttcttagcagatcacgaaatgagttttggaccaaaaaagacagtatagccaatagtagaacgcctatcatcaatacaactggcccaatcgacatccgaataagctacaattgacacaatcgatattgagttcttggaatggaataacttctaccactacaataaccaccatgatgaccacctcgaggaggagatggagttagaggataaggtagaggatataccattccataactaggatagccaaaaccataaggattgcctctgtaagcagggtgatatgaacctcgaccaccattatgagggaaaaaacgggattggatgaggagagaggcttggatgaggcaaggtagatttggtttgatctacaagattagcctcaggtttggaaatgtgaagctcataatcttgagtctctttgcatacttcttttgccataaccagggattcaacctcagcaacagaataagcatcttttcaagtcaagagagaggtgataaaaacagagtaatcacacagaagcccattgaagattgccttaatgtgatcctgaggtaaaagaacgtgaccaattgatgccccaaagaatctacaagatgcttgatctgaagaagatagtcattgagatttcttgtgagacgagtgcgatggagctgagtgagaaactgaatgatcttagcacgattatgatcctttaagactggaccagatttgagctgtggtactgcatatgtccatgcgcgtaagaatctttttagacatcaagagaagaagccatgaaacaaggacactatcccaaatgtcgtattcaataaattcagggctaaccgtgctagcaagttcatcttcaatcgtattcaattttggaggagttgaggaagaatcaagaattttagtaaacgatttcctttaatgacggcatagatgacttgatgtcgccatggaagaaagttgttttcatccaatttgacaaagaatgattgaacgagaatgagtgtggttttggtaacgatgatcttggagcttttaacagtggagtcaccaagttgagataagattgaatcagccaaggaaatgattggatcaagaaagcaaatgataccacttaagagaaacgaaacctcagagtaaatgatattgtaatcttgaataaatgatacattgattataacttttatacagagttcagagatagaattagttatagtcatatattgagagttagttacaactgaaaggctaacaactaattgaataacataaaaataaaagcatttatctctacttaagatcctattctctaacaccttggctcgtaaaaaatcaccatgagagaaattcaaaacctttcatcacttgagctacaactccagacaatgaatgataaagatgccaagtttgcttagctatatataggagagccttattaaaaacaaagagatgtctaaaccacataccacaacttgtgcttacaaagcctttgtcaagaactactccaatgcatctttctatttttagtccccaccccctaaatatataattacatttttatcaaactttttgttattttgaatccattttcctcttgtctcataccttttttgttgatccttctccctccccacttttgctcttctcaagtaacacatgaaataatataaatatttagaagaagaaaaattatgcattaaaaacatacttatataaaatccataaactttataatttctttttaaataaagaaatctcccatttttagtttaaatccaacaagaaaaaaaatcattaattcagatattttttttgttattttttatatatattataatttttggtgatcgaattggacatttattaatttaaaaaaatggacatttatttgattaggtaactattgttcgagaatttataatgtttggaagattgttttatccttaaaactgagagccaatctcagagggatgtaattaactagagaatcatggttgaaattacttaattatatgtttttgatcttgttctgttaatttaaattgggtaattagctagaggaatatatatatattttagaataagaagcttttatatgatgatgatgattgatgaaacaaattaatatagccgatcgagaattgagaatcatatcaaatatattaaaaaaaattaataataagatgcagtatacccttgaaggtttcagctcttctaattttaaggtcttcttctttgttattttttcatatttctaataaaatgcaaatttataatgagtatgatattattattaatattcttactcattctttattagatgattcttaagtttagtggccgaatctttctccttacttacactaatttcttatacttgtaatgaactctggatttttttggcttcttttgaatggaattttcctttgtctcaataataataataataattaactgtagtcgttgatcaatttgctgcaccaaatattacaatataacagaaagagctatatatatatataaatagataagctcacaggacgactatataacttaacaaacaagatacaaaacatt

SEQ ID NO: 219353 - DNA, 4703 bp, Cannabis indica
taataatcattagagaaatttccaaactgaaagggaattaattggagtacctttccacccaacaatcaaaccctttccattcctttccatagtcaaagaacttccataaccaaacttcttagccaccaagctagcttggtacaaagaagagtcactcaacttactctccaccatcctaaacctctcaaagaaagctctccaaactccaatcctcacacttctaataactctctcaccattttccttactcacaatattatcaatccccattcccaagacctcttccattgtcgttttaagctcttcttcctctttaaaacaagtctcgaaacagtcaaagaaagccccatagaagaacaaagcttctatgaatcggttcgcaaacgacggtgcgtttagattaacttctgtttctatgacaaccattacagatggctttagtgttttaataactctcatcaatttctccaaactcagtggcttatacaacatcattcttagtaataacgaggtgaacacagctaaaacctcgtcttcctcagtttcgatcataccttcattgatgtcatccagttctgttaagatcaagattttaaacgaaaagggtacgttcagagactcagctagattcgtcaaccggttctgggtttcctcaattttgacctgattctccggtgtaccaatggctgtgatcttaagaagctgaaataatggacggtcttgattattaatattattattatcatttcgctctgctaaagctttcattaaaagtgtccattgaaccccacttctaatctcgagatcgatcacatgaagcttatcatcaaactcatccaaactctcgattatagcttgaacagctgggaaatgaagtacctgaggaaaagggagtcgttgaaagcaggtaacgcttaaaatgcttgtacccaaaccacgacttaattgatctttgtcattattagtagtattagttgtactggtcattgatcttcttcttcctcttcttcttctagtaataaaaccagtttctgaatcgattttctgttgaagagcttcaatgaaagagaggacaactcgctcgactgagttgggtttattattaggtgatgaggaataataataagagggagtgagttgaggactttggaggagtctggtggcttggtcaaactgttggtcgttgactttttcagctacggataagagaaggtggactagttgtacatctttggtttcgccatgggataaaccggagatagcataacagcttccaaaagggggcatcaaaacggtgtcgtttgttccctggacactcgagaatcgtatgtagcatgatccggcaattctcatgatttcttcagttgatagcttcgaacgacgtgtcgtataatgatgactattcattatttgggtgttgctttctgttatcgtcgtgttcttgttatgactactcagcttgttatgtccactagtttcgcattggctaagaaactctaaagaagcaaagggaggaggaggaggaggatcatcgaaattcattgaaatcgcatcgaaatcatccaaaattgagtagtcggacttgggtaattcttgtctttgttgatcttgagcaaaaatttttggtactagtacttctttattaccagccatattcatcatcatcatcatgttatcttgttgatcatagaacaagccaaatcgatcatcatcatctttattgttcaccattcctccaaatgaatggtctttattttttggattgaagatcacttctaattcatctgtaatagtagggccgcaatgattattgttctggatttcttcgaagttgaatggtggaacaaagaagaaagaattattattatcatcatcattagccataatatatatctgtattgtatcttattattatagctatagcacaatgttgtacttataatgagttttattatttgcacaaatatcatgagttgcttagcaggacagcattggttaattttaagatttgataattatgtttcgataccatcaataataaagaactgttttaatccgcaggctttgtttattttatttatacaaagcaatatttgattaaaccaaacaagacttcgtgagtgttatttatttattttaaaagggttttattttttgaaactatatatgcattggattatatagtttcatcccaatacaaggcagacaaatgtcagtaagagcacttattataattatcaaattttgcacgcccaaaaagtattactgtattagaatagattatgaaagtttgttattgtcaaataatatgtaataaagatataaacatgatgtaattgatttggatgtgtgttttttctttatacctatagtagatttggatttttttgaagagacaaattcaaaaggacaaacattagtatagggcacaaatgagaaccaaaaacatacttgcttggctagctagctttttctttttcataaaattaaaattaaaaaattattatttaattagctagctagtcattgtaccgtgtggatgatcagattggtgacttcaagatatatattattctgcaataacttggaaattaataaacctaatcaaaatctccatatatacaacaaatgcataagaagttatgataataaaatataaaatatatatctcctaacatattagatgatctaattaaaaagatgtacccaggcctatctacggttgtaacatctccaatgtatgcatcatacatgttataatataagtaattagatggtaattatatatatgcaatacaatattaatcaaattaactaacatttcttctaacttcgaacatcttaattaattatattaaaaaaatgtaataatactattaatagctgtcatagtgatatacaagatcttaattaattaatattataaatataataataattaacgtcacaacaactaacctagcagtaaggaaatatcataatataattcaactatatatagataagagacccattatatattaattaaaataattaaaaccaagaataataatattcttttcttcttcttctttatttctttttccaagaaatttttttatacatcttaaagaagcagtaaaagaaagaaagaaaaaatacacagtaacatacaattttttactcagtaatatgatcagactttttcttcaacaacaatatttaaagtagcaatattactattagtattggagtcaattatttcagatgagattctacctactctcctacaaaacaaagacattccaacccacataagactcttaatgactttcaccataccaatagtgacagtcaagtaatacaaccaccagccagcaaagtcagccaaaccaacctccattaacatctcacctttagcctcagccacaaccaccaacgactcaacctcgtccctcagccgccaataccacaacccaccgaaactcccagctatggctcctctctcgaaccacttttcgttcctcgaaacgacaccgaaaatggtgtcgtccaccacaggcttaaccacaagcctcgaccaatgaagcatcgtttcgtgcaagccgagaaagaaaatgactcgactcaccaaagtcctgtccgtaccgaagctcgaaaaatctgttcccaatgaaacggttccttcgatccctaaacccacgcacacttgtaatgtgattaggaaaatccaggcggcgctgaggcggagtctacggctgaggagagcggtggtcaacggtagtgactcgctgaggagtgtgagcttgcctactgttagggtgtggacgagtgtagctatgcttatggtggagactatgagatagaggattgaagggcttgtgtggaggaatatggagaagaaaggtggagacggttgtagctggttgaggaggaaacgggcgcagacgatcctagccaagaggagaaaagataatggaagtaagaggcttagtaatgttgttgtggttattcgaaatgggactcttactaaggctgattttatcaaaatcttgttgtgatgaacaactagtgtatgatcatgatcatggtcactcattttagaacaaagattatttataaatgtacctctaatctatgtgttttttttttgtttggatgagaaggtggaaaagtttatgatgtatatatatgtgagggttttatatttgtagcaacgacttgtatatgatcattattatttatttgtttgtgaacatatttattgttagagtggttgacacgtctatatatgtatggcgtttcttttaagtttgaattatttattgtttggcataaattattaagacatgtaaattatttattttttttaagtgaaagtatacatatgaagcattgcgcgctatataaacaaagattttagcctatcaattcttgttctatgattttctttttctatgtacatatatatatatattgttcccatatatatatagttattgttatagtttgtttgtagcgtttgaattttgtctcgattgtttatattcttttttctcaaatgacatttacatgtttaggtataattatacaatgtggatcttatatttttaagtatttgtttgttagatatgtgtatataaaatgtaatgtaacaatgaagtataaggtgggagttggtttctttgactttacgtctctatccattctgacgtggcaagttg

SEQ ID NO: 219354 - DNA, 3856 bp, Cannabis indica
aaaaaaaaaaaaagagtaataaaggtgttgtctcctcagatcagaccaatggcctcttctcttcatcaccatcttcttcctgtttcccatttgtggtcatttgagtggagggagctggtttaggaagcctctgcggtggtttgttttcaggcaagagcttcattgtgattcccatcccaatcagaagaagtccagtcccgtgctgctcagttaatggttttgtgaatatcatgtatgaaagcaataatgttaccgcttttcttgccgttgtaatctgtcaaacgcacatttttattattatcattattccaacattaaaatcaccacaacgttatattaataatgctaaaagtacaagtgcttgaaacatgtgattttactacaaatgctcagaggtgctactcgtgcagctatatatgaatcctatgatatccgaccccactataagcaccaccccagaaattacctagtgggctccagttggagctgtgaaatatctgatccaagccaaatagtggcgagttctaatatttgggaaccaagcatgaaactcgtgatcatttttcaacaagtggtgctactataggctcacctctatctacacacaacagtgtgacgaaactctaatatgtgttaagaaacataaagctcgtgatcactcacttgtggccacaatatgtgttaagaaacgacaagttcaacaaatgattctttggtaccaccgcattgtttttaccctaaagtaaggcacgttttttgtgtcacacttactgtgctaagtgtcttttcaaaatgatagattattatgaacttgtactatgacattcaaatgaaaaagtaaaaaacataaagtatactgtgtcttttcaacatgatatgatatatgaatggggtatcttttggtagtcaccactcacattgatgaaaaatttataaagttaaaccagtgatcttatctatatacttgtgtgtataaaattaaatgtggtttatgcaagaaaagaaattagattatgtgtcataccatggctgtggttgcagctccaaaaagagcaattagggagagaacagagacctggcctacaaacgtggccatggcttcaaagaccaacacgccatacacataaggatgctgcaccaaaaacttattttgttattaaaatccaaaaggtctgcagtgaagcttgtgatatgtgtgacatgagaatgtttttatgtacctggtaacaagaattccaagctctgaatagttcccctgttaaaagcatgggagggatcaagaatggcaaacccaccacggtggaacaaaagagcatctccgtctgtccaaatggataacaaaacaagaaacatgtgaagtcaaatgttaatgtgtgcacttttctatgtctttgttaatgaaaaaagacagcttgtttttaaattataacacaactattccatgaaggtcacctgtgttgtttcgggattcatggtgaagattgcttcttgcaaatttcccagaaaagaatccatgactagagcaccagataccattaaaacaccaatcatgctgaagttgggagatgtttgagcatcggctagggtgaaaagaatcaaacccacaactaaaagaacagcagaaagatattcatgaagtggatatttccttctcaaacccggtatgaaagcccccataatcatcacaggtagaacctagaacaccaaaatcatcacagtaaacattaggaaaaaggagggggggaaatggggtctttggcttttcactaactacctcccagcaactgaaattaacagatctcattgttctaaaattcaaactcgtaatattgaattggctaattaatacaggtaatgctgcattactgtcaagttagtttagtaggtgtacttaactttgaaacagaaaactctctaccatcttccaaaattcagtataataaaatgaaactactatcccaataagagtataggtgtggcataccttagttgatttgaacatgagctgggcaggatagttgagaaaaagccaaggaacctttagtgaggccatgggaacccattagaacggcagacagctttacataagtcttccatggattcaccatttgcttggtactgaagccttgtaggtaaatgagaaaaatatacacaaacccttgaacaaatgtgaaataccaaccatagctgaaaaaaaaacaacaataacagtatgaaccattaagattttttttattcttttttgaaaaagatgcaccattaagattaacacacatatatatttaagtaacaacatataaccaaattaatactcgtaccatatatacttacctaaattgaagcctattgtacacatattcctgaaatttatacaaaaataattaattagttgttgggatataccaaaacaaatgttaacttcattcatcgaaatagagatattcgtataaagtataaatcacaatttcttcagaataaaaaaaatattatatagtgcttttgagaaaaaaaaaaaaaaaaaaaaaaaaactaagcttggaacttcaaaaagtaaactagagaaagaaataaataaatcataattgaaaatttcagtggtggccccagaggcaagaggagaattaactttcgatctttttttattttttttgtaatacgttttctttgtaaccaaacaaagaatacagacagcataatcttttttattagttgctagaatgcataagcgaaatcgaattatgagctgttcttgattaaaaaaaacgatcaaagaatgaagtcaactcattaaagtatttattaacaaccaagcagaaagaaatgaaagaaaatcccaacgctattccctttcaagaattcaatattcccaggaaacaaacagaaaagccaaccgtaaattgtacaagaaaatgaagacacacactgaaaaaatgaaaagggaaaaaggaaaaaacagcaatacctcgcagataccattgacgagataaccaaagaagaatccggaagagcacaagagaaattgttgccatctgggtctgtcggagagggaaatcccaaatagagaccggctttgttctacattcctcatcgtttttttttccttttttggcgagcaaagaaaactcagatagcgtagctaatataaaaatcgaagaaaaaacccaggaagaagatcaaaatgaagaaagggtccgttaaaaatcaacgaagaagaagaaagcttgtgtttagcttcatttcgttgagggtctcgggccgagttgcatgttgtgtactcccaagaaaactcagcaaatataaggagcaagaaaggtaacgttttgattacggtgattgtaaacaatgaaaggaattaatgcactagcttgaagagagagtattgaagagagagagagagagagtttgtattgactctgtttttggtatgtttagaaatacagagaagtttggggaagaagaggactctttctttatggaggcagattttgtgtggacgttttagtagggggccttcttttttctattattttattaaaacgccttcacaattttattttgtggatccctaatttttatatattttgtcctactagtcctcaaatgtttcattatctattatttggaataagaatattacatgtcctttaattcagttcatgtaaagataatgataatactactaatagaatgtaattaacaatttttacactttaaagttttttttttttaatatttttacaaaattctatatagaaatttctattgtaattaacagaacaacctaaatacgcaactaatattcacataaaaactgtaaaaaaattttaaaaaaaataaaataatatataagataatt

SEQ ID NO: 219355 - DNA, 4558 bp, Cannabis indica
tcaatctcatttccgcattaattatattattgacgtgcgtttgcataagcaatttttgtccttaaaaagtataattagtagtcttgctgagaaaatggttgagacaaaaaagaatttggtgatctacacactagtttattatcgacttataactttggctttgatattgcccgttactactgctactgtggaaagagtattctcttcaatggattttgtgaagaatgaaatgtgaaatcgaatgggagaccacacaataaatgaatgataacttactactctatgttgaaaaagatatatttagtagtattagtaatgatattatcatgccacattttcaaaatatgaaaatacgtcaaggacaattgtaaattttttttaatgaagacacttgtatattttttttcttctaatattttgtattactttagccccctgtcacaaaattttagcttcatcactgatgtttagtagagagtaacgatatatgcatttttatctatagagcataagtgtataaacttgcaaattgcagtcataagcctcggtagaaaaatgttaatttgtgaacatttgtctataattgcgacagttaatgaattaataaagttaaatttttcattattataacgacaatgagactatttaacctccatttttaactatattagaaattattacgtttttttttgttagggattttaattaaattatttagaaagaaacaatataaaattcgttttagtttttaataggaatttataatttcaatttcattaaataaaacctgtagcctaaattaatgtcccacaaagcattagcccaaaacagagtctcaactcacaagccaagattctaggcacaagactcgcttgaggacaaaaatataacagagaaaattcgccctccaaaattaggaccattttcattattttattttacctaatatattacatattaaaacaaattttaatatgtatgtaatctcacttgtctattgttaaccacattttataacatagaacatcactacttaaaccctaatcagtattcagtaatcacactctcactcatatattaatacactcattattacttgcttttcttatttaaagacattattacttataagacatgtaaatgatatatattcatcctatttatacacccaacaagatcacatcctcttctcctcaaatctctctttccctctaaatccacaatgtataactgtaatggatcaacaagaccaaaactcttgtatatcaccattcccatttcagctatcttactcttaaccctcatattttccccaaaaacaaatacacttaacccacataatctccatttccacaaacactaccaaatagctcactcagcatgccaaggatctctctacccaaaactgtgcgtttcgaccgtagcttccttcccagatctcatctcaaaatcactccctcagataatttcactcacagtaaaccacaccatgagcgaggtccgagcctcttccgccaactgcaccttcatcgagaggaggttcatgagaggaaccaccacgattcagaaacgagccctcgacgactgtgtcgagctattagacgacaccgtttcggagctcgaagcagcactgtctgaccttacctcgaaaaaatcagcctcgagtcactacaatgacctgcaaaccttactgagcggtgcattgacgaaccaaggcacgtgtctcgatgggcttaacattaccaaacagccaaacagcgttcttaagaactatgttcagaacaggattgtcactatctcaaaccatgtgagtaacattttggctatgctgaaaaagattcccgcgggaaaacatggtcattttactacgacgtcgtctgatcaggaggatgagatttttccggaatatggtcacgtgataaatgggttccccacgtgggtttcttcgcaggatcagacactgttagtggctccagttaacgagagtaaaattgacctcatcgttgctaaagacggcaccggaaatttcactactgttgccgaggcggtggcggtggcacccaattccagcgacaccaggtgaaagctttatatatgttttcgctattattaataacttcaattgaaacacgtacgtcggttaggtgtagcgtaggtcccatatgtataatattataatttatactttttgtttccaaaatatacattatacaacaattttacaatgcatcatgaatttttatatgtttggtatttcaaataactttttaatgatgaagtaccttaaaattataaataagattcaaacacattgttttatatgtttttgaaatagactttgtgaacatttttttatattgtaaataattttaaggtacacaaacttataaaaaaaattaaattaaaaaaaaatctaactagccgacacaaatataaagaatacatccgtctattaaatatattgttaaagcagtttataatatataattaactaaatataaaaaactagaattaactctatacagaaaagtgcttttactgtcctgttcatttataaattaacattttatttgtatgtatgtatgtatgtataggtttgtgatatacataaaagcaggggcgtatttagagaatgtagaagtggtgaagaagaagacgaatttgatgtttttgggagacggaatagggaagacagtgattaaaggcagtagaaatcatgtcgatggctggactactttccgatcggccaccgtaggtcagtaatctctaaccaagtccaacctcatcctctaataaattttattataaatttacgagtatttaaaagaaaaaaaaattaaatagattaatataggcccaacattattatcctgtgacttgacatgtcatgattcatgagagatgagtgagggagtactgtgctctgtctttttattagaatttagaacttcgtttttgtaggatccattttctctatgtcacatattttatcctagtatatatgctattgtacttgttactccactactagtccatcactgatcaccaacattataatctaccttcaatatatatgagtcgtgttgaaagtattacaagccaatatcaactcaccccattttataaatgaatattatttttgggtactagtgtttttaatactttttataagtggtgtctcaacgattagttagcgatatcttttaaaaattattttcttaattcgatacttaattacactaataatggtatgatctcagtgtactaagtcccaatagattgtccctttataaatggattatcccttttaatgggtttatataaagaatcatacttaattttttttattaatttatcaattttttttttttgaaaaattctcaatttattaaaatatttataataagttgaacatctttacaattgttaattataacacttttataagtgtatatatatatatattaattgtactagatagaagttctaatattaattgggacaattgaattatatatatatatagtctcatatatgttttaatttaataattcatataaaactattatataaccactcatgcatatagtgccatcccattatagtattagatacttatcatactttaaaatgtctattagcaatactcaaaattaagtaaccggagcttacgtactggaggatttaaaaagagtattagtattttgaagtatctagctcaataaaattgaatattatttattaaataaaaatgttggagactcaatattattgaaaatggtacgtatataaactttatatgtcaaaagatctagtaggtgagattacgttgaataatataacaaaattcgagttttatgttgtggatagtagaaacaaattgaacatgtatgataatgctaaggctaaagtagtactgatcatgattgctacaatcagcgtgcatactataagtggaccataaattatattatggtccaactagccatatgcattaaccatcttcaatttttttttctttgtcgttttagaattattacttagacagtaaagctaggtactcgtgaatatctttgcttttgaaatttgtaaatatattgatcaatcgtctctttctttctttccttttttgagggccaaccactatcattgacactttaggctgataaaattgagtatattccacgtgaaaaaagcactggaagaaaaatatctatacttaagcattttcattagagttaatagtagcttaataattaatttaaacgatatcatataaatattattaagaaagaacaaggaaagtagatttttcaattccactaaaaccatataccttttaattgtttcatatatctttatgtaaggtaaatctatttatatagaatatgttaataatttataaaagtttgacaactatcatcattagtgttatgttgtacataacagcatattagtaaattaagtcaatgcagtaagtgaaagatagataattaaagagaaatggtaaagggtactagtggtgcctaaatacctcctatttgtcaatatcgttatt

SEQ ID NO: 219356 - DNA, 1886 bp, Cannabis indica
aagatgttctataataatattaactattatttgcattggaaatgctattagggacccgtactaacgtttaagaaagaaatggacaacactcttgattaagccaagtaattgtctcatagaagcaaacaaaaataattctaagaataggaattggttcttctacgtcattctttcttgtaagaatggataaatgctgaagagttattctttatcatatatctttttctttcctatatcaatttatgtagggtccaaattaataattcatcaatttacttactatttatatatttatatatatataaatactttatacatgatacttatctacatgataatgttatttgagttgtttcttaaagcaatagtttgatcgtattatcgatgtgcacgtaaaaagtgaaagaaattccgcaagagattgcatttaaaatagagaaacgagcactatataacgccaatctatttcatgattcagaatattttaacataatcgatcgaatcaagtaatgtgctttaaatataggcatgctaatatttgttctcctacgtaatattcgtaatttccccgttcgtaatgcatggttcgagtaatatataatctttttttttttttttgtaggataagtagtatataatcttgattccttgctttattgacattaatttaaatgccttattactatcacgaaaaagaaatgaaagcattttattgatctgtattgactgaatgaattgtgacagagggattacaggactatatatatagtatatagacaactaacacttacaactaaccaaacactaaaccagcaaagttagttagagagactaaccgactctactgacataaaacagaaaaggaaagaaacaagttacagtattagtggtattaactaacagacagataacaagaatataaatcctaatacccctcaagatggagcatatgtatatcatagatggacatcttggagatatgacttgtgagaatgttggaggacaaaggctttgtaaaagcgtctgctaattgaagagatcccgaaataggaactagtcgaatggttgaatttttgatcttctctcgaacaaaatggcagtccaattcgatatgtttggttcgttcgtgaaatgttgggttgttagcgatgtggattgcctactgattgtcgcaataattgaatgctggatgaggctgtggaatttggaagtcatttaaaagatattgtaaccaggtgacttcacttgtggtagcagctaaagcacggcactctgcttcagcagagctctttgatattgtgggctgcttcttggttttacacgagatgagactatctccaaggaaaacacagtagccggttgtggagcgacgagtaacagggcatgaggcccagtcagaatcggagaagccacgaagagttaaagctgatgctgaggagtaaagaagtcattggcctggttttcctttgaggtatctaagtaaatgatgtgtggcttgtaaatggggcgtccttggtgttgccataaactgtctgagacaattcacggcaaaagtgatgtttggtctcgagagggtgagatatagtagcttgccaattaattgacgatagtgagatggattggcaagaggttcaccaatttcattgtcgagtctgatcttggggtccatgggagtcttggttggcttgctgcctacatatcttgtgtcttcgagtagctgaagagtatacttgcgttgggagatgaacaatccttgtttagcacgagcaacctcgaagctgaggaaatatttcagatgtccaagagttttaagcttgaacttcttgtgcagagagtcttgtagttggtgaagaagtgaaagatttggtccagtgatgatgatatca

SEQ ID NO: 219357 - DNA, 4883 bp, Cannabis indica
gatttcagtaggtttacttggatttttcctttaagtttaaaatctcaagtctttcccatcttcttagaatttaaaaagcttgttgaaaagcaattcaatttacccattaaaactgtccagtctgattggggaggagagtataggtcttttgcaaagtttctaaccctacatgggattcagttccaacacccttgtccccatgatcatgagcaaaatgggagagttgagaggaagcatagacatattacagaaactggattgaaattactggctgcatctggtttagacctctcttattggtggttagcttttcagcactctgtttatgttattaacagattgcctactgttgtccttgatgatatttcaccatatgaatgtctctttcacaaggttcctgactacagtttcctaaaaccatttgggtgctcatgctttcctcatttgagaccatatcagtctcacgagctggaaatcagatcagagaaatgtacttttgttggttattctctgcaacataagggatatctctgcagaaacagtaatggcctagtctacattgcaaggaatgtgacctttaatgagcttgatttcccagccacaacaccaacaactcctaaagaggtaaacatctccccaggtactctatttcccacaacgagcttctttactgttcctttagacactactttagaacacttaccacctgttttttctcctacatctgctgttcctgctgctggcacaagcatatcacctgctgttgctcctcccctgaatgagccagtgcctacaacttcagcatctgttgctggtgtgcctgcttctacaattcaaagtccacctgctgagccacaaatgtctaactcaccagtaaacacacctgcccttcaaccatcatcaactggtgtgctcttaccagctcctgccaacactcacaatatgacaactcgatccaaaagtggagtttacaaaccaaaagcctatcttgccacaaatcaccctctacccgaatccctcacccctactgaaccaaaaacactcaaacaagcccttgcagatcccaaatagttcaaagctatggaagatgagttccttgccctcaaaaagaatggaacttggactttagttccatatgatccaaatatgactcttgtcgacaacaaatgggtgcatagaatcaagctcaatcctgatggctcagtaaataaactcaaatttagattggtagcaaaagggtatctccaaactcctggaatagacttcacagacaccttcagtccagttgtaaaaccagccacagttcgtgttcttctaactcttgcagtcaccaataactggctcataaatcagcttgatgtctctaatgcgtttctaaatggagaattacacgaaacagtgcctcagccccctgggtttgtagatgctaccaaaccaactcatgtgtgtaaattacacaaagctttatacgggctcaaacaagcaccccgtgcctggaatgaaaaattaaaacagaccctttttcaggaaggtttttcagcttcacgatcagacccctctctgttcacaaaaggctctggcagtgagttcctcgtgctacttgtttacgttgatgatataatcctaacaggactaagtgaatcactcattaacagtctaattgctcgactgaatcaagccttctccatcaataaccttggacctttacactactttctcggagtagagattgcacgcaatgcctctggtatgtatctttcacaaaccaagtacatctctgatttacttgtcaagctccatatggacggagcaaagccctgtccaaatcccacaagttctgtgcataagctgtcactttcagagggagagccattttcagatcacacactttacagaagcactctcggagcattgcaatatctgactttaaccagacccgatgtggcatttattgtgaacaaattgagccaatttattcatgcccccactactacacattgggaggcatgcaaaaggctattcagatatctcaagggcaccattaatgaaggactcttaatcagaccagcaacaagattgtgtctacaagcatactctgatgctgattgggcaagctgtcctgatgacagacgctcaaccgggggctatgctatttactttggaggaaaccttgtgtcgtggtctgccaaaaagcaacaggttgttgctcgatagagtacagagagcgagtttcgtgctcttgcaaatacagctgctgaggttaaatggatatgctctgttcttactgaacttaaggtttatctgcctattactcccattatctgggttgataaccttggtgctgcatcattggctgcaaatcctgtatttcatgctcgatctaaacacattgagatcgacctacactttatccgagaccagatcatagcaaagcaagttgaggttcaatatgttccctcttgtgatcaaacgacagacattcttacaaagcccctgtcaacaaacagatttttatatctcaaacacaagcttcaagtgtgtccaacaccatttcgcttgaggggggatgataaagctacaactattactaaactacccttagttagttaattctgttaataacagaatcttgtaacaacttccttttctgttatttttgttttccttactttctctgtatcgtcccctatataaccatatcaaagcttaataataattcagcttttgcataatcttgaattgcaatcttatagattgaattcttttagatcttactgcatagataagctctttcaaaagacaaatgtaagtctacaaaatgtaagtgtaactttatatattaagatattaaaaagtcacatacatgaatgctacaattgttccaattattgaatagggcctcacgaattttaaccacacgtatccaaaatttggagccaccacttgaggattataactcacttcaccatctccgacttgattgtgtgcctggtgattagattaattttcactttagcacttaaaaaatataaaacattacacacaatgtgaagttgtttcaactaactatgtcactgtgtataataattgggtatacataacataagtggcaatttctctctctttacctcttagttacatacatgtttggtactattgtattaggaaaagcatgacataaactcttaacaaatcatccaagtcatttttatttacgtaaccattgttaaaaaaaattgtgttttaataaacaaaatttctattaaatctttgtgttttttttttttttggtaataatatatatttgtgcatttttagaaattccccaatatacataaacatactagttaatcaaattagatatggtagctacatgtaatgagatatcatttacattgtataactattttaattacaactcacagaattttaactgaattttttttagatgaattttaactgaaaattgatgccttgttaataaaaaaatacaagaatgatataaaataaaattaggaaaaattaatatgaataacatacttggaaagaattgaaccccctcggctggctgttcaataatgatttgaaacaactatttctgccacccaacctttctttatgatgaatcaaattcttagtggagtaataaacgtcgtaagagaaggatttagttgttgggttgtatttaattgatgcaaattcagaatgagaggagttatttttaagatgagccggtataatatttagcgataagggggagacgaagagccccattgtatgtatgtatgtatgaatgaacaatgtaatattcatacaaatctatataacaattcaaagaagaatatatagacttgacaaaaatacaagtttattatcattatttaaaatttaaaagacatttgtttattccatctcatgataccattattaggccggcaattggtcatgaatatgtttttctcatttttgtttctacctctttttttattattaaattattatttcacacctccaataatttccttattcattttcctgttaacaaaaataataaaagcttcatcacttcaagcttatttttctagaatagttgtctattattgattctcatgaagtccttagaaaaatgatactcattaagtaactaatcccacaaagtattttaactcttaatatgcacccaaaatctagttaacatagatggacgttcatttcttgtatgtccgcctacgctaaacttcacttttagcttttacttaggacacattcttcaaataattcgaattgtcctcattatttgcattttagaagtaggaatatcaaaaagatccatttagttagatttggttggagctccaattcaacggatcatttctgattcgaaacattcgaatacttattaatttttggattagatctgctctatcctgcctaatttttttttttgttggatcagatctgatccaattcggtttcaatatataaaaaaaattaattcaaaacccggacccgaacccaaattcggacctaaatccagacctagaacccaaacctggactcagacctaggaccttgatccagacctagaatccgaacccggagccaaacccgggtcccagacccgagactcgaaccaaacctagacctggacttgggacacagacccagaacgacccggacccggacccggacccgatccgtagtgggtgttgtcaagcttattgaaaatatattataactttacacaatctattaatacaagtcaatatcaaacatagtattgtattaaataatactaatacaaaattaaaattaatataaaactaaaattcttaaaaaaaataaaataaaataaaaaagataagtcgggttggattagatac

SEQ ID NO: 219358 - DNA, 2317 bp, Cannabis indica
aagccaaagacctgaaatacagagtaacaattttttacaacaaaattattgtgaaagctttgcttcttttttttctgcacccgaatgttgcttacgggtgaaatagtcaaaaacaagtaatcatgcacagggaactgggattcccaactgaataatttagtcgtagaaaataaaatcatgtatagcatactgacaatattgacaataattattattaaaagaaatgctgtatgcttagatcacatattccatttcgtcttatttttctataataataaataagcaacataattttattttaaagggagcatcatattttctaaaattttattttatttttctgcagcacacgtctagtatttttttgaacggaaaatgtctgtattatgaacatcacatgatttcaccatttttttttagaaaaaaagagagaaatttaaaaataaaagtgaggatgaaaaaaaaacaatatcaaattatagtttctctagaacaagtgtggtcttacatctcattctccttcaactgagagaggtattcatctttttgctcatctagcttattgctcacatcctataacaaaaggaaaaaattgatcaaccactacagaaatgcaataaccactctattatttaagcatcaccaatatatcaaaaacatttagccactgaccaataaccaatcacaacagcatgctatcctccataaaaatggttcttatacactaaatcaaggtaaaataatatcgagttacatgcaatatttatgcaaaataattttagatacaaagcttcaaatttgtatttgaaatcacaatagatgcttcagcaaattttcacagagacataattatgatcaatatcagcatcaagaataaaatagaattttgtactgaagataagcaaattcggttacaatggtgagttagtttgagagaccttccgctctccaaattccattccctgaaggatcccaacacccgacattcccgaaagccacttttcaagcaagggaagagtatttatagaaccgtatatccatctggtcagaataactaacaaataatattctaaaatcataataaaaccattaacttaagtggcgtttggattttcaaaaaaaaaaaaaaatggcgtttagtaacacttttgttttttaatttgagtaaattagcggcaaaacctccaaaagtttcacctcgctagcaattaacctcccaaaccatttattcctacggtaaaaccccccaaactcatgttcagttaatagttttccatttcggtccattttggctgttaaatgccaactggattgtctacatgaacataatgtacacacagcacaattttttggtccacataattacattatttaaaaaaatataaataatattttaaaataaaaaatttaagaataaatcatattaaaactaaaaataaaaaaaaaatcaaactaaaaatttcacatatatatatttttttttttttgaaaaagagacagaagtcattgtcttagactggcccctacccgttatatattgaaaactctcacttgtggcagaggaaaactttgggtacatgagttttagcatgaaacatactaaaacaagcacaaaaaaaaaattatattcgtatctagtacatcaaagatttccactcacaacataagtctagaaaagaaaattcttcaaaatgtttagtcctgtaaacctacgttgcaatccagaatttgattttttttcccataacctctctacttgatagaattttccatccaaaattctcgtgtttttttccaaccaaactgcccataaaagaaccaaaatggatgttcgccataggggattaggattttttagttatatttttattcttttatgtttatttattatttttttatttttttaataattatttgtttaaaatgttttattttaaattgtaaattaattaattttaatttaatattttttcaatattaaattaaatggactagtaaaattataccacgtgtacactgtgtccatgtggacaatccagtatggcatttaacagtcaaaatttgatggaaatggcaaactgctaacaaaatacgggtttgggaggttaattgctaacgatacgtaacttttggagatttcgccgcaatttacacttgttaattttttaaattacaaaagtgaaagtataattttgtttgttattttctgtatttggaaaacaggaatgtattctgcaactacttttgttttttaatttaaaaaaaataaaataaaagtgtgttctgtaaatttcattttcatttttgtttattagtt

SEQ ID NO: 219359 - DNA, 1436 bp, Cannabis indica
tataccaaaaaaagaactaacagagcttgaaccaaaaaaaaaagtgacagttagagaatttatatcccctaaacatggatctataccaagtactgacaagttatataacaagaggataagaggaccatctccatctatatatctaataagagattcttacccccaaacattttatctcttaacttaatgagaaaacagacaaagacaatacacaaccaaaatatcatcaaattgaaagaaagatttgacaaatttagcaagtggggtttttcagaattgggtcagttaagagagtggttcacattttgtttattaaaagcttaagaagcttagtatgggcttgaatgaactacccaacccaaccccaccccacctcaccttacccaccattagtgaatgtagttggattctgagaattagctcaaattacaataattcctctaaactatattctaaaaaaacatgtactataacattgattgttacccatatatatacacataataaatagagagataatgtgaacaagaaaagattaacccacatttcaaccatggaagcaacttcatctggattttccactgcatgttcatgattcacatcttcctctctgtaaaaaaaattaattaattaattaaaaattaaatacaaccgacaaaattaattttatttctattttttatttttttatttaatatttactcgaccattgttgggctcaaagggagtaaaggaaatgaacaaatgaaaaaccgacacgtgtcagagagagtacgagtactatgaataaagagagagaaagagtgtgtgtttttgtacagtgctcgaggcacaaaaaagcagtcactgtcagtaaaaccgttaaaaaaagccgtttctagaggaacaattgaggcgacccgtcgtggggaaaaaaggtgaaaggacggaaataccctccgtgattttacccttttgtttaagtaggttaggggtattttggggaaatgaatatggaggtgggagctacgaggtgaatggagggttttttggttggtttgtaagttaataaagaggaatccgaagacaaaaaaacgtaacggaataaacggtggtgatctaaagatccagatctcaacggttgggattctcgtttacggttttagtagtagtaatagaatagaatctgaagtgaaacaagaattggacggtgaagatgatacgagtgtgaaaagatttgacggttcagatcgattttcgaaaaggaaattgtaataaatgaaggaatttaataaatgccggtgagtctttttagttaggtgacagacctggaagccattgttgagttacttaagctctgcaactcctctgttccttcttcatctctgtaacaaaacaaaacaagaaaattgaaaagttgtaatgtactgaaacaattcaagagtaataacgccatt

SEQ ID NO: 219360 - DNA, 7366 bp, Cannabis indica
actttggctcttggatcaatcaattttttttggatttttggtggctcttttttttccggctctacttcgatcggtttattttttgggcttggatagtcgctagagatttttttttttgttttgctctgataccatgttagaatttgggataaagtgaatggggttccatctcaagaccaattggccatgggaggagtagcacattcctcttatatattctattatctttccacacattggcaatgtgggattctctaacaccaatcaaacgtcatcttagtaatttgttcttgatgaagaatgaatacttttttaattttattaaagaatgagaattttaaattaatttatgatttaggaatgggattgacaatctcacgaggttggtgaaatttttagtccaatttcttttaaaattataaattatcatttttattctgtttcaattgaagaaaattaaaaaaaaaaaatccaaataatttttttataaagggtatttttgtaacttaaaataatttactccgattacaaagtaattatgtaaacacatactgatttggattcctacaaactaagtaaacaacttattctaatccgattgagcataaatttgattcataatcagtttgatgattcttaactattccagttaagggtaactaaacgcaccattaatttaactattatttttttttcattctatttcatttcttttcctccacgtttttaaagaatttatttattattattaatatgattatttatatttataggattaatgataatattattttacttgtaggaaaaagaatatgaagcaaatctatatatatatataaagctaagatgtaaggcggtgacataacaatttaaattaatttcattctactttaattttttttctccattttctatatttatttaaataaaaatatttaaaaaactcaaatacaatttactttaaactcaaagtcaaatatttgctatatcactatgtagaagcttagttatggcaaaacaaagcaaggtactaagccagaggtagaaaccagggagaaaaaaagaaagagaaacagagaacgccaagaaagcttaaccagaaatggttagcttgatctgttatttatattcactaaagaagctaaatacaagttgtaaaaaataattgaacactagagctaaaaccgatataactaactaactgatttagtattgtattttacatcctccctcaaacgaaatggtgaagaagccatttgaagtttgctcttgagatagttaaatctgtcagtagttaatgacttagttaaagcatctgcaacttgatttaaaaagggaacatatcaacctgcaagttggtgagctaatatttgatctcgaataaaatgaagatcaaaatctatgtgtttgcaacgagcatgaaacgctggattagttgctagagatgttgcagattggttgtcaacctaaagcataggagtttgaacaacaaggacttgtagttctcctagcatagatgtaagccatcgaatttcagcagtagcatttgttagtgcttgaaattcacttttagtgtttgatcttacaacaccctgttactttttttatagactaggagatgagattacagcctaagaacatgacataaccacatgttgatctcctattaacaacataattggcccaatcagcatcactatatccatgtaaacatagagaatctattggacatagccacaagccatcatggatagttccctttggataccttagtaacctcttacaagcctcctagcgtgtattagtaggtgcatgaatgaactaactgaaattatttatgatgaaagccacatcaggtcttgtccaactcagaatttaaagtgcacctaaagtgcttctatacagtgttatatctggaaatggctcaccattggtaagacttagtttagttgttgagcttgtaggattaggacaactctttgccccctccatatgtaaccttggtaggaggtcagtgatgttctttgtttgagttaagtacattcctgttgtatcacaatagatttccacaccaagaaaataatgaattggccccaagtctttaagagaaaaaactttgttcaaatcagagatgagtcttgtatttgatacattgataagtatatcatcaacatatactaacaagtaaactagggatgcacctgttccatgaacaaacagagaattatctgacttagacagttgaaatctccactaaaacagtgtgtgtttaaacttctcattccaggcccttggagcttgttttaatccatacattgctttgtgcaatagacacacatgagtaggctttgttggatcaatgaagcctttaggttatttcatatagacaatctcttgtagagtgccatggagaaaggcattgctaacatcgagtttcttcacaggccaatgagcactaacgacaaaacttaagacaattctcactatggttggtttaacaagatgactgaatgtatcttcataatctattcctggtgtttagagatagccttttgcaactaatcttgatttgaattcgcctaatgaaccgtcaacatttagcttcactttatgtacccacttattgtcaatcacattcatgtgtggagcatatggaacaagagtccaagtaccttgtttagtaagagcatgaaactctactgacattgttgtaaactagtgaggattgttgagagcttcctttaaatttctaggtttattgggcagaagagattcttgtagaggatgttttgttgccaagtaagcctttggtttactaataccactttgagaccttgttctcatagaatgaactcttggggctattgtgttccaaatgcaggttatagtgagggatcattaaaaacaggtagggatggttcaaatacagatggtgatgtttgttttgttaggacatgtggatttggttgagatggtaattgttgttgtaaaaatagggctggggcagcaggagagttttttgtaggtatatgttgtggtttaattgaggctggattggtggctggtggcatggtgtaaggtgatggtgcagatggaagtggaggtttagtgtgttactgtatggagatgggagtaaggttaggttgtggttcattggcctgttgtggtggttcaattatttcttatgtaggagcagttgggatgggagaagtgtgtagttgtggggtagtattggcaacctgagttgttggtactgagatgtgaagctcagtattatcagcaaagaaaaaatcattagcatgtgttgtaacaggtttagtgccaaaagttgcatttggaacaggtgaggaagaatgtacctatgttagtgttgaggttaccgtgtgaccagtagctttcgctgggaatagcttctcattgaacaccacattcctagccatatagattcttccttctgagttctcacaaatgtagcctttgtgatgagatgaataccccaaaataggcatttcttggatctgtaatcaagcttatgcttgttgtatggccttaaatgtggataggatgcacatccaaaaagtttaaagatggcatattttggtttgctatcaaacaacactgcatatggagacagaaactttaacactttagtaggtaacctgttaattgaacacaacaaaactgaatgcataccaccagtaagtaaggtccagaccagattgagctaaaatggtgagaccagtctcattaatatgcatgtgttttctctctgccctcctattttgttcatgagtataaggacaagggtgttgtaaatagataccttgatcttctaagaatcttttaaatggcatatactccccccaatcatcttgaacatatataattggcaagttaaattgtttttccacttgacttttccatctcgagggcttaatgatgaattgtacatgtttcagccaagatagaccgcaagggttaggccctacaagaagattgtatagaaatctcattttactgcttaggtcgacttacatgtaacaacttgtaatattttgaaaagaattttacaagatcctagatttgtaataatattattttattttgaattaagattattacaagctattttgatatataagttatttcattattaatttacttggttaatagatcccgattaaaagaattagcataatgtaatcacgacatgtggcattccttgaaatagggcgttacattaacttttgacagatctgatgtcattctatcctccaataatatataacctagaaataccacctctcttgaccaaaattaacacttgtaagttttttccctgttaattgatcacttgaacatacttatactattatccataaagcaaattaggagtggattgtagtatcatttacgtactttatgccttttatgttgcttgaatatttcataatcccaacacttctcaaaaactcgtatggttcttgtcgtgccatgaaattattctagatatgccactttggtcctagttgtgccttacttgtctcttttctctatttgaggctatcctaacctcttctccttgagctatgctttacaccattattgttgtacgatatcatttcggctaatatcatacaacatgtggatgacatagttaggtccacaatgttaatatggaagttagcaattgaattctacattttctcttttgataagacttatattacataagttaatggtgtggaggaaaagtgcatcaagaccgtatgatattctcttaaagtagttaagagattctctccaagtggttgagagattccctcaattggtcattgaatatttaattcgatcttaaatatctataacagattcggttataaatatttattcaaataattaaatgtgattcaatttattattttaaattaaaaaatatatatatttaaataaattttttattggttttaatatatatatataccgtatagacttaaaaacatatacgcattatttttaggaagcctaaaagtaattaatctaattacacttttttccatcatcacttctaagagttcttattcatgtgttgagaacaaacaagaacacaatatacaatacatatcctgatagcccacattattccttgtgtgtgatggaagattcgaaagactactgtgtgagttcttcatcatcatctaaggatacaacttacgaaaagaaataaagatgccctgataagcttcaagagataaattttctttcatctatttattttagatttaatatatatacacatatggtaatcttgaagatgtggtacgaagataattagaaactattattctgctacaaacttgatttaatactacaaaaccaatagcaaatatatttaatattgactttgggccaattaggaaagacctgatttaaaagataactatcatccacatttacggggtccatttaatgatgacaattattatacattgctaaatctatacaataaatgctagaggataggtgaatcaatccctaatttagtgggatcctgtatctgaggtatctccacataagcctttgtttctagatgtcttttagacagtccttccgagaataccccatgaggatattagaatatgccatattgaaccttttttcttctgaccaagaaccattcccaaacttggacggtttgaccttgtattggatgagttcaatatgttatcgaacaccgagccacaaactaacttccttagtgggctgacacacccatttgggcccgagaatgggccttcctaaagtgagatgaatcttggaggtacacgtatcaccctaccaaaaacacgaataatatttatcccaaaagcctttggggctcatgagtcgttgaggcttgcaactttacttctgaattttgtgtggtagatgaaaccacgtataattttattctttaggaagagcatcaggtcatggatactgataaactttgtgttttccatgaatggaatacacatggtattgacttcttggtctttgaaatatacacatcttggaaagtgtgtgagacttctgagtttatgagatgacgaatgaccacactagcaagtttctcgaggtgaatataatcattgttttgccttgatcctacattaaggcattaaatgaaatcccttcagatgccctgactgttggatcatattgtgtttttttggagtgcgatattggttgttggatgttaagcacacaaatccccaatttatatataaatatattcaaggttgaaagtttaccactttttgccattttgaatttttagctccaatttttctgagagagaaaatttcatccaaagccctaatttttctgtacatctgacattacttcactttcttttgcatagggcccacagacattacgaatgagcattctcaagactttcatcaaccatgtggacactcaagctgacgagatgcaggaggcagctaggccatcaaaggggaaaggcagagctttcagttctagaccacgaatcaaatcaattacatcccctgccaacgtggtggatgccactgttgcggctaatgcactggccagtttcactactttgactatcctggtagctccgctgaactagattttgctagcctcagcggcacccatctgggatcaacttgtgatcccgaggggtggtgatgatgatgagggtgtgaatgggctagtctttctgttgaagaggtcagtagaaaatgttgacagacccgctaagaaggcaaaagttgaggtcgttcagaagttgacatccctacaattagcccttcaacagaaggaggagagggagaagttcgcgcaagagatggtgagagggagaaagctgaaaaggagaagaggaactccaagtgataagatttatttccctaataacccgcataacacatagtttttaattttccataaaaatttacagtacctctaaaatactaaagtataccactgtgacagttttgctagttcgttgagtttccactgttacagctcctaaacatattaaatacatatgtcgcaggcataattttgtaaaatctctataattgagtgttaatatcgtatttgtctatattctaataacaggtcttcatttctaaattcacttattattctataagttgctacaatattaattaattactaatttttcatgtttatgggattattataattaaagagttggagaatttttcagggtgtggcatgaagacctggatgatattagggatgaaatgcaaaataattctaaatttggaaactaagttagtaaatgtctattttttaaaaaaaattaaaaaatgatcaaatataataaatt

SEQ ID NO: 219361 - DNA, 2889 bp, Cannabis indica
tagagtattaaacttaaataaagcgtgatacttagtttttactatttttttcatatttttaagttaatattaaaacttaggtgtgtaattggattggattggattttgaggtctaattagattgaattagatgatgattttctaaatttaattactgattggattgaatcggatgaaaagaaaaatgttggattggatcggatgctcaaccctagtaaaacccatatttttttctacatgcaattagctatttatctacccaaagttggaaatggacattatacatcttcggttgtcaagtccaataactttgtttgtggtgtggatttgggcctgcatagtatagcccatgccctttggttaaatccagccctggcctgcaacttttcacaccggatcttgttcttttgctctcttttcagcatgtatagaattagttagttcaccccccaagtgtgtgaagtattgttcttttttctttcttctatttattcttatgttacgctttagagcaaacgataaagtccaagaaagtaaaataagacaaattttactttataaaagatcgagaatagtgtaattttgtagcatgtttaaaataaactttacattatatgctagttattatagtttcaaaatatatatgtatatatataatagttagcgtccaataatgctcgagttacatatcagggtacatatcaatcatgcacattaacacacacctacgccactgattagtattaatatatattttttcttcaatgtagaatgggaaagagaaattaaaaagaataccgggtacatgttaaaagatttattagtacgaaaggaagttccatcataaaatatgatgcgatccacctaagcctcatatgtaaactcagaatgtattacgtcctactcgtagaaaatagctattaccgacacataattattgatatccttaattagaaaaccatgtttcatgtttacattattatcaattaattaatatatgttttatgaagtcattattaacatatcctcgtagtgattagcccaaataagcatatacatatttgcacaaaatgttctcttgtaatagtggtgaggcgtatgtgacacgtgttatatatatgtacatgtatgtactgtataaatatatatataggtcatctcaacatcaaattgtgtaggtgagtgagtgacttcttagtcatggtcttgacatatataacttacaagaaccactaatagatgattgccacgccacgccagcatggatattgttctagccacccaacacaaccctctcaatcatcacaaactttgaaccatccaatgtagccacagaacttagagaaaacatttaatggtatcattaaaaacaataagtttgtgttcgttactagctaggagtacaataattgatttgtcaaggactgtggaaagttcccaagaaaaatcaaacaaagtcataaacggaaagaaaagcttgtctttactctggctttggtttcatctataataagtgacatgcaatatgcaataggagtaacagtacgtacaatgcacaaggaaacacaagttgcaagaaaattgcaaaaaagaaagggagttaaaaatcaaagaaggtagcattaggtgaatagatggacctcccaaatgcccccaccgggccacaccagtgtcccatttgtggttggtgccatcagatgtgtcaaaaaaaatttggtatagtgcttaagcttcagaaaccgcacctaattcccaccattaactcacacaagtttatgaccatgatgcaagccaaagatcttgtatgatccacattacataccacatttctctcacaaagatttaaatatcttgtctctcactcagtactatacttgttctttttcttcctctctacccatcttaatttaaaataaattataaataataataaataatctttctattcttatttaacaaatcaagttgaaaactttagttttggtctagacagttgtgggttttgattatcttcctagttccttcctactataagaaaggtctattttgtttcatttctctactttctcataaattaaccacaaaaattcttcaaatgaataattagaccaactcctaagcccaaactcagaagtttctaaaaaaaatcaaaccgatattattacaagttgcactccctccacgtttttcttaatcttcatttttcagcgcgccttatatacatatttacacacagtgggcttaataataatagtaataacttatagaaagggaaagcactattggatgtgattcagagagagagagagagaagtgagcaatgaagaagaagtgtgaactctgtgattcaccagcaaagatgtactgtgactcggatcgggctagcctatgctgggattgcgatggccgagtccacagtgcaaatttcctggtagctaagcatatgaggactctactctgccgtgtttgtcaatctttgactccttggagcggctcagggcccaaactcagccccactgtttcggtctgccacaactgtgttaatggctgctatcaaaacgagaccggaatccaacaaaacgatgacgaagaagacgacgactacgaagaagatgaagatgacagtgaagaagacaacgatgaggatgataataatgatggtgatggtgatggtggtagggatgacgaagacgatgaagagaatcaagtagttccatggtcaaataatccacctccaccagtgtcaagcaattcaagttcaagtggcgagtcttcaaagtccaacggcttgtttagtagacaaagaaatctttctgagtcaaaaacgacattttcctggaaagtacgtatgttaatgatttgatcctgatccaggtctttctggtttgt

SEQ ID NO: 219362 - DNA, 2540 bp, Cannabis indica
cacaataagtgatgaaaatacttctgtttctttattgatatttaaaagatagagattacattgaaatagagttttatttagggcataaaatccaacagttgtttctgatttttaactaatttacttacttcttaatgtgtagattagagtagtgtttgttatcttttgggtggtaaaggcaataggctctcttatgacttctttaattaaataaaaacatctttgcggctgaagttaaaactgtaattttttatatttcatgggacgaatctctaggtctgaacaattttaatgtttcactattacattcttctaatctccatttgacggttgtttaaattaaaaaactgacaccatatagagtacccatatttttagatgacagtttataattgacacttgaaaaaattaatggtgtgggtcagtaaactgacactaaagccaaaattgagatttaaaagaattttttttttttttttaaaaaaaaagcaaaacacctctatagtctcagttgagaattgagatcaaagagaacatgaaagatcaaaacaaactacgaaaccttgcccgctctcattttcatctacgctgaaacctaagcctggaaccccaaccatgaaacccctatcgatcccgctctctctcattctctcttattgatctcccttaccatcggaggtcacccattaatcctaaaacccccgtcgactttacccaacctcaaggcatcccaattcgtctttcctctctcgactgcgattcttgaagtgaagaatccttgaagttggcgactggagtttcgaaaaatctttgaagtagtcactggtcctatctcgtcatcgtgactactggtactccttgaagctcaccacttcgtcaaaaacacacaagtacataatatatactattatatataactattgtatatagttattataatcataatatatttcttttaaaattaagctccagcatgtttttctaagcttttagtgtttcaagtttgccaatagctctcgaaactcatgtattattatagtcaaatatatttctaaagttaaaagcatttagttttatatgaaacttttcataggctactctaagattagcacaactgaatagagtatcagaaccattgtctcgacaagttatggagcatcatgaagtaatgggcaagtatttagtatttatttttaaaaagtaaaatacatgtggtttgtattttccggatcatcattttcccacagtgagaaattggtatagaaaaataaggttcaaatgagattgtttatccaaaaagttagtttgatgatgtggacactattattgacacgtggcacaaagaaaaaaaatgttgggggctccgcatcccaggataggtcagtgttacttgtgttaggttttgtgccctaaataaaactcatttcaatataatcaatttttttttgatcaagaaggaacaacttcattactcaacaaacaattacaaacaaaactcagctgaaggtaaaaaccagctgcaagtcaacaaattttacagtatagttgctctatgaagttcctctcatatctattcaagctccctttttttgctattgatcatctgtaaaacataattttttttaatatcctgtacaatagatgtaattgtgctcgagaaaccattaaaaacacagttgtttctgttcaaccacagcctgtataccatggctgccatgacagcagtacaaattctgctattcttgtttttgttgctgatcaccaacctgtttttccaagcctaaaactccttcggtcagcccccaactcccagccaattttgcacctaatctgcaaccttgtaggagagattacactcgacgaaaagatgctgaattgattcagcaacttcagcacaaaccgggcactctacattgtccagcaagacccgaaattgtagcattttgttccttgttagcagctgatcattaacaacttgccacaagataaacctatgcttcaggacatttattgaactccacacacccctgatgtaaatgaaaggaatctgaggcaatttactgttgtataaaagatgaggtttgaacttacccgaagcccttgcagtttgaatgtccaacctatcaaatttatgtctcacatggcaaagctttagccaataccaactcgagtcaatctttagttcatatgtccaaatagatgagttctttagatatatattgttgatccatttcacccaaagagaatctcttttgtttgaaatggcccaaatatatttcgcaagatccgcttgattccaactagctccatccttgaatcccaaaccaccaaagttcttcggaagacaaaccttgataaagttgcagggcaccttgataccgcctattaccgacttaccttgtctgggcttgtcgaacaacttcctctaacttgataaagttgttagctctatcaaggaactccttcatattattggttgagatcctcgttatatctttctagaagtcactcaatggaaggatgtgttggaaattatttta

SEQ ID NO: 219363 - DNA, 3469 bp, Cannabis indica
taagctttttgagaagggtatttttgtcatttttatcttgcgtgaggtggttgatttttagtgtgggatctggccactatgtgagtaatgattttggtttatcattcctttttatgaatttttggaaatagaaagaaataggaaaaaaatcaagataaaccatctttttctctctctccttttctaactctcaaggaaccagcaacaattgggattttctttgctgcaaatcagagtaattagcaaggttttagtgatctaattcaaggggcctgtaaatcgtcaaacaactgttccatttaggttggccgacacacttgaatttggaaatgaggtaagattagtataatgatatacatatgtgtttgtatgtttagcatatatgttagttaagcctgttagattacattataatagcggtatcagtatatttagtattatgttggatatcagtgaatgtatattggcttaagtactattggtcagtatcactttggtacgactagagtatgactagcgtacttagtataggctgatattatggtcaataggctgatattatggttaatagtactatcgtacgaactttcttgactctttactgtgtcggacacggggatagggttatgattgggtgtatgggcacctgattataatccgaaatatagttatattattgtttatgcttttcttactgagtctgttgactcacagatattgtttgcatgtgtaggtaagggcaaggctaaggttgagcagccatgagagcgagcagatgaagattgtacatatcggggcggttaggcctggagcgtacggtctttgggacatctggacataatttgtatagtcgctaggcgacaacttttgtactatgcactgtgtaacttatgtaaatattttgcaaactggatcctagttttatataagtatgttattttgatatttataaatagttaagtaaagttttaaatattcacgattttcaataaactcattgattagcaacgaactggacaattaagttaaaaatcaagttaacatgcctaaactagtagggtgttttatgttaccctgagttccatgtctaaacttcatgcaatagcttcttttatgggatcgttttccaatatggatcaaatgattgacgagccaatgattgtgagttatctcctttaaatatgtttgatatttacgatatcactgaatctaggagagttagcccccctattatcaagtctcctcgcactaagttttctcctcctcacgatttttctaatttttctaattataccttaagttgaatttttcacacttatgtttgaagtgtttatatgttcttttcaatgtaagatatgctctttatgttattcattaatcactttttctttctttttgtaggaatggagttagatttggaaaatctccttagtagcctcgccgtctttgttatgtgaggcaagaagcaaggtgtctccaaggtttaaatcgtcgagaagtagccaaaggttttgaggaaaaaaaaaggcaccactcagaagaatgctccccctgcctccagcattattttagagaaaaacaagaattcaacccctaaagctctcgtttggatacctgaattgacagatagagaaaaccaagcgatgggatccgttcatcaaatcactttctctactactagccctgtagttattttggtagatcccgtctatcctttgcctcttgagtccagcatcgagggttcaagagtttgccctcgctatataacctaagagtgttgccacttcaacatttatcagccgaatgattagaacttgatcaaggctgggtctccttctaactttctaacgaggactatagaacttttgcaatcgattagtatcttaacttttgtagttggctaacttttttcttccttgcttttttttcccttttattagaatattaaattctcagttcttatgtgtaggcttcccttttggcaaacttgggccttcaagctcatcaatagacttcatctcataagactgtgaagattccaatcaactgaaggagaatcgtgctcagatcttggtgatactctgctacagaaaggatacaagggttagagatctaagtggaaggagtcatttaattttgctgcaaccaatataaggtttcttgaactttatatgtgtttaaattccattgttttagaaattcatatttaggatgttaaataacatacatggtagtaaatctggatcctggtaaaataatccctaacaaatcggtcttccagttaaggaaccgttctgcaggttaggccagttttaggaaccctagtttttcctatttttgcgatatttagggtatttccatgttgtccaaagataaacaaacttttagtttcaattttcagtccttgaaaagttatttagcgtgtcactcatcaattttgcgaataatgtgatttaggggcctgtaaatcgtcaagcagcaattctactttggttggtcggcacacttaaattcgtaagtgaggtaaaattagtataatgatatgtatatgtgcttacatgtttagcgtacatatttattaagcatattaggttacatcgatagtggtaccaatatacgtagagttatattagataccgacagatgtatgtttggctcaaatactgatcgacgctatcacattggtgtgactagaatatgaatagcgtaccaagtataggctgatattatggttgatagtattgtcatacgaacattctagactcaataccgtgttgaacacggggatagggttatggttgggtgaatgggtgcctgattataatatggattatagttatgttattgattatacttttcttactgagtctgtcgactcacagatattgtttgcatgtgtaggtaagagaaaggctaaggttgagcaattgtgagagcgagcgaatgaagattgtacatgtcgggacagttaggccttgagcatacgatctttgggacagcttgtaatattttgtatagtcgttaggcgacaaattttgtatcaaataactgaaatagatgcaaatattttgtatgcgggatcccggttatatatatgttatatattttggtaattataagtatttaaacaaagttttaattattcatgattttcaacaaacttgttgagtagcagcgagctgtacagtaaatataaaattatgataacacacttaatctagtaggacgttacaaatggcttaattgttaagaaaatagagtttgagatttatttgttaattgagagactttgtatggtctaattaataaataagataaatagtaattttatttgattaattaattataattatcaaataaatagtttttataaattgaaaaatgtggcattattaaaagaaaaaatgaattatgaaataaaagtgataaagttgtaactagtgaggcccacatgtgtaggccagccact

SEQ ID NO: 219364 - DNA, 3328 bp, Cannabis indica
tgatgtacgacagccattagatgagaagttatttgatctgagggttggggttgatctagaggtaattaaagttaaaaaattgtaacatattctgagacccatctaatgtaccacggaatacgttacgtgaaagtatatcacggaacaatatcgtgtctcaaaatatatatatttatatattttattatttatttatatattgctaaacatttacatgtagatttatatataagtgggaggaagacacttgttgtggtatgcctttgataaagtaaactcttgattatattaagcgacaaataatgggtgtgacatgtcagtatctgaatcatagagacacttaactttgtttttctttttctttttggaaattagaaagaaaataaatacacacaaattaaattcatataaaaataattgaaaagtaaataaacaaattacaaaataaaaaataaaaccccccacccacgtgtactttctataatgggttgggttaattatgatggaaattttgagtttctttggtggtaattaataagaataaaaaagcaaataacaagtacttataattttaattttatgagggtataaatttaatattttgtagtgaatataagtatttaatgtttataaaattattaaatttattaaaaaaaattaaaagtaattgatattagatgtttctatgcagacgaaataatttaaaattttgaccttatatatgttctcattaaataaaaaatagttcatctgacgaaattagagaaaaattatacttataaatattacatacttatgttgctaaaaaattattgaatttatgtcatttaaaaagtcaaagctttaaatattataccctatctatccaaagaaaaatatattatcaccgatctaatgataggaattctttgctttgtaattcaaggtaaagattcaagtgggatcaaagttaaaatttgtatatttgtgtatatgttaattatgtatttgttcctcttttgtagtgtttatctctcaaagtagtagtgatgatattcttccctctccttcgttgagatttcactcttctttctcttcataggtattcttgaaggattgtgttggcttggaattaattatctttagtggctattattcaaaaaatttggtaagatgaagtgaacaatattttcggcacgtaacacctagaacgattctaaaaaattatcaagcgactctagaaaataatacacataagcactacccaagcagggtaggggcacccaagtccaattttcccaatagttgattttaggcttatttccttcaacaattcaactataagatcacgaaaatacattgacatcaacaaacatatccataataggggcctggacattgctcgtgtgcttttgggtgcccaagtcctatttttgtgatgggcaacttaatttttgtatacttgggcaacttaattttggtatactctggcaagctgtgtgcacattcagctcctgaaagatgaaacagtgcaagaacaagacttagagacatcacccagcacgtagactctgtttattgagtaaaatgcccagacctactcgatatcgagcatggtgtttcaacaatcagactataattcactctaaatgcaagatttctagctagaagatcaggtgaataactcaagatgcaagttacaaacccattagggggcattcacgcctaccaaacacccagggtatgcatgcacccaacgaaggcagtgtcacaaggactagggaatatagcgccaggtgctgagttcatatacccgggtagttagggttttttacctcttaatcaatttatttgattctgatcttcagaagacaatttcatgtagaagataggcctttctcgaggacacgttcttccgaagggcagatcattactttcaatttggcatgcaaagcctcgagaagtttcttcttgatcaaagagctctaatactttatcaaaaatcaatggtcctcatcagatcccaacatcaatggccatcattcacttccaaattctacatatctcatccattcatcaaagttcaagatcaatgaacatcgttaaaccttaaaatctacagttacatcatcaaggaatattcttgaaatatgctcatttaaacatttacttatcattattattattttaaattataatacatactagttttcctatatataactagaaggcttaacagttcattatttcccatacactttttttttaatatttaagcgtttatatattacaaccatgttttacttgggacccgaactcaggacctccaactttcacccacctacctatggccacttgagctagcctcaagtggtttattttccatacactttatttatgctcatttatgcttaagaaatttatagttctttaactttaacattgctcttaagctataattatgtaaacagtttattacttggcgcttaagaaactcacttgagccacattcttgtgattttaagtgttcaagatttaataaagctacaagtaattaaacacaaattattattgcttaaagagaccaaattactataattaaaattactatgctcaatctttacttttatgctcattgttaaccgttgaacacattgtcgttgactatttttagagtggtgctcactatttataatttaattgtaatatgtaatgatttaataaattttaaaaaaatatatattaattcaatatcaaaaatatgtaacctaggactaaaatattcattatataatattataacacaaataatatatggatgttaatataaaaaaaaaaaaaaaaaaaaacataggctagtgtgtgagcaattatgagctgccctactatatatgatatatatatatatattatatagttatatatatttaacttaataaatatttttgaacaattaatgatcaattcattattgtatatttgttaaatactaataatttcatgttcactttcacaaaataataataataataatttgatgttcacaactaaattgatatattaatttgaatggaatagtttgtttgaatgcatggtaatgtgaatttgtaaaacatataaatatatatataaatattcataaattaattaatgcatggctttgaaattatccaatggttacttagttcacaatcacatgtttgaaaattgaaaagtaacaataaaacgacatttacgaagtggacattgcgtagggtttgtctctctgcctattagggcttccaatatgcaaattccagagattgtctacttcacaatataccataattagtccacaatattttttttt

SEQ ID NO: 219365 - DNA, 2046 bp, Cannabis indica
tcacttcttctatctggccatggttgccacaaatgtgaatcatagtgttgaaagtaacagtggtcggagctatcccttcggtaagcatctctgcaaaaactttagatgcttccttaagctgtccagctttcccgtatgtgtcaatcaaagtattgtacgtatgtgaactcaaacaaacatgagaaagcaaaccagtctccattttagtggaaccattcaaagttttactcttttgcctcagctgttcacctaatgaccatttcttgaaaaaaccctcagccttttgaaactcccctgctttcttatacagttgaacaacaattcccatagttacttcatcaggtaccattccttgcttgttcattctcgccagccaaagaagtgccttttctttaagcccgcctttgctataaacatcgattaaagtcccataagttgaatttattggtgcaattcctttggctttcatttcatcccaaagaccctcaatatagctccacttcctagctttcccaagtgtcctgagcataatattgtagtgaattacattcaattcataacaacccttactcttgaaccaatcaaagatttccaaagccctttcccagctcacctgctctttcaaaataatgctcctttctttattgttaagattcccctcccaaggctgtaaagccttatccaaatccttaacttcaactaaagcttgcaggattgccggaatacaacccccataagacccccatttcgtcgaacacttggtatgcactttctttactaccacatcttgtctagtactactcctcctaaatttaccattaccctcgttctccttcaaaactccaccactatcccaacagtttgctctcctttctgtacctgggttttccaccaaactctgttttttaaactctcgacggccactactagctgtatcacgagagggtctggggaattcactaaacctcttcttaaatccttctgcatcgggagttttaatgaccctttgcttcctatccttgctaatagcctcaagtttttctagaggagaaactgagattcctatattgggtacaatcttcgtggaacccaacaaggataagcaaccggggtccagttgaagcttgacgaacattattcaaccaatgaaaaatgtgtgaaagacacaaactcagacgaaagcagaaagattcaaaattgagtgaaacataccagtaaatggttatggatgctgctgttgttagaaaatggagcaagtgtcaagttcagttccgcgcgcgcccgtgttaaccacttttaattatttttttggtccatagtaagaaatagaaaagattttgtttatttgtggataaatactaaaagtttttttattttctcagtttgttagtgtattttgttgtgttatgtttttgtgtgttatatatttttttaagtgtataaatttttggagacattaaaaattattggaggatcagtaaagatcattagataagctttcttcatattttaattgctaaataagtatttatatattgaaatttttgtttttaattttttttataagttaatttcttacttcatttatcttatttatcttttttggtttttttgtaggttgttaatttgtctatacttcaaaatacgaaaagttcacatattgcagaagatctgaactcattggttacttcttagtcattcaagcaaaagcttcagtcttaatgatagtgctgggattggctttacacattgttctttctttttgttatgtggagtctaattatttagctttagtttctgttgttcaaaagtgctctttcttttgacatgagctaggtttttttagatttttttgctactttgctttccagttttcctaaggcatccctagttcatgttcatttctcatgaattagttgtgcatgcacttagggtggatggtgatttagcttagatcgaggattatatatcttttcttattgatttgtattaaactcttggttgttgttaataagagtttaatttccaaaaataaaaaaaaaaata

SEQ ID NO: 219366 - DNA, 5957 bp, Cannabis indica
tttttttttttttttggtttaagatatggaattgctgatttgattgatgaagttattctattaaggtgttaatttgcttttttcataacgtaggtgtttaagcactatttcgaagagttagaagaggagtccttgagggacaactttgttgtagtggtatgtgatattctttgcatcactcaattcatatggattattgttttgcatgtataatataattttgtacttgtgatttcacagtatgagttgcttgatgaaataatggactttggtttccctcaattcacggaagctaaaattcttagcgagtttatcaagactgatgcttataggatggaagttactcagcgacctcctatggctgtcacgaatgcagtttcttggcgaagtgaaggcattcgatacaagaagaatgaagtaggtttattgttttcggtgattgcatcttattgttttttatgctgattggagtagccgtgatgtgtgaccttttttttcctttttatttcaggttttcttagatgtggtcgaaagtgtaaacatacttgtgaacagcaatggccaaataatacgctcagatgtagttggggcattaaagatgaggacatatttgaggtactagatttttttctccccaggtattgattgtaattatgctttaaaacaagtaggcttcatagtgtccaattgtatgaatttcttagaatgttttttcaactactatttatttccaagtaaaaatattaagtaatgttaaccttgatatgttgttgccctacatttattcaatttgatttacttcttccaacttccaagtttgtatctcatttatgcaatgcaatttgagttggagcacgttgtagttgcatttgtttgcagccatgttcttcacccttgtgcttggttgcagacttgcagttacttacctcaaacatttcggacttggcattcaaagcatgggtgttcattctttttttagttatctttctaatcattagagccttcactgtgattggtattataaataatgtgatttatttatttatttttatgagcaataccgagggaaaacttctaatttattttgaaggacactttttcccattagtcaatcttttcttgttttgggccttttagtattgcccaacttctgtgctgtgtcatgatctcaagaaggtttatgtgatttatacactgagggctcatttttttttcttccctcaacgcttttaaaattcttctatacattcaaccttttgttgattaatccagcttacttggttgaactcttgcagtggtatgccagagtgtaagttaggccttaatgatagagtgttactggaagctcaaggtcgaacaacaaaaggaaaagctattgatttggatgatattaagtttcatcagtatgtttccccttaccaactttgtttttctcttgattttcggactcccttcaagttctgttaaactattgcagactgtttatgtgtttcaagtcagacattctgtatgattgctcctttcttttcccataacattccttttcgttccttcaacctgttaggtgtgtacgtttggctcgatttgaaaatgaccgaaccatatccttcatacccccagatggagcttttgatctgatgacgtatagactcagcactcaggttcatttcacatgtagtgaacttttaattgtataatattgtttatttttttgttatttatttatttagttttaataaaaattattattatgttttgtgtgtgactctgtttttccccttcaggtaaaacctctaatttgggtggaagcacaagttgaaaggcattctagaagtcgtattgaaattatggtaaaagcaaggagccaatttaaggagcgcaggtagcttttactatgtgtttcttataatttatacatacacacatacataagttgattcaaaattttcttaatattgactgagtagcatcaagttttcagaagtttctcatgtcaatgtttcctttccaatggttaatggccatacttcctacaaattgcaaaatgacactctttagttgtagattttcttttgtttagcctataatggatttcggatttaagggctactttgatagccttagaatccaatttaatttattcttttagtccttgttacatttgtgagggatgtgagtgagaagtttctgatttcaatcactacgaactatgtggtacagcactgcaacaaatgtcgaaattgaattacctatcacttctgatgctacaaatcctaatgtccgaacatcaatggggagtgctgcttacgctcccgagagtgatgcattggtctggaaaataaaatcttttcctggtaataaggtaggcatgctcacatcaagcgttgactcacataccatttgatatactgtatatttgattattataaaatcgttaagtttgtgcattgattctgtaggaatatatgttaagggctgagttcactcttcctagtataactgctgaagatgcagctcctgaaagaaaagctcccatccgtgtaaagtttgagataccttattttaccgtctcaggaattcaggtatgttttctgagcattgttatatggcccaatggagccttaaaatttgctttattacagtctcaaactagaattggaatttgaaatcagaatcataaatacttgcaccagaaaagaaataggttggctaagttcaagctgaagctaaatttgctgaatatattgatgtagtagaattagagttgaaatatatcttgagtttgctagtgagcagggtttctatgttcttacacatgatattgtttttttttttatcatatgcaactctatgaatgatatggaatgcatggtattataacaacgcgtggtggaagtataatggagatgccatgtttgagggatggtagataaaatatatagaggcggcttgtaatataaaatgttgccatgttttcaactctgtttgataattattagttgttttctatcttctctcgagaaatgtcttattagtattaagttatatcgtcaatatgtttgagcttgtgggtgtagcgcgacaaatggttttaaacctttgtgtataatgaaaagaatgtcaggtattgaacatgataaaggtttatttcatgtacaccaaaattcaaaatgagagagacgcacgaggggttgctcaaaaggtcagatatgtggttttctcccacaagatttgaggctcaagtcctttgtgggtagctacctacacagtaattgctatagttttcctaaaatatcattggattaggcaggagtttagtttaaaaataaaaaaccaaaatgagttgggcttaaccagtcagcagtctaatcatgcatgcacaatcccaccttcctttattgttctttgacaaggaacaaactatgtttatataaaatgaattatggttaatctgtattatgatgttttgattaataccaacatttaaaattgggactttgtaggttcgctatctaaagattattgaaaaaagtggataccaggctcttccatgggtgagatacataacaatggctggtgagtatgaattaagactcatttaaaggctactcgaatgtgtatattttgcttttacgaagtttccttccataattttggtaatagtgctaattttcttcccttgcgatcttccaatactataaatttttgttcaaattgtatgagctgtttgtaatgatgcaagtgttataccaaagaactaaatattttctttttcaatttttgtgagtattgatataattgagaagcaagaattcattcaacgccactcttgttcacttttatgttgaatattgataaaccctcacacttctatatgaatttctagtttctttttagagtataaggagttttttttttttttttttttttgagtgtaatagagtataatgagttgattacgtgaaaaagctttctaatttaaataatgaatatttattcttattgtaattttaatttgattgcattagttacattacatttttaaaataatttggttataggaaatattataaagcagaatataattgtaaggagagtaatatgtaattatatttttattaattgaattatattatttggttgagcacataaatatattattttaaaaaattaaaataaaaaataattttttattatatctatttaataattacaccaattaataattagaaacacattaattttttttttatacagaatttttcttttcggtctgccattattttataactattgtaatacatgttatatcatgccaaatgtgaaaccagtatatattttgatttagtaatagttaattttattaccattgatgtgaattgattattacacttgcatgtttactaaaggggaatgaatttaaattgtatgagattaattcctatttattgtttactaaattttggaatgggagaaattactgggcacacaaaaagagaaaaaaaaaggaaaggttttctccccattttcataaagaatatctttccttaacgtactttatattaattatatttatgttaattgaaaatagaaaagacaaatatacccttcaaaaatatataaataaaaaatagttacatgttctaataatggtaatttagtcaaattaagtcattttgattatttttcttaattatgtaaacaaaataaaataattctgatttcctttccagtcagtttagtaaacaacaaaataaaatataagatctcattaatagttagtgaaccgctttgatatcaattgaaattttgtttttataattactaagtgaaattattaaataatttaaataatacagaattgtaataaaaatgtttgaacagaatttaactactctattagacagaatttgacagaacaataatatgatgcaaaagtaaaaatacaaaaaataaaatgacacacaatattttatatgcagtatcaacaatcctttcgaatcgctcctagtttatggggccatgcccagagaatgaaatttattttatgaatctcaagtgattacaaagccaaattgacttatatatataatctctctttgaatttatcgcaacggttgtaatttatcattctaatcaaatttttgaagtgcctagacctttaactcctttcaaatcgtaacacttgcacacttcctttcgaagagtgagtcacttgcaatctttctcctgagagtgtctaacttgtacttttcctcctgaaaaatgtcttacgaacaattcttttccctaagcttgatgaacaatatctaaggtgttcaacttgcacaagtttaacaagaaacaatatagaataacacaataataaaatattaagaactttttgaactcaagctcttcacacaacaaagaaactctctctaaatttgaaagtaattttagaaatgatacaacaagagagatagaggaaaccaacaacctaagagtgtatttatacactttagaatccctctaggtcgtggtcaaataatcatgaaacaatcaggtcaataaatggaaaatcttcccaaacatgtgagtcagaatctatttaaacacatagtcactcttttcaaacaggaatagaaaatggacagttttttaacaaaatttctataaacaaataaggaaactttaacagcctttacacacacaactatacaatttcttggctaaaaaattagataagaatcaaataaatataataaagattttctttaaaaatacgaagatatatcaaataacctaaataaggaaaacttatttttattcaccaataaatacaagaaatttgatttcaaaggcttttcatactaagaaaagagtatatatttttgaaattaataaatataaatacaaaactattttcaaaataccaaaaatattatatttgtctattttatcaaatatgtcaataa

SEQ ID NO: 219367 - DNA, 2792 bp, Cannabis indica
gaagaagaagaagctagtttggcttgatgggagctggaaaagaatctgaaaactagtcgaatgagctcagctcctctcaaaactcgaccgtttttttttttaactaaaacatagactaaccaacaacaagaaaaaagaaaggtttttttctgcattttctttaacaaaggttgcagctttagtggggagccttaaaatgtcccaacaaagagctctactacttacttgatgaactcttttcctacccaattctttaacctatcgggtatcgccgccaactttggatgttaaggctaccctgagttgttcctgcgtgtaaaaccgactccccattttcactgttgcttgttggatcatcaaatcgttaactactgagacactggcatggtgaacatccaagtctagctccattagagctgccattacccttgcagctgggtggttcttcttactacattgaatcctaatcatggcatcccaaccaatgattttcacgtctatatccaaatctataagcttgcttccaccaccaaggttagacaccatcgaaaggtcttgatcagctgacgaagaacgcgaatctttgctagctaattcccttttcatagaatccatttgtttctggagatcctccttgtctgtttctgtagtttgaagcttcgatttgagctcgttgatgtaagaaatcgcgtcgccgagtagggaagctttgtccatctttgaaacgttgggaacaacagctctaagagcataaaacctctggttaagcttctctcttctctgtctttcagcttcaacatgattcaatggctcttctcttccattagctggctttctacctctctttctgggccttttctctggctctactactctgctactgtcagcttctctaacaaccgaagcttcaagatcagagtggtcagaatcacctgttccaccgctcgattttatgacaccactggatggtaaaacaaccccagaagtaaaagataacatcccttcttcgttattacttccccttgaagttggagatttcttcttcttattagtaccattagtagtggtgttgttgatgttgttgttgttttcttctgctgcgaattgggattgcccagaaaacaaattcccattagcactgtaagaactcctcttactttccccaaaattcaatatctcccctgattcaggcttcaaggaatgagaatttccgttgttcttgacactgttcccatcaaatccataatcagagaaattcaattctttggtgaaaaagctttgggtagtctgtgcttgttgttgtctctgaatcgtgctgggattgtcggtcaagctactagagctagggttttcgaactgaacagttgatttagaagtctgttgctggtttgttgagctcggaaccgaagccgacggagctgctccggtggttacagaatcttttacttccacggtggtagaagttgggtcattaagccaaaacgaaggatcgttttccccttgatcaggagctccaccaccgcttaaaagacaagaaccaacttcaagattactgaaattaaacaagaatctaaccttgttcatcagatccgagctctggaagatgacttctgtagaccctaattccacaacaccattctcagaaggaatacaaactatcgtctgtaacccaaagatctgaccttgtcgagccctctcacatgtcgaagaggttaggttatctcttcccgtaacccaaacagggtttgaattgaaaaacgcctgaccaggtaacccgccgccattaacgaacgactgagtcatcgaaaccaaaaagaaccactccgtatcagtaacttcctcatcaacagcctcatccggcgccggagcggatccagaaatcaaagaattaagctcacgaaggacttttttccggtgctcctgttcagcaggagaagagtaagacgccttagccttacctcttcctttatcttcttcacccttgtaatacccatcaccccaaccaagaacagaagcaccagaataatcatacgaagactgccagaaaatcgcgtaagtccagctctcccgtgctccttcaatcaaagcctggagtcgttgctgaagagtctcctggttaaaaggcgcaacctgaggaggaggaggagggggaagaggaggaggttgttgttgttgttgaggggcggctgaagtggaagcggcggagtgaaggggttgaaggggttgggttgaggtggtggtggtggtggtgggtgtagcagcagcccataaagaagaaagatctgaagaactcatgaaagcttccatcatggaagcgttgtcgtcagtccagagattcatggtggattgtattctgtagtccgtcattcatacaacggaaatgggtttagagagagaaagtggcggcagagaagaaagagagagagagaaagatgatgatgatatgggattggtggtttgctttgctgaattattataattatttattataattatttatttttaataataataataataataatacatatctgaattttggagctcactttgatgatgatgatgatgagcagttattggttttatttttaatatttgataataataataataataagaagtagagttggagaagtgagtttggattgggtggtagtggtggtattaggagaagttatttgaagagaagaaaggtttggatgaaaacgagtaaatgaaatgaagtgtaataataatagggaaatttgattttctatgcttagaaattaaaaaatttgatttttaaaccaaaa

SEQ ID NO: 219368 - DNA, 5071 bp, Cannabis indica
cctgcagttaaggactatggtttgccttttgtatgccatttatgtactaaaacggcaactctatgattaggcgattccattgaataatactgatgtgcgtaccattatcatttttttaattgaacaaatcaactaaaatcaaatttaattttaagtggatgagcaaactattcaagcatacaaaacaggtgtgatatgaattattaaactattatactaatttacaacggtaataatagttggtagcattaaaggtttgatgtgtgggatggatcatgtttatctactgtactaactgtggtatcatgtaattccatacttaaataaaagggtaaggctcataagtgaccactaatgagtgaaagaacaaaaatgcatcaattttggatataagttttagtttttttgaaataaaaagaaacatatggatcataattaagttacaagtcgctaatcattataatatatataatgattaggaaacataataaatattgggtgtaatcataaaaaaataagatgaatatacagctcagaattaaatgaaaatatataaaaagaacagtcttgatatgattccttaattctttattaacccgtgcattttggctcaaccaataaccgaagtcgtacccactaaatcagaattatatgaaaatgctggtattcagcatgttttccatcaagaattaataatcaaaacaaacaccccgattcttataaaaaaatatatataaacataaattcttcttaaacatgttgtgattaataattcacatcaaataaaaaagctccacgaattcgtggtactgatataatacctaagaaagtagcagtggtgcatagaaattacaagattaggtggatggaagttttcattaggagtggctagagatgcatagctcataaggatattgccataatcgtagtttgcataaaatatagagacaataataaaaaaacatgtaacttagattacaagtttgtatttacagtaaggttacgtataatatttccaatgtttttaaacaatgatgtaagctgcttgaaattaatgaggttgctaacgaaaatgtacaagcaacataaaaataacttgaacctctatgagttggtatgcatcaatgagaatttctgctgatgatttgatcaggatcaagaacaatgccatgggctactcctggtcggccgaagatacctctgtgatgagtaggggctaaaggttccattggctcaatatttggaggaattggagtttcatcagagtggccagagatgcagagggttccagactcatcttggtcccagtagacctctaccatattccctctaggattctctgtactttcggttccaggaattcccacaaacctagctcccactggtatctacattacatttcaaaactatagagtaagaaggccccttatgtgtaccattaacataacaatggaaaactagcagtgagttaggcttttacctcaattgatattccagatgttaaagtaagagtaacaactctaccctcagctattgctgtttctagttctgcttgctttgctatatttaagaaaacttcttcaagagttgtaagaccaagttgaatgtcaactataccaaattcacttcctctttcttgtagctccgtaaaaaaattctgtacaatgttaaaaatacaatgaaacaaaaaatcaaactaaaggaacaataagggaatttatttattatttcaacaaaaaatgcaggcaaaaagaataaaaattcagaaacataccggtaaaagcacctctctatcatgaggaatgacaaaggtcaaaaatgatttgttctcctcttttggaagaacgtttaaatgctgtcaaaacattcatcaagttagagatgaactatttattagtgaaagaaaagaaaaatcatgaatgattgatttagtcactctacatgcttaaagaactgcttcaccgcattatgatgagttgtatcaacaacatccctgttggtcgtttggcgatggttgctaccagaaaagctcacattagcaataaaaccagtcccaaaacgggacttcaatctgattgaggttccaatgcagcgtagcctaccctttgccataatcccaatccgatcacttaaaatgtcagcttcttccattgaatgtgttgttaggactattgcacgccctttcttagcattttctataatatcccacacatgtcttcttgttattggatccatacccgttgtctacaaatcaaaatgaaaattacataagaaagtattcaattgatttgactagcaaagaacacatagcaacaaagacaacagtctcaactgcttacaggttcatctaatatgactagttttggatcaccaataagggctatagcaacactgagtcgacgtttcattcctccactataactgccagctcttatattggctgcctcagtgagtctcacctcctcaagtgatgcttgaatagcctgcatttcagaaaagcgctcaagtaaaagtgtggaatctaaagagacaattgcttaacaatggtattgcatgatagttagacatctttatctcttttactaaacatgcatgtgagaaaataatcactcaacacattatgaattgtgttacatactgatttgattgaggatggggacaggcccttaatactagcaaagagatcgaggtgttctttcccagaaagtgcgtcccaaagaatatcaaactgtgaaaattgaaacagatacaatacaaatttagattagtcagttttctcaatactgctaaatactgaaaatgagatatatttatattcttgataagacattaaggagaaatcctgcacttacaatacaaaggaaacacgttatgggcaaggattacctgaggacaaactcctatcaattttcgaattttagtacatgccagtggagcttcttacagatagcccatatatcaaagctgttaccatgccgattacaattgcaagcaagaaaaagacagcagtaagattacactcatatgttatgtttatggatgaacacatcagaaatcaacaaattaccatctccactagtcaccggagtgattccagtcaaacaattaattgctgtggtcttccctgctccattgggtccaagaagacaaaacaactgatcttttgcaaagttaacccacaggtcctaaacgttgatgaaatatttttagcttattgctatgataatttaattataacacagaaaaggaaacaaaacagcactaacagaggttcacatctcttatgcatgaacatattcttatgagatttttgtgtttttcctcctttatggcaaattgctaatcagaacttgttttgaataaataaatagtatattttgacgatggaatatccgtataggtagaaaaaagcaccaaatcttcatcaagtaggacgctacactaaataaatattgatagaaagtgccataaattatagctaatatataaagttttcaagactatcaccaaccttgctaaaatccataatcaagcacacgtttttaccttcaaagcttggtaaggagaatttttcttgaatttacagcaaccaatgtttatggacccagggtatgtttttcccaatccacggatctgaacagcaatattggggtaattaacaccttccctagtgtgttgttttactaggttctcctcttcaatgacatcttcatcatctggggaaataagctcctgtggtggaagagagcctacacagctacaaatgccaccctctgtgaacagaaaatggagaagctattaagttcccagtatcaatcaacaaggaaatctcaagcataatataaacacaatttaccttccattttgtttccaccttttccaaaccaatatcctggttttaaaaaataaaacacagattttcttacaccgtatacgttaggaataatgttatcaaagtagatcgccaacactaaccaaaggaagaaagtagccaccagccacttataaatatcatcctgccaaggaatgttgaattcaaaactttgagacaaaaaaagaggtaactgctaagaatttgcatagacaatgttgaactcaaaactttgagcaccaatatttcctcatacaattgttatgacacactcgttgtcatttggtgcacattttgctcgtctactccagctaaccccaacatcttgagatgtggaagttgctccagcaagtaaggataaggcttgagccagaagatttggtgggaagaatgaccaaatgattctgacatgtttagatatgatagaagagtatggaaatccaaatgctgtaacaagctgcaatgagaaaatggtaactgctgttaccattctaatgattacttctcttcttgagtctagaaaacactaacaagggaagcttacctgagtcacaaagccaacaataaacacgaagaaaccagcagttgtagatgaagatgccttagtcatgaaggctgacaacaagaaggcgaagccaagctgcactccaaatttagacatggaaacaaatgttactgttaacaagaaattcttccgtgacagagagaataacaataacaagcacactatgaacgaaccatattgagttggaatagaaagaatacaagaaatacaacagcaaaactattgttcaagaagaattcaaactgaaacatcatgccaacaagaacaataacaagtgatgagagcaagacaagaatcccctcccatgtgagccatgacaaccagtaagcagaatcataaagacccatcatagtcatcgcctgcatgttaaatcaagaaagcagaattaaattctgagccatttcaagaaaaattctgtaaattttaactcctagaaatgaacacctgccgcagttttagttctttctcagtgagcaaagaactaatctgaagtacaaatccaaacatggcagttgcaaagaaaaatgttggtcctattgtatccattgcagagaagatttccttagcagggtgagaaaattccacaagattgacagcccagctaaagtttggaactaaacatgatgggggatata

SEQ ID NO: 219369 - DNA, 2059 bp, Cannabis indica
ggtgagattgagaaacttcaagaatatataaagactttggaaacacatgttggtaatctaaaacctcattcgaataagagtagaaaaaaactcaaccgtttggtggctgatattgaatctttaaagattgaaataaagaaaagaaatgaggttttggacaattttgaagagaggttcagcaagtacaatgtcccaaaacgttatgaaaatggtcacaaacaacctttgaagggttatgtagtaagattacaagagtacatggagatcacttggagaaaagaagccaagaaaaatagagaaaaagggcattggaatttgtttgagatgatgacaagtatggatatcacaactgaagatgcctactttgcttatgactctcttcaggcttctcttgaagaaattgctagcatgatctctagcttcttgattgagtacttgaccttgatcatggttgcttcgaatgaaagtaatgaaattgtgtcgcgtcgtcttgatgagcttctaactgtggtagaatgcttatctatagaacaagataataaatattctcttgttaatgatgtgtttgttgagatagtacgtttcttcataggttcaatggagttggctgggccattttgggacgataatgaggacgacaagaagaagaagaagaagaagttttatttcgatgaggaaatggaagacgatttagctcatcatatcatcatggaaattctgcgtttggaggtgagctttagtaatcctgatttcttccctatgatgcttataaatgatatgatgttctcaatatcagtgcatcttaaatgttatgttttcaatgaaaaattgaagagagttgtagaaaagataggtgagtggaaatctgctataagatttgtagaagaagttggtgatgatgattattcagagatggagtttttaatgcaagttttggaggctggggttcatgaaatatgcactgataataacagaacttcatggaccttagtaaatctagtgtcaaaataagaaagtttatgaagttgtattactattttcactttttggatttcattattgataaattattattgtaacgttcttcatgtttgatcaaagattcaatcaatagaaagattggaaaagaaattactctgttccaaaagttgcaggaacctatttgttttaatcaaatctttacattttcatgtatgatccttaagatctttattatactctttggtcagagtctaaaaccatcgattattaaaagaattttcaagggaggagggggtactcttttttgtttgaactagaaaaggtactacatttttgtaataacttattatttcattagtttaactagttttcaacctttaatccaaacctatcttctcttgcaataaaaaatgtagacatataagcaattactgtaatccgcttagattgacatgtggtcaacatttttaaaatgggtgaaaaagtttttggtcattataaaatcttaaggtgtctttatcgaacatcatgtgtgagtaatagcagttttacaaataacatatggtgttataagagagtttaataatatcttgatatacttacgattttatataatccactaatcatgtttgggaggaaaaatcaatgggataagttgaagaatacctatttttttttatcaattaaccaaaatacttacatattaaaatccattcaaatttacctacttttataagtttactatccaatttacccttacatatgttaccttaatgaatagctaatgggtattaatgttggggaggcatcacgttaattgtatgaatcagaagggacataattggtataataattagaaaagagggtataaatcaatgagttttaagaaagaggtaagaatgagatggactaccttaaaaaaggtataccatttaatttcctcaagaaaaagtcacaagcgtaaaaataaggaaggcccattaagaattaataaagtataaagaaacggttaaccggaagtaggatccatcaaaggtgtttggggcaagtacacactctgggtgaccgagccgaaact

SEQ ID NO: 219370 - DNA, 10328 bp, Cannabis indica
actacaaaacaatattatctgagctagtgtggggactatgggcatataaaatcatgctcccaataaaaagttctagaatttatcgagtaaattttctatcttattaattcctccttattccactgtagattcaaaattgcactcatggttatatagaatgctctattcaccaataatatatatgctataagttatccattgtttcaatctaaataataatgatcttctatagatgatctacacaaagtagggactaagattattattttatctttaaaaacacttagtttcttataaattatatttcagtaaactaatataactactgaaataaaagctcttccatttatgtttgttagccaagctctaaggaaattatcatttctcttctaactatttatagaagctatagattttatttctataattagctctcccactcaattccactaccatgtgcccaagatgtaagtattgagttgatcttctggtaagcttgtaacgaacaagtcaaaaaatacatgtaatacaattaagccagaacataaccacctcaaaattaagatcttttatctaagatcgactaagtgatatttacttagaaaagatattacggtaagtttacgatatctaagtgtaagcgaaccccatcatatattatcacatcagtgtaaatcttgtacactgataattcatgagactaaatgtttgaagcatatgatcaagattatttttcactatgtagataacacaattattataatcatccataaattctagatttaatagaatttaaatattaaaactgtaatcatgaaataatcatgtgaaacaagttacataaagtttgacttctatatcattcattgttaagcttataagattatattgaaaagaattttatttaggacataaaatctcaatatggccttcgtcacatttgggcttcctaaaaaaattgaaggtctctgcttcctaaatctctcatataaaggctctagtcggttattggcaaccaattgttttgctcgcaatgctagagcgaaagcaactgatacagtaatgcctcttagctttatttgagaattaacagataattaggacttatagttagaaataggttttaagtattatttttataattattgagatatatttaaattctacgtgtattaattatgttatttatgaaatttataatttttatattttatgtctggtaacagtggaatgcgatatttgacctattgagtctcttagaaatggtatagtatcttagaaatatcgggaaaaaataattagacatttgaatgttgggagtttttggagttggggtttacgactattttacccctaagttagtagataactttttgattaaataagggtataatagttattttaccctagttattattctttttgggtggattttcttagtaaaatctaagctaatcaataattaataagatgaaagtaagtaattaaatcatacttagccaaaatcacaaaagctagaacatcgaagcctctctttctctctttctttgtttggccacaaccaagacacaagaaccaaacttttctttcaataattcaggcctatatcaaagggattttagctgttgtaattcaagtgggttgtgaggtcagctcctctgctccttttctttgagtttcaagagaaaaagttaggatttacttgcctatttcagggatttcgattttgtgcaagttagggctatttggaatttttttttctatagttatttgagttatttagagcaggttttgttggttgtaataaggtttaagcttgagttgagttttcaagctcaagcttcaacctttaatggtgatttttgttactattagttgatgttggaatttttagttgttttatgatatttatggcctaattaggtgttttggagaattttgtaagatttggggtagctttgtgtgagaaatgagactctttatttttctgccataaaaaatggtaggccattttttgagaaacaacctgccgattttagcaggtacgaaccaaaaaaaacgacctgctgtcttttatggtacttttcccaaagtcttgtttttcagtattttcttgatatttagagtatttgcacgctatttaatgataggaaaaattttagttttgagtttacatcctcgaagagtaatttagtgtatcacttatcaattttacatattgtgacttacgggcctgtaaattgccaagtagcaatttcaactcaggttgaccagtacacgtgcatttgatatcaatgtatgattattataataatatcatacgcgtttacatgtttagcgtgtaagttttatgattttctagtagataacatattagtaaaagaggtacaagtgtataaagagttacattgaataccaatggatatatgtttggcaaagtacaggttgacgctatcacatcagtatgactatagtattgagtataggctgatcttatggtcaattgtactctcatacaaatttttcagacttaatacacattggacacgggataggattataattgggtgtataggcgcctgtttataagctagtttatgtttatatttatacttttcttactgagtctatcgactcatagatattatttatatgtgtagtaaaagaataggtaagtttgaacattcatgagctcgagctaatgaagattgtaaatatcgggttagttagacctggagtgttcaatcttcgagacaacatgctttattttgttagtcgctaggcaaaaacttctgtagctaagttttttgtataactattttaactttaaaataggatcctggattatgtaaagtacttatatatttaagtttaaagtttatttgtaaaaatttaaattattcatgtttttcaataaaccttttaattagcaaaggagtgcacattaaattaaaatctcgataacgtgctcaatctagtagggtgagacaattttgtatcaaagttgctagattatcttttgaagatcgttaggatatgtacaatcatcatcagaaataagctttactcacggtccagtaatcctttttatgctgtagttgtatgacttattagtaagtaataagaaaagcctgataggaagcatgttgtattttctcaagtaaccgttaattaaatcttgatcttgatcgcgatctgacaaggctagctcttggttttgtaggctggtctaatacaatggacgccaagcaaaacacgagaagctagggtaactcggttgggtatagtggcagtcagggagttttgtttcctcctagtgtctatggccgaggtagagggcaaagaggtagggcacatagtcggggtaatgttaacccactgcatgctacctaggattgggatcaaagatttgttgaaatgcaagcgtgaattaatgaacaagatgaagaaatccaacatctaaggcagtagggttctcctgcgatgcttgctcccaaggtacagatagctccttcccctataatgcaagtggggccggttgttgttgccaattgcatggaaccattataagaaaggttttgtaagtaggaacctttagtatttttgggaggtccaaatgttatgaaattcgagaaatggctaacgattattaatagagtattgaattttatgggagtaactggcaacgacaggatggcttatgctactttctaattctagaaggatgccttagtctagtgggatatggtatccctcacggagacgtcaccagaatcacctgggaaaaatttcaagaatttttaatttccaagtactataatgaggcagtctgtagtagaaagagaaaagaatttcctcagctggtctagagggaaaatattttagttctagagtacacgacccagtttgataggttggccaagttagcttcgagaatagtgccaatcgattttagtaaaaaggaaaagtatttagatgggttgaagcctaagatcaaacatgatctaatgattacaactgatgaagaaactacctatgctaatatggtagaaaggcactgcctgttgggggcgcagtcgagtttatttaagagtcttgaggactcaaattgttagtggagccattgtcctcctacttttagttttggtaagggtggtagtgactcaaccacgaatcagaagaggagagttccatctgcatctggtggcttaagtcagaacaagaggttctaagagaaccaaggccatggtaatcgacaaggtggttcagagagtcattacacttactcgaaataccaagttgtaaaaagcatcatctaggtaagtgtaagggtcgaggatgtttctagtgtggtgtaactggacattacaaaggagactggctgtagctaagaaaagaagaatagaagacataggtaaagcctgctccaactagggtgtttggccttacccagactgatactaaagcttgtccttccgttgtgacaagttaactttcaatcaaaaattcttatttctctatattgtttgactttggagccacatattcttatgtggtagtccgagtatttgataaattgggtaggtcatgtgattgttatggaacgggctttggaaccctctacctggcggagaattagttatctccaaaaggtagcataggtctatgataattaggattaaggatagggtgttgagcgctgacctagtggaattgggtttagcagatttcgatattatactttgaatggattttatgtgcaagtatgccactaacattaattgtaagcgaaagatggtgatttttcaacctgagggtgaagaaccattcatatctatgggatcagttcagggttcttgaatcatagtcatctcattgttgaaagccaaagatttattacagaaggggtgcatagggtttctagcagtggtgttagataccactcgtgctggattagtttggcatgaaaatatcaatgtggtttaagagtttttggatgtgtttctagaagaacttctgagattaccactagagcgggaaataaattttgtaattaacttagcacctggagcggacccagtttctaaggtgccctatagaatggatcatgtggatcttaagaaataaaagttacaaccataggggatgcttgatttagggttttcttgacctaatgtgtcaccctggggagctctagtgttgttcgttaaaaagaaggatggatcacttcgtacgtgcattgactatgaagaactaaacaagttgaaaatcaagaacaagtaccctctacctagaattgatgatttgttcaatcaacttcagggaaatacagtcttctctaagatagatctctattcgggctatcatcagttgagaatccaagaggagcacattccaaagactgccttttgtactaggtataaccattacaaatttcaagttatgtcttttggactaaccaatgctcttgtggcttttatggatctgatgaatagggtattcaaggatttccttgatatttgttttgtagtatttatcgatgatatccttgtgtactcccaatcataagcagagcatgagcaacatctacgaatagttttacaatgactacaagaacataagctctaagaaaaatttataatgtgtgaatttttgcgatcctgagtgtcctttttaggacattgttaataagggtggaatcatggttgatccaggagatattgaatccgtcaaggattggctaaggctgaagtcaatcagtgaagtcagaagctttctaagttttgctgggtattgccaacaatttgtaaaagggttttccaagatctcaatgcgcttaacagaattaactaaaaagaatcggcagtttgtatggacagataagtgtgaagcaagtttccaagagctgaagcagccattgatcacaactccattattagcattactgtcaaatcaaaaaaagtttttcatttattttgatgcatcgagacaaggtatgcggtgcgtactattgcaagctaatatggttatttcttctccttctcttcagttgaaggagtatgagcaacgataatcaactcatgatctagaactttccgcagttgtgtatgcactaaagatttggtgacaccatctctacggagataagtgtgaaatttacactaatcacaagagcctcaaaaatttctttactctgaaaggcttgaatatgagaaagaggagatggttggaattagttaaagactatgattgtgaaactctctatcatcctaggaaagcccatgtagtggaagatgccataaccagtatagggcttgggcaagtattcacaatgactatgatctcacctcagttgggcgatgacatgggtatattagctattgagtttgtagtcagcgaacttagtaatttgactttgcattcagacttggttgagaggattaaaaatgctcagttggttgatttagaagtagtgaaaattcgaggagaagttttagttggccaagctaaagatttcattgtgttgggtaatggaatgttactttataaaacctgagtttgcattccaagtagaaatcaacttagaaaatagagtctggatgaagctcataccactcccgattcagtacatcccagtaccgccaaaatttatcaacatttaaaaccctattactggtggtgcgatatgaagaaagacgtggtagattatgtaaccagatgcttaacttgtaagcaaattaatgttgaacatcaaagacctgaaggattgttgcaacctttgacacttctcaagtggaaatgggaagatgtcaccatggattttgtggttggtttaccaagaaccataggtatctttgattccatatgggcagttatggattggtttaccaagttagtacactttctgccagtgaaaacaatgtattcagtagaccagtatgcagaactatatgcaaaataaatagtacgacttcatggggatttgaaatccattatttcgtataaagaactgaagtttacctccaagttttgagaaagtctccaacgagccatgggaacaaagctggagattagtacaacatttcatcctcagacaaatggtaagtctgagaggacaattcagatattggaagatatgttacgagcttgtgatagattttgaaagcttttagagtaggtatttaccacagatagagtttccatacaacaatagctatcagagtataatagggattgctccttatgagatgttatatggcaagaaatttagatctccaattcactaggatgaaatcagacaaagaagatacctaggtctggagtcagtttaggggaccaatgaggttatagagaaaaccaaggccagaatgtttacttctcatagtagacagaaaagttatacagatccgaaacacataaatataatgtttcagataggagatgatgtcttcctataggtatctctatgaaaggggtaaaatatttgggaaaaagggcaagttgtgccccaaatatacagggccttttcagattcttgagaaggtttgatgggtagcttaccatctagtcttgcctccagatttatcatcagtgcataatgtatttcacgtctccatgttaaggaaatacgtctcggatccaacacatgttttgagttatgaaaccctagagctccaaccagatttatcatacaaggagcaactagtacaaatccttgacaaaaaggataaagtcctatgaaacaagaccaatagcgttggtcaaagtactctggaaaaacagaaaggtggaggaagccacctgagaattgaagtctgatatgagggttcagtatctggcgttattcaggctagattttggagatgaaatcattttaatgggagattaattaaaatgaccccttatttttattttaataattagtagataattatggcttattgttaaaaatagattttaattattatttttgcaattatggagatatatttgaattttaggtgtatcaattatgttatatatgaaattttatgattgtcatattttaagcatagtaacagtggaatgcgacttttggcctattaagtcatttagatatggtatagtatcttacaatagcgggacaaaatagttagacattgggatgctgggagttttaggggtcgtggtttaggattattttactcttatgtgactgaataaatttttgattaagtaagggtattataattattttacccttgttaaatattattctttttgggcagattttcttagtaaaacgtaagctaattcaatagataataagctgaaagtgaataattaagtcatacttagccaaaatcacaaaagctaggaaaaccaagcctttctttctctctttctttgttcggccacaaccaaggcccaagaactaaactttttcttcagcaattcaaacctaaatcaaggggattttagctgttgtaattcaaatgggttgtgaggtaagctcccttgttccttttctttgagtttcaagagaaaaagttaggttcaacttacttgttttagggattttggtttcgtacgagttggggttgtttggaatttttttagtagttattttaaggttatttgagttttttagagcaggttttgttgcctgtagtaaggtctaggcttgaattgagtttttaagctcaagcttgagcgtttaatggtgatttttgttattgttagttgatgaatgaattttctattgttttatgttatttatggcctaattaggcattttggagcattttgtaagatttagggtagaattgtgtgataaatgagactctttgtttttatgcagtaaaaaatggtaggccctttttatagaaatgacctaccatttttagcatgcagggacccaaaaaaatggcatgccatattttgtggtgtttttcccaaagtcttatttttcagtattttcttgatatttagtgtattgccaagctatttattgatacgaaaacttttagttttgagtttatgtcccagagcagttttttagcgtatcacttatcagtttttcatatattgtgacttaggggcctgtaaatttccgagcaagagttttcactcaagtatattgccacacctgaattcagaatcaaagtaagattagtataattgtatcataagcatttacatatttagcgtgcatgttttacaatttcctaatagataatataacatttgaccggtattagtgtacatagagttgcattgaatactaatagatatatgtttggcaaagtacaggttgatgccatcacattagtacgactagagtactgattgtaggctttatggtcaattgtactgtcatacatatattatatacttagtacgtgttggatgtaggatagggttatgattgatgtatgggcgcctggtaattatccaatttatgtttatgttttgattatgtttttcttattgagtctatcgactcacacattttgctcatatgtgtaggtaagggcaaagttaaggttgaacattcatgagctcgagctaatgaatattgtatatatcgaggcgcttagacctacaatattccatcttcaggacatcgtgctttattttgttagtcgctaggcaaaaacttttgtaactaagtattttgtataactattgtaattttaaaatgggattctgaattatgtaaagtatttatatatttaagtttaaagtttaattataaaaaattaaattattcatatttttcaataaaccatttgattagtaaaggagttcaccgtaaattgaaattacaataatgtgccttgcctagtagggcgtgataggcacctgaggtggaggtacaacagaaggtccctgtagtctcagcctcttattttcctcgtcttgaaactaaattctagcttgaatttttgcaatcttttgctcccaatcttgtagagcctatcttaaattttcatagccacctctgtaagcccttccacgacctctacctttgccacggggatgaggggattctgatctcctttactgccactagcctcgaccatattgttttgacctctcatgttttgataagtttccattatataggatgtgtctgcaaattcaaaatgcaggtaggtcaggcagcaacaaaaactataaactaactatcgcatacatgagaacttaacatgctcttaatctactatcaaattcctatcactcttcctatcatgcttttctaatcatgcataactgatcaaactactaaaactcataaaggcttattgaatcgtgagtcaagcttttctctaatgatgattgtacat

SEQ ID NO: 219371 - DNA, 2111 bp, Cannabis indica
aaataaaaaactcaaagctacaaatctctcagcaaaaataaaaaatttgacccaaactgtttaaaaaaccttatttgccggtaatttagatcaggtaggtatgatccgaaacaataataataggaagaaaaaaagaaaaccctttaaattccagaacaaattagccacatttgccccatctaccccagctccggatcacaaacgaacaatcccaccttattcttctccccaaatcctttaccaaacatagaacacaacaaaccaaaaccctcatgcactcttccaaatccaattgtaatttcaaccctgaaacctcaagcactaaacctccaactattactaccataaatcacctgaattgactcaacaaaaccattcgcattgtccaattcagatccaaaaccccccacaatttagcctaaaaatatcttttttctctctttcccaataatttaaaccctccacggagacgaacaacaacaaacaaagctcctcagttgaatcaggcacagagtatggaaatggaagctgcaagatctgttttttaacaccgacaaaaactgaaactttagagagagaaagagaaagaaaaagataataaagatagagaaagatgagttgtgaggggcgtgaagcataaatctagggaggaaagggagtgccttcgtatacggccacgtatagatactccgtatttatacggattcaccaatttttacatagagatctacgtaatgtaatgtactggaatcaatttcagttggggttacttttgtctttttacgctatgagaataagggtatttttgtaataagtgatcagagaatctgcgtgggagggaaggtttgggtaacagagccacgtgtatgtcagtgctggttgggaagaatgagctgcacacgtcatcacgacacgtggcgttatctgagatgcattagggagcggtgggcgaaacgacacgtagtttctgtgattgttttgatcacctgattttgcatgttgacaaaattctgtttttctttatttttttattttttttgttatataaaggaaaacatatttgtaacttcattaaataatatatgggtaggtaatactgtaaatttgaaggcattcactcatattttataataattattaaattaaaaactataataattattaaatgttagtagcaatgtgtactaagtactactacaaaatatattttattatgaatagttagtatgtttataataattattatattataaatatataaaacttaataattaattatacataataatatatactagtggtgtggtttagtatatatttctctaaactaaaacatgaaacttattgtatagattttttccaatgtaaatgaaatattttgtagcttttactagtggttcggaagtgacaactctcagttttgaagttttcttttctgatattatagttttattgtctagctctcttagggtatctctgcatgctcttaggatagacaatgaactattatagatagaagaaaatccttctctggttgcgtaactttgttacctttgttattttaacctgtatcggttactcctaaaaaaaaaaaaaccatatagtatgtataccagtataattaaagtaaaatatattagtaaatttttgagtttaagttaatataaaaaaaataagtgaagtatatatttgatattataggtgggttgtttattgtttaagccgttgggtacatgaaagcaagccccacaccgtccaatatatcgacgttttatccaatttgaattgagactttggtgcaaacaaatattattattaaataaataaataattaaacatcaatatcactgtgtttgaaataaataaataaataaaaaatattaattgtattggtggtgtgttcagccaacatatgaaatctcaacaaattattactttgttatataaaaataaattatgatattataaagtagtttttatataattgttacacagtcagctatcatggaaatgaaaagatacaagtcccaccaacacaacacaaactttaccaaagtaacatctcctaactaatgactcctagaagtcatacccaaaaaaaaaaaaaaaaa

SEQ ID NO: 219372 - DNA, 3188 bp, Cannabis indica
tatgttttatatgtttattttaaattattgaatctaaaaactcttcacatattcttttgtttttttttttattttgcgattgccaacaatcgcaaatttaactttttgaaactcaaaaacgctaaagcacaccacaactaatcacatttttagttacaatttttaacataaaaaaactcaaatttttattcccaaaattctccttttaaaaacacaatttttgaatcacaaatcatttagctctttaattcttgcttgaacaattaaatatttttaaatggatacaatcatataagaataacctaatagtttcacacttctcatattatctatattttaattaattttctctctcactcctttctttaattaaggaacaactaacaatacaacaacttgtgcaacgtactacgaatgaactgaagaccatgccatttttcaccaagtttttggatcaaattcaaaaaaatgaagagatttcactacgtcttgaaaatcttgtgaactccaccaatgatagtaagatagatatggtgatatattgtattgggagcataaaaaatagtgaaaaatcaaggttgcaactaagcctagcacttttgttgaaggaaaaagtgaattggattagtgaaaccatacaaatatttgatccaactctaagtgatgaagagaataaagctttgagtgatatgggtttccaagtgttggagaataataggctaaaggtgaataaaccaacattgttcttcatgcttggttgtccattgcatttgcatatgaatctagtgaaagaaaatgaggaagacacattgaaaaatgtagtgatattagggaatagcttcaagaaatttaaatctgttattcatggtgatcatgatggtgttaactcgttgagtcaaaattttagccatgagttccaacttgatgctgcatcatgttctatgtttaaaatatatagttggcatttttctgattaatttcacactatatgtacatcacaagggataagaataagtggtattaataaagatgaaatattaatatgagactttaagtggcaaaacagatactatataaccttattgagtgttatgttatattaaaaatacactaaaattaaatctaaaaaataataacttaaaataacctaacactctaccaatctacggtttcgatttgacgattgtcctctctagctaagatactcttctacaatacccacttggtgagatcctagctttttctatttgtgaatccatcttttgagatggtggtgattgtattagtgatccaagattgtttaatctttatgctgttgtaacttgtgagcctctaattatacttgagaaaaatattgcaatcctattattgaactttggtgataatagatgatttaatcggactacggtctgcttagttttttcccgcattgatagtttccatgtaaaatgtctcactttaatgcttaatttgtgtatttatattagttgtggtgctttagttgatatttgatatttcttattatggtgtgataaattattctatttttgacatacaaaaagggaaatagtgtgattaattgtaatgagttttctatatcagaactaaagttgtttggtgttaaattttgtgtattgaaaaatagatgagtcagatggaatgataaaattgcaacttattaaattatttccattggaagcaagtggtggaggatttggttaaagatttatataagtttattaaaggtagtaaaaaggtatctaagttagatgaggaatgaagatttcaaataaaaaagtcattgtttatattacgaatggatataaatttttatgaacatgaaaccaaaactgatgtttttgaagactacataataaacaaacatgttataattaatgttacgtggtatttttccattaagtaacaataattattttaccaaaataaataaagtaaccaaattgcagcattaatattaatttgatgagtagctaaaaaactaaccacaaagtcaaccaagaaatacaattaatctgagaagaaaatgaataaacgtacatatacatatacatatataaattaaaagtaccccatgatcgtgaagatgaacatatgaagaaactgcaattatacctttaaattaattccagagaaacacttgcctcatctctactctactctgccttggcactggcagtgttgtgttgaccatcatcattatcctatacaatacacattaatgaaattaatcaacatcatatatatatatatatataaatatattaatgcaataaaatgaatgagagtgaataatgaagttagttatttacgatttgatgagcaaataaatgttgtaatgccgaatcggaatcatctctctccgaaattcgtcggcaatcaacccatggcttcaatgaagcgtaggtatttatgatcccatgtagaaaatctctttcatcgttaggcactcactacaaatataattgactcccaagtgtgggaaactcattaactttattcctgaatagaagctttggagagtttggcaaattccgaagctctagtctccataattcctaggaaaacaaggcagtcatcagtagtcgtactactctcttcgtcatcttcttcttcctcatagtactctgtattattagtaataatctccctgatccctttgcaattctctatggtcatttgttgtaattgtacaagagtggctgctgttgaggaagagaataaataagtcagcccatggcatcccactacactcagacctcccaagttggggaaacacataaaggagggtgcaaagctctccaatctcctacacttctgaacactcacatattttaaatgtggaaaaacaatcctataattatgtgatggttgagcattttcatgtggatccaccccaaacagataatgaagcatatcagcatcctcaatacatagttgctccaaagaagtagatgtagaagtagtagtgtcaatcaattcatcaccaccacttaaattcacaaaggggcccctcaattgaagtttcttaattttatgatatttgtgaaggaataacgtcaaatttggtacaccaattgctgctttatcgccagcagatgtacaatctaactcaagttcgagaaggttgggaaacaatattattgaattactcatctcaaatatctcct

SEQ ID NO: 219373 - DNA, 2146 bp, Cannabis indica
agtaaatctaaatcatggtaacaatctattctaacacaaagcccctcactagggttatgagccaactagtcctcccttgggataaatgctgcaacatcttcgacaagggctttggtgcggaggttgttcaacctcattatagtaagcttggacgaaggcaattctcaatgcagttatggcttagatttgggtggcattggtagtgcctccactaattccacatcagtataatcatcaccaaggacaagtaactggttggatgaggaaataggttgacccacctcgttgaatcttccttaaggaaattgttcgtcagcatcaagttctacctccccatcagaggccttaagatttccatgctcctgctccttaggctccatgggttctgcgactcgcctataagaggtcataaacatcccaatgtggggattattggttgatatagcataggcagtttgcttttacggcctagttttgacttgacctcaaaaactagtctttgagtatgacgagcaaccgttactgccactttagcctgcacaaagcttctcttcaaagattctagctaaccaacaagcagtgtatccttataggttctcccaaactctgtacatccacaaggctggatgaaatggcctctaacctctatttagcttccacacaaagcatccatacacttctccagcgagtttggtcggagtagtgatagtgttgtatctctagatttttggtaatcattactgaattccaactcagagaaacttgaagtataggaagagttgcttggagatgaggatgttcatctgctcaaagtctaggtttattctcttaaagaacttggagcaagtagtcgtctattcaaaaattactcccccaaagtcacctaggttcatctacaaagaagagaatagggaggtgagtatccaaacaggtctagaatgcccttccaaaggaagaacaatttaaatactcttaccagaaggaaaaaaaatgaatcaaaatgagggaaatctatcctaatgacaaagatcctaaacaaaaagtcaattttgggttttttaaaatttggaagcttcaaagaatagaaacagaggaaaatggatgtttttaacatagaatttcttcaccaaacatttttaaattgaatcaggtgattctcgggtttattttttcttaaaataacttcaaagaaacttagaatctagcaagcagcaacaaaatatatatacaatctaataacttaaagcatgcaaaaataaaattgaagaaagttcaaaaaagaagtatcttactcactattgcgtcgaaaattagtttcctcggtgaaagaggcctggacaaaaatcacaatttgcaaagcttgaacaatgggtttttccttttttgtaagttctgaagattgaagaaatggtgaaagttttgaatgaatttggaaattcctcttatagacccaccaaagggcaatctcagtatacacttgaaaatgggttttcccccaaaaaatgccaaaagtacaatcattaaaagagtggaggtgtgtaaccgttaaaatatgtttccccgtttctcagtttttgaaaatagcactaaatgataggatttgaagagactatagaagatacactcacctcgagcagtaaaaatatcacctctttaacaacatgtgaaccctagcacgtgttaccaatcagagcaatgcatagaccttggaagtctccttgcgaacgatagttcccacgcagatttgggggcaaatgttatcctaaatttgcacaagatggcgagacacttcacaaggtaacacgtggcaggtatgttaagagctggtcggagcatgtcccccaaatacactgactagatctaagtgaagctatcatgcgactactctttggacggagtaagtatcttgtgatatgtcctggagttgatcatgttgggaaaaatgaactgtctggatagctaaatatgatgagaagtagatcttctccagattctttcctaaattatttccacgaaaaataacaacaagaattcctaatcattcggaattcacttgccagaccaagattcgtgggattgctagcctggagccaatctccaaccaatcccaccaaaataggaaatttaacttacttctcctattttc

SEQ ID NO: 219374 - DNA, 5198 bp, Cannabis indica
atagtggaattttcttcttaaatgcttttgcagagaagttcaaagccacttgctttcaaagcaaaccatttcaagcatacaataagtatatcagaatggacttgcctgaaaggaaatattcattattcaactacaagtgagtatgtagcaagcaagtacaaagggcacattcaaaaaaaaaatgttatttttgatgtacaaacaaaaacactgttagacaatgaatgaacaatttagatttttttgatctatagcaatacaaagaattatttatgtcggtgctacacaattcttaaaaatcctctatcaaggtagttagtttagttagtgttagttattatttaatgttgtgttgtcctagagttagttagttagcattgtaactaactcaagctactataagtagctaaaatgtattgtaacagattgatcataatcaataaaatacagattcattccttatctctgttttcttctttctttctttcgatgcttagctgatatggtatcagagccaccattgatgtgtggtcttcttcttcatcgtctttcttctttcattttctattaattctctggtttttcactcatggtacgcgatggaggagttcaaactcgatttacttatgacactgagaacacttctaatgattcgaatagatactatgttgttggtgagaattctcgatccagcactgccaatgatctctcgaatcctttctttctttctaatggtgataatctaggagcagtactcgttcccaaaatcctcacaggaagtgaaaattatagtacctagaggagatctatgatgatagctcttgttgctcgaaacaagatgaagaacatgataatggccaattgcctctgccagatgaagaacatgataattacgatgcttggtgtaggtgcaacagtactgtgatatctgggattcttcatacaatctctagagaaatcgcagataacattatgtatcttgataatgctgctgagatctggtctgaatggcatgaaagattcaatgagagaaatgctccaagaatctttgaagctaaaaggttattcagaatcttacagaaggatcgagcagtgtaagtacttatttcacttgattgaaatcgttatgggatcaaattcatgaatatagaccccaacctgtttgtagttgtggtgctatgaaggttatacttgagtatcaaggagaagatcggcttcttgagttcctagttggactgaatgattcttttagtaatgtcagatctcatattctgatgagagatcctcttcctactattaacaaggcttatgctttagtggtacaagaagaaagacaaagaaatctaacaattggattaaatggttcaagtggttttcgtgaggctgaaaaatccttaagcaattctactggacaatttgctagtgttgttcaaccatttctatccaaatacaattgtactcattgtggcataaattgacacacaattgatagatgttttagaatgaatggctatcctcctggtcataaacttcatggaaaatttccaaatcgaaattctaagggacctcaaggaaaaactacttctgcaaactttacaggaacagatgaagagaaggtagagaatacaccaggggataaagatcttgtgtccagtctgtccaacattcaatgttaaaaactcatggctttgcatgctcagaaagtagctgataacacaccacctcaagttcctaatgatcaactagttgtatcatactttttttggtaagagttctcttgttcataaccctaaatggatcattgatacaagagtcacacaccatgtgtgccttgacattactcttttccaagatacctacaatgattctagtcttaaaactgtccttttgacaactggttcacatgctaaagtttcatgtattggaacaatcgttctgactgctgatcttgtcctcaaaaatgtgtaatatgttctacttttcaatgcagtctgttatttgttaattctttaacagccacaactaattgcacctttttgttctcccataaaaattgtgtcatccaggacactgtcaagaacaagaggattgggataggtgagaagtgtggcagcctctactatctcaaccataatcttcttaatgtccattctatttctattttttcatcagtttcagattccaaaatttctaatgaaactatttggcaagaaagattgggcaattcttcttgtataaaaactcatccattgaataaagctttgaattttcactctaattttaatttaattcattgctttatatgtcattatgcaaagcaaaggaaactacccttcacatctatttaccacattgacaagaattgttttgatcttgttcatgttgatatttggggcccctataatactatgacaactaagggatacatatattttatacatatattttattattattttcgatgatacttagatcaatctcatcaagcagaaatctgatgcccagattgtcattctcagttcataaacttgtttaaacacaatttgataaaaccatcaaaggttttaggatagataatgctaaggagctgcagtttagtgaattgttttccaaacttgggactatgcatcaccactcatgtgtccaaagacgacagcaaaactctgtggttgaaagaaagcatcaataccatctcaatattgctagggctcttttgtttcaatcctatattcccttatgcttttggggagagtgtagagccacttctacatacttcataaataggacacctacacccaatctcaaaaacaaatcaccatttgctgttgttttttccaagcctcctatttatgagcatttaaaagcttttggttgtcttgcatatgcatatactttgagtcaattatcatgacccaagttttctccaagagctgctttatgcatttttcttggctattcaccgggaatgaaggcctataaattgttagacctaaacacaaataaagtttttcattcaagagatgtccaattccatgaacacatatttccttttgtcaattcttaacatcttcctgcagcatatgatcattttttctctcaggctcctcattctaacattctgaaatctcccagccttcatctcctagtcctgaatttgaacatgttgctgaccctaaggtagaaccactcataaaccatcctatttacatgactatcattattatttggctgctaatgcttttacttcttcatttcagggtacatcagttacaccttaccctttgtctgaggttgtgtcttatcataggttacaaccaacttttagggctactattttggccatttcgagttactttgagcctacgttttttcagtcaagcacaaggcattcctgaatgagacaatgctatggataatgaaatagatgctctagagaaaaatgacagttggattgttgttcccttacttgaaggacaacatgtcattggttgtaaatgggtgtacgaaattaaactcaatgttgatgtagtgttgagaggtttaaggctcagttggttgctaaaggatacaaccaacaagaagggatcaattatactgatacatttgcactagttactaaactagtaacagtcaaatgtgttattacccttactgttataaatggttggcatttacgccaattagatgtaaataatgctttcttacatggtgatcttaagaaggatgtttacatgtcacttcctcaaggctataaacttaagggggagcttccacacaatctagtttgcaagctaaagaaatcattgtatggtctaaagcaagcttcaagacaatggtttgccaaattttccattgctctgtttgatgaaggttttgatcattctgcagttgaccactccccgttcattaaacattatagtaacactttcattttcctgttggtctatgtagaagatgttatccttgttagcaatgatttacaagaactggagccattaaaaccagattaaatgctcgatttaagctcaaagatttagggaacttgaagtacttctctgggatggaagttgctcaatcagaaaaaggcatatttgcgtctcaaataccatatgctttgcagctcttagaagatcttggataccttggatggaagcccatgaacacctatggaagctaatctaaagcttggacaagatgaaaaagaaaattggcagatccaactctatatagaaggactattggaaaattacaatatctgacaatcacaaggccaacccacgttctagaattagccacagtggtgtttgcactaagaatatggcagaattacttttattgggataaatgtaaaatctacaccgattacgagactctcaaatacttttgtactcagaaagatctaaatatgacgcaaagatggttgttcgagctagtgaaagattatgattgtgagatattgtatcatcctgaaaaagctaatgtagtattaaatgcattgtgtagaaaaggtcctgggtaggtatttggtaccaagttaatcactcggttagaaataaaaatgactacgacctgcattgagtttgtgttttgcaagcttagtaatttgactctcctatataacctattagaaagggttagatatgcataatggaaaatcctaatttagtaaaatctcaggaagaagtcttaccttgttggactaaggactttctaatttctgagaatgcgatgcttctgtacaaggattggatttgtgttccagttagtgatggaatcgggaaggaaattatatgaatctcataccactgcctactcacctcatcctggtaccaccaagatgtatcaagacttgaaatctttatattggcggctaggtatcaaaaaggatataatagaatatgtatccaaatgtttgacttgttggtagataaaggatgagcactagagaccagcgggtttattacagcctttgactctttttgagtaaaaatgggaagatattatcatggatttttttattagattacctagaaccacgagattatatgattcatatgggtgattgtagatcattcagtaagttagcatactttttaccgattttagacaacctatatagttgattagtatgcaaaattatatgtaaaaggaacgttttttttttctaatgtaagctaaagttctagtataatattcta

SEQ ID NO: 219375 - DNA, 4607 bp, Cannabis indica
ttttggttcataacttttgactcgagactccgtttgggatgttctttatatcgttggaaagctcgttccgagctctatgtgaatatctgtagtttaaatgccaattttataatttgtggaaatggatttaggaattaaccctatacttgtgtatcccgagattgtgactaagattaccggcacttggtcaggagcacccagagatttggaatctctatatttgtgggatatcaggtaagacagtagttagcacgtagagatatgcacaatggcgcttatatgaatgtgatttatatgagaaactagaaaccgggattagagttattactctaaagtgagcggtttattggcttagggttattacccaagtgaattgttaatatgtaattgttatgccatgatgtatatagatgtatattgaagtaaagggttatgtgttcaaggcataatcgggttggactcggtaactagaaccgagatgaaccgttctaaggccttattgtaattagacgtgtgagcgtaacacgtaggtctatgccacatagacataaataggcgtgtgagcgtaacacgcaggtctgtgtcatacagacaaatatgaaatggcattattatttatgtgatgagttatatatgattaacgatatattttactgtcttgctgggcttggctcacgggtgctctactgtgcaggaaagggtaaatctgtctctgatcagccatgagtatgggagttgggcgatgatgtacatgttcgggccacactagaccaagcgggttggggtctaccagtgttgaaacttttgtaactctattttgccgcttaggtcggctaaggagaaaagacttgtaatattttgtaaaatgatttttgggatcccgaaacatgtaacttttgtttgtaaggtaattattacaggtttattttcattccgttttcgtttaaagtttaatttctgcgcttattttattagtaatctcatttaagggattagggtttcttaatcatattgggtaacgtgcctaaatcttagggtgttacactaaatgtttcagtaaagtcgaatccaggttgttgatgaaatcctttagcaaccaacttggatttacacctgttgagagtgccatctgtgttttctttttctttgtaaacccatttgcagcctattgcttgtctaccaggaggtaagggaacaatactaaagcttttatttcttacaagggccgaaatttcatcatccatagcacctttccactattgcatttggagtgcttgagcaactgtagtggggacagaggacacactgaaaaccttggttttgtgaacaccagctttggctcttgtagtctttttatggttgttctgaactcttgaaacttgaggagcatggatcacttgctcctatggggtagattcaatggatgtgggagcagggaaattagtggaaatttgaggaacattgagaggaattacatgctcaaaaccaggggtatataaggtgtagatgacagatttttgggagaaacagagacagatggagagactgtggtggaacgtggtgacacaggtgaagcactagaggatgagacaggttgagatgaggactcattggtgttggacatgtcaattagacagtgaacatgttgtctagcagtgggaattttaacagggatgtgccaattctgaggtataataggttcagtttcattattggccttagagtatggaaattgatgttcatcaaagatgacatctcttaaaatgtacatcctaccatttgaggcaaggcatttgtagcctttgtgattgaggctataccccagaaatgtgcatggttcaaacataaactgcattttgtgtttgttatagggtctgatgttagggaagcattgacacccaaaggttttgaaccatgtgtagtctggttgtttgtgaaatagtgtctctaagggagttttgttattgaggactagtgtagggatcctattgtgaatgaacacagctctcctaaatgcctcatcccaaaacttcagaggcatggatgcttgagctaacaaagttaagccattttcaactatatgcctatgctttctttcagctaggccattttgctcatgggtagttgggcaagggtgtctatgttggatcccaaactgttgaaggaacttatgaaaggttctaaactccccaccccaatctatttgaaccattttaatctgagttcctaattgcaactctacttcagctttgaacatttgaaacacttttaatatttcagatttgtctttgaggaagtagatccagatgaacctggaatagacatccataaaatggatgtaatatctataaccactcttagaaatagtataagagggtcctcatagattagaaacaaccaactgcaaaggagcagtgtaaacactggtgctaactttaggaaaaggcaacttgtgtatcttgcttaaacaacaagaaggacaaacaaaattggaagttttattatcaccagagagattacaagttctaagtacagaatgcacaatggttttggagggatgccccaacctgttgtgccacacatcaaattcagagaatttcctagtattattacagtgtgtacaaggttctaaggaagcagtatgagtataaggggaatttattgtgtcctgtgttgttatgtgtgtagattttgaggtgacagatgatgttggaagtatgttgagaccttcaaaagtatagaggccatttctgtgtctcccttgcagcagaattcgcttggtatcctggtcctttacacaacatgtatcacgatgaaactcaaagaaaaccttgttatcttcagtaaacttagatacacttagtaaattcttagtgatagcaaggacatgtagcaaattattaagaacaaggggctgagtagacaagttagaagcaagtagggtctgacctatgtgttgaatagacaaaccggatcgatcaccaacaaacagttgctcttgtccattgtagtctgagctttgagcaagatttgcaagatctggggtgctagtagcccctgaatccaaataccaagtcatgtcccattcatttgtagtggtaacaacattagcctagggagctgcggggttagagacaacagtggtacttcgagtacctgaggggcctggaaaattcttgtcaaacctataaaaacaactttggatagtatgtccaagtttgagacacaactgacactggagtttactattagcagtaggcagtcgaactcctcttccaaaaatgaaattgcctcgaacaggagcaaaataaggataaccataagcattgaaatcattgaaattgataggtgagtgacctctgccaaaggaaggaacgccaggacctgtgttgttgtggaatcggctgaattatggttgttgtttgtatccttctcgaccatagtttgtaagattggcttcaagagcatgatcaggttccatggaagcgacattagcactcaaatcaacttcatgatccgtcttctcaattttggattcggaggccaatagaagtgcttcaatctctgctacagagtattgctcaagtctggtgttagtggatatgacaaaggtgtcatattcacttggcaaacctttgaagatcgcatgaacatgatcccttggaaaaagagtaccaccaaccgaagcaagaagatcgatagtttctttaactttgagcagatagtcattaagagataaagaacctttcttgagattttgtagcttcgtttgaaactcaagaatcttggcagagacctatagagtgaagtacttttccaaagtagaccaaatttgactagcagatttgcatccaaccatgcgagtttaaagacttggactcattgatgacagaagccatgacaccaatagctgatcttgagcttcccaatcaagataagctggattgtggattcgcctgatccgatcttcatcagtgaggtacttcaatggaggatcggagttagtgatgaagtgttgaagtcaattccctcgtattgtagctaaaactttttgtttccaaagtagaagttatgatcattcaacttgatcaaaaggttgtgattgaaataaattggagtcgaatcatcaggatccttccttcgagtacgttgaagactttgtgtctggtttgaggattcttgtggagcatgttgtgagttatctccagcagcaactattttcccattgccagtaacgcattagtcattaatggcggaaactcaagcttgatccatgtaacttcctagacgttgcagcaaaagagaaaatgaaatgaagagaaagagagagtaaacagagagagaaagaacaggaaaagagtggattgttattcaatgaacaaagagcaccatacaagcctatatacacaagctaaaaacagaaagagagaaagaagagaatcagttagaacagtaacaaactaactgaaaagctaactaacatctctaactaaattaacggaattggtacccttaacatactaataatacacacaatatcaatcaaagctctaaatttatatgaatatttttaatatcacgtgtataaaaaaaaaaattcaataatc

SEQ ID NO: 219376 - DNA, 2225 bp, Cannabis indica
gtatatgctatattacatacactatatatatagtctaacaatttcttcaaaaggttaggaaaaaataaaacttttatatatatatttaataatttttggtaaatcatcatgtatgattcatgtaaccaaattatatgttatatgcctaagttcactttaaaatattaatttcaaacttccatttgttatgaattcttgatgaaaacaattaaccatatatatatatacaagaatttctcattttattcttgacattttttaaaagcttgaatctaaaaaacattacacactagtgcattattttcaaagttacacatttttatttttatttcttttcaaaaccaattagggaacctactttattatggctaattaaaaccatagttttaaaatcattatagagttttacatggatataatgtgtaagaaatttattaacatatataaaagtgtgggttactctattgttttaagatagaacacctcataattcaattaccatacatcttaccatattctatattttaaaccacactttcaaattctaaccatatatttatttatttattttatatccatatagtcctataaaattttgagtcatatatgagagaagaaaatagtcatatgatactattattgtcatctcatcttacttatatgccatcaacaatttgtttccttgttcaaacattactcatttgagtcatacatcttttagcatacatttggttctccatcaataatattaccttaacaattatttaatttgttcccaaaaacttcttttggggaacatataagcaagttattttttgtgctatgtacttaatcttcatcattttcattcacaacaacttctcatcttcaataacttttggaagttaaatttaatcatgaacaccttttgtagcacaaacccctttagttccgaaatttaccaggatttttattgatatatatatatatatatatatatatatatacttattcttctcccttttcatcttccacaagcttactctcacattaggtggttcatcttcatcgtttggtgaatcttttgtatacagctgaaggcctatatggtgccttgtgcacactcttgccgggaaactcgtatgtcttgagtttgagggcggatgttagctcgcataatgttggaaaaaataataaattttaactgcagcgaaataataaagaaatttactcggttgggtaaaattactaaactcacaaaacgaaatatattcacttatgacttcaaaatttcatacactcactatctaaatctctccctccctaatctcaatacaactttttcttcttactcactttctcacactcacttcttttttcataacttactctttttctcacacacacctctcacaaacataaaaaaataaataattatagagtcccaaaacttaggcaccaagacactctaaaacttggtcaccaagactctctaaacttgtacaccaactcattttctcacaattaataattacccaaaaataaattgtaacttaacaattatagataaataaattaatttgagtcaaacttcaacatctccaccttgactcaaattctctaaactcacaactcaaaccatcaataagagttatatgcatcgagttcatactctcattacttcacttgagcacttgtcttcacattttttaatttttcactgatgccttcttttttcaaacaaccttttattgaaattggagtcttcaccttgttggattctttaacacaaactgaatgtcttttgtgactctacctttgctctttcttacctttcacaactaccaagctttaattcttaatatttatttcaccatctcttacaaaatagtcatggccatgagtatctaaaactctgaaggagattaagctcttcctcaatgttggaacatgtgtaacatcagtcagtgttttcacaacaccatcaaacatcttcactttaatagttcttatttcatacaatttagagcaaaattattgtccatcaaaacagaacatctatcatatgtcttattataattatcaaaacactccttatacgggcacatgcatctagaatgaacaaccagaatccaaaatctaagaatcagaaaagttttcattaactatgatagagagaacatcagagtcactttcaaagccttcaccagtaataggggtgttcatccgatccaatccgcactttt

SEQ ID NO: 219377 - DNA, 1540 bp, Cannabis indica
caacaactatatacaaccttatcattggaaaagtgtattgcgatcatcatgggatcatgcacataagtggtaatcgccagttatcctgtaaactcaagtttaaagagcagactattctttaccaaaattctcgcgaggttagtattctcaccatagtttatttgtttttttcttctcagtgatgatttggcttggaaggttggattgggttttctggtggagacggctttcaaaggaggaattcttgataagctttagggtaaagatacatcattttcttacttaatataaattttattgatttggattggtttaatttttttttcttttcatggaataattgtagcaatgcctctacatctgaagccattgattttatgtgtcagcatcttctgctctttactatttttccagcaatctatcagtgataagagctcctagcagtgaggtttatttcaatttgtgtgttagtacacaattctcttttatagtgttagtgcacaattctcttttatttctttagttgctgagcagcttacttttcatgtgcaatagtaatgtgattatgtaaatgctcggtatgttgagttaaagctttcaacaattcattttgtgtatatatctttcttttttgggggatttttacactattttctttacctaattttaacatatatacaactatattaaattttaaatatttgtcatgaaaaattctgagaaacaatactctttatttgctctcgtcatgtttagattaggtgtattatgcaattaaaattttcaaaacctaaagcatcctgaatttagagaaagaatttaatttctaataggtctattatccgattgtgtgaggttttcaattagtcatctcatgatattaatttttttaatttataagaaaaattaatattaaaaggtatgttatctaaaaatttgatatttcaaatagttatgatattaaattttctaatttgtaagcaaaattttgtttaaaattcagtttaacatgctaagaattttcaaactggggatccgcttgagatgactaatatggctattgggtttttatgaataaaagaacaattgtgatcattattgtagtcattaactcattgtcaaaaaagttctgatagtagtaccttatcatgttccttttttgtgaacaatacaatataacagttgtatttatattttatatatatgtgtaaattcagtttgatgttttttgttcaacctttttcaatttgtgtgcagctaaatgtagaacaactttgtgaaagtgcttattctgttggttagagatcgagtagcttcgtatcttcattttattttcttaaaaagtcctatactttgtgaagtattgagcaatagaatttaattttattaatttgttcactttgttgtggcaccactataaattggaagcaatggtggttacctacgagtgaaatgtgttggtggtctcaatcaacaacgaaaagtctattagcttattgtgatcagattttaaattttaagcttaagattaaaaatgttg

SEQ ID NO: 219378 - DNA, 3123 bp, Cannabis indica
cagtgagattcatcaagatcggatttctttgcgtgcaagaacatacaagcctacgtccatcaatggctaccgcaataaagatgttagctaacgagatttcactgagagatgttgaggtatcacaaccatgggctggtttccgatctcatgtttataaaaatggaccaccagcatttgtctcaaagcactttctcaaagggctccacaatcagcttccaaagtcctcgtacatcttatttctgactaccatgtttttctttcatatgctataagaagaagaagaaggaggaggaggaggagagtgcggcaggatagaagaagaagaagaagaagaaagaaaagggaattaggaaatttagggtttttttttttttaatttttaaaattggtttttaattttaaagtaaaatattttttatttttatttttaaataattatttttattttaatattattatttattggcacttttgtgtgtgttgttgtcttcattctctcccccatttccaaccccagttaattctgcccccactttttgtgcctctatctatctctctttcaaaaataccggtagtagggttttatcttttataaataatattgttattattattttttgaaatggggtttatttttattttaatcacaattattttatattttttttttcttgttcacattaatctacattttgttactaaattttgaaaaggacaaataattctgaagatttcaatgaattaaagattttcagaattttctatgatcaagcaaaatttcaagagctaaaatgaagcctttgccttaatattcaagtgacaatcagaatgataattggacttatctcaaaactaattatagtgtatttttgtatatatgatttaatatttttatatttaatttatttatagataacaatattattcaatattccttcatgagattttatcgtaaaattattttttaatgaatggagtaatccatatttttatatatgttcagaccacatctaatataatagatggaataataaatcagttctatcttttagatctgtttgatgtatatttgttcaattagttcgtatttatctaatattttagataaatctgaaacataaaagagtatatataaatttaggagaaaaatatattgtatattcactttattttatttgtacttttatttttatattctttaagatatactcaattttataaatggtgtctctattatactcattagatttatgtaaattatgttctaaactaaaatgaaaaataaaagtatatatattaaacaacccacttataaaagtagatataatttaataaaatataatataaaaccacttttgattaataaataacaaaacataaaagtatttctcaatccatctctaaatttatcatttgaaatttattttaaaaaaatttcttatataatgaactggtattgttattaaacactatggggtgcctcctaatatttctagggtttatctcataaatcctggtgaactgttatccaaaaagatctctaaacgaaaataaacataaaagaagagagtaccttgccatgtaattctccgatatggatatattcgttgtgtaataatgagaggcttagaaaattaaacaagataccttatttggcccttggaaagttcaagcaatgaaccgtgtaccatttcaaaatattaaaataaaaattcaaccatgtactatattctttttttatacatatatacaggagaaaccacgcacatatatatataccattaatttccaaaaaataaaaaataaaaaaatcaagcatatatatcctttgaaacataggattttgcctgatggttctttgttcttctgagtgtgtggtaatttacttgatatatagtgtaataaattcggcaaagttttatactgacaaaaatcttttcccaagtagaagtagtagtcatcatcatagtataaaaatctctcttatatctcattattaattagtcacagtcatagcatctaatccgtaattatataccattgaaaaataaaagtaatgttctgaggttcaaaattttgaaaaagctgataaagttagtgggacagtccgaatgtctcttcctcaatctctctctagtctctatatctataggcttcttctctcttctctctccccattaaaggttaaaggctgaaaagctcttttcacaggactctgatttctctgctgatagaaattgtgtctatacatcaatcctacatacaattaattataaccctcttccttatcattatcatgtatattgtgatatatatatatttataaatacgttttgagaatgtgttacacaaaagaaaaatatattataatagctagcaatagttccaaacaggtacatatatctagaattaaaactatatataaagaataagcaatatggatgttgtgcgttttacaggcctaatttatagtgtagtaatagggatatgaaatagtggagttgtagtggggaatggggaatacttcactactacttgtttttttttttttttttaatttatataataatttatataccatatcgtagattagaaggagctagctagtactgcttgctatataggtttgaaatttctttatgtgtaatgatactattgctatattgtgatcattgattcatttgaattatgtttactaattaattaagatcattaaatattaatgtaatatatatgataataattatggtatattattgatctatcgattccggccaggaaaaaacaaacaaacaagatataaataaataatatttatttaaatcaatcaatgtactgtttctggctactctatgttgtcagccatgtagatctaattcattaaatataatatataaacagctcaaagattcttgtcgtattgtggcacaataccaaatttgtcttgcaaacgaccgatgttgtaaaaacatcaaagaatatattaatacgtagagaaaagctatttggttcagtaacttcatatcaaaaaattcagaacactggatttcattgagtattgttcattctcaacaacagagaaatttaacacgagtaaagcgacgtgactacagtactagctac

SEQ ID NO: 219379 - DNA, 3796 bp, Cannabis indica
tgaggccaccaaggttaaaggccgtacataagaaggccgatatacgaccataattagaggcatcctgccgttcagtaaattcttgaaagatatcagaaggatctcaacgagtaacatgaaggagttccttgagcgagctgatgtcttcataaagttagaagaagctatccgacaagcccaaatagggtaactcaataatagacagtctctatgtgctttgcaaccccagaactttccaggtgcgcatgtaggcactagtagtgccgcccagacctctagtggcaagaacattaggggtaaccacaacaacagtagctccaaaaggaatagtggaaaaaatgaaaagtacaacacttctgccacgccatgagactagaaagataaagagcggaagtacagctgctccaccctccctagcggagaaacttgggaccattcatatggccacttagggcattgtcccatacaaggagcccactcccatcaaaagagagatgagcaagagggacatgtcgaagttctaccgatatcacaatgactttgcccatgacacaaatgagtgtcaaaacttgaagagggatattaaattccttataaggagaaataatccccacttgcattgttatgtgcagaatggctaatctcatccacaagcttcctagaatggaaacgttatgccacctcgagtggcaggtcacttaggggtcatcattggcagacctcgcattacaagcaaaactagaaaggctagggagcactatgctcggacaccccgtcatgagcctaaaagtgacatcctagccgttgatgaaagaggctccaaccgactcaagcttggggagcccgccatctcttttacagaagaagatgctgcccaagtcaacttcctacacaatgaccctggtcattactgcacaaattgggaacgcaatggttgcagggtatatggtggacaatagagcctcctcccacattcttttcaaatccacatatgaaaagatggggctccaactagccgacttggcaccttgcaaacaagtaatgtacgactgctttggccaaggaattacacccatggggtacattcgactacccctggaaattggagagagcccaacaactagtacgctaatggcacaattcgtagtgattgacgtgttatcatcattcaaatctacgataggttgaccagcattgtactgcctaaaggcagttacatccttctaccacctttctctaaaattcacaacaaggtgtggggtaggatgtttgataggagaccaacagtctgccagtcactgttacaacttggctttgtccaaagccaagaaagaaaagatgcccaccaagagctctgatgaaaagcccagcaaaaggcaatgaaggctagcctaaagcagggaggcagacgtagatcctcacttgggggatcctgcagactgctttgcacctgttaaagaattggaagaagtggaggttgatcccacttttccaggcagaagattgaagattgggaaaggtttagcgcctgaattaaaatcagtactgataaaatttaaaagggcaaacccagacctctttgtatggtcacatggaggcagggtcagaatggacccctccgtgatccaaacatccaacttgcaaaatggaaaaggaggttgttggataaagcgaagttgaatgcccacaactttatcactgaagcattctatccattttgggtgtcaaaccccatgttggtacccgaacctaacaaaaaatggagggcgtgcatatatttcaccaacttaaataaagcatgtccaaagaccgctttcttcttccaaggatcgagtagctagtagatgctataactggccttgagatcctaagatttatggatgcttactcaggttataaccaaatcaagatacacccaccaaatccagaacacaccaacttcatgacaaacatatgcctacactgctacaaagtcatgcccttcgggttgaaaaatgcaagggccacctataagaagcttgtgacaaaatgttcaaagatcttattggccataatattgaggtgtgagtggatgacatggtagtcaagtccaaaaaggctaggggacatgtggaggatctaaacgaatgctttaatatcctctaagagtataacataaagctcaatcctctcaaatgttcttttggtgtaggctcaataaaattcctaagcttcatagtcaatggtaggggaatagaaacaaacccagaaaatatccaagcccttttgcacatggagtcgaccacaataatcaaagatgtacaaagcttgacagtttgcatcgcttcactaagtagatttgtgtctaagtctaaggataagtgtgtccccttcaaacattctcaagtggaaaaaatttgagtggatagaagagcgcaaaaaagcactccaagagctgaaaaaattggcttaactacctttcttgtcaaaacctttggacaatgaagagctaggcgcgtacctagctgtaacagaacatgttgtgagtgcattcttaatatgagaagaagactatatagaacatccaatatactaaatcagcaagagactgatcaacactaaaagtcgatacccacacatggaaaagttaacatacaacttactcttagcatcaagaaaggtgaggttgtacttccaagctcacccaataagggtctacaccgaccaaccattacgatagatttcaccaaatcttgaagcactcaaatggaccaacgaggcacgaccaatataaggcctcctatttgttgggaatttatgccctaaataaaacccatttcaatataattttatttgttatcaatagaacaatagaaatcatttaagttaacatgattttttttcatgattatggtttaatatataatttttgataaatgtagaacatattattgttcacaattatagtgatgtcatcacagtggaaggtagttgttattatatgctttgaagtttatgtcccatgaaaaatttatactaacatgttaaccatagataaattttacttacaccttggataagtattatgtcctttccagagcattggtaaagtatgctgatatcgaatgtatagagtatatatcggattggactgatattgaacttggtaaagatattataaacttactgttgtatcttcttaagtcaatatcacttagttcatcttagatcagtagatcttaatcctgagatggttaggtctaatctcaaatttgttatttgtgttcttagagttgttcgttaaagttgaccaattggatcaacccaatacctatatcttaggaatggtagtgcaatttggtgagagcactatcatagatacaaaatccatagcttctatgttgacatagaagtgaaatgatgatttccttcgagaatagattaatagagataaatggaagagctcttatttaagtaattattagtttattgaaatatcattttgatgaaactaagtgttttaaggataaaatacattaaaaggtagcccggtaaattggtccctactcaatgtcaataatctatagaggatctttgattatttgtattgtaacaatggataattaataacgtatctataccttggaacatatagagcttttaatataattaagtgtgcaattctgaatttatagtggattcataaggaattaataagttaaagaatttactcagtaaattttagatctacttattggaagcttgattatagaggcacatggtccgcacactatttgagataatattggcttgtaga

SEQ ID NO: 219380 - DNA, 1841 bp, Cannabis indica
tgcagaaccaactaccccaactgcatgatctacaaggccagacttcgcaaaagtttcaatcggtaacatttgcaagcttttcccttagttactactggtgctgttgtggtgtttgggaattaggattgattttagatgctgtgcagtgtgcacaatattatttttcatataactttgatcttctagtaggtaggttccaaaggtcaacaaggcatatgtgtctaagtttggatttacatttgtatttggcttgttatccttatgtagcataatgtaccggcaaatatgcttcttacttctaaatcctggtgtattaggattaggaatttagtttgactgataaagtttagaatgaaacttatttctacttttttgttagcaagattttcatagaataatgaataatatactaatggagttatatttaacttacacaaagagagttcattctgcttgttttgtaattgataatgttttgggtccagttacatgggcaacaacaaatgcaattttctcagtcaatggggcagcagcaattccagggtaggcagctgtcttctggacatcttcaacatggcattggtcaaagccaactcaatcaaggaagtcaaataaatcgtcaattaaaccagttttctagtgctgcaaatagtgctatgtttaatgcagctcagacaacagcaaatcctcaaatggtcagattgattttttttttttttcacttccattctaaatcattacgttcattgtcatattgcaatgcagtgtgtgttttttttaaaagcatgaaacacacaaattgtcttcacaagaatgcggagactgaggtatataagaatgctttgtagtctcagaaagatagagaaggattaaagatttatatgtcattgttcgattaaccctagatgttgttggaatagagagccatcaacaagggtgtttgattggttttgagggatacaagagtgttttgtaaagagaaggttcaacagtggggacttatttatggatttccaattttaggtagaaaaagaggggggagacaaatgctcaccttatagtgagtagacagaatttttatacccgatctcgtagatatgttgataattataagtaaagctattttctatgaaaactttatgcacgacttgaaaggagatctttcataccttgtgagatccactctgcaatttggggttacaaagcctttctcttaatagaaaggaagacttattattgagccctttacactctcaagtcatattgatttttcatatacttcagaagaactttaaaatctatattgggatcatctctttggagttgtgaatgttctttttcgatgcctttgtgatggatgtgcattatattttcagctattgatgtcaaatgcaaatttaattcaaaaggttgcctctaatataattgcattctcttttgaatgccttggatgtgacatgtgcccactcattcttggcaatgaagtatagcctaaaattttctgctctgcttcatgcaatagatctgtttcatcatttacgatggtataacagttgttgactttattcacttcttttttcagattccaaacatgtcaggtacaatgtcatcatcgtccattttgccacggatgcaggtcagtagtgaaactgtgttcttattgcatgtcatgtatatggaagaagttgagaattaagtaagcagagtgttaagtaacgctcttagagtacgagctgagacatgctaaagtctttcctggttttaagtatcactgtctaacctggtgtggtgcacataatgatttttaagaagtgtaattgcagcttaaaaatgacttgaga

SEQ ID NO: 219381 - DNA, 1342 bp, Cannabis indica
ttttttttgacaaatataaaaacttattagagttgaaataaatatacattatttgaacaaagttattgaaaaataaaaaaaaagaaaatgcaaaagaaactcaaagaaaatattgaagagtaaatattgaaaatttatttaacctgatttttttaattattagtgtgtttaaatgtaactccaataagaaattaatttggtctaatctaatacagaaagaaggaaagaaattgatgaattttgcctaaattaaaaattttacaataaaatgacacaatggggaaaaggaattacatctttggtatttaaaatgataattcaatctcctgttagtaattttttatttttcttttaaaggaaaattgaacaaccaatcacagccaaaaaaaaaagtttaatagcagttgagcttacacaaagaagaggatcatattatgtcccccgaagagaatggctttgttataaatttacttattaattggagaaagaaatatcttaaacaaaatttctaaacaattctctaattgaattggatgggatgggatagttaatttttagatcactcctaatttaatgtatgcccttctaatagaatcaaataatagttaaattacattggtttttttttttttttttttttttttttttttatgacagttaggggaggggaattcgaacttgagatatcctctttattttacatgttaattcaaattcgaacttggtttgtggtaagtactgtcattatcgcttttgatattcttctcaaatttattataatttctttgtcaaatttattacaaaaaaaaaagcttattaattagttaacgaaaatctacgttaacaagatgcattttagattggaatattacagcgatgtttaaatatgggtgggctattgctaaaaaggaagataatttatgggtgaaatgggttcataatatttatgtgagcgaagaggattggtggaattataaagctaccgcccaagctagttagtattggacaaagctggtttcaataaaggaaaaaatgaagaatttaatcgaatcaaaccagttaactggcagcagctataagatagctcaacagtgtcaattgttatgtgcaaatccacctagagtagcatggaaaaacattgtttggagccaattcaacattcctaagcatagctttattttgtggttagctatgcttagattaatcaaaactaaagataggttacagaaatttaacattattgataacgcttcttgtctcttatgtaatggtggagaggaattgatagaacacttatcctttgagtgttctttttctatgagttgatggtgttgggttttat

SEQ ID NO: 219382 - DNA, 4522 bp, Cannabis indica
gcaccacccgcaccgcgaacatgttgtttgcttaatctcatgtttcgagaaggagtttatttcatcttttactctttttttttttaattttcttttttattttggtgtatgtgtgtgtgtggcgggggatctgtttatattttctttgcggtataatttcccggctcttttctttcagagcatatgttgtgtccttaagaaaatgtaactggttcaaaagtgtcactatgttctttatttgtttaaacacttagtttaggacaagataatgatcacagtaccattactgtacagttgagaagaaccatttatatccatcagctccttccttgactcgttacaaggattcatctataccaataatgaaagaaaaagctgctggagtctgttgttttggatgacaatttgatcaacaagctgaatcacttgacagtatccaaactttgtgtcagattaaacactttaaaagtaagtgcctttcatataaactagttctaaataaaccttaaaattttgatttgatattttattttaaaatattagatcatattatcaataacttatctcttcagtattgaacctaatttcttgtgcatgattcctcaatgataagatcatttttcttagatgaactagttaatttaattgcttgcaatgatatatcattcatagctgcaatgaaacacatattttcaattattttttctatgataaaaaggtaaagctggtattttctgtgcaatttgtcttttatgtagagcataagctgcagtacaagtttttgggtagcatttcccctaaatattattgactaatttgctttgttgtcctatgcagtatattgagaaacaaatttttatacttgaagatggcattaggaaatcctgggcgcttgttagaaagcctaatgatggaaaaagtggtgagtttatgactgttttcaaatatggattctagctgttagagtttgtaaaattactccatccgactagttccgggttcgagtcccgagcaacccattatacttaatattttgaaattctatctctacaaatatgaacttgttattttaatggcccgtttgtttcttcgaattctactgtaacaagtaacaacgttaactggtatctaagctcacaattatgacatgcaacatataagattgtgttgctttattcatcaatagtcacaaaatgtacgtagcagtctcttttctcatccctactccacaaggattcactttcttctccaaaaaagtattgagataaacaaagccttgctaagcctgtttagaattttcctgcaagttaccttgttaaccctatttatgatagtagagtgactaagaaattcttaaacctggttgtttaggcaattgtaatcttttcggcatatatgctttagctttgacaaaatttcaggtttttatgaactccgttgtccaaactatattttctacagggttcgtaaagtataattcagaggcattagaattttatgaacaaatagtgatggctgttttaagtaaacaaaaataacttttaactgtaccgtaagcggtttagttgaatgaggtgaaaatgacattctttttccttttacacaatcattaagggtggattttctttgacgagcgttgcagttttaatgtccaaattcccttaacagttgaatttttgttgttgatgttttcatgtttaacttgtattttttatttgaattagctgagagtgagcctcatgaaattactagtggtgaagaggttgatgaactgtttgccaatacctttgacattatcaaggacacttcattgaatggtatcaagaaaatttgcgagtttataggtaagtcaaatttgcagtataatagttcctattgttaccaaatttcttcatatctccatacattgcaacgatgttggtgcatcattcaactaaattacaataacttatttacacataattttcaactgtctcgctttggatgggtatgaaaacattcagcctgatttatgttacttaaactcaatgttcaggtccaaaagttgtgttctgggatctcagggatggctttatctcttctttgtatagtggtagtgttgaagttgctcgtttggacagtgtacttccacatcttgacactgtaagctgataaaaatatacatttttccctctccacataatgctgtacttgtacttgtatttgcattacatgatgggtttaattaaggttacatttttccttcactggaattgttttgttgggttttaatctaagaggcacaatgtaggtccttgatcgtgtatgtggcttaattgatgatactttgagagattgcgtgattttaaccatatatcgagcatcactggtatgatctcatccttggaagcttatgttttatgaggctgttttcaaataatttagctttgcattgatctgtgatccaggaaggttttgtatgggtgctgcttgatggtggtccttcccgtgcattttcagattcagatattatatttatggaggatgaccttgccatgttgaaggttcttaaaatttttcatctagcagagaattgaggcacacaattgttattgaatattccaggtcacttaaacaaaatgaaacaaactaagagctattaataaatccggactaaaagttctgtctaattcttaactctgaaatgcttgatatctggatccctaacaattatgtgcttgcaagtatgaacttaaatcatagaaactatttttttttttgtaaatcatagaaactttttcaaatctcctttgacgtgacagttgagtagccttgtacattacataattcccaagggctaacacctaagaggtttaagaactacagaacaaaagtattttatagcctagcgtgcatgttaattctgagcatactgttacttattaaacttcctaaattggtgatgtgtttacgcttgtcctaaatacgagatttgttttgtcaggattttcaatgggtaaaagattttgggttcagtagatagacctaggtccttaatagccactttattgacatgagtttgtagagtggcactgctacatatattaaaaccaaattcaaatttcatcatgtgatttgaagtttgaacacgtatgcttatatgtacaatgttgatttaaatatttttaactgacaaatgataatgttgctgaactttgtaggaactttttgtagctaatggtgaaggccttgactgttcattagtagaacaagaagcaaagtttgctgagcgaatactgggcttgtactcagttcaggtttgatgacttgtgattgaaaactttttacttttgattagtggctgaaactggcagcgtgatggattattatttctgcagactgaaactgtgatccaaatgcttatgactgcgagtgagcagatctccatgggcttagattctcatgataatgatcgtagtaatatactaaatgtccacacattaatgcgagttttatgccacaagaaagatagagaagcctccaaatttttgaagacacaatataatctccctatgtcctcaggtgttcgacctttcttttctcatattgatatcatggtagtctgagtagcagtagtggtaatggagaggctgtaaccacatttctgattttccaggactggaaaaacaacaaaactagttttatgcactcgatcaccaagtgcaatcagctgattattttctaatgtgcattttttgtgcagagtacgaggacaatctattaaaggattcaacatccccatcgccttttatatcagactttctgaaacgaagtacttcgtttcattggagcaacaagagccagagtagttttaattcatttaagaagagacttcaagaagcaacatcagatatcaggaggtagtgcatttagaatatagtttataatgaatgaacttattatttctcatcatgccaatatgatgctggaggtggcccaatccgagaagctcaaattattctttctggttaattgtggttagtcaattttgattccttatttctcgtaaagctttattagactagaaattaaattataaagaattttgataagagaaaaatacactattgatggagattcctttattttctttttctgttgtgtgtagctttgtcaaaagtatagaaactgttagtgcgtttaaaatattttcctttatctgtacaaggtgcactatcagactgactagtgttattggcctcgtttatgtttaagaaaaacgagagcgtatactctttttagtgttagggatatatgcattaaattattaatatgaatgatttatctataaatattgattttttttttattatatataaggctgtcacttttaattgtaagaagatcacttagtcatgaataaaacaattagtaatatattaaagtctggcaatctttaatcaatggttgctaatacggtttattgtgttagagatattattacaatgaaagaaaatcaagatttattacaactctattgtaa

SEQ ID NO: 219383 - DNA, 2031 bp, Cannabis indica
gggtcttatttttaccattttggaaaatacagggtccattttatcatttaacaaaacagagggtccaatcagtaacttttgcaaaacacatggtctaaaatagtatttttacccaaagtaaaaagcagtattataaaacatattttttaaaaatatttttactaattaaaacaagaaacacccataataaatggacacatatacatgatgatgatgatgacatataatttgatataaaaaggggttaaaggtatgagcctttttcattgtgaagtcatacacatagaaatatgactagtactaaagaaaaacaagaacaagaagaaacttcattatcatcttcaaaagtagttacaagagataagtatagatcattcttaagtgaagaagataacacaaacactatttggagacatggtgttcctcctacctatgatgatgttaatctcctctttcaacaaggaagaaccaaggtcatatataaattcttaatcttatatctatatatttatagaaaaattgttggtaattattattattattataatatattagtatttttagtattttcggtagatgaataaatttttaactttttttttcattcatcttttctaatcaaaactaaaatttcgaaaattaggaatatcagaataagaattacacttgatattattagaaatattcagaaagaacataatcatatcccattaatgtgaaaaatatactagattagtgaaattaatttcattcataactctatttagtcacaataattattcattttgatcgaatagtttaaattttattgtcgcggtatatattttgttaatatatttaattataagatatatatatatataaataaatatatacatatatatatgttaattatttgcaggaatgggcaaaaggatcattagaagagatagtacaaaatgctgtcaagtcatgggaaatggagctctcacacaagattcgtttgcaagatttcaagagtattaatcctcaaaaattcaagctctttgttaatggtaattatttaaatcttatttagatgtatttattagaccaaatctaatattttaggtttatccaattttaatttattatatattagatattaaattttatcatccaattcgatccaattaatttcagtcatttaatggatattagattagatcagttcatccattagatgtacttcatatatatttattggtttaattttaggtttatcaaatattttagacttagtattttaggttcagtatatattagattggactaaatagtaaaattctaatgttaatttttatatatacatatatattttacttataacaatataaatttaattactcacccaaaataaataaaaatactaatgagttcgattggatgttggatgttggatgtattgaatttttggacactccatccaacatctaatcttatccaattaacattcgatctgatccaatcgcaattaaatatctaatgtttgactattaattgtaattagattgatcaactatcattgaattagatcgatttatgcatattcttatataaatatatatatatttctttgtttatttatttggggtacatgttgaaattgttggaaaaataaatttgaatatttttattaaagagatgatctccataaaacatatcgagtatattgatgagtactataaattctaatgttataatagttaattttataaaataataaatcaaataatcatagttaattacatatcgaaattacttgaaaaacaactatagatctctagagaaaagataatcagcattaattttatgggcattcaagtaattaaactttcgataataaatgggtttcaatgtctttaataataaatttctaacatgttcatcataagttcattatttggttgaaaatagtgtttcctaaccaaacaataatgatcactttgattctttttgttcaagtttttaatgaattcaatttaaattgttttctcaaaaaaaaaaaaaaac

SEQ ID NO: 219384 - DNA, 8482 bp, Cannabis indica
tttctcctactatagctgatagtatcatgcatgtagaagatgcatcacacatctggttagaattgcaggaaagatttcaccaaaagaatgctccaagggtgtttgaggtgaaaagatcaatgcagacattaactcagggatccaatcatgtcacttcatactacacttgactcaaaggactatgggatttgctgggcgaatacaggccacaacctgtttgtacctgtggtgcaatgaagatcatacaagagtaccaagatgaaggcaaggttcttgagttcttgattgggctcaatgagtcttatctcaaagccaaatctcagattttactccaatatccacttctgaatgttaacaaggcttatgcctgtataatccaagaagaaaaagagagaggaattatcatttctcaacctgaaactcccaagcctacaagtgacaatttagggaaatttgcaaggagtacacaagctaatcgaggcaacaatcgatctaataatcgacctgtttgttctcattgtggaattattggacatattattgcaaaatgctacagagttcatggatatccacctagtcatcgattgtatggcagatttcctaggaaaattcttaacaaaccaggaaatcaacaagatcaaccaatttcaaatgatgatatgaacgaagatcaggatttgtccatacaatgtccaaagctcatggcaatgttagcatagaaaatgctagaaacttgttcactcacaatctcaaccatctgatcaacctgttgtatcaaacatctatggtaatgtctcttttgtccctaaatctagttggattattgatattggtgctacacaccatgtgtgttttaactgttcttggttctcttccatttagaaagacattgtttagtgattgagctattatattatattttatttttaaccctatgcccttcgaccctcctccgccactaccactagtttttctttacctttctctctttcctttagccttttcttcttggagtgttaaaccacacatcatatctgttaaggtatgtgatttgggggttttgatttatgtttttaatttatggtttatggcttcgatgtaatgcatctcctcaactgattcgttcttgaactcaatcaacctttttgtggagaatccttcctttggctctttttctccactgtatcatgattttgtgtattagaacaatttttagtttttcctttttatatgtttctgcatctttttctgtttagttcatttgtcttatggtgaatatttttctttaattcattgcattattgtaggaattgaatgttgcttacaagcacaaatgttcttactaaatgttttgagatagaaaattcaaatgtttgcttagaaaatatgtgcatagctattgcttcttgttattgatattcaaatcctataatcttccttgggcaaacatgtcattgtatcttctttaaatttgataagtttttccatcacatgtggaacactcaccaactatgttaataatatcttcatcaccggcttggccatactacaagattgtgttcgtactatagatttctaggtggtcttgaattattgtttgaaagttatttgtttgggtcgcttcttgcattcttgtttttttcctttatgtgaattgtatcctttttaagtctatttttttacaacaggtttggttcattgagaagctctagaaatggaggacattgaagatttgttagttggaagcattagcggagctcctcctggatttcggttgccactgacttcagttggattgaacccaaagaaggaaaaaaagaaacctcctctcaattatgctaacaccaatggttttgcccctaaaattcctggcactcagacaatttacatcaaaaccttcgggtgctctcacaaccagagtgacagtgagtatatggctggtcagctttcagcatttggttattcattgagtgaaaatcccgatgaagccgatctatggcttataaacacttgtacagttaaatctcctagtcaatctgcaatggacactataataactaagggaagaagttccaaaaaaccgcttgtggtggctggctgtgttcctcaaggaagcagagatctaaaagaattggaaggagtcagtgtagtaggagtacaacaaattgacagggtggttgaagttgttgaagagacactaaaaggtcatgaggtgcgacttttgaaccgcaaaactttgcctgcacttgaccttccaaaggtaagaaagaactcatttgttgagattcttccaattaatgttggttgtttaggggcctgcacttactgcaaaacaaagcatgctcgtggtcacttgggtagttatactgttgatagccttgtaggacgtgtaaaatctgttgtagatgatggtgttaaagagatttggttgagcagtgaagatactggagcttatggtcgagacattggggtcaatctcccagttttgttgaaggcaattgttgctgaacttccttctgatgcaagcacaatgcttcgcattgggatgacaaatcctccttttattctagagcacttgaaagagatagcggatgttttgtgccacccatgtgtctactccttcttgcatgtacctgttcaatctggtagtgatgcagtcttgagtgctatgaatcgagaatatacttcgagtgagttcaggactgtggttgataccttgactgagcttgtgcctgggatgcatattgcaactgatatcatatgtggatttcctggtgaaacagatgaagattttgctgaaactgttagccttattaatcaatacaagttccctcaagttcatatatcacaattctatcctcgaccagggacgcctgctgcaaagatgaaaaaggttcctagtactgtagtgaagaaacggagccgtgagttgactacactcttcgaatccttcacaccttatagtggaatggaagggagagtggaaaggatatggataacagatattgcgaccgatagagttcacttggttggtcatacgaagggatacatccaggtgcttgtagttgccccacagagtatgctaggaacttcagccattgtgaaaataacatctgtaggaaggtggtctgttttcggtgaagtgattgagactatcaagggtaggagttccaaaacatcttcaaacatggggactttgtctattgatgaaaaatgtagcccttgctccaatgcttgcggtgatggttgtgagtcaagagtgcaagaagaagcatgtgattgtggagcaggaggctgctgtactggaactactatcaaacatagtgttgcctcaaacaattccatttcgcaaaaggatggaagcagcataaatctcgtcggatggttgcttaggaaacgaaaaaaccatgtgcagaagcagatggagtctgaaattacaactgaatttgataacaaacaagaacaagctgaacaaagtattgcttcgtggaatgcgatggataaagttcttctcggtggaatgcttgtgagcttcctgacaatcttagttctactgattcttcttggatttaggacttcgtctaactaataaacaattttgtttgaaggctgcttttgttgttatttccatttggatccgcttttctaatatggttgttattcaatttgtaaacacttgaaagtcatttcacttttctataaaaagcaatatgcaagacctaccgaatctttttctatcataaacatgtcaagactcatttgtaatagatatagagttagtagtataaaatgcattagtctatcagatttgattgtcctcgtagacctttggcagatatagaattaatttgagcttcaagcgtttgttgaaaaacaaagattataaggaagcttagctaaatcaccaagttaaaacccaaatgaaggttatttccccaaaagttgtaaggatattgaaacaagtcttgatattaagacctaaggtctattttaatcttgtcttaagcttgaaacaacaaacattttatttccatattaaaagcttgagtggtataattgttccgcttaagcttgtaacaacaaacattttatttcaatattaaaagcttgagtgacataattgttctgcttttttccatagaaatttgcatgaggatgtgttaatgattctatctcaagggtgtagtcttaaggggaagttgctctctaatgctgtatgcaagctaaaaaaatctctatatagccttaagcaaatctctagatagtggtttgaaaaattctctacacctttgattgaagaaggatttcaacattcagcttctgatcattctctagtcatcaaacagaatggatcaagcatcataatcctccttgtttatgtggatgatgttattgtagcagcaataacatgtcagcattggagagtttaaaagtcaatctgaataacagatttaaactgaaggaccttggtgatctgatatactcccttggccttgaagttgctagaacaagtcagggcatttttctatctcagagacacctccaattattagaagacctgggacaattgggatgtaaatctgctagcagtccaatggaagtaaagctaaaactgtataggaaagtcattgataagctgcaatatttaactataaacagacctgatttagcctatacagttgactataatcagacttgatttagcctatacaggttaacaaacttagtcagtttttggttactcccaaagctactcatatgaatgctgcacaaaggcactcctggacagggtcttatctactctgcagattctgaaatcagacttgaggcatatacatgctgactgggcagcatgtgtaggacacaagaaggtccaaaacaggtttttgtgttttccttgggagatctttagtgtcctgggaaagtaagaaacaacacgcaataccgaggtcctcagctgaagctgattgtagggctatgtgaaacactagtgaattggtatggctgctatcattactaaaggaactgaatattgagcacaaaggccctgctgtcttgcattgtgacaacaaagcagcccaacaaattgctgctaatcctctctttcaggagaggaaaaagcacatagaaatagattgtcacttagtaaggcaggaagttcaagagagaatcataaagacaacttacactttgagcaaagaacaaactaacatttacattccaccttaagggggagtatcaagattagttagtaaggtgtagtgttaattagaagttagttggaggttggttagtttgtgtttgctcttgaactgtgtatcaatactgattgtactcattcattttcattaatgaaatttagaatatatatttcattctatctctctctctctcttctgtcctaaaactaaaaaatatatatttatatgaaatatggatatgaatattgcatatgctctagcttataggaaaaacagccattactgaacagggatatccctctctcactcagtcactctcattgaaaatattaggtacagcagcattgtcattgatttcttctttatcttttataaatcttatactctgtgttatagtgtttcttgagtttgtcttgttgaaactgttattactaatagtatattatccatataacatattttatggtcttttattaacagttctttggacaaataaagggatacatagtaatgtataaatttaatgtcaagtgttgtgaaatgtatgttttttctggtttgtgctatattgaaattatataatatgttttgtgatattgtctatgccatgtgttaacttgtgctattgtttatgttatttatttttctgaaaccatatgaattatagccagtaaacctaaggtcaaggaagtacgaaatatgaagaccaagacaactattgcccctattgaagatcattaaagattggagcttttcaatttattttaatgtctagatttatatttgtgattattgatgactgtgaaaacttattttggatggcccttataataagggtggttaattactagtcatacaagacattaatttttctttgttttagtcttaaaattgatctaacttatttttctaatattatgatatgatatgaatggcttagaattttctaggccaaagtgattgggttagctcattaaaataccctcaacccgtccaacccaacccaacccatctcaccccgtgtgcagtggttcagatttgtagacaagcaatgacttataggtacaaaacttaatattgacgttggacttttgtgtgttaggacagagatgaggaaaataccctgtgttagcatatttcatgctttgtttgctttagttcccatactagattgagtttggatgaatggttctcaatgcatataaatttattagtatctttatccacaattgggtcaattttgtaataagtattttgcaattgtatgaattgttttatatataccgctaaggtaagcttactttgcctctctaagtgggaaatatatgtgagttgatattaacactatctttttatttaaattgtagaactaagaaagtagatcccttcacctcaatatatttctacaaattcaatttaaggcgcatcagaataccaaaaaataggtaaaattgtatttattgtaaaattgattaaatcttaaatacatctaaaagttgttgagaatttagtttattgtatttgagtttcatattcattttttttagtctcagtgcaattttcttgttctagtttcagttagttacaattactctaaggttgtgtgatggaatcgatcacagaatttattgtccagaactgttatatatatatttttttgtaatctcaggttccttacggtggttcatcagttaaacataaaaattttataatcattttaatcactgtttacataagaattatttgtgcttacatcaatcagaacaaaatagagctatatatatagagctctgagtacaacaatcataaatctacttttttggagcgcagtgcgttgcactgcccagtatatatatgtatatacatctttgctatcttttattatcagtaagtaatgtcacgtattgatattttttctttgatttaaaaaggctaattcttaaagatatgtttttagttattaatttacttgaaatgcagctttacatgctaacatacctacctaggtagccaactgagtgatgctcaattgctcaaatttatgaaagaaaaatctcaaatcccatttgtgtttgtgcaaagggtattgatttttactgtttgtaatttgtatctttttcgctacacaggaaatgagtcgatttcaaggtccttcatctttgaaacgtaaacagcaagagtctagttcaccattagattctctgtcagaacaagagcgaaccgtttataatgtaatcaaaagcaaacaagatatgggaatatggtcaagagatttgaagagagagactaatcttcttgacaatatagtcaacaaatgtatgaaaatccttttagccaaaaagctaatcaaagaagttgtcaccaaaaacaaggggaaaaaacacttcatggcagctgagtttgagccctctaaagaaatcactggtgggaattggtatgtcgatgggagtttggatacagagttcattaacttgttgaaagatcagtgttttaagtggatttacaagatgagagttgctacatcggagggactttcagatgcgattcgaaggagtgggatctttaaagttgagttcaccagccaacagattgaggagattgttagagcattggttttggataacaagattgaggaggtgaatagtaatggaatgggagagtttgattatattccagttgggaaagtttgctacaaatgtataagcagtgaaggcaaaggagagcccaagttaggagccatggcttctatcccatgtggagtttgtaccaggatcagtgagtgtgctcctgatggtgtcatctctcccaaaacctgcatttactatgaaaaatggttggacttttgagttgattatatataaaatctcagggatagaaaccttagccaaaggtatacattcaaacctttttatatataataagagtgatgttcacctccggcttaatagtcatttataatctagtttttgagttgcttcataaggagtgaattgtaattttacaaagtaatgttcacctctcacttaatagtcatttataactttatttttgagctacttatgttcataagctttatttttacaattaaaatttattgtcagttgtcactacaaaaagttgatacgcataatcaaacttaaacatgtcaagatattctctaattttctctaaattgtaatttattttttttttttctttttattgacctctcagttttttcttttttatttttcatttattcctttattaatttataaaaaataattttactattttatttg

SEQ ID NO: 219385 - DNA, 3432 bp, Cannabis indica
gcttaaaaaattaaaaaaaaaataaaaaaaaaaaaaaaaaaaaaaaaacctaactattctatatatttggagtccttttccacactaaaccctaagaattaaataaatcaccactgttaaatgtgctttacagaaatgtagtcagttcctttgctacaatagccactttgagttacatattcaagccctctaagtttctcccacataaatcccaatggataaacataaattaccattctactacaaaccaacaaagtgctcttgataaagaggtgcttacgaacttgctacatcgtcccaacgccaaattgttccgtcctcacagcagctgagaatggtgctgcaccacaagaaaaagggtatgtcagtgtatggtgtatatgaatgaggctaataataaatcaagcgaaagtaggcaccttccatcgaaggacaccgctgtctgtcttattggagatttcgattgagcatgagacagcctaagagaagcgccatattatgaaagagcgttttagatacagaatttgcaccttctaatagcaacttaacttcaaaaaataaaggcaaaccgaaaactgaccttgcagttagaactggggggctagattggagttcccaaacatagatctttccttctcgattgcctggtagataataggaattgaagttggattcagatatattgaaatacagataatatgccgatacacatggcgtctaaaggtgttacctatagcagcagcggtatagtgaaaatcacaagagaatttgatgaaccaaatatcacactcaggaactgggtatttttgaaggatgtcaaccgatccctgaacacataatgtcgggtaaatctcgtaatcagaagaaatcggggaatgggtatagcaataagaaacaaaaattcttacctccccaggtgactggtccttcattttaggttcccacaacacaatttcattgtccacactctgaaattttaaaacaaaccgaagcaccagtcaaattcatactgcatggcattaatgagcaaatcaatatcatgaataatttcattttcaacaatatttttaagaaatttcgaaacattctccagtattggcgattctatttaagaatatacaaatttgagttatttactaaatgttcaaacagtgagtgtaacgcagatacctttgagaggacaaaatcaccgagccatctattgcagtcgacatagtttgaatggacggaagcgataaatacctgaaaagatcataggaacttcagacacaggaaagacaaaagctcatctccaactaagaagcaatggctacttacaggaaactgaacgtattttgtgggaaatttcgaaggtagatcagtccatgtgaaagatttctctacgtatgtccagaactctggaagaaatatgagcagcaaaacacaaatagtacttgtcaaaacatgtaatgataataataatgtcattaacttttgaagtttaactctcgtctgatggctcgctcgctcaatggtcaaaaagaaatcaatggatatctaaagaacatgtggcacggtatcaacaaggagaaggaaacttgtgactctgcgggataattttatagtcctacgatttttaatgttgttgcttttgtcagtgttcgtaatctttcaccctcaaaaataaaagaaaacttttaaagctaaacctttttgtttcacgattcattattttattttccaaaaaacactaccttcttagtaactttttcatatcctacctttcattgaccaaatcttgactgtattgtccatgccacaactcgcaattcgatacatgtctgaaggatgaaagtcctatagtattagataatagtgtcactgtcagtgcagttgagatcttaaaagctcattatatcatataaccagaaaatctcgaattaaatatatgtgtaaatggagaaagaaaagagagcaggaagacattctgttctatagtcacataccacactcaaaacctcattgcggtgacccccagctcccgcgaatatcagaacacatattccagtttctacattccataaccgaactgactcatcctgctccatttgaaacattgatagataagtcatacaaacaaaaccttaaataacagaaaattcgcactcactttacttgctgacactataagtgatggtcttagcggctgggttcttatttcatttattgagtcgccatggccaacaaaactctgcataccagtaagagtaaaaattatgaacagcccgagcatgtattttatgaataaaacataaaagccgaagctcaggtggtaccttatgtatcttctcagtgccagcatcaatgatacggattataccattgatacccccggccacaacaaggggcatcccatctttattgcatgcccagctcacagtgtaaaaagactcatccttctgatctacaaagtatattgaagtcaaatacgcagtaatttcttgtaagatgaataaactatggctttaacaactcacatcatcatcaatgtaagactgcaatacagctataacacctccttctagacattggtaaactgtcacctgagagaattaagaattagtattaggctatttagaatacagaaaagtaaacaaaacaaaaccttcaaatgcatacaagttaaaaatccttttaaaaaaacaattcatcgttctaaggacaagaatttaaggctcactacagttcaacattagagttccaatataaacatcaattattaacaactctccatacaagtcaatggatattatagttgttacccgattgcctccgacggtagcaaagacgttgaagtagcgagcatcaatgaagttaaaaacaacggcgtagagggggcgcttgccctcttgaagcctgttggtgaccttgtaatctctctttttggagggcgtgagtgatcccaccactggctcgcaacctagggtgaactttgccatgtgcatagctccacagcaacttcaattaacagaagggactcaacactcactccacaactctctctctctctctccagtctccacagcaacttcaagtaacaagaacggactctgtctctccctccacgagaagaaacaaaaaaaaaaaacacactttcctgagcaaaaaaattaataatagaagagttataaaggcaaaacctccagtaattttacttcgctagcaattaactcccaaacttaaattttgacagttaaaccgaaaaactcgtgttctgttagcacttttctatttccatccattttcgagtgttaagtgacatgttcgacttcccaggtaaacaaagtgtacacgtgacataattttaaaaaaactaaatcataaaaagaaatttttcatctttctccaatgtttctttctctcttccatttttttttttttcattcatcatca

SEQ ID NO: 219386 - DNA, 5402 bp, Cannabis indica
aaattttttataattaaatattacttttagtgaaaataaaaattacttatcactacaaaataatatttaatataaattgttattaatttaattttaatcactataaatattattataaaaatcataaattgttatttttgtaactaatatttttaataataatataaaaaataataatttatgcttaattattttttcacttttagtaataaattttattttgattaaatatattttttttttagtgaaaacatttaaattttatgaggtctaaattatgtacacctataaatatagtctgtatattatatattataatgttcattttcattttaataaatgttattcactttgttaataaaaaaaataagcattgtcacttctgtaatatattatttgaatgtaattattatatggtgaatttgtatgtttatggttttcaaggcacaaatttacaaaaatgccttttttaaacaaaaaaaaaaagttaaaaattaaaatttgaaaatataaaagaaaatataaagtaaccagttacttttaaatatctttttccatatatacttttcatttcttccattaagtaactttttttgagcacatattctataaaatcccatcaaacaagtgagtttctattttaaaatatatagtggcatttagtatactatatatatataagtagactatactataaagagtaaatattgtatatatatatatattacctttgcaaaagcattcttgactgaagatctaatgtaatgatcaacacgatctcgagatgaatcgacgaccaccacagtcatgtctctcttatctttccctttactaccactcccaccttcagtgattgtaaaatcctctcccaaaattctcgaagcagacaaagccaaaggcaaaagattctcaatctgagaaacattacctttcaagaaataatcatggtaacgaagcattctcttctcggcccagcccaaaatcgagcccaacacagacgacaatatcttggcccaaaccacatccctatccagctttttagcgtcgcttgccacctcagccaacatagtgtgagacgcatacagcagatcctgctccaccatagccgttgccacgtattggtgaaacaatacccacgtgaaacacacgttgtggatttggcgcgtgataccaagcgttgaccaagtcttcttcattagctccaaaagctcgtccacctcatcaaggactaaagtctcatctctcacgtcgaagattgactgaaggagtgccacgtagacgtggacgttgaccgggaacccgtcggcccagtgacaaacgtcggtgggtgttgatccgttggggctccgccaagaaagcgagacgacggagttgcagagggttctcattgtgtcggagtttttgccggtgtctataggttttgactcgccggcgcgtatgatatcgcggaggcgcgtggcaaaagtgttgggcttttcgagtgggattgatgggtggagtaggagacctgcttcgaggattttgagttgtcgtttttgccaaaggtggtattcgtgtgagtcgttgaattccgatggttttaaatggcggagaagctctaacggaagaattatcgtctctgctcgcctacccatctgttataattaattaatgattaatcgtaattattatattaaaaattaattaacttaaaataacaattaatggttttaattaagtgaacattaatgtcctattgcgattaatacgatcaaaccaagaaaaaataataaatagtaattagacgacgtcaaataattatcatataattaacaaattatattaactaattatttctatttaaattaaaatatattatccacatttttttttaacaacagacaatattaattaatcttaatcatatataatgaaaaactgatcaaatctcacattaatactatatatatttccttacagttaatatggttgtgattttgaacgaagttaataaagataagagatggtatattattatattttagggatatggaaatttttttaatatttgtaattattatatgatttaataaaaaaaaatgtaaggaaaattactttattttaaaattttattgcagtacttttttgattgataagtgctaattaagaatgtcaaatgttagctaaaaatacttgacaatatattttttaatttttagcgtgatcaaataatatattgctatatatttctgagttgatatttaatgacttaaaaaaatatacttataataaaattgtaagataacgtattttgttattattttttttattaaaattatatgtgtaataattattaatgttaaaggaatttttccgtaaatatcctatattttaatatgagtttaaatttatttaatcaattatacaaaaatttatctaattataaggtacgtacacaccatgacacaagtgatgtattagattcttaataataattagcgtgtagttataagaaaattataccgcatgtaattattataaataaaaaataaatataaatttatatatttatataataatatacgtacgtacttggcctacgagagttctcatgagagtttttcggagcctattatcactctgctcggtgacccgcatttgctgcctcataatctcagccgaagtcatcggcctcctcgctcttcccagctgaggcaccgtgaaagacattcccggcgacccaccagcgttgaccgttgacccaggagacgacggattcgacgaccctgaaaccatcctcctcgacggcgaccgctttatcatcttcaaccccaaagcccgcttaacccgactcgttggagtcgtaaccacatgcccactctgcttaggcccacccccaagcccaggcccattcacacaattaccattatgcccatccccattattattgttactgctcatcccattattattattgttattgtcattgtttgagtaaaaattcaaggcgttccggccgccaaagccgggagaagaccggcaagcggtgaagaagatctcgtaagccgtctctcggacatcgtcacggtctataccgtggagttttccgaacggccagacgagatctgaatccgccgccataactggtggtccagttaggttattagatcttgacatggcgggataagatccggagagagtttcgcggcgagttgggtgacccattatcgccacgtgggatgaatggatacggcggcggcgtgtggtggcgatttttaataatatttttttttatctctcttttctctttctttctcttctctcttctttctctagctctctctcgatcgtcaggtatacgacggcgggagagagcggtgagaagaagttgtcagcattaaaaaatgaaagagaaaaaaaagaaaaagagagagatatatttgagaatgtggggaaaaacttgttgggtgtgtgggtgggatggggtggccgttttgttagttatgacagcggttttgtattaagagagagaaacaataatatgatcatgagggcctaataataagctggtggattaccaatagagagagaaattaaggaaataattatgagagggattaatttttaattttgattaattaattatgggataattatgagtggagatgagtttgccaacgttaattaattaattattattgttgttttttttttttttttgtgcgaagaatacgtactagactttttagaggggtttgtgctaactaagattactttggacgacagatatatatgtattttaattagcaaaaatctatttgataaaataggttaatgttttaaaaactgtctgttttattagttaattaattaattaattatcaatatattattattataccgattatttctcatttcatctgctgcatgattcttttttatctctttgttgcttttagttttatttgttatttggtttaatcaatttatatgaatttatttttcttttataataatgttagttatataacagacaatactgtcttttcttgttattccctattaaattagtacaatgctaaaagtcacgttttcttaatttgcgcaaaaatatactataactaataaaatgtcatcaacatatgactatatttagttagtttctaagtcatggtagtgttacaaaaaagaattattggggtacttttgaaagaattattaggagtcatttttcatgcggccattttagtccaattgtgttgttaatttttagaggaaattagaccctataatatttttatattgttctctttatttttattctcttttttaaaacctatcatttttacctctttttctacacactttaccgattttacgcctatcacattaatatactctccatgtgactcccttatatcagggtattttaggtacaatacatataaaaagaggtatgtttcaattaaatataaaattagaggtaatttggttaattaataaataaaagaagtatttctcaatatacacctaatttttattgataaatattatgtttgaccttgtgtttattggactatctgtttctttaaatgataaaatatgccctgaattttctaaaatgggagatactgaatttaatttttgacaattttccattaatataattaaccgactgaaaataatttctagcacgaatagatgcaagaatataaccaattttattataatatatgtatatcgagttattattaagttttattttgaacaaaaaaaaatcggttaaggttcttatttttactattttagaaaataaaagatttattttatcatttaataaaacagaaagtcgaatcagtgatttttataaaacacagcttattttgtggtaggagttccaagacattattggtgggaaaataatgagttttgaacattttatatgtgatgtttaaccatttggtgttacaagcttgaaactctatgtatataatggctccatactaaattatgatgatgttggttggagatatcttataggaattgtgtgggagaaatagaagttgtaaatctctctttctccatcatctgatttttgagagaattatggttaaaaatagtttgattgagtggatgggacatgaagaaaaatctaagtcttcaagtaacgataattttcaaagtactcatagccatagtggcccaaaacaaaacatgttacatgactgtccaaagtggcccaagagagtactacacaggcaactcagagttacaatactgggcctcaactttttctttggcccaagataaaggggaaattacactctataccttttttatattgtcctctttcatttttaccttctttttaaaagtctatcatttttacctctttttttaaacattgtaccaattttgcccct

SEQ ID NO: 219387 - DNA, 2139 bp, Cannabis indica
aatataatatataattaaataaacaaatatcttgtaagaataccagataaaagccttccaggcacaagtggactccagtcgatagcaaacccttcatccttatgcccaaatttaaacaagggagcctgagtatgaactatagagccaccttcaatgtttgattctgatgctgccaaatcattgagatgagagctgaagtcccagatctggcatttagtgaagcagggtcaaattacatcacaagtaatgttataatgagtggatgaagcattctaacagactctgacctggacatgacccgtatctgcccatgatgcacatatatgagggctctgtgtcatggcacgaatgcgattaacacaaccgctgtgagccacacttcgcaactgtaaaacacaagaaacaagaaactaagatacagataccaatagcgaaaagttgagaataagcaaagtttctcagcaactaaaattaataatcgaagtaaaaatgcagtattgcctgcagcacttgcgacccagatccatcagggccttcatcttcgctttctgattcactatcactgtcatcatcatcatcatcatcattttccatatcagtaacaggagtggtggattttttgggagggactagttcccgtcttttcccagaaatgttggatatcttaaatattcctatggagtttgaactagctttctctgcctgcagagcaacatagactgattaacattgttataaacaatataaaagaatattctgatgattccagcagctttctctgtctgcagaacaagaaaaatacatatataaataaaattaagccttacctgagttcctgcaacaaaatacgctgtatgtggaaactctgttcgtatcatccccaatgtatcacgaacaatatcaaagctgcaaagaaatttaacaccaattacttaaatgaaaattttctgtaatccccatggaaaactaaatagtttatttgtgttggagttatggaaacttttaacatctaaaaaatgcacttccccgtcatttttgcatcccttaaatcaaactagagcattaaaaaaagttacttaaattcagaagtacacttcatatagttgaacttccataattaggcatttggctgatcaaagttcttaactttccggagtagcaatagaaaatattatattcttaaagaaaagggtaaaaatttaagcttgacgcattttcctgaactttctcgggaaaaaagcaatgaaactctagcacatacctcaaacatggccatccgatgtggaaggcatgaagagaattataggcagaaggatcacactggagctcttcaccttcctccagcttgtccactcctggttgccacacttttactggcataggcggtgctgcagcagaagacgacccaattcctttaacctgaaaaaaaaaatccattcaaaaatcactactcaaaaaattcgacaattgattcaagcatgggaatttgaatgtcaccttgttctttcgtttcgctttcttggggtttttgatgctccgaaccattttaatgttagggtacttacgaaaatttacagcggaggttcaacgttagaagtaggaattcagggctttaatggtgctcgctagggttttaggtatgtagtatggttacactttcagcgtgttcgcaaaaactagtatttctacgattttctcacgattttgctatattatacttttatccacaaactttgtgatttttctcaaatgaaaccctacaaacaaaatgacggatcagtccttttttcaatatatttttgacaatttcttttttgaaaattttacaccaaaaattcaaaatgataaatttattacataaatacatcatttctctcatttttctcttttttttttcttttatttttcatttattttcagttttttttttctaaaaaatagtaacctccatatagctgaacacttccctctccccaatcccaactccattttccctcttctttttgttcttcaaatttttttcaactcccattaactattttctctttttattttttttcttcatttatatataaacatggttgtatttcattcttcaacaactcattcccctgttaaaaaaaaattctaaaatggagt

SEQ ID NO: 219388 - DNA, 2851 bp, Cannabis indica
tacccaccattctttatacattattttgaattttgcatttttggtagctgcacttagtagaagagtcgtgtttgtattaatattgatttttagagggggcattggtgcttttagattacttctggttttagatttaaaatcagggaaatttgaatgatggttggtgtgaactgtgaagaggttgtggcataattcgaaaataatgttactgtgtcattgctaaatgctaatatatctttggaaatgctttttgagtagcgagtgtaggataaaaagaatacttgcttttctttggaagaaaaaagaaacttacgtactgtcatctttgattgttattttttgttgttgctgaaatcttggattgtcattaatttgttaaatcagagataataatatatcatggccctgtccctgttttattccctgctgtaaatcgtggctctgttttgaaaagatgaatttataagtactattactaatcaagtattagtgttttgttttcccaggaaaaggaaaaatctcagtccgaacaatcgttgccattgtggttccaattgctgttcctatactactattcgtattaggattctctttcttagtaaagagagcataaatgattgtatagaatcatacatgtttcatgattttttattttttgtattttgtatgggtttctatgtccaatagtggtgtatttgctaatttacttcacaacttttttccttctcgtgttcatcattagttacttctggttatttttttttatcaaattagtttttaactttggttaactttccctgtgtttgatgggcctcatcttgagttcattattatctgtaaggatggttttcacaagttctctactgtgctgccttatagtataatttgattataatatgcagaaacaatagatctatattggtactttatttagtaattctcttaatttgatgcagtaagtgttttcttctcttggtgaaagaaactctcaattctagtaggaatggcgaaggaaaaggggttcatcgttttggctttattcttaatattctcgctcatcatgccatcttccgccattgccaaatctcgtcgtcccataactgtatgtttttatgtctttaatgaatttaagaatagacttgaatttgtggtcaattctttcgggtgatgtttttcttaggatattgagatgaggcagaagaagaatcaatgctacgaggacattgagaggtataattttctattcattgtttttaactttgcttttgtaaattttgcatttgattttcgatttggatgggttggaatggaacagtggattatggggttgggagtgcaagtcttccatgatagcaaaggaaaattgtgttttgaaatgcctttctcctacttgttatcaaatcatataccagcctgatccggtaaaacttatttcatttgaacttggtaataatattcaatttcttaacattcttactaatctttgttttcattctagctcgaagaaggagaaaaagatcttattaggggacaagagtacaagtactgtatgcacaagtatgttactttcattcttttaattctattatgaacgtgaaaaataccacctttttttttcaactaatgtttactgtttatttcaaagaggggaaaaacaaaactattgtttagtgtttactgtaaacttgaaaaacctcataatctaagcaaactactttcccatccggaattagtggatagcccacaaaattatcgccaagaccaccatctacatgcctaaacgaggtgtcaactgtcaactaagctttgataaatccctattaaaattgtgcttccattccatcttgcaaccacctgatctataaagactgctatgttcttccctcatgtagatctcaccaaacctagcagttgctgtcctcacaactcctttctttccatttaaaataatagaggttgttgttgatgctatttcttctcaaaattttgttttaatatctgctttccgtttatgaatttggttttgggataatgactacatacaagaaaatatctgtgaacagtataaagtaaacattgtgatggtgtgagtttcttaacatccaaaaactgagaatatttttctgagtacggaggatcaactctcctgcaaggctctataattagcccataacaactcttaaaataaacattgagggtgtgagtttcttatgaacatagtttaacatctagtaatctaccttagtgatcaggttataaattcttaaagtatctttactggtttgatgaaatttcgacattgtcttccttgttcttcctttttgtgattgtgtgactttgttgctatatctactttattcaagtacataattaagttgcattacaacagactatcgttgggagagagtcttgagggtataaagagttcatttgagtaaaatgagtgacaattacggctgcactggatcggtgtgaaacaagttcatcaggtgtttgtaaatttaaaagaaggaagttatgtgaaaggaaggatgtgtgggattttgatacgactcatcctgttggtgtttcaatgttgttttcgtgtggaaagatataagatggtgttgcaaatcaagtcagtttgaacatatgatgaccaccaagtctacttctggagtctggactttgctgtaacttttctactattaacaattgctttacgttacctaattattatgtagtaatcaatctcttttaaagtgtgtttggagttgaggtgataaggacttaaaaatatttatttggcaagatagtaattacatacaaaaataattatttttagtacataatatttaatataaaaagtttt

SEQ ID NO: 219389 - DNA, 4069 bp, Cannabis indica
tttttctaattttcatttaatgacatgcatgcatgcatgcatgaattcatcattaatgttttttttcctttacatttattgcttttgagaatactgagctctgctatatcacccaaaacattaattttgacaggttcatgcttatgagcggtcaaatcgcgtttttaattataccttagatccttgtggtcctgtgtatataactgttggggatggaggtaaccgagaaaaaatggctactgaacatgttgatgaaccgggtaattgccccgagccatcaactacgcctgatccatacatgggtggcttttgtgcaacaaactttacgtctggcccagctgcaggaaagttctgttgggacaggcaacctgattacagtgcttttagagaaagcagctttggccatggaatccttgaggtgtaatttctattcttctgcagctttgatacaaaatttatgatctacttgcatttacaatgttgttttggataagttgattcaagataatgtttgatgatgtagatgaagaatgagacttgggctctgtggacttggtatcgaaatcaggacacagaaaaagaagagggagatcaaatttacatagtgaggcaacctcatatttgccttggccagcaggagtcacccgaacaggggcattcagacatttgaaagctgactaaacgattcgggtcgtttcatttcttcactcaaagtgttacaactgactgtttaagacttgttatgaagaaccctaatgcgttgtgttaacctttgcggcattgggagtgcaaggaagttcagagtggttatagattgatacagagtatgtgaaagactcttcaatgaaacttttacactttcattcatgtataactgatttgtattgtatgttgtatgagtagtcatatatatttagtaaacaaaatattagtttattggaaacaagcattaactattgtacaaagggttgagtgatttgcattgtatcctgtaagagaacatattacagtttattggaacaaatatcagctaatgtacaattttgtaatgttgattcagatttctttagagtatgttggcatttgttctctaattgtgtattaagctatagtagtatcaaaacaattagggccctattggcctatacaaacacaacatgattaactattaaatgtaattgttgtataaactgatactaatactacaattttagtaaagagtcacatcacatttatctccttcaatgttcattccattcatcagttcttagaagatggctgctagcctttgcaatgaaaagggtatgaactaaaagggtcttactcgaacaccgacacctcaccattccaactacaagaagcaataacattaggcaagatggggtgaacagcaatgtcaactgatgcttgctcatatgctttgattttcctcactagctcggatgatttatagttgtagaagtatatagaaccatctgaggagccagagataagactctctccatccaagctgaaattgcacttgatgggaaaccctgataccccatggctttgatatctcttgtacttgtttagcttgaaagggggacttgaagagaatagtgcaatgtaatctccgtttgactgggccacaaaaactgaatcagaggggtgagacctcacacagggacaggtataagcttctacataaacctgatacagcagcaccttagttaacacacatatatggcaactgaagaaatgtataattcattgagatctatcacagccaaccaaaaaagaaaaagtaatgaaaacaataagataatgtggtacccaagttggaaattataggacactgttaatgatctgcatgccagtatgatatcacgctatcctcgtttcattttattgagccatcgcggctaactagaacttaacgtaatatttagtataaaagagaaggtaatattcacatcaatctccttgccaagacatcagtaaaagttctctcatttcattccttttaaatctctaccacaaattgtttgacttgaattacatttgaactatacatgaagtatgtaatgattaatttcataggtttaaattatgttttcgatcctagataacattatgaaaatctcctcttaaacaatgcaaatgctatcaactttaataaactttacaattaggttattagtttatgaaatttataagaatatgtatgaactttgataacttctaatgccacacattatgatcctacttaaaggagaaaactttaagttttagattcatatcaggctattgattggtactagtaatttatatatatatagttttgatccactcacatgtgaataatggaatgagtcttttacctgattagaaagaggaacttgtcttgaaacatcccaaactacaattgaattttcactaacattgcttcttgaaatatcactagaagatataatttgtctgcaatttcgggtgaattcaacatcaagaataggatcgtgacctcgagcaaattcatgaaccgccttcccatttcttatatcccacaacctgatgcgcccttgtgaccctccagagagaaagagattaaaattttcctcatggaacttaacagcaccaagcatttgatcttccttaaaaacctgaatctccactcccttctctacatcaaccaaccttgacgagcaatcgaatccacaagaaagaacagagagtccctgcaaagaccatttcacatctttcacagctgcactgtgaacgtttaacttcctcgctatcttctgatcactgctccacgggttccatatgcatatcgagtgatccatcccagcagaagcaagaagatgagctgtagactaactctaacgaacagatcaataaaggcagcaataaatgcaatgaacacataatcacttcatataaatttataaaatcatggaagcaatgcacaaccgatatagttgagcatatgcctaagctcaaaaccagagcctccatagttttaaggaagcatgaaacttagggttatccttgcataggtcaccttatagctttaaagcactgttggtatgactcctacacaaagagaagcattccaagtatggtaggtccaatgtccaaactaatgactataaactaacttcatggtccaatttctacccttttacaactcttcctattaaataaccaccacactactagaaaaaacattgaaactcttaatgataaagaactcaattaagcatttgagccacatgcatttatacacatacatatcaaagagaataatagtaatgaaaacaaactttccaacaatgaagaactcaccatgatttggtgaccaatgaatagcattaacagctcttgaatggctagatagagcaatagacaccctttgagacatttggtctcgttgttgtacactactcctcttattcctcagcaatgacaatatatcataacgaatatttgaatccaaaatactcccaaaagctaaaagaaaaaaaacattcagcataccaacttttttgatagatttaatcacaccaaacatagcctttatccaattaacaatacgaaattaagtcttaaaagctacttaagtgtaatataaaagagcaatttgagacaaaacacataaaagtttcttttttgatacaaaaaccatgtttgaactaagagatagataaggcaacacaaaattatacaatgataaaaaatggtggttgattaaacaattgaagaaagtagtagttaccaggtgaattagaaactgggtgtggtgggtgatgggccgcagggggagaggcgaagatagctcgctctcgcttggatatgtatctaccgggaatcggagaatccagtggggagtagggtaatggggtcattggattgtggggttgggactgggtaattgggatttcgattttgggtcgcttagaagaaggttggatgagtatttggtgtttaggggcatcatcatcgtcttcgtcggaatcattggagtacgcgttgcatagaagatccattaatttacaataacgagaaaggattgtttagaaaatagaca

SEQ ID NO: 219390 - DNA, 4778 bp, Cannabis indica
actttcgaatgaaatcctttacaactagtaataaattaggtggagctctctcgaaatgagtctcaaatggatacttttagaaaagccatcgtacaagggctgccttcatgaaaccttgttcgatggtgatcctttcacttggggtagaaatcgaactgctgtgaacactattaaagagtgtctagattggtgctttgtgaatagccattctagagactttttttttcatattcctcaagttcatcatctcgattattttcagtcagaccatcgtgttataagtgccactttccatctactttcaacccagaccaacaacattaaacgaaagagtcagttttgattcaaaaaattgtggctctccgatcctgacagctaagagatcatagtgaaaacttggtctaactctgcctctaatgacccgattattgcggttatctacagtctgaattcatgtgctgaacaacttcaactgtggcataggtggagcagctcaataactctctggatcaatcaagcaaccactttgatgatttaaaacatgctgaaaccgtccttgacgagttgctcaaacagaggaaatttattggcagcagtgttcttgggttgattggttagcttgtggggataaatatactaagttctttcatgctaaagcgaatgccaggaagtccaataaccaaattaaattcctctacaatgatgcgggtgttaaggtctacttcaatgccgagatatcttcaatttttcatgattattacgctgacatttttagagctggccatattgatgatattgcccttactcatacgcttgagtgtatccccaccttagtttctgatgattacaatgcatctcttcttgctccattcactatggctgaagttaaaaatgctctcaaaactatgagtgcggataagagcccgggaattgacggaaggtcggtcatgttttattaacaacattggtctattattggtgatcttgtttctcacgccgttttaaacattctcaacaatggtgctgacccttcaagcttcaaccacacattaatcaccttcatttcaaaattggtcaaaaaaatgattattgcaagattcaaagaggtgcttcctttggtaatttctaaaacgcatagtgctttcttggcaaatagattgattattgacaatatcttagtggcttttgaattggttcatgcaataaaaaacaaaaccactagacgtcatggcgttgcttctcttaagcttgacatgcgcaaagcttttgataggatagaatggaaattcattgaagaggtaatgaagaaaatgggttttgcaagtggttggatttcacttatcatgagctgtcttataaccaacaaattttcattccttgtcaatggtgaagttacaggctccctagtcccaacaacaggcttacgacaaggctgccccttatctccttatctatttttaatatgtgctaaaggtttgtcgagacttcttcaacatgaagaagatattggcaacctacatggtttcaagcttacacgacgcgccccaatgatttcacatttattcttcgttgatgatagtctacttttttgtcaagctgatgaaagctcatgcctagctatcaagagggtattggatacttaccatcaagcttctggccaattgatcaatccagaaaaatttgtcatgtcattctccccaaacaccacattagcagcccaagttttcttctattgtcatctttccttgccagtcagagaatgccatgaaagatatctaggcttaccctcttactctgaaagagataaaaaggaactattcagcaatatcaagaagagaatttggaaactaatgcagtcttggaatgaaatagtattctctgctggtggtcgagaagtccttcttaaagcggttgttcaatcgattctgacctatggtatgagttgcttccaattgccagtgtacttttacaaccaacttgaaagtatgatgactaatttctggtggggaatgaatgaaagtggctccaagattcattgacgatcttggaatttactttgcaaaaccaaaggagaaggtggtatggggtttcggtctttcattcactttaatcaatctctactcgccaagcaagcatggcgtcttattgagaacctgaattcactcctgggatagcttctctaaagcaaatacttccctcacaattcattcttagaagcaagtatgggccattctcattccgtaacttggcaaggaatacggtggggtcgtgagttattgattaaatgtttgagatagaaaattggtgaaggaagatcaattagaagtggccttgatccttggatccctggtcatacaactttccttccaattagatactcgtgcccttcgaattgtgtggtagataatctcatcaccgaagacagacaatggaacatctccttacagtagcagtactttagtccacttaatattgacaagatcctcacagtaccattaagttacttctcgacacataacaaactgataaggcatcatcaatctttagggaatttctcagatcaaagtgcttaccatcttgcaacatcattggaagaagaggatcttaggtctagctccacaacgacagtaacctggtggaaattattctggtcactacaaatcccccaaaaagtcaagatctttgcctggcgtgccatccatgatgcactacccgtagccacttcacttgttcgaagaaaaattagcactgattccacatgctccatttgtaaacaagcttgggaatcaacggaacatgctctctttagttgtaagtatgctgatagtaataaggtcctcttcgagataggacaaatctcccaatgcaagctattgcaaattcattcaacaaccaaccccccccccaaaaaaggttccagccaacatttatatgtttctagaacagagtaaggaaaaagaaattacatctcaaaggaatagtaaaaatggctcatccagctagcttctcaactcctttctgccatcacaaagtctcttagccatttgggtctcacttggcttcttttcccatgtgctggaagctcacgctcaccttcagcagcttcttctccttcgttgacaactgaagccgaaggctccaactcctagtgttgtttacactgttctgcccaagctctaatcctttggtccattagctttgggtcaattagtattgggccttgatcttgggttgtgctaacattactcccctcctcgaagaccaccttgtcctcaaggtgggaaagatcatacaatgctttaaagatagaaaaatcttcccatgtctcatcttcaggagagctcacaaaccactgcactagtacttgttctactggtttggcatggatcaacttagaacgagtggccaaaatagcaaggggaaccataagaggtttgctggtgatggtgagctcgggtaaagggtagtacttgggtgaagcgtgaccatgaaattgtttgagaagagaaacatgaaatttgggttaatacggctctcggttggcaaatccaaagtataggttgttgtaccctgacgagctatgactgaaaaatgatcaaaatattaccgacaaattttagtattaagacgtttggccaccgtagattaacaatacgactgcagcttcactaataccaagtcacccacccgaaactcgtggtctcttctcttcttattagcttgttgtcgcatacgattttggctttggtgtaagttttctttgagctgttgaagaatagcaccacgggataagaggtcttcttcatctgcttgtatagaggtagtaccacaactgtaggctggaatagatggtggtaccctaccataaactgcttgaaatggagtcattccaatagctgaatgatggctggtgttgtagtgatactcaacccaagaaagaaatttgctccattggttcggattgttggctgtaaatgcacaaaggtactactccacatagcgattagtaacctccgtttggccgtcagattgaggctgataagctgaactcatatgtaaagtagtgcccacaagctcgaacaactttttccagaatgcacttgtgaaaatggggtctcggtccgacacaatagtgtgtggcatcccatgaagtcggatcaccatgttagtgaataagtcagcaactttggtagttgtatactggttcgacagtgctccaaaatgggtatattatgtgaacctgtcaatgaccaaaagaatattagtgagcccatacgaactcggtaatccaacaatgaaatccatagccaaatcctcccaaactcgttccagaatttgcaggggctgtaataatccatacggagcctgcgtcgatgccttaacagtttggcacactagacaagattgtacatatttgcgcacatcctgagcgcatcccttcctaaaagaaattggcacttaggcaaagaaaagtgcgatcaattcctgcgtgacctccaatgggtgagtcatggaactcacggctgagaatatgtttaaggtgggagtgcttactaaggacaattatattcttaaaatacagcaatccatcacgcgagttgtagtgtggcaaggtattgctttaactttaatgagttattattctagcttggtattgcaaatagaaataaatttataaggttaagccaaactctagcttggtagaagtttatgttaggttttatgccctaaataaaactctatttcaatgtaatctattttattcaacatcaataaag

SEQ ID NO: 219391 - DNA, 3202 bp, Cannabis indica
tctctctctctctctcttttgcagtcatggcttcaaatacaggtacaaagagaaaactagatgttacatcattttcaaatttccctttcttctttccttacaagttatttaatttattatgcttcaggtggtaatggcgtcgatctctggtcagagatcatagcttcccaacaacaacaacaacaacaacaacagtcgcatgttgaagtgttttacagaagaagaaaaccatctaaaacccctcctgatgtccttcctccgtaagtttttgtttttgttcaagtgttctaccaaactttttcatgcttaatttgtagcttttgaacactttaattgtgttttggatttttcaggaagcaaatgggcttggaagatgatgggattcatcatcgactaagcttggttgttcttccccctggtccaacgaaacgcatcagttggaatcgttcactctctaccaggtttatttccctgttttctgaacccattttgggtttttgtttatacttttaatttacatttactttctagtgtttgagttatatcaattttctcttttttggttgcttcttaggttggtaactgggttttggcgatacacattatttgccattgtcaccataatcttttgagattatgctttaaaaaaaatcccattttcttcatttttatttgtctgtatattgtatcgtttctgattttggcttcagggtaatgatttattagatatatagtttccatttgtggtttttattattggattgtatgcttgacagaggtcggactagtattcgccgttggcacttgcattaatcaccagccacaaccaagaaggcaagagaaggaaagcctcctcgaccaagtgtgatttcgctactcttattatgcttgtttctttgtattgccagcggttgttagtatgtagtattgtgtttgtagtgtccaacatgaaattgcattttgtcaactttgaattgaatcattatttttttacgtttttggtacaactgtttgtatctagaacaaggaaatctgttttcaactgtctcaagaagtagatcaaaatgatttgttttggttgacattatcatagaagttttgatgttttaaattctaaacggataaacgtatttgagaacttttttttttgtttgtgaaaaccatgtatttatactatcttgtgtccttgtggtcagggaaaacaatttaaacctcaaaattttgagatggagaggatgtattttgaagaggttgatgcctttgaattattggaggagagcccctctcccaaagtttttggcacatgggccggggccaacaacactgatagtgttgcattaacacatctgtccacaagactaaacaagtggttaatctgtaggaatttgaactactcctgtggaccttcgagcacgttatcaaagattctaggaacaccatctgttaagttggaacctatagattgtggtaacattgaccctgaaaatatgaaaactccggaaaagtcatctgccaaaggcacttctcgtttgccttgtgctgagatcacatcacataaggttgaggacgtgggcaatgagagttttgaagaattagaagcttcagtcaaaaaactgtcactagcatcaacttcttcgtcagatgctttgcaatttaatccatttgctacactgttagcagtgtgtgaacagtcagtgccttctaagtttcaggatgttttctcaaaatattggtatgtttcttgctctttatatagtcatatgtgtgtataggtgtagcagttacttgtgtcttattaaaagctaaaaaattggaaccaattgaacatggctaacatctttttaacactttattcccattcattgtgttcttattatttcatggctgtacaaatgatagtaacattcaacttgcaaaccaatgtacacaaaacagaatgctggattcatcagcagtcttatgtatgacttgtgtagtaatcacttactaagcttcatattttcattcttagtcctggctcagggtccaggtttgagttgcataatgattctgattttaggtcctacaactagttttatagcatagtactctctaagtagcaaaaaatttataggatgacaagctaagtcgttagttcaatagagaaggaatattttttgatatggcatgttaactataataggtatcttgaaagtatatccaatagttctctggtgatatttgaggtcctccagttttctctctctgtcatttgacatccaattatatattttgcagtcaagacttttctttgtttttctttttaattgaattgttcaagtcagagtgcttgaggttttaggctttaattaatatgatttttttaataattatgtgacctgtctttaggctattttgcttatcatatctgtttgtgcattttacctcacaaacaagattatgatatttaatatgtatattttttaatttagtgatccacaggagatcattaaaattggagaagggacgtttggagaagcttttatggctggaaattatgtctgcaaaatagttcctatagatggagacttcagagttaatggagaagtgcaaaaggtatgcctatctataacttattgcaacggttttgtcaattaataagactattgatagtaagtaaacgtaggacaacacagatgtataaaattataaaaaaaaattgttttaaaccagtttttttatcaccttggcaagtattcatcaatgcaccttagagttctttcaagaccttattcatacctctgcaagttttatcattatgttaataggctttgtttactgctgactgttgcaatcttttgtggttgctatgctccagagatcagaagaactgctcgaggaggttgtactttcccgaactcttaattatttaagacaaaaccaagaagatgctcgtaatgcctgcaccacttttattggaacaatagagtatgtaatctctctgcttttgatgttcaaagttttacgattcttcttgcaaggtgcaactgtatcattatgcagaaagttccttaatttagttctgcttaacttacttcattcacatcctgaatgctacgaacacagtgctacaggctgttgagagttctgagtgagcgtttatgtcattgggggtgaccttttatttatttagatattactgtctgacctcaacctattgcag

SEQ ID NO: 219392 - DNA, 3232 bp, Cannabis indica
caagatcgattaattaattgaacttaaacgcatttaacgattcttaatcggacggacttgagttttaaacagtagaaaactgagcttctccactgagtaatatacaaaccctccactcgagtgagtcacaaacgatccaaagctctttcccacgatgcaatgccaagctggaccataccgtgaatcaaattcctaccataaagaaaaagagacaactttagcttcaaatatatacaaaaagaagtaaaagaaaagaaaataaggcttttctttcacgagaaaagtactagaagctcactttcttgagagccatggccaagtgggtgggactgggatttttctggtcactatttgagtcgagcaaagctctggtacaccgaaatgcacggtcttgcatcacagccggcatgtccgccgatctcagccgtatattcaaatcgatggctattgccgccaagttcacttctctgaacggaggaggtaacatgggtcgagggcggctcactattacttccttttgtttttcttgctcttctgattcttcttcttctaatttcttcccctggtctctccatgagctctgaggagagagagagtgagtgagtgagtgaattgactgttttgaaatgtttggcaactttgactgaggactttgaacaataggacagggccttagggtttttattctctgcagtcagtctaggaaaaaggaatgaatcagtaacgtagaatctgttgactttttaattcgtttgatggatacaagtggtgacatggatttggacggctttgattacacaattgattcggtagctccaacgattacaaattttatttttagggaatcatcatcgatcacgtgctcccacagatccaaaatggaaggccatgccccttattgtaccaaggaaattcaaaattttagaagtagttgctgattttgatgattacatgtgttttattttggactcaaacagagtcaggttcatgaatcatcaaacacctctggtaccccataaactcaacattatcatttacttttattcgattcaagagagagagtttcaaattcactaaaatgatttgtgttgttgtcattgcgtagcgcatatatataattattaaattttgatgaacaagtaaaattgatttctttatgttgtttttattgggtgtgtagaaggttttgttcagaagggtctttttcttatgtagagttgagctggttggttggttcctggtcttgttttcattttgctaatatatagaaagcctcttttcaaaaaaaatgatcaccaaagattgtatcttccaacaatacattaatgattcaaaaatcaaaatcatgaaaaatctcagcagacatttgtaccagaagtttggggtgattgtgtatgtgaatccaaacgttttttttaataatcttaggatttctacaggccatttgaaaaccctacattgctagcatttgaaatcatgtataatattctataaagcctgcatttccaaattggtatggccgttgttgttagcagatgtgtttggtgcggaaggctgagtctcgtcctcagacttcatctcttgaactgggggaggattgacgatggtcattggtgacacagagttctcggaaagacgccccttcatctcacgatgctcctgacacaaggcacaccagtgcaagcagcagtgcaccaggcaagggtcacatggcgaattctgcgctcacaaaacaaaatgataagacaattaaatttccttcagattgttcttttggcataacttgtctattaagtagtcaaacattcatattaagctttatgaggacaaattcacttaagggcatcatagaactaggagaagaaaccatcaaattatttgaatagagagatttagaggaagtgtacagaagaagaacatgatcatctggctatttgcttaattgcagtgcaaaggaaaaagctcaagttagtagttacctacctttaagatggtagttcttctgtaatgattgacgaacaagacctgtatatatgccacacatccaccaagcaaagaatagaccctcgcaaatgagaaatgcagacctcgggtcagcaccgtgtaagattgcagtagctactgccagtgccatcccgccttcaacacaaacagcatgacaaatgcaaggggtggtccaaggcgtatcatctcttaagctttcgacattgcgaccaaacagaacacatgggcaaaatagtcctgtcaaacctgaaaagggtaaaccataactgttaggttggatcactacatctccatctaaccaacaaactgagtatgtacaacaaagttagacatccacttacaactatctctatcttcgcaacaaccaaagatcccagttgtccatggttcatcagcaggtggttcaaagctttctgggagagcctgtccacactcattgcacttgcgaacattcaactgttgatgttaaacacagataagtaatttcatttaagtaactgatatttgggtactcagtttctttctatccatcctagatattccattggaaccataaattatcatcaaattgggaacaatatcagtataaacaataactaatccatataccaagcccaaaaaaaagggttgtaaattgagcttagatatgatagatgtacaaagtttccacaagaacttaaccaagtactagttttgaaaacaaactcctagataaaaaatgaaaaatccttagcaaaaaccagagatgcttccacattgaccttcatcagagggattcagaaccaaaacaatattgaacagaaaaaaagaaaaaaaaaagaattaacataaagctataatgatatacatatataaaaaacatatcaataatctatatcctccgcagaaaaacacggatccatcaagatttctacttttcgggggtgccactgaaatcgatctaacagtatttgaattaccgcataagtgttacgattattattgagtagcaagccaagattgatattttcagtttttaaggagaattgctttaattaatagaagacaaaattgtcaaattacgatgtcaagaaagaaagaaaaagacctgaggaacctcaatgggctgattaagctctccgggtttgatatcttcaatcggaacttgatctttagtcagcttcacataacgcgaatgcccagtcccatcccccatctgatctcttcaaaattcctgaacttttttttt

SEQ ID NO: 219393 - DNA, 2267 bp, Cannabis indica
aaaaaacttacagaacattattataataataaacaccttaaaaatcaaacgtatatgatataaaaattaacagacaccaaattacataagcataatataaacttctccttcttctctaatttcttcaaggaagtcttttaattttctttaatttccttctgtaatctgtgtagttcaaaaaatacttgtacagacagttttaattttacctgtagaacaatgtcggacaatgagaatctaagaaaagagtgaagcaaatatatgatttgatattaatcattataaaagatccaaattaatcacattcatagaacacattcaaagataattaataagtaaataatcaaacccataactaactcaccgatttcatttttttcttgttatttctcacattgtcgagcctattatacacaattgttggttatttgtttctctatgcttgattgtaaaatcagcctatacatagtttacaaaattcatcgcctactcatccattggtgtattgaccggcaaggaaaattggatgaacatattactggcatacttttcaaataattgttgttcaatgtgtctgcgaaaggaaggagcttcctcatctgtctcctataaagagcttagcgattccattgttctgtgtggtttgaacatgaagtatgttagttgtatatagaacatgtcaactactactgatcttacaaaagaatgttaagtctaaaagcatcaaacctggctaaacaacaattgttgtagaaaactagtttgtgaacaacaagacttgtttgagtaggaaagtagggtaaagaaaaagaaccagcttaatgaagtaatgccacttcttaaactagccttattagctataagaaaaactggccagtggacaatgccataaaataattttgaaaacataggtattgtcatcaaatctacctcattattcataagaggtataccttatttttccatcaaaaactttccaagactacaatatcatgacaggcacacattactatgagaataacttacctattgctaagtaggtcctctgaatatctcatattgtttatcacttggttacaagtacaaacttggcaacaccatctttcccaacgcctgactcccgacaaagttaatagatgattagcatgtgtgagattgttgctaaaatattgattaaaaaacacaaaaattgcacataccttatgaatttgttttgaaagatacattttcgtctctttttctcatttttttgaagtggcaagatgtggagtttacttctcaacattcttaatgtctgaatctatatagcatactcaagtaagaacactcccaatgtactcaaaaaaaaaaaaagagatagaagatatggcttacctcaccaagtgaaattatagatattttaactaacactagatttttatcacaagtgtcttcccaatcataatagggtgagttctttaaaaccctcctgctacgataaggtactgtgactttctacctaggaacattaatggtattatcttcatcggtttcatcaagacaacagaggtagtgagaccatcttatatagaataattgataaaacacttttgaaattgaaaacatctcctctacgttgctgctttgttctcatatttagtcatattcttagaaaaatagtatttgttgaaaaaaaatactttcttatcttaatgactataggatggtccacccctaatcactttagaatagctatcaaacacgcaaaccttagttaacagttctagcttctcttaagttcatgatcaggacatccctgaatctagtaatgatgtgtagaacaatttcatcatgctaaagtttttcctatcatgactagggtatatccctagaaggattttggcagctgctagtaactaatcatagtcctttaattttttatcaatatgcaatccgaatttctgggaaggtattattaatactattcaaagttcaacttaatgatctttgaactgcataaccaaatacttatccacccatatctgtttccaagatctgaaccacttaccttaatattttttaacattgctaaaaattcataaaatttctcgaacatttcaaatttctttgcataagataaatatctaaagtaatcgttttaaaaatttaactataactcatatccacccctggttgtacattcatatgtacgaatatatatgatcttattttcaagtagatactggcttattttctccttccagagattgatcttgtcaaaaccacta

SEQ ID NO: 219394 - DNA, 2198 bp, Cannabis indica
atgggtacctgaatgatgcggcgaaggggacgctgggggcctttggcagcatgagcaccaagccaaggtgtgtgtctccaaacggtcttgccgtcactaccggcgacaaccttatttccaccgacgaccaattccaaggaccacattccaggcatcatttgccaaagaacaaaacaaccattttcaccactcctagtccctaaactctttacgtttttaccagtcgaaacctcagtttcacaacaaatcattttcacacttccacttacgtacatgttcttgttacatgacttttgttgcttcaaacaacctgttgatgccaaatattgctgtataatatagtgtgcaatcgaagtctcctgcaccaaatcaataaataatttattattattattaacaaaaattataaatatataaaaagaaaatgttacaaacttacaaatggaatgcctttaagatgtaggagatgatcaatattggggtcattgacttggggtattggagcaagaggacaacctaaaacgccaagcaacaaccttagatcttgtctcttggctaagatattattattgttataataattattacaattattattattattattagagtaggaggatgggaaactagtactactattgctatttgggttgttattattataacccttttgagctcgaaaccattctctaataacttcccatgaactctccttcttgaacccttcttcttgcatttctgggtcaggaccttccatcagtggtgtcaatggtactaattgtgttccccacaattgcttttttcttggtttggagcccattaataataattatatataattggatatagagaagaagatgatgatgatgatgataattatgagttatgatatccaaaggagagaatgaaagtatatgaagagaagtataaggcttaatattaaggaatataaataaataaaggggttacaagtgggaagagacaaaagagacagcttacctgtcccaatgacagataataatatgggtaaataccattttggacactttgttttgtaaaagttattaattggaccttgtgttttgttaaatgacaaaatgaatcctgtattttttaaaatagtataaataggaccctggattgatttttaaagtttaattataatccgatctaaaagtgctatgacaaaactgtttatattttgtatctgttcttattaggaattatcttcaagttggttgtattaaaataaaagttgtcaaaaattaagcttagggtcctatttttaccattgtagaaaataaagggtctattttgtcatttaacaaaacagaaggttcaatcagtaacttttgcaaaacacagggtctaaaataatatttaccctaataatattggtgtattatttattataattattgaattctatatagatatatatatatatatatatttatagatatggatgcagatgcagatggagatgcagtactagtagtagtactatacaatacacactctcatgttggcctgtctatttgctttattcttcttcttttagactctctttgtcatttaatttaataatttgttctcttttcaagtatcccaagtatgaggccccatatgtttttgacgccttttctttttcaaattcacacatatatataaataaatatataatatttcacctctttattgatcttattctaaataattaactagttttgttagaacattattgtaacctcaagaaagaaataatctcaacagggaaaaaaattattgaataaagaataacaaaactttggatggataacctagccaccaaacaccatagtcttacaacaaagcaagcttatagataaagtattgagaaacaatgttatagctaactagcataatgggaatatatatttatatatctgtataattacaattgacatatattgacatctctaataatacctaattataagtaagaatcatcacattcacattgtttactattcatagctcgaatgacattcacaaatagtatgattagggcatctctaataggaaactcaaatttagtgttaaattaacaccgaaaaatatatatttcaacactaaattatttttcaattccaaccacaacactaaaaaattacaccaaattttatattctttattattttattaatataataagaata

SEQ ID NO: 219395 - DNA, 3262 bp, Cannabis indica
actaaccccaccattctttcccctctcatacctttccttcttttcattcccttattacacactcaacaattcacactctcccaacccaaacgcccttttactcaaaatttgcattcccttctcttacacatctttcccaagcactcaaaagaaacattccatcttggaatcccattcctaacattcccaacattcccattccccaatgacctctctcctccctctcctcctccttctcctcctccaccccatctccacccattccaaccccaacccaccaacactccaacccttcctaaccgacccatcatcatcacgaccagtaacaatcccagctttcccagaacaatcagacctcacaggctgccatctaaccctccctgaccaattctaccacagcatcaaaacctcttgttccacttccgggcagctaaaaaagggcagatgctgcccaatacttgcttcatggctctactcagcttactcagccactgctcttggattaatcaacacaaaacccaacacagaattagaagaagaaaaagagaaagcttcaaaaatcaacaataccatgtcctttgatatgcctatgcttcctgatgattctgagacttgtgttggtgaagttgataaggctttgagaggaagagggattgagttggttggacctaatgaaacttgtgatgttgtttattgttattgtgggattagattacatcctttgagttgtcctgaagctttttcgattggggaagatggaaaggttagaggtgataaaagagtgaggagattggaaagggattgctatggaaagagtggtgatgttaatggctttcctggtcttggtggttgctctaaatgcttgaatgctcttcacttggttagtaactaattttgagttttaacactttcttttaatcttaatctttttttagtgatttgtttgatgtttttggttgatgggtagttggaattagtgaaaaagattgcaactttggttagggtttcttctgggtattcttctttttcatttttcctcttctcattccatggtgaattgggaaagtttgtcttagttggaattaaaaatgtttgtatactcttcacttggtttagtagagttttgacactattttttagcttaatctttttttaagtgatttgtgtggtgtttttggttatgggttgttggaattagtgaaaaagattgaaactttggttagggtttgttctgggtattttttttttctttctcttactactcattccatggtgaattgggtagttggaaatagtaaaaaagattggaactttggttagggcttcgtctgggaatttcttttcattttttttcttctcattccatggtgaattgggaaagtttgtcttaattggaattaaaaatgcttgaacactcctcacttgattagtaactaattttgagagttaaaacacttttttgttttattttgttttttttttttggtagtgatttatgtaagtttttgtgtaataatgtgtagttgtaaatagtgaaaaaaattagaactttggctaaaatttgttctgggttttttttttcttttgtcttctcattccatggtgaaacgggaaagtttgttctttattttttagtttttcatttttaataataataaaaaaatgggagtaaaaattggcaccttgattgagtaaaggctctacattactttatttttagtttttaccaaagattaaatagtctctttctttacttgttgttctgattatttcaagataagacttcagtgtctttttccttgttcactagtcattttcataatattctagccaaaaaagaaaaggaaaaaaaaaagaaaaagatagctcttttaataatgactatagtctaaaagatttcattttgataaatttgcaattattataacataaatataactaattttgtttcattctttattaacaaacactatcttatgacatgtcacattacaagttcctaaattaatgtttattttgactataactaggaatgttttggcaagctttggtggttagttgagccttttgcttgaagtgcatatgagacatatttttgattttagattatgatgttccaccaatttaatattaagtaatatcttattaaaaccctaagtaccaaacaagtgcttttgccataagtttccatgtgatctctaattttgggtgatcaaataaaacactatgcagctcaacaacaacaacaacaacaaagctttgaatacaagcaaatcagaggataggaccactaaaatgcacaacaaggattgtcaactaatgggcctaacatggctccttgaccaaaaatcggacgacttatatgcgcacggtttcagccgtcttaagggcaatcatgctgagctcggacgaagactcagatcaacttcatagatgtccattaacaagcgatggaatgcctctagccgttgattcttccgagttatcggatcaatcctcttccactataattggagaaaaaacattatttaccatttctctcttcattgcatttacttccttcttgtattgtatcctcttcattgcataatcattctagtttagttaacaactagagaggagtgtattcatggtgttaatttgacactttgtatctgttttttttttgtgtattatgaaaaaagccaatttcccccatttgcccatttgcattggtactttgagattttgtttgtttgttgtgagtggggggcctaagagaacatgtgcaagagtgagtaatggttagttttttgagggacaaaagcttttagaatatggtgacttgtttagtgtttttttttctttggggggacagttgtgttcttcacaagaaattaatgaaatgtcaacatctttctctctccataacaagccagctttatctttttctttgtgtggcttgtatcaagaagagtagagtgaaaaatgccaaagccaagccttggaatcataataatatacattactcttttttatactagtttcagatcttagataataatgctcactattggtgtttagttactgttttatttactgtaattgttaggaaaagtaataaaattaaaaggtatcattatccggtctcatataattaatattgttgggtatccaatcaaagtctcatattgactaaaaatgagaaagattttaggtatataaggatggatattatctccattggaacgaggccttttggaaaagtgcccaaaaataaatc

SEQ ID NO: 219396 - DNA, 4128 bp, Cannabis indica
gaaaacaatggcattattgtaatttcactttcattttcttaagctgaaaagcctatattccatatttccatttagtctttaatattttctattctgaagagagacgacgactcagactcgactcgactcgactcattttgtgtatttcttcgctcaaatcaatctccgtgaatggagcttcagagatcagtgatgatgaggctctttctagggtttctgctactgtctttcgcacctatctcaattcatggaagattcgtggtggagaagaatagcttgagggtaacatcacccgaccgaatcaggggaactcatgacagcgccattggaaactttggaatacctcaatatggtggtagcatggctgggaatgttttgtacccaaaagataatcaaaagggttgtaaggagttttctgactttgggatttcgttccaatccaagcctggagctcttccgaccttcgttttgctggatcgtggaggtaattttctcatatttttgcgtaatttgcttgattttgagggttttggagttcgcctagttcgtttagatcgttttttggacttactgtttttatgatgaattaatttgtattgatagcttccaattccattattgtaagaattaatttcgatttcaagtagttaatttgattgctgttgcatggtttggtttatctattactgatgatatatgcttttgttgatttttgtcaatcaagaaaatatgttcgcttaggtttccaattgattttgtgaggttcttgagtcgtttccagttttatcatctaacacatatggattcccttcttctacttttgatcaaagattggatttagtttcttcattttaattgacccgatagttatgctttatccaaatttgatttgatgattatccgtgcacttgttgcttcataaaactatacatgtaaactcgaaatgtttaccggttgctttttggttgatgaagaagatagctgtttcataatttgggtcttagtgcttgctcggcactcctttttgaagctacagtgagtttgtattgtttggctttgatagaagaccggtgctctttagtagtgacatatactctttgaattatacttgcagttttctttaagttctttgtgttactttagttacattgacttattttctgtcactttcttcactgaaatgcttttatttttaacaatatttttatcatttcggatcaagtaaagatgactccttaaatattatgttagtgttactttcatttttggtatttaagtttgttattgcattatacttttggtaatcaaatttcatctatccattttatgttgtgatgtttctactgccccctctctctctccactaattgattaacttgggttttaactacagctgttagagttcatatttgcttcattggtagattgcatcttcatgatccggattgggtcattcctacctttttatttcctttcactgttttggtttgcttgctttcagtgtctctcatggctgtttctttaattttaggttgtggtttcagttggtcatttgtcttttatttgtcaataccttttccttagaaaagatctttcaatgcatgagattatggttgatatgatctcagagttacctttttttatatatattggtttgctgtgaaagaaaggaagttattattactattcttcttcttcatgatctgggaatgaatgattggatagttattggacactgctcatgaaaaactgttctcaccactctttgcatttctttccagattgtttttttgctttgaaggtctggaatgcccagaaggctggagcttctgcagttctggtagctgatgacatggaggaaccactaattacaatggattctcctgaagaagatggttcaactgccaagtacattgagaacatcaccatcccatctgcactcattgataaaaactttggtgaagtattaaagaaatcaatccgttctggggacatggtcaacgtgaatcttgattggagagaagctgtcccacatccagatgatcgagtggaatatgaactatggaccaacagcaatgatgaatgcggagttaagtgtgacatgctgatggaatttgtgaaagattttaagggtgcagctcaaattcttgagaaaggtggttatactcaattcacgcctcattacattacttggtactgtcctgaggcattcaccttgagcaaacagtgcaagtcccagtgtattaatcatggaagatactgtgcccctgatcctgagcaggatttcagctctggttatgaagggaaagatgtggttttggaaaacctgaggcagctctgtgtttttaaagtggcaaatgaaaccaaaaagccttgggtctggtgggactatgtgacagatttccaaattagatgtcctatgaaggagaaaaagtataacaaggattgtgctgttgctgtcattcaatctcttggtatataaatttccattccattcactcgtttctaatttctggcattgctgtttgatggaatttgagtgttcatgtaatatatgacaggactggatgttaaaagtgttgacaagtgcatgggagacccttctgcagactctgaaaaccgtgttctgaaagaagagcaagatgctcaagtatttgtccatcattttttacttactacactttgttttgtattttcatttcgagttatttatttgaatttttcttttgctggagtgatttcgtaattttgagccactttttgcaattgtttggctgataataagtgttatgtgttcctaatgattgggaactctgtgtaggttgggaaaggaacaagaggtgacgtgaccatattacctactcttgttgtcaataatcgacagtacagaggttggtctttgtgcttcattctgtagaccatctggctctgtgcttctatcattcactaattatgtatctgtttgcaggaaagttggagaaaggtgctgttttgaaggccatctgttctggttttgaggaaacaactgagccagctgtttgtttgagtggtggtatgtattatttgtagtgtttttgtgaactggttgttgtgtgtagtttatgtaactttttcgtattgaagcccatttattttgtttggttgtttgatttgtggcagacgtggagacgaatgagtgcttggataacaatggtggttgctggcatgataaatcagccaatctcactgcctgcaaggtagagtttgaacctttcttttcttgcaggtgtctagttgtccttttcatcttctctgattattatctcatataatcaggacacgtttcgtgggagggtatgtgagtgtcccctggttgatggggtgcagtttaaaggagatggttataccacctgtgaaggtaaagactgctccagcttcttgcaatgaatattaataagtattataaatttagttagggaagcaatgcaattgccactctgccccttctaatggggaagattaagaggttcaccaaaagaaaaagataaaagagcaagaagaaagaaacatttaatacctggtgactgcacccattaaccattatggtagctcgtttttgtgatggagctttatgttactgaaattattatcttgattgtctgttcattcaatatttgcacttgatgtatgctcattcgatgatgcatattctctttgctttcagcaagtgggcctgggaggtgcaagataaacaatggtggttgttggcatgacgctcgaaatgggcatgcatattctgcttgcactgtacgtgattctcatttctgtttcttctcttccaaggtctttttacctcaaaaaaaaaaaattaactttgattcctttctgtgtaacaggataatggagaggtcaaatgtcagtgtcctcctggatttagaggtgatggtgtcaagagttgtgtaggtaagagatttttatcacattctgttaatgttgctgttacagaacaagtttatgaggaaatttgagagccaagaaaacaatctggaaaaaaactgtatgatttctagtttatttagtttgtatggcaatcttgcttggcttgatttttgtagctatggtccaaactggcaatatatattttttttt

SEQ ID NO: 219397 - DNA, 2005 bp, Cannabis indica
ggaatgaaaattgtttcttttctattccattccatttcattacctccaaccaaacgccaccttaattcgatgactagtcataaaatgagatatttttttaattacctcaagaaaaacaagtcataaaatgttacaaaatgtcataattattgttcaagtatatatcattttgtttgatcatcacaccttatgcctccaaagcttttgttcactatgaaccacaacttttatttttagcatgaaaataaataatttaaaaacacacaatttcatgtagccttatatataaaggcacatttattttttggccctcaatcctatccacaatttggccatcaataggatatgagttctcatcaccaccatggttggaaacatagttcaactgtctagagttaaggaataacttcatgttgaattttcgtattgacgacacaccccaaccgcttctcagaaaatgcagatttttcgagtagttgaggcataaaacaagtgtaacataaagcaaactcttagctagacattatagcaattcatttcaagagggacacagatctttaagcttggctttctgtacaaagttacaatcttttcaacatttacgagttgtgtgtggcaggaacatacctgcttcgctcgatagtagcatgcagttaatgcacgccgtatgctgatgcagaaatacgaataccatgttagtggaaacaacaaaaacaaaagtgatgtctaaccatttcattcttctgtatactgtgaaaatatacaatattatcataaaagttcacaacaatatgagctagtaaactattcctcagttctacagcaagcatgtatgtttcagacaccattaagaattagaacgtttacgctattgggaattcattgatagcatgtatcgaggcattttggctcaattcgaaggatcttggacagatgccctttgttgtttgcatccatgctccggtaaaagatgttctgaagcggctctttttggtcttaactgcaactgaaattaacattagtgtcgctcttacacgaatgtgtttgtgtgtacggtgcaaagcactaaatcactgaccttctcttcagcgcgctgatacatttgccttagaaggatatttttagattcggtagttatcactgcgtaggatcaataaattcttaaaggttcaaaaaaccaatgcacatactcagtttcaaatcaaaggcaatagctacaaaagatgtgaaatcttttgatttaccttgatcaggtggtggaagagtctggttgtgtgtgggatgataggttgtaagtgtcatcttctatacacaggcataaacataatcttagagagagaattttattaaaatttatgaaaataacaacaacaataataatagtaatcataaatagaagaagagagggaaagcattcatttttaaaatgcaaatgcatgaatgataagaaaattttgaatacattaagggttcgtttggtacgccgtattacactgtattgtattgtattttttttttaaagaaaatattgtattgtatagtattatattgaattgtattttatacaatattattatgtaaaattatatgtagtgttgatttttatgggcacctaaatatataaatttattataaattaaaatttaacataaagatataatatatagcccaattcaatataatacaatacactacgagccgtatcaaacaaattctaatagttttaaacaaaaataaagtcaaaagggtaaattccatacaagaaaaaaaataaaaaaaaaagaaaacaaactaactgttttattaaaggattaagtaataaaagagctttctaagattatactcttggtctttccaggatattcgaaaattctgtttaaataatgctcagttgaatttaccagtatgttttccaggaattagaagcatttctttttgtttataaggctataaatataaaccatactaatactcaatacatggttgagaagtaacataatcaagt

SEQ ID NO: 219398 - DNA, 2602 bp, Cannabis indica
ttattttctattttcaaaacaaactttaattttctatccaacatattcttttttacatagaaaatctgtggccgcgatcagggtctgggtctggctctgggctggggtccagatttagggctggggtggaatggtcgcatagttaaaattaaaattagtaaggcaattagcattaattatttgtatgctctgactacacatgattataagtgaagatattattatatgggtcctattttcaaaaataggcattaggcactactataaaagtgtgtttttgcgtaggtcaacacatcagttgacgccaaaaattaatgcaagaaaatcacaataagattttttgtcagtttggaaccgacaacattttgctatagtttaaaaatgacatgttcaacatttgcgttggtttataatagacgcaacctagcgtcaattagaaaccgacacattaaataaaaggaaaaaaaaagcccaattcaataaaagcccaattgacacataaaaccctacatatataaactaaatataaatctaaacctaaaacccaatcaaccgcaccccatttctctctctctctcttgacaatcgacaaccccaccatgcactgcctcctccgatcgtccagccgtgcgacccctcttcatctcgtctcgacactaacactgtcacccgcacgccgacaagccgaacgggccatgaatggcctcttcccttctcttttgtctcgataccatgccggtgccaccatgtaagttttctctactatctctttctttcgatctcgtgggtgaaatatttttttgtacagatttttgagttggggatgaagacgataaagacgaccattgtctatttctgagttttggtttaataacggtagctattgtgttttgtatttagatatgttttagattttctttgtatgtttatttgtgtagatctcagtatttgtataattattttagatttgtaaaattaaaatgaacattaaaatttgggtatttgttttagatttgggtgtgatctattttatttttggtttttttgttgtgtcggtacaaaaccgacgggaatgttgtaaaaaaatttctctacactataagtgactttttttaaccatcgctaatttttggtattgactgttgaaaactgacacaaaataatgtagtttttgcgtctacagtatatacatcagtttcaacaaccgacgctaaaagaatatatgtcagttacaaactgacgaaaaacaccatatttgtagtagtgagggttataatttctcaattttggagattttattaaactctaagtgtactaaatatgccatatgtgaaaatttatatttttgtgatttttactcggtaacgatagaaatgtggcgatttggctattagagtcacatgagttggtttagaacctttactttaatgaatcgatcatatgtgatagttttaatattggagtagagagagttgtggttttagactattttacccctaagtcttgaggttacttaagggtgaagtaaagagtaaaagtgtaattatacctaagtgctagtttgtccttcagtgagttggtagaccattcttagtcttaatagctgaattaagctaaggctaagtgaaataaaattcttttattaaataaaacttaagataaatcataaacataaaaaggaagtcctctctctctctctctctatcttcaaactcaagtgaaactaggggaaaaccagtcatctcatcacttagttttagaggattcagtagggattaaaaggggtttggtgaagcaaaacttaaggtaaagccctagcttccttttcttgagttttttgaggattttgtttaggttcaaccatgcaaattttgaaattaggttatatccaaaccttagttgcttttagcacttttgacaatatttaggttttcataactttcattgatcaataagtgaatccagaacctttataagacaatatcaaacaacttcatattcaagatatagtaaatgtttgagataatcaaacttaacaaccttaaagaccagtgccattaaagaaatctatgagagaaatgacataagaaaataatggaatgatagaagatgatccaaattaaattttatcatgtcatgaagtttcaaactcttaaaactagaatggtatcataaataaggagtataaattgataagagacaattaagtgttggtatttttcttattgttataaggtgtaaaactaattggttatagataaatatttataatcaagagggatataaattacagtattgagagatgcacaatatgtcttgtatgtaaagaattactgataaagcatatattcattttaagtagtagactttctttttgtttgcttgaaagactatttcatgacaagcatgacactgtttactcattatggtcttgagttatatcaaatagattattaaagtatcatttatcatggtaatgttgatgacaaaagttatgtggcgcaattagaaaattttgtatccagcaaagatccaaagtatatggctcgcaaattaggaaaatctatgtatacactcaagtagcttctcgccaatgattaca

SEQ ID NO: 219399 - DNA, 8859 bp, Cannabis indica
tctctctctcactctctctctatatatatataacccaacgttgtttcatgttctacactctagctccatttggtttttttgtttttcagaagatgaagtgaacaaagttgtgaaaagttgtgtgtgtatatatttgtatatagatatcatatattatatatatatatgcttaccaatactattatcagctcaatcagctctgaagatatatgactcaatatttttgtgtgttttataaatacaaattcttttgagatcaaaataaagcctggaaaccagtagaattgttggttttggtacttggattttgaagatctatctatggtttataagttatataactaattaactaattccggattctgaaacggtcgtcgtttttgccctctttgactttatttttccaggacctctctgaattaaagaaagaagaagagtactacaattatatagagaaggccactgatctgatcatattaatggttgatcccagttctagattcagaaaaggtatatacaactatttttatttatatatatataagtacatattttgcatgtacagtagagagagagaaagagagaaatagtaagtactatataaatatgtgtgtttggatagtgtgtcatagatatggaggctaattaactaaactaattgttccttttcagagaagtaaaatctaaagagtgaagaaaaacataaatatatatttatatatatatatattacgatcgatggcgacgtactttcatggaaactcggatatccaagcacctgacggtggcctacagaccctggtgttaatgaatccgggaggctatatcccttactccgacactcctccgccgccctcggccaccgggaacctcatattcctcaactccgccgccaactcactcgctcaacaccaccccaacatttcccacgcgccgcagtcccaccagcagacgacgcagcagttcgtcaccgccataccatcgcctcaccatcatcatcatcatcatcaacaggaccccaacaactcccagcagtccatgcagcagcagactcaacagcacgacttctccgcgctgcatggcttcatgccgcgcgtgcagtacaacctctggaattcacccgaccagtccgcggcggcgcgtgaaactccacgctcacagcagcaaggtgggctctccttgacgctgtcgtcccaacagctcggagggtttgggtcttttcggtcagatagggaaattccgtcaccggtacagacgcaaggtcagggcccggctgtatcgggtgaagacatgcgggtctccggcggctcgtcttcgtcggtttcgggcgtgaccaatggcgttccgggtattcagagcgttctgctgagctccaaatatctcaaggcagctcaggagcttctggacgaggttgttaacgtcgggaatgaaatgaggaacgaacctttttcaaaaaagggtactaattcatcacagcaaagtaaacccgccggggaatcgtcggcagcagcaagcggtgacggctctcccatcgccaccggcgagacgagcggtaagcgtgcgtcggaacttactcctgccgagaggcaagagattcagatgaagaaagccaagctaattaccatgctcgatgaggtatgttatgtaaaattaagaattgggtaataccgaaattcaattgtgttgtctctaattttgatactttgaatggtttttaggtggaacaaagatacagacagtatcaccaccagatgcagatagtgatttcgtcgttcgaacaagccgccgggattgggtctgctagaacatacactgctttggcactccaaacaatctcgaagcaattcaggtgtcttaaagacgccataactggccaaattcgtgctgccaacaaaagcttaggcgaagaagattgcctcaatggagctggaaagattgaaggttcgagactcaagtatgtcgatcaccatctccggcaacagcgagctctgcaacaattgggaatgatccagcaaaatgcttggagaccccaaagaggcctgcctgagagatctgtttctgtccttcgtgcttggcttttcgaacactttctccacccgtaagttcattttttctttgtatcaatattctctctttgaattttcctccatatcccatttcttttatgctacagttttactaaaagtgatatctttttacgtattaggtatccaaaggattcagataaacatatgcttgctaaacaaacgggccttactagaagccaggtgtgtgaccatttcatttcaagttcttaatttttttctattgtgttagttttgattccatttccttaatttgttggaactggttttgttgactgttttgttaaggtttcaaactggttcattaatgcccgagttcgactttggaaaccaatggtggaggaaatgtacttggaggaaatcaaggagcatgaaaagaatggctctgcagaaaaaaacagcaagagtaatgaggattctgactctaaatccacaaccccaaaggagaaaagtccagctgtggataaccaaacagggagtttcaattccaaacaagagaattccatagcccaattcgtcccatcagccatttcaatgtccacctcttcaacctctccaacaggaattaacaaccaccggaatcattctgggttttctctcattggttcatcagagttggatggaatcacacaaggcagtcctaagaaacagaggaacaccgaaactttgccatctccaaacagttacccatctataaatatggatgtcaagcctggaaaaatcactaatgagcaaattagtatgaaatttggagaagatcagaggcagagccgagatgggtactcgtttatggggaaccaaactaacttcattggaggttttgggcagtacccaatggcggaaattggaagatttgatgccgaacagtttgctccaaggtattctggtaatggggtttcactcactcttggattacctcactgtgaaaatctttccttggctggggcacaccaagcttttgtccctaatcaagggattcaacttggaaggagagtagacataggtgaacaaaatgagtttggtgccatgaatagtccaactcctcattcttctgctgcttttgaaaacatcaatattcaaaacccaaagaggtttgcagctcaattgttgccagactatgtggcttgaggactttgctaacaagttcttgaagatgatggagaaagaagaatattacttaagcattttaggggagaaacttctcccaaaaaaaagaaatatatttcttttctagaggaacaagggggggtaatgcattgtagtgtaaagaaaggaagatttttacttttagttttataggtttatacatttgcaaaatagaacaatttcagctcttagggatttgagagcatatatatgcttgaggattgtatattatttttgtaagttttgatgatgcatatagatggattggtgtcatcattggggtataccattatatgggtaattaaagtagtctcttatgatttgtatatttttcataaatgaagggagagttggggaacaataaaagcttgattggttgcctataatggtacaaaaaaattgggggggaaagaataagcaatgactgattttgtctttgcattccatattcttcacataaatcagcaagaactatcttatatatataatacatattttatttctattatctttgtttttggggtgaattctagattgtattctattatcttacaatgaccaaatttttgtgtgacacttaataaggatgtcacaactttttgtatgagaagtgttatcaagaaaatacttttatgattaagtggatcttatcctatataatatgattcactaactacaatgtgtttaaaaaacagaattgggataggattaacattatgcctaaaaccaaaaatatgatcctgaaacacagcatatccgatcaaacattgggattttcactagtatattctgcaagtaaattttttaattacaattaaaaacaaggttccacacaggggaccccattgagggttacttggcataatgtagaaaaagaaattgtaagaagataaggagtttataataaggattaagacaagtaacaaaaacgacttatctatttctaagtactaatagtttaatacttttatggatgatgtaaaggggggtatcacttatttgtttattttatttttgggtgaatcacaataagactaaagttatataaacattgttctttggattcatttattaatttagatatttttttcttttttccattttttaaagattgcttttgtgacaaggtagtgatatgattaagagttggacttttctgtaataaaatataacttacatggtgaagcttcccactcagcttttgtattttaatttttatttatttttaatttagtaaggttatgattgcgtttggacttgttagttttattactcaatgaggacgtaatctggttgtttcatggctataggctggtctaatatgttaatgatggaacctcttacacattattgccccaaagaatctcaaaataattagtcaacaaaaagaaagatattctgcatatccaccctgccatcccttcatttttttcttttttcttacttagagagtgagtgggctcgcagaaaatatttcttccatggggcaaaatcttaattgaggtactttcaacttttttctcggataatatagtaatttaatgttttcaaatcattttttgagaatactaaaaaaaaaatatcaaacatgcatactacaacaaattgtttgaatcatttcattgcatatcttaaattattcagaatttagagaacttggtattttaaatgtctcaattagaattgttccccaccataaggacattttgtgctagcctaatgggattttttataaaaaatattgaattttaagtaaaaatttacaattctatttctacacgaatttttttataaaaatacttcgtttttataaaacaacttaagacaatcgtaaaaaaaccaaaacagaataatgaaaaaaaaataatagaattaaacaacagtaaaaaatttgacacagtatacagtattttaaaaaaaataatttgtcccacaataaaaagaaaaaaaataaaaaatttagtatgggataaaaaaccccacctacataaaagagtgttaattacaacattttatttcaacttttttttaacatccaaaaatacatgccaaagtattttcttgccatcttacggttggtataaatgagtgatatttgttggtgtagaaagaatatgttaactacaataagcatcaccatacaaattattgtagtcaaaagttgagcaagtgattgaaataaaaaattgaccaattatactcgaaagccaaaagcatatttaaccctctttgaatttttagtaagtaaataaagttatttaagcacctgaaacataaatgtcaactaccacatccaaaaatcaaaatttacagattaacaagtctaaaatgggggtggtggctgacctatacagactacagagtgtcaaacagttcagcagaaaaactatttttactcaaacctttccattaaaaatgatgcttaaacctttttttcacatttttttttggtccctcacaagggtaatccaacctgacttgagttcctaacaagagatgggtaaaggttaactaaagaggtcaaagtgtactggctgttgtttcattatttactcctaatgacgatagtcttcgtttagcaaccttggatctgtaacaccagacctcaaatgcctcagtcaggtctggatattgaacttgctgatttcctaaccattcagccaatatcccagcctgctcgtaggatggcaatgcaagaattatcgaaatgaaggtggattctaaggattgccaaagctcactatctacctttggtgtaggcgtagtttcatcaccatcattactgtgagctgtgaaggaatcaatcagaggtttagtgatcctcacaaaaggaagccataccttcaccccatgaagccgccttgcagttggcaatatgacagtgccgtaacctatagcctccaagacttttgcagccacctcaataacttttgactttgtctcaataatgtcatcggttgaatttccttgctccacaatcttaactatcttgtcagatgcatccatccaattatggacaaagtccctcataatttccaacttattcaatatttgacatgcccacgataaatccgataagagggactgaaaattttgcattttcccttcttctgctgatgaatgattagcctcacatagcatagcttctaatgcattattaaacctagcaaacagtctattcacacattctttaacctcagcttttatctcactatcagctattagcaaaggggaatcatcatcttcagttatcatatactcgagttgttcttgggcagaagacttgatatcattcaaggatggtggaggggatgatgtggcgaattgaattgatgagagaaaaattcttctgatggcagctggattgactggttgaagacgatcaagaatagcttccacttcagaacccatctgtggtatggtttttagaatttcctcctcctcagactcttcccacggaactgcttccaagtagttcacacaagcggaaacaatttttgggcacccaagttcaaaagccactcgaagaatgcctagagcatttttaactccttgccacgggtcatcaattgagccatcaacgataacatagaaaaggcgaagaacaatgacatggtaatcgaattctgattcctcgcagtagacctccacacagttccgggaatcaataatctgacatgttggccaattctcagaaaggcggtcagcaaaatacttgcacttatcagtgagaatgtgggagtgacaatatatccattcatctcgcccatccttcgttctaagcctcacaacaacatcacttgttgatcgatcaccaaacctgcaagaagccgttgtttcagaaccctgaaagaaaagaaagtatagaaacaaaataaatgagaagatctccaatctccattctaatcatcaactcatgagtaaaataaacttacaaacaaaaattatcattgaggatctagtacctcacaaacaccactcatttatattgacatacattttgataacattctctctgtcttcaatcaatagaaaatctaaaaacacttcgaatgaatacagcacattgcaaaacagtaagaccaattgatggccatgaataaacttacagcagagtccatggaagcaattagcagcgcatatgtcttctaggcaacatggtatctgcaagaacataggaatcccaaagagaaatgtcaaatctatacacattttaagagtttagagaactaagaaatcagaaataacctcttgaaaaagaaacacatgaagtagtggcaatgaatgtactagtaattacaaacactaaattcatcctaaacataactaaattcaaagacaagagtatacattcgaacatgaacatgtaatgatagcctttgacaattgttgttcgctaaaaaccatttctcgttgaaaaacccattattattttggggaatgggacaccattaaaacagcagacattacaagctacaatgatcgaaacccacattttaaatttaacctcattccctaaaatctcaaacccaccttatgaaaagtgatcgaaagcaacaatacttactctgtattctagattcttcgaagagcataaacaacaatgatatgcataagagaaaagtggctattccacaaatgggtacaacaaataaataatttcaataaaaacaaacaaaagttgaggtagagcacagaagaatggctagaaaaacatacccaatctgaaagagaaatggaagatgagaactcataatcttggtgctgtgggttttcttcaaaataattgggttggaattttcagagcagcaaagcgagaggggtaagagctccttcgtccgcgttgtcactctctagttcactgagcggtcaagttctggattctctctcagcctttggcccaataataaatatgggctttgagttatgggcttatctaagagcaactccaagaaaacactgcactatcatccaaaatttagtgtggaaaagtattttcactgaaaccacaatattagcaaaaggttatagttaggatttttgcccgcttaactttaatatatatcaaattatgtcccttgaattaaacctcacggtcattacaaaggataatgttaagtatagcggagggatccactatacctaaaatattctgagcataagcccatctagcaacattgtgagccgcaaagttacaacatctaggaataaaagaaaaattacaagataaaaagttcttaaagagttgattacaaacatacatataattaacaatgttccaattggactggacacatttaatcgctttaataaccacgtccgaatcactctcaacaaggataaagtcatgcttccagtaagcagcagtttccaaagcaagctgacacgccgccgcctcgccaatcaaaggatcagtgaaatttaggatgttggccgcaccctacaaaatcatgtccctcgaactttgacatttactaaatcacgtctcttgaactttcatcaatgttagacttttttttagtaaaattagacaaaagtcattaaattcaacaatcttaatagtttaaagagcatttttaacgaccttaaaagttccgagtacatgatttggtatatatattttattatt

SEQ ID NO: 219400 - DNA, 1825 bp, Cannabis indica
ggtaccattagtgccctttagcatttctctttgcattatattgacaaattattttaattctagtgaagaagttacgtaaaaccctataatgctacaagtacggaaaaaccaaaataataatacgaaacaaaaaaaaaaaggagaaaaaagaaagtgcaacaaagaggggcaaaaatagacataaatccgtattcagcggctattgttgactcctttacttgtgttcataattaaataccgcaacttccaacaatacccttgaaaattgaattttgaatgaccaagatagcggtgctcaatgtgaactagacatataatagaggggtattattgtcattcaatagctctatgccactagttataatttgttcataattattctgtcaactttaccattaaaattgaattaattgtcggcttaagagagggaatccatgtctaacaagtcacaagttctcactttcagcaaccctttatgtcaagttgctacttaaataaagttttaataaacataaagtttgttctaaaataaaacgactcattaataacataatgaaatattgaaatcccaagaagcaaaatatttatatatttttaaggctcaaagttaaacaaatatgcataacaattggttaacattttatgtaaaatgtaaaataatgattgtcacattctcaattaacacaaaaattattattgatataaaaaaattgaaaaatacttcttcgacttttacattgctttatcttcaattaataaaaaattcgaaaccgaaaacattaagtgcaccgaagaggtaggtctttattttattttttttttattgtaacacacataaaaaaatattttaacaaacttatatttaaaatatattgacaaattatatacatatactaatttacaataataagtatgttacaataaataaaaaataatttaataaataataatacattacgtacaaaaaaaaataatctaagtcttataatagacaatatatgaattaatataaagtaatttactaaaaattcaacaacataacgactataaaacggaacgtttccaaaaaaatttaaacctacaaataacaactaaaaacaatccaaaataatcacaatatcgtgtaacaatacaaaatttataattattacattacatattacttaagttaaattaatcttatagaacatagaatataataaatataaaaatgatttacataggtatattatacatacattaaacacattactttaaactcacactaaacgatagtctttatcaatagagttcgtaaaaaaatatttttgaattaaaatttgtttggtaggaaagagaaagaaggatggatgaagagtaaaagtgatggagatgataattgttctcacagggggcaccacgtcacgtgtgcttttacaaacttattttaatctaatttgttagcttaagaaaagtgaggtttaatttaaacttttaattaaaataaacataattgttattaaacataaaactgtcgttaattatggaaatcccatgtataaacttttacattctgctctaaaatttatttttacaaaataagattacatttcaaaacactgccaaaagggtggatcttgtccactggtggccgtgacactgcgattgatatgtacactactggaaaacctctaactcatggttctctgctttacccttccctttacctgcaccacgaaacatccgtgagtcacagagactcgacaaaaaaagctattaaatcacacacaatgcaaaatacaagtaataacaacttgatacagcatacatactcaccattcaacat

SEQ ID NO: 219401 - DNA, 6005 bp, Cannabis indica
atgtaaagtctaaccccactgccttttgagttattttggtcacatggggtcttaattaatattttatcatataattaagagtctgttcaccttaagataaagcctcttataatatatgatttaagcaacatagtaagtttcaaaaattgttgttctggtgtagctaatgtgaaattctttttattttaatactatttacacattttaaaaattcattcctttccatttgcataaaaaatatagtatttaaattgttttattttttacacagtaaattatttagaattttttaaaaatttataaataatcttaaacaattataatatatgcgaataaaaaaactaaaaaactttaaaataccaaaactgatagaatgtgtataaaaaattttccaataagttatttgagagtgcaagaattttccaacaaattatacactttttcagttctcaacagtatataatatttatattaagttaatattacgtgtatgtatacttagttatattcttaatatatattttgattatgtgtacttttaattgtataattatatataatgttactcaataaataacatcatttttttttattaaaaggtatttaatttgagtactatttattataaaaaaaaaacataaagtatctataaatataaaataaaattattatacaaaggtttaaacaaattcaattaaatccaaaatattagcaagatgcatcgaaaataataatattttataaattctataagatgtttcaaaactatgatgttatttacacaagtgaagaagaaaaaaattaatgtacagatatttgcggcgaaaccctcttaatatttgtaattgctacactaataaaaaaaagtggtagcaaaaatagcttatcttacgatttagttgcagtcgtaccttaaccaaaaagtttcatttagcatatatatttacatgtttagcgtgcatgtgttatgtttgcctaatagataacatatcagtaagagtggtatagtgtacatagagttgcactgaatactgatggatatatatttggcaaagtacagattgacagtatgacatcggtacgactaaagtaccgagtataggctggtgttatggttaatcttactgtcgtatgagcgttccagatttagtacacattggaggcgcgataggattgtgatcaggtgtattgacgcctagttataatcaagtttatgtttatgttatgtttatgcttttcttactgattctgtcaactcatagatattgtttaaatgtgtagataaatgcaaagtaaaggctgagcaatattgagcctgggctagatgaagatagtacatatcgagacggttagccttggagtgttctgatcttgagcacaactgactttattatgatagtcgataggagacaacctatgtaactattgtatattgaaaaccaatataacttttgaaatgggatcctgatatttgtattaaattcacttatgaaagtttcactttatttatgaatatttttaattaattacgttttcaataaactctttgattaagaaagagatgcactatacttagagacacgataacgtgcctaagctagtagggagttacataaatattagaggaaaaatattagattgaggtaaaaatttatatatgtgtggtaatatgatgcctttgtcattctacgaggaaaataagacactgtcctccttaagcatgcaatatataaaaatacatgcatgtcctaacaattgcatcctataccgtaagagttttgtggatgaaatgttttgtcccacatttcctgaatgaagcagatccaattcatcgtttaacggaagacgtaaatcaattaattaataagtaataatcacattgattgtgtctaaaccaattaactcttgtgtaatttatttcttgttttattttttgtttcatgtgacactgaaaaaatagttaacactagctcgctagatttgtaagatgaataatgagtttaagtaaataatatagagagacacacaaaatttatagtagttcactccacatgtcgcgatggtaatagagctacgtctacttcaagtttttatttctcacaagaattgcaagagaatcgactaaggagagagctcttatttctagagagagaaggtaggcagagattctctaaccttgtgggggctaagaagaatgtgaaaaatgagctagaggagctctccttttatagggaaggaggtcctattaaaataataataaaataatataaaaatatgaaaaattcgcaatggactgatcttggccattgatgatgatctaacagtaaaaattggttcttgatgaaaatcctcaatttttggagtttgaatctcgtccgttggattgttttcgggtaatttgtgaaaaaaaatcgttgtggtaataggcacgaatttgaatgtgaaatattcagaattacgataagggtgtgatatatgtcttgatagatctctaaaatagaaatgcaagttgaatctcattgatcagatcaatattgagagagttatgactgtttgattgtaggctatgcaacacctagcgtcctggttgacaacccaacgcccatgttgatgtccagcgcccaatttgacatcctgacgtcaacctagacactagataagtgaataaacatcacaaacttatattttttgatgcctaagtgatatgccaacataagttagtcagattctttgttttgatgaagttactcatcagttctcagagatttcaatttttggtgaaattaggtagactcaaaacatactaattttgccaatattccaccatgttcaaagggtggctcgtcacaagttgtaactcttgtttattactatggaaaaatagtcgaatgctcgagacaaaattaggttctgatgagtagaacccaacgcactaggttacatgtcaaccttaccattgggtgcttcttgggtgacctctcggtgctcgtcttgatacttttaaggcgttcaagattgaaaatgaggtctcctagcccatttttgaccaaaataagaagaatattctcataagaattcttttgagttgttgttagaaatggcccaagttgacaaagtgtcaacctgggcacttggtcccagttttggctaggtcaatccctttctttcttgaaagtaattgattcttcatttctgatggagacaaataaaatgcttgggatacttcttcaatattatggttggaagtgccccaagttgacaatatgtaaatttgggcgctgcgtgtcctaggcacctagtgccttgggagctcaaaactaaaagtgtttcgattctgattctgattccgatgcctcatatatattcgtgacaagtcttattcatatcaaagtacaaagtttgagccatttttactaagacagacctacaaactgaaaacctagttggaatgtcaacctggccattgggtgaaaaccctaggcgccctggttgacttctagggagttgctttgtctctttttagcttccatgccttggaatttgattcttcttatcttcttggtttagaacactaaaacatggtgatttaaaaacaacttgacatgatctagacacccattcaggagttctcaaagtgaacctaagcgcaaaattagggacccctcctaggtcgactcttatgactcaagactactcaattttaagagtttttctttcttaccacatgtcaaacatgaatgtcgacatcacaaaagctagttttcgtttaaatatttcctaaatgattgatcatttgttttatatgtttgaacatttttatatattaaacattatcttctagtgtttgtgctttttaggttgtgttttgtaaggattgttccccaacattataactattgtaatgaatatgattagtagtaggtcaattattatttttaatggtcatacataatgaccaagcttttataaaattcacttactactatcctataagtaggtgaacacacctctattcaagagagtgctgatcaatattgaaaaaattatgagtactatttctaaagtggagttggctcatcaatcttgagggctgaattactatgatttttgtgtctatttaaatatatgcatatatttttttctctttcaatacttgttgttctaagtgagtaactcatatatttattcttgagtgttcaaacgacctttgaatactcgagtagatttagggttgtcaaaattcttcatacaacaactatgtatagtcaaaattttccaaaatatcaccattgatatatatacatatatattaatagaattttgttttgcaagagcattaattttgaaagagattacaacatatcatataccatatatagtatatgaagaagaagatgaacactcactcacaaccttgagaaaagattaatggggatcaccatgacttgaataaggtattatcacctttgtccaaatatttgtttctcatatctctaaggattaagataattctcatgaaaatagctttgagaatatagttttctagcaaagtgctcttgttgatagaaaactaagttttacaaatgagtgttagaaatttatttatttggggtcacaattgttaaaaatttttgttgggtcatcatataaatgagtcgaatttatgtggtctaaattagaataaagcttatgacttaagggcatggttgttatgattttaatatgtggacaccattgagataatttcttatttgatgaggggtcaaattagaaatagtaaataaataattaattactatttttatagttattaataaacaagtattaacatcatattgtattttatattctttaatccctaccatcaagaaacttagatttcagagaaaattttgatgcaaaaaaattagaagatcataccattaaaatatcgattctatacactctagtacgattttactaatttctaatttatcatttcattctcttaatttaattaggattaaatttaaatttaaagtgtgctaacatattgtatccaaaacatttctaaattaattattgaagatttatggtagtattgatcttcaattaaattatttttgtatttggaatatttggtttgttgttgacgtcaagtatattttaggtttggtagtaattgttagattaatgtgtatactatgtgtgtgcgatttaaaagtttagactttgattcactttgataaatataaataataaaggtttaattttactaaagttatggaaaacttctattcgcttctatataatggaattcatgaccatgatatatatttaagatttttctataattgataatgatcatttggtttaaaagaagataacagtgcttatatatatttataaaattggagatttcatgattggcttgtgaagaaggtgtgatgtgaatatatggaaaatgtaattgatttttatttacatttcctgttttatatacaaaatatttcacaagccattaatcttatatggattcattgagtttaaaattttatgagtatacgctcatggcttcattcaggttttattgttattattttattaaaaatagataataatttcagtaactactaatattcaaattttaattttgaaatttgttaaggatatctaatattttagttaaattaattgaaataaaatataaccgaactcattacttttgagtagattaatttaaataaatattaagatattagtgtgtatgtaatttatgtgtttattaactggcccaaagataagttaatatttgactaagtttcgtacatatgtgataaatatttgatgattagaagatatcttgtgtgaataatatgtttgtccaaagatattacatattgttattatcaatgtttgagcgctgcaacacgagtaccatttataatttatattactgtccaaagacttaatattaatagtgtgtttggtatcttgagatgtgattaattattatttgaatttat

SEQ ID NO: 219402 - DNA, 2273 bp, Cannabis indica
aaaaatttatatttgtgactaaaaaattgccactaaaaataactgagacaaacacaaaaattgctttattgatcggcaatgaataaattatcagggcagataatatagttacaaaatacgtttaacatattttctgaaaaattctacatataatttaagatggcaacgttaaaattcagatagcgtctgattttcttattttttttaacttaagaaaatataatttttgactaaaaaaatacgatctttatgaagaaaaaaaaattatatcaacatcttataaccaagttatatgaactacacatatatacctgagtaagtaataaaaaatcagaaataaatatttttatcaagaaaccataaaaaaaaaaatagtactagatgtaaatttttctaaatttaatgatatggattagtattaatggtcatcattttcaaatttaggaaccaaattaattagttatttttcaacaaaatattttgtccattgtgtcaaattcaagagagcaacaccatcaaaaatcctaaaaagagtccatgcatatctgtgaattattaatggataattacataaaatattaatttttgtaaaatttttacatttttacatttaattaatttctatatttttacggtattttatagaaatataaaaaaataacaaaaaaattatataaaagtaacaagaaaataacataaaacaataacaaaacaacataaaaaataatatacaaataacaaaaactcaacaacaaaataacaagtgtacaacataaaaatacacaaaaaaaatcaaattttaggtaaataaaatttaaaaaccgtaaaaatattaaaaactccgtaacaaactctatttttataatttttttttgttacttttgcgttgcgttttttttttaaattatcccaattattaattagttaaaaaatttagaaaaataacatggatatatgaagtaagtttcttaaattatataactagacaatgttgctcatcaaaattcaaaaagcctccatcaaaatatgttatatatcatcatttgatcaaagtacttgatacatggaattgagttcttaaaattataaataaataaataaatttcaaatattttggctgcagatatatattagatatgtatatatatagaaattaattcctataatataaaaagaaccctccagtcaaaaaatacttatcctatataattgagttgtagacagctaaccaatatctgccatcatcaaattatttgaaaaagaaaagaccatgcaacttgcatatacaaacaacagtaacaaaattatatttaacataatgaaaataaataaataaataagaatatattattattttgacaacagtttaagatattcaggtctgcttatacatgaaattatatataatattatatatgtagcaagtggttgatcagtaataatttattatgtgataagcgataagatggtgggttttttgaaaatttgtataaagatcatcatattattcaaataggaggagttgcttttcacattttcattttatttttatttttaactttattattattattattattattttaatattttttaagttttgaaagggaatttggactcgaagtctaacctacttatttggaagtttttgatagatggaagagaatgactagaaatgcttttaaatattcaactttgtcacatactttatattcaagcatgacattgacttactttattaattgtctccttaatattgaaccaaggtctttgccatcatcaacttgattttcagtttctttagtatatatacacacacaaacctcactttgaaaattccaacttgtattagtgtagttttctaatatgatgtcatatttgttttattattaatttttttttaataataaatgtcattagactgctcaagtttaggtcactatttttgtttaatagtgacaatttgctgtagtccaatttacaaataattgccacggtaatgtcaatttagttgttacctctgaaaagtttatatatatctattctatatatatatatgttaaggtgctatatttgtttatttgaaatcttctacatatgttaagttaattattattttattattacctatggaaaagactagaactactaatatatttatttagttatctacagtgactagtgaaaatactcaatataagaaagtgttgatttagctaaaatttaagatctttttgatgggccagattcataacttctggaagaaaaaaaaa

SEQ ID NO: 219403 - DNA, 5535 bp, Cannabis indica
cttcttttgtctatttaaggtttcttctttatgagatttctgccatacccttttattctctgctttcccttttcttctacatagccctctttacctaccaacccttagccatggacctttcctctcaaccccatgaacaaaactccaccttcactgatgaagaagctcttgttcacgaatttgataacatctctgtccatatgatacttccccccagtctttctgtttggttgccaaaatcctatctcccaaacacatcaaacctgattgggttgataatgccatgaaggacgcctggatagttcgatgccctttctccttttctgaatatcattccggaatgttccttatccgttttggctgtgaaggcgaccggagacgtgtaatggaaagacagccatggcactttgatcgcaaccttatccttcttgccatccttgatgcttttgacactgttgtcccttcccaagtcagctatgtccctctttgggtccaggttcacctaatccccttcggtaagcgttcaactgacctagccaaattcctttcagtgcaacttggtcatctcattgaggttcatgcagcttccctgtatgatactataattccctttatgcgtattcgtgttcttgttgatgtcaccaggcctcttcgccgtggcatgaacatcaaattttgatctcttccctcggttaaatggctgaagtttatgtatgagggaatccaaaactactgttattactatggtatgctggaccacacttttaaatggtgtgaaaaacttctgaaattttgtgatgtttcccctgttcccccctcccttccttacagggacattttaagagctcctgccaaatctgcctataaaaagagcatcttcgatctctctaactctgtccctttcaaagaatcgtcctcacgtaactctgtttccaaccaaagtctgcaggatgccattaaccaattcctcattcccagtatggttaatacatccctatccttggatgttttatccaagtctctcatgtcctctgcccactgctcctcttatgaccacttctgtcatcactagcgttgataaaggcaaagcggccatggtttctgaatgtcctcgaatcatcctctctcccccatcattgaacctgtgtggtgctaagcgatctttcacaaggcagaatgtccaatttggtaactctgttagggagatgctgaagcatgctaaagcagcctcggaggatgaagatgttgttgtggtcccttcaatcgaaatctctgaagttcaggcgggtggtgcttcgcaaccccgcccagaaaaatgagtctcttgagctggaatgctcgaggtttggggagctttcgagcattccgtaacctctcccttttggttaaacaacatgaacctcagattctttttgttatagagaccaagctcagtgcaggttctatagctcggttcaagactaaactctcttttgattatggttttgaagttcctaggagaggtctaggagggggtctttttcttttttagaatgatattgttaatattaatattttatcctactctagtagtcatatagactgttttgtagaaataattgataatataaattttcatctttcttgttattatggatccccttatagttatggtaaattggattgttatactttgctcaatcgtttatatgatgtagcaccctcttctccttggataatcattggtgatttcaatgattatcttggtctcattgataaatcaactagttctaggccaccatccactgctatggttcatttccagtcttttatcaataaatattctctcattcctatgcctttcaaagggaaccgattcacctttaagcacggcaagactctcgaaaggcttgattgggctgtggttagcacgaattggtttgatctttttcccaaagcttctctaactcacctcccttactttggctcggatcataggtgtctcaaagttttatttactgatcctagtcaatctctaaaccattactcgggctttcgctttgaaaattcttggctctcagaacctgatttcttcaatgttatccattcgaattggcactcggttcctcataacaacagccataattctctttcctctttccttgctactcagtccaactgtgtcaacaagcttaaagagtggggtaaaaacaagcgttatttcaaacataccattcactatttacaaacctctttggaaaacatttattcctcccctactctcactgatgttgatcttcagcgagccaaagccattcaaaatgaccttgactgtgctctctataaagaggaaattttttggaaacaacgtgctcgtgcttcttgggtcaaggctggagacaaaaacaccaaatttttccaccatcgtgcttcttcttgtcgtagacataataccatttcccacattactttggctgatggtactactacccatgatttcaatatcatttgccatcaattcaaagaattctatgcctccctcttcacttcccagggcacggatttcactgctatcaatactatcctccctggaatttcctacactctaaattccaaccagtaccttcttctcagccaaccattcacttctgatgaagtccattctgctttgtttcaacttcctggagacaaagctcctggtcctgatggtctgaatgcacaattctatcagaagaactggtccacggttggaaaatctctcactgaggctgttcttgatgctcttaataatcaaatcgacttatcttcgatcaatgacactactttggttctcattcctaaaaggaagaatgcctcttcccttaaagactttaggcctattagcctttgcacaacgatttacgaaattatttcaaaggctattgccaataggcttaagttagtcctctgtgacctcatttctcaccgtcaaagtgcctttctttgtgatcgaattatttttgataatgtgcttatttccaatgaggtcattaatgcgataaataactgcaaaggaggaaaggttggctgggctgctttgaaacttgatacggagaaagcttttgattgtgtggagtggggtttcattcaggctattctcactcattttggtttccctccttcctttatctccctaatcatttggtgtctatcatctgttacttttaagctttctattaacaatacccttctccctcctttctcccctaccagagggattaggcaaggggaccctctctccccttaccttttcctcttagtggccgaaggtctttcagctgccatccgtgttcatgcatctcactccaatttcaatggcatttccatttgtagggcagccccttccatttcgcacctcctttttgctgatgatagcctccttttcactaccacttcccacaacaattgccggttaattaaggatattctagctctttaccacaaagccactggtcaatctgtcaatttctcaaagtcctccattctgttctcgcctaatacatctgcctctaataaggacttcttcttcaatactctccaacttgataataaaccttttgtcacaaaatatttgggagttcctcaatgttttggccgttccaagaaatcgtccttccattacatcgtccaaaaagccagtgccaaactacacctttggagtaataaattcttctccaaagcgggtaaggaaactcttataaaggcagtcgtccacgcaatcccttcttacgcaatgtcttgttttcgcattcccctctctatttgcaaaacccttgataaactcattactcaattttggtggggttcttctggcaaccgcaataagctgcattggaaaaactggtcctccctttgtgtttccaaattttatggaggattaggcttccgtaactttgtcattcataatcaagctctccttgcaaagcaagcttggcgtattctcataaatcctcaatccttggtttcaagacttctaaaaagccaagtatttcaagaacaacgatttcctttctgtacttccaaaggtcactctccttcctatacttggaccagtcttttatggggtcggcaccttctatctaaagggctaatttggaaaattggcaatggtgtttcgactgacacactccatcactactgggtttccctggcttttaaaatctcttaccttacaaaaacccccgttttctcccccctatcctcaactgtatccttttttatcaaggattcagggagttgggaccttcaaaagctccacacttacttcccctatgacattgtgatggccatcctcactatcccaattgacctctctcaaccagacaccctgatttggagttctcacccttcaggaaatctcacagttaacacagcctatcacctagctttatcctctgcctctttcaatacttctgctccctcaacctccaatcgggatcgatctaaaaaatggtggaaaactctttggcatcttcccatccctcccaaaatcaaacattttgcttggcgtgcttatcaccatattcttcccacttcttctaaccttttctacagaaaaattattccttcccctgactgctccttctgttctcatggtctagatacagttactcattccctcctaggatgttccagagctagaaaaacttggaggaaaacaagtctcgttgatttttttaatgctcatcaatttaaggacattaaagactttattcattcaggttatgagtccttgtcaaaggatcagtcgtctctttgttttactttgttgtggaccatttggaacagacgcaactagactcttttccaatccaaaacctttccaccggatgatgtcgaaggatatgctgtcaacttcttgaaggaatacacaaattgctagcaacaacttaccacttcaactccaacttcatcagccgcaggctctcaaccgccatcacccccaactggcaggcactccttatattctgatgcagctatttcaaaatcaagttccagaatgggcttcagtgccgctgttcaagactggaatggccataccattgctgctttttgtactccgaaaacaggtgctctctctcctattttggcgagggtcatgcacttctccaagcaattcagtggtgtatcatagttgaccttcccttgcactacattcattctgactgtttggaattggtcaacaaaattaacaagcgttccaaggatagatcacctacatctgacctcatttggaaaatcattgattctttatcttcttttcctagtgctaagatctcacatgtttctcgcaactacaatgtaaccgcacacactttagcacaaaaagcactaggaacagatagagatttaatttggaattgtaattccttcaattccggtttcatctgatcttgtaaccaaaatctttgatctcatcttttaatgttacaaatcactttctcaaaaaaaaaaaaaaagaaaaaaagaattattactcttgtaataataaataaggccttgtagaatcaatttctt

SEQ ID NO: 219404 - DNA, 1900 bp, Cannabis indica
aaaatgaagtagaaaaactaagtgatcttatattaatatatgcaagggtaaatagcggcataagtacccaaagttttaagtttgtaagtggcataatcccaatgtttatttttagtggtataagtacccaatgtttgtaaaactgtaaagtttcttcagttttgtcaatacagactaataatcaaataatacctcaagcaaacacaaaacccactaaaaatattgagtagaaagaaaaaaagaagaaaagaaaaataaaaattctaaaatataaatgcaaaataaataaatagaaaatgatggaagatgaatgatgacttcatgaactccaacaatctagttgtaaggctttaaaattaattggactagaaacaaaaataataaaatatgtaataaaattccataaaagaaaaataaacttataaatatcatatttttataactttattattaaatttcatatttcataatattttcatgtatttttgttgctgaaccacatatgaagttaacagttcaaacccaacatagaaattagagcctgggcccaaacgatcttaggcccaaaagagaagccctagaaatattatgcaaaattccaataaaatgcatttgattctctaccgagcctgagctcacactgtgaaactgcaaaaaaattcagggttgaatattcatttggggaagaaacgagagagagagactgatagtcatggcagccagaacattaggaggaagatgcaggatgctaatggcagcagccaaggaggccgctttgaaaacggcatcgtctcctgcctcggctactgctccaaagcctgctcgctccaacgtgggcttgatgaagttggtcccagtctctactgagctcggcagcttccttggctctaaagaagcctctcgaagcgacgccgttaagaaagtttgggaatatgtcaagcttcatgacctgcaggtactctctctttctctcaccctaaaacccaacgaaaaaaaaagggttttagttttcatgcttaagggttatgattctttttttttttcctttatcacttgacaaataactgagaaagatttcattttgaacctctagtttaggtactctgaaatgtggttttaccatttaggtgatttgtgtacacaggagaacaaaagggtttttgttttctcttatgggacagtgtgttggttcactatgtctaaggaactacacagtacaaatggtctatgttagtgtagttcatttctctttagttgagattgctctcttgggttgttcttgcacacacacactcatatgtatgtatgtatgtatatttgtgtgattttggtttcaagagctttgataatgttattatgagggtatttatgctaaaacatgtttgttcgatcaatgccgttacttggtccaaaccacagcaatcaacggctgtggggggacaaacacattaagtgtagccaatttgattttaccaatagcttgtttctcaatggccgtgctttggattacttgcagaacccagctaataagaaggagatcttttgtgatgagaaactgaagactatctttgctgggaaagacaaggttggatttggggagattgctagattgctgtctctacattttgtcaaatcttcttaaaaccggacttggagaaacttttggtatctgggtgttgtgttttcttaggtagaacttctgatggtggatgggttgttctttgtattttgttgttattctgaaatgtgaaaggtagcttgtacttattacctaaaagggtgctaatgtttagaccctgaaaaacatatgcttgtttgactcatctattgagaaatgatgtcatatgatatgaagatggtaaaggttaggcaaaatatatatatatatatatatttgaat

SEQ ID NO: 219405 - DNA, 6528 bp, Cannabis indica
attttgtgtgtaaatgtaataaacatattaaaccattagcatgaaaaattcatgcaaacataaattacttcaaatttcttatattaataactaatcaaattgtaaagggttttatttagggcacaaaacccaacaacatcttcaagaaagtgattggaagcaccctaggttgacaacatgtcaacctgggcactaggtgcatcactaggtcaacttgggcgctgggtgcctaggtgcctcaagcaagaagttttctaattttgattatggcgcctctagcatgtttgtgataggtctaattcatgtctaagtacaaattgagcattttgcactaagacagagtttaatactgaaaccttaggtccatatgtcaacctgggcactatgtgaaaccctaagcgctagggttggcttccagaatgccaaattaacttcttcaagttcccaagcttgcaacttcaagtcttattgtcttgttggttcagaatatagaagggtggtaacttagaaacaacttagcaggatccaaataccgattttggagctcctgaagttaacctgggcgcagggctacagacccttcccaaagttgactactatgatttgggacacttaattccatgattgtttttcttcttgtcacatgtcaaatattgatgtccacatcatcatgatcagtttttgggtaaacataagcactacacatcagatgctttcaaatagagattctctaaaatatttaaagaactaagagtacttacattagtttctctactctattctttaaaaaacttcactaaaattttacttatttattttaccttaaacttttacattacaccatacattagcttctttattttttctcaacattcatttaaaatattatttttaacatataaaatacacaataataaataatgaataaaatatcgattaaatattatttgaagaatgaaaccacagtagcatttttaaaatctgagctaaagtagctcatttattgaagctcattttttgttatttattcacatttctcttctttattttgaggaaaagcacactataactcgtctaatgtgagtgctgtaaactaaaaacacgctatattatatgttttaaactcttattaagatcttttaaaatatattatttatgttttatatttataaaatattatttattttttaaatatattttattaattgttaaagattttattttattttttttaggcgtaattagaatttttacctcttgaactttgatatgtactaaattatgccccttgaactattgagattgttgaatttaaggacttttgtctaattttagtaaaaaaatctaacatggatgaaagtttaggaggtatgatttagtacatgtcaaagtttgaggggcatgatttggtagatatcaaagtctggggaacatgatttcgtacataaacaatcactgaaatagtaaaattgaatgaaattaaataaaagtccttaaatctaaaaatctcaatagtttaggagaaaattttaatagtaaaaaaagttacaggggtatgatttagtacatgtcaaagtttgaggggcatgatttggtagatttcaaagtctggggaacatgatttcgtacataaacaatcactgaaatagtaaaattgaatgaaattaaataaaagtccttaaatctaaaaatctcaatagtttaagagaaaattttaatagtcaaaaaagttcaggggcatgatttagtacatgttaaagtttgaggggtaaaaatcttaattaattttttttatacgatatatataaatattaatattatattttaaaatgaataaagtataagaatttttttatttatacattttaaaatatttttttttttacatttttacctaattttatatttaaatccctattacaactaacactgtaaactaaattgcaacaaaaaaattatatagaaacttctattgcaactaatgctgcaaccactttagaatttcaaaccgtaaatttgaaaaaaaaattaaaaatatatgtagtaattcttttaaaatttgaaaaaaaaaagaagtgtagtgatgtattaattgtaaagaggtaaaaagtttgatgagataaaatagagaatttgaaagtaatttgaaggggtggagttagaaggcgacaggagtgcgaggagcattttgctgtaaatgacctaaaaactacgctaattttttgtaaaggcagagaaagaggaaagcctgattggagtgttgcctcagattgttgggaaaaacaatggcggagatggctgattcgcgtagcaacagagctgctgttcaagccaccaacgacgacgcttccgccagcaaattgttagtttctttgtatctttatctgctgtttgcttccaaagaaaacattttcatttccagactaaagagtactgactttcaatttgtatggctgaaaaggtcctgcgttaaaaaagggtacatgaaggatgactatatccatttatttgtaaggagacccgtgaggagatctcccataattaatcgtggtaaacaacaattaagctttagcttcttcgttttaagattatatttgtgtgtatttgattagtgatgggttaatcgtctttcctgctttgtatatatcaaggctactttgcgcgttgggctgctcttcgacagcttctttttcaatttctggacactgagagtaatggggatgaaaaggttcaaacaaagaagcagatattatcacttggagctggttttgatactacgttttttcaattgcaggtgtttctgagtcatcatcatcattattattaatgtgatagagtcagtactttcagtttcagatgttcctttcttgtacttattttaagttggtagatgtaagaaattacttgtaaatattttggctcagttagttttgtttaatttctcagtctttaaatgcccaaatggtttaaattgtcttccagtgtttcatcactagtttccgaggacaacacatgcatagatatacatattacatgtataggattgtattgaattttttcttcgttctctttgccaggatgaagggaaagccccacatttatatgtggaagtggattttaaggaggtgaggaacattttaaaccttcattactattaggaatttgttatcaaatgcagtttcttttctttttgatatgaggaagcattatgtctacgtaagcttataatgtattagcatgaattgcttatagaaatttctgtaactaattccaactgtttttgaccaagagggttaactttaatgctttctcttaaaagaggaacagataaatcttttgcattttttgtcatttgctcacctttatatctttttattttataggttactagtaagaaagctgcacttatagagagttgcagtcagttgaggaacaaaattaatccatctgcatccatttcacaaggtagatgaacctcaagttacattcaaagttactccctggaaagaattttaactataacgtatagctttcttctctattacatgctggtcatggtttttttgaataagatatatgaaattccataccgagaatgctgagtatggatgtatatgttcagatttctatactttgagatttctctttgatttaacaatgtttgaatttagagtgttaaggaactgcagttagaaacaacattttaaacacttgccttacgtataaaatggccttgcaactcttttttgccttaagctaatatttttattgattatgtaaatttttaaatatttatactagaaattttgttgattatgaaaatttgatgttttaataattgataggttaatgtgtttaatttaatgtttatgcaagtgataaaatttctattggggtatctgtcacttttcagaaaaaggggaagtagttagtgataactataaactgctcccagtggatttgcgtgacgtaaacaagttagatgacatcatagtattggctgatatggatctcaggtatgtggttagagtcattacttagaacaaaaacgggtatgtcaaaaatgtaggaaatgagttcatgaaagaagggagacagtaggaaaatgaaccttttgcttattgtttcttgaaacatcctgatcttaagcatgttagatgtcatacctattttcccttgaaaaagagaaggaaagagacttcttattatcttcatttatcgtggaggaggattaaatttcttcattctaatatttttatcagcttgccgacttttataatagcagaatgcgttttgatatacttggatccagattcaagtagcgctgtagttggttgggcatcaaaaacattttctacagcaatatttttcttgtatgaacaggtaatgtgccttttcacgcctacctattattattatttggtgttttctttgactgcgtaagacagataagtttcaaggttgatttaatttttttaagtcaattgctgaactaggatcctttcacatcttattacaatagattcatccggacgatgcttttgggcaacagatgattaagaatttggaggtctgtttctttcttgttgtcatgatcattgttgttttcatttgttagtagtctttctctggatttccttgtttcctattcgagtcttaaagacttctctttttctttttcttttggttcttaaaaatgatttcattcagagccggggctgcggactcctgggtttatatgccacaccaacgttacaagcaaaggaaaaactttttcttgacaatggatggcaggtaggtgttccatgattttaatatctggaaataaaagttcttcatttcaatattttggtgatcccatttttaatactggcatcatgttcaacatgaggttattgcagagggctgttgcttgggacatgctaaaagtttatagtacttttatcgaagctcaagaaagacgtaggtatgtcctatgctctgaagtgttagtgaagttatgacggattattcaattgtgaattgtcataattgacttgaattaattacactagtttggtagtgtttaaatgctcaaaagtttgggtgttaatttgtgttgctacttgttatccttgtccttgaaaattgtgaaatttgtgacggaccatcttgagaggtgtttacaactactacaagtcttagaagagtcgccagtttacacatttatgtcatgctggcttgctgagttgataacaacatttatcaccataagaagatcacaatgagagtcccccccgctttgcatctactttgcagttgcatctggtttaaagggtaaataagaaaggcgggtggggtggttctaggttcttctttacatgaaaatgacagctctattataagtttattacctgattttggttttattcagctccccctccctccctctctttcctttaaatgcagtctacagttgtagataaactgcagttgtgatatagtatggtataaatcctcttttaaagctcttaagtttctcttactgtgcatctttgtgctcttgctttctaacttcttagtatgaagctcacaattgctcttacatatttggagaaagattcttatcagtgatcttgtgttgattaggattgaacggctagaactgtttgatgaatttgaagaatggcacatgatgcaggcaagtcaaccctaacaaatcttaattaatatcaatttgacatagatttatattagttgtccttgaaagctgtttccctgttatttgcactaagcatgcacatgtataggtcacacacttacgaatcatacctgtttaagttttaactactgtgaaaaatatattttttttattgattatagaataaatatacaatacaaacaaaagcttaaataggttaagctagggaaccaaacaaactaattgtgaacaaggtacaattcattaaccgaaccaaaactaagtgacactgtcagagtctaatatactatctcttcacaatattttttaactctctcaacaatactattactctgatttttatgcctcctttaagtggtgatttatgtcacacatgctatttatttgatctaaaatttgtatggtatttttaaatttaaataactgtacataaatacatcttcatatgatgtagaagtggagctgacgtgggcttccttaaaagtttgttataatgtaatgttgatgggtcatacacatagcatggggtttcgatttttatttatttattttttgtttttcttacgtgatttttgtattggaactgatgattaccaggagcactactgcgtggcttatgcaatcaacgatgccatggtatgtccgcatatcactaaactcatgctctcacttttgttaagctcagttcatatccttaacttgtttgtcatgtgattctccaaagcttctgacattttcatttttcattttctaaaaccagttaaagttatcattttttgttgaggtaattccgttttagtctagaaccaaaaccaaaaaaaaaaaaa

SEQ ID NO: 219406 - DNA, 2160 bp, Cannabis indica
aacataaacagctgctaatttccaaattaactaagcgggctttacagtgatcgagctcgaaatccttcattgaggcaatctcacaaatcacctctatgcacatgatatttttctcctagccttgtaaatactgtccctgacctggtataaacactggggaatgactattatacaaaagtgagagttcccatcgtttaccatagtttgtggttgtacacgacttcgtgggttgcgttgttcgagatcctcctcttgcggtctttcctcctttcaaccaagttgttgacctatatcaggagcatcggggcctctattacgtgtagagtcgtgaagaggttgatttagatcaagccattcctggccattcttgtctacacgttccctgtgattatgagtattgtcttgacattcattatgacatctagtattatcagttacctgagtatcattacgacgtcaatttgggactcgtggcagacgttgggtttgaatcgtgtctctccctacgatgtccgcttgtaatgcccgcatttgttcttgcatggccatataatgcgtggttgtgagctaagtgatgccctcagacgcaagaacaagtgtgaacgatggaaaatgcctcacagtagttgttggcgtcaaagtttatcctacatgtctagctgtatcagggaatagattgaaggggtgaaacgggtacaacccactcctcctattatggcttcaacaggggttgttcctccaccaggggttgttactccgccaagtgatgttcctccaccatgaatatgaatattaagaatcctaacgttgaaagatccagagtttttgttcacatttgtctgatccatagccatattgattctcctccagaaatcttcacatatacatggttcccatagatagcgccaaatattgtcgaaagaatttagacaacaccgaattcgtgtgagtattcaaagtcaataagaatactcaatcaaaaacatgtgagtactcacttagagtatggagtactcaaattattggctactgaacagacaaaataaaagcaaaaataaagagagaacaagataattatagtggttcagtcagagctcggtcggtttagtccactattgcaaagatttctacttagtttatttgatttgaatcactgctttatatagaaagtaagtatcctttaaacataattgatcgatttcagaaccgtttttacattaaatgataataataattcaaagtaaatacctaaagaataaatgaagaacagtttaatctattcttgtatttagtgcaacaacatatgtgacttggtgagccgcgagttgcatgttcataattcaacactcgagctcgcaagctttaagtgcacttatattcgcagggtggccttcgggtttatcgtttagatatttgcatttatctttgatcgcataaatggacatctcatgtgttgacaagatggaacatgtgagtttctaacaaattaatcaaacacattagtcactaggaccactcttagctaaagaatcgatatttattagtcgtaagaaaagtctatttagtcatcacatatagtcgatatatttgtgaccagtatcaaattctcttgatcttgcttattttttatgctatgcgaggcataacatgcgattaaatcatatctcggtcgcatcatcttgggagttctcatcaagcaaggttagctctatggaagctatctattaacacatcatctttttcatcgagaactcggtccacgtgtcaattttatatgagtactcgtacttctaagcaaacaatttgtaccataatatataaaaatattatctttatatattattttatgtattattttcaatttattataaataaaataatttttttgaatataataaaataatacttttattaataaaaataattcaaaatctttaaaatagtgatattaatttgttatgtgttaaagcataaaaattttcgagattttaatatttttgtaatattttaaaaaaactaatattaataataaagtaagaataattttgtaatacaatacttatttcattccattcacaccaaattaaataaaacgaaattctgagtacatgtttattataaaataaatcaattacaccataatagtatttccattaccca

SEQ ID NO: 219407 - DNA, 3576 bp, Cannabis indica
tctctctctctctctctccttggaaagaatatcattacactttagtccctttattgaaaggggggtgcgcttgagtggacagacattggcgagtatcggagattgaaggacggagactcaatttcgacgacgagttttagtccttcaaggacgtaggcttgatttcgaaggcaactacattatcgagctcggctggggagttggctctagttgagagggtgagcgactggccaaagcaccgttcgacggtgggtgagatcggtggtgcgagtggtggttggtaagtgattctttgattttggtttggttgaagatttttgctcaatccagttaggattttagtatttattgattgtggattcattgtttgggattcaggttgattggtttgcttgggtgggttattgttggtccaattctatttgtgtggaggagatctctgggtggtgttgatccatggggtgggttgggctggatactgggggttttgtttgattgaggcttttgttagtttttattgtggaagccatttagggctgggttagtgtgggattgattgggtgctggttattggaagtgacttgtgtgttgtctgagtggtagttgggtgtggttggtgcgtaggactgtaggcagtggtgagatagaaggtgggttttgcttgtgggtattagggttgtgtagtggtttgttggttggtgttagtggtaagggactagagccaagcatgaatttggaattggtgtctaagctgacaaaagtgttgaaactggatgaaacagatagtccttttgtagtgccatttgatggataactaggaaaaagagagaaggaggtcataaagaggtaacggctggctggtagtaacgacttgtcacgatccaattgtttatttaatatagttttaatgttccaaatgtaataaaaaaagagatagatatttatcattccgatcgtcaatccactttccataataataagtaatttgttaacaaggtagaaagagattggaggtgtgtctggtgtggtaggtcataggatctaagccaactaatagagaagaaattgagaatgctatgaagagtattttgaagattaatcatcggttttaggtagaggaattaagcatgaagagtattttgattcttttttggaagcaaagaagatcgacaacgtgtttctcggggtgggccttggatgtttgagaaacaattattatcctttatgaaaccaatgggactaggagaggtgtctaagatgacttttgaccatccttccttttggatctcaattaacaatgtgccacgtgcttgtatgtctgaagtgtttgcttgtgaatgaggtagtttgatagggaaaattgaggatgtaagagtggctaatggaattatgaagatccatgtgcgcatcaatattactagacctctcaaacgtggcttaagagtggccattaatgagaggggtacggaggtatctctactctttcaatatgagcgcctcttggaattctgttatgattgtggtattattggccataatgctttagatttccctcttaaagactttcaagatgaggaaatagggccaatttagaatggatggtatagatcatggatgtgtgctcctagctctctacctaggattcggggacatcgtggtagtatcaaacaaccttagtcacattttatgaacatgagtgaagtgggaagaattgtggaggctgttaaatgctcacagccaagaagaaacacagtggaagagtttgctacaacatcttttttagaaagttaagaatgggaggaggagctatgtagtagtaaggtggttaccttggaaagtgaggttgtaactagggagctcccttcaatccaaatgataagaagtgacgtacctcctggccctcttgcttgtcttaatgctaaggaggagtgcccaccttcccctagcaatttaatggtgtctccaccgtaacatatttaactgcattctaatagtattctgatagaggattcagggtccattgcatctacattggtcgaggtgcatcaaccttgccctcctgaacaagtatagcattttggagagtcccatgtgcctgctaaatttagaagtcatgataaaggaaaaaccattgtttgccctaaagtagagatgagtaagttgttttaaagtacctttgagcctttggtccaaacccaaaagaagaagacgtggaagagacgtacatcttccttagatggatgtggtgctagtatgtaatgaccgcagtttagaatatgaattagttaaggaaattagcattaattattgatatttttatagttatttatgaatttaattaattgtgggtctcattattaaaagtgggcactagagttataatttctcaattccagagattttattaaactctagaagtaatatttgagttatatatgaattatgctatgtttataatttttgctcggcgacgatagaaaatgcaatagatggccatttgaatcacatgggtaagtctagaaccttttttttagcaagttaaatgtggagaaaaatagaataccgagtttgagcggggttataatttttgaccattttactcctgggcttgatttagctcaagtttaagcaccatgagcattttagtaatttggcaagtgaggggatatgtggctattttagggcttgacacctagccaaatacttttagcatgagattaattaatcaagctttatttcattttgaatgaaaattagaaaaaagtcaaaaaataaaataaaataaagaacacccttttctctttcttccttgctcgaccaccacaagactagcttagaattgggatttttctggtgtaattgaaaggtaactagctgaattcaagtaggttttaagcaatggtaacccctagaactcttaatattttgtttttgaagctttgattttggtttattatgcaattttgaagtatagggactgttcgggtttgtatgagttggaattcaatttttatgttcaatttaagtttgaatgatgttctagtagctggtttagggttgtggggtgatggatgcacaagtttgagtttgaaaactcaagcttggttcatccatggcatgttttgattttatgtatatttctagattctgttgcttggaatatgttgtgggaggtcaatataggtgttttggaagttttggtgaagtttagacacgatttgagcaggtttggaattgtttggggaaacctggtgcaaaccagttaactggttttccaggacctgtaaaaccggttaaccaattctggcaggttccccgaataattctttttcgttgattcgtgtccattttagagccttgtttgggagattccctgtttcttagggtattgtagtttcaattattaatagcagaaccttaagttggaggttcgagtttcttggattagggttttggcgtgttatttacctagttatgttatgtgattagggcatccatccagcacgagactttccgttcaggtcggccaactcacttgaattcaaaaacgaggtaagaatagtgtagaacatgtga

SEQ ID NO: 219408 - DNA, 1529 bp, Cannabis indica
tgcggtgcgggcggtttgagcggtttgatgtacacccctactaatacagcttgggattcttctttttcttttgctcatcttcttcatggcgagttctttggctctgatcatcatgctcttatcttgactcttcactatcagtcctataactcccgcccgaacccatgtttcattttcgataaactttgcacctctgaattgggtttcgatgattaccttcgtcaagcttggacttctgggacgattactagtgttcctgatccaatatccaatattattagcaaactccaacactgttctacacatgcatctcacatagtgaaaaagatccctacccctcactttctcatcaaatcaagaacatctaatcccaacttcaaagtgtgtagaatatcccccaaccttcaaactctcaactggccttatgccaatctctcgaaagtgagttgaatagacccctctacaaagagaaagaatattggcagcagcgttctcgtatcaactggcttaagcttggggacaagaatactcgttatcttcatcacatagcctcctcccggtgtgctatcgaccaaattcgatctcttatacatttggctctctagccattgattctgcttcgatcttgtctaccattgaatactactttgctcagttgtttaccagtcagaatcctggcaatgacattattgatagagttttagtcgagatcactgagcatattacagaggttgaaactgctagccttcaagctttgtatactgcgagtgagattcaaaaggctgccttctaattgcccaatgacgaagcacctggaattgatggtttcaatggtgcctttttgttggttttatggtactaaattaggtacacagcggaagagtttcgtagattattattgtaccatagcccctaggatctccagatgtgtgcacattaaatcaaaacaataaaaataataagtttagagtatatttcttgaagcctatcaaggtattctcgacacttctcgtaagttgtatcccttaatccaattaatgaagaatatgcaatttagactcacatcaatgtcttcaaacacttgtaattgtcgtttcatttgactacgtatcattgcctaaaaacgaggtcaacaaataacgtggatgactgaaaacatgttatacaataagcgaaatccaatctttccaaaatgatcaaatattaattctcttgaaagtgttaattttgtgagtgaattcaattattgagctcaaatctataattgaattacagattaactattcattatgaattaatgatacttaaggaattcaagagacaattagaagtgtaaaataataattttgaccaactccaattatgaactaaaaaattaaagaacgaactacttacatcaattatattaatatggactacaagaaaaaattgtgtaaatataattttatattatctaaaagtgtaattccataatcataatcgagtaataataatattaataaatcaaattattttattgatgagatgag

SEQ ID NO: 219409 - DNA, 3537 bp, Cannabis indica
ttagtcacaaaaaaattatgttgtgatcactaaaaagttacagttttttgtagtgactatgttttagtcacaagtaattttttgttgtgactaaaagtcacatttagtccctaaaaaattatgttgtgactaaaaagttgtcactaaaagtacctaatttttgtagtgccatttaaaagttaggttttcaaaattaaattttgttttcttcatgattgaaatttgaatgtttgtgatgctatcataaaagattttgtgacattaattattattgattaatgagtgacattttcttgaaccattttttgtgtgggggccttagctaagaaaagttggaaaagaatttaggttaactcaaaattgaagataggaaaaaaaaaaaggagaaagagagagagttaatgttaagttatggtaagggtagttttgggatgaaaattccatttaactagatcaactcgaattcaacaatgtcagcaacatacaaaaagtaaattatattccgaatcagtacgattaacatagaaacgaaacgctctagttataaagtgagaaactcgattggtaaatcgtttgtaattttaagtctaacactattacaaagtgtcatattgtaatatattaatgtttaaatatattagttctatatatgttaatttaatttaataataattataaaaaaattggtaattaatcattcccaacaaatttatgcatgaaaaatatttataatgattaaataaaacttatgttcctttcaatatgaaagcttttgaaaaaataactttcccaaactagatcaatttagataattttatatattctggaatattatgtacgtagtgtaatcttatatatgtatgcattaattaatatataattatatataatgacaaaaattaagtaattaaggatagcataaaatatatattattatgtcatatatctttttttaatcgaagagagaatgatattgttcacatatacatatcataattatgggtaattattattattaaataaaattaactaataaaaaaaagtatattgtgttagtcttattattacaaccgaaagtaagacttaatttttgttaattattaattagtctctttcgatctatctatcgtttgctccttaccaaaaggcaaaagtgattaagaaataaattaattaattaatagaaaagttaaagattgtagctagacaatatatatataatacttttttttttaatatttcgtatgtataatattatttgttttcttatattacatatacatatataatggagaatattaaagtattttttttttatttttactatcatttttttttgttatttttaagaaaatctatataacaattaatagagcatgcatgcaacctaaatttcaatcgaaattcacatagcactacaagaaatgtcacttttgctagcataattttgtactgaaaaaagtttagtattgcgttgatcacaaaacggaggcgaaaagagtttgcaaatcaatattggtattagaactacttttgtcggggcaaaataaaaagcgtttgcaaaaataacttttttcagcacgtaaatgcactggtaaaagttagatttttgctactgtaaatgtataggtaaaattttgaatttttggcaaccgcaatttgtgaaatgcgctggtatttttaccagcacagtaacgaactgcgctggcaaaagtgacatttttaataacaatcaatatagaaactaccatagcaacccaaaccgtaaattttttcaaaaaaaaaaattaaaaatgttgtatagttattctccaaattttaatttgctacataaatttaatttaaacatattatttttcataaatatatattattggaataaggggaaaaaaccttattttttaccctatttagtaaaaaaaaaaacatatataggttatttctgtatattatagatagatagataatatataatattaaaaaatgttaatattgggtatatatattttagaatcgaatcataactccaattaagatggagatcaatatatatatacatcagaaagcaaatatatatatactaaaaacttttaatcatataatatttacaaattatatatatcctaattatttatattaatataaacgatcaattaagaaaacgtaagcaagacccttcttttcaattctatttgctttgaatttctagttgttatcttgaccatgcacccaaaaaaaatatattcttattccatataatcaaaatatatatataataaaccacgtaaatctatatacagccaagcatgggatatagatatatatctagatccaaatattttcttatctttgatatggggtatcatcttttggtccccaaaaaatattctatttttgtaataaatcataaaaagttagaatccattattttatctgttaattatttttttcactacatatatagcaaaaaaaattctaatacatgtacaaaaaagaaaaagaaaaagaaaaagaaaatatattatatgcctatgatcaacaaaaaagaaggtttataatatccttataataatattattattttaaataaataaaattaatattgctcatagaatgagtcgaagaatcgaatttctatacttaaatgaagaaccttccaagaaagagagcaatatattgttatatttatattaatatatatatatatattatattagtcaatcccacgttctttatatatccccacataatatttgtttgtgttatgttataatttaatattattttattttattatatatatacatgtatgcatcaatatatatcaattccctaccaaactttgaaaagagaacaaaaaagaaaataaaaaaatattactttgctagggcgaaaaagagagtatacttctaagacttattataagacatataactatatggaagaccctaatgactataacaactacaagaggagccaagaacaaggtcatgatcaagatcatcatagtaatccggtgaagtatcggggagttaggcggcggccttgggggaaatttgctgcagagattagggatccgtcgaggcaaggagctaggctttggctcgggacatttgacacggctgaagaggctgctagggcttatgatagggctgcctttaactttagaggtcaccttgctattctcaatttccctaatgagtactattctagggttttgggatctcctccttatcctccaaacatttcattttcgactactcaaaattcttcttatggtgtttcttcttcttcttcttcttcttctggtccagctggtcagggttcttctggtccagctggccaccgccaagaaaggcaagttttcgagtttgagtgtttggatgataaggttttggaagagcttcttggttctgatcacaaggataagaagaaataattattagtaagagaaaatagtcacattaaaattataattatcaatgcatgatcatgtttttgagtgctagttattagtacttgaaaggaaaattatat

SEQ ID NO: 219410 - DNA, 2465 bp, Cannabis indica
aaaaagaaattcacttcaagcactgattaaaatccatatttagcaatggtacatgacaaacttgatgcattaagtaaaataacaatgttttaaattaatgattatcgactgtcccataaaaaacttatcgatgtgtaacgatgcttaacgatggtcctatgttacattttttaggcacaataaataaatcaatgcttaccaacagcttaatggtaacgataatggaaatttgatttcttttaggggaaaaaatgatatttagcaatatttaatgatagtctcatgaaaactatatttttttggcaaaaaaatatactaaatcaatgcttaacgatagtcttatgaaatttgatttttcaggcaaaaaaagatgcttagtgatacataacaatggtttagaatgatcctatgaaaacttgatttttttttaatgcataaatgatgcttaacgaaaatcaagcgatggtcctatgaaaacattcattttaggtaaaaaaaagatgatgttaaatcgattcttaatgatggtctagtgatagtcctatgaaaacgtgaacttcttatgcgcaaaaaaaatgtttaatgatgatctagcgatggtcctatgaaaccttaaaagttttaggtgaaaaatgaccctaagtcgatgtttacaatagtcttatgaaaatttaatttttagataaaaaatgatgctaaatcaatgtttattgatgatgtagtgatgataccatgaaaacatgattattttttttaaggcaaaaaacaacatgaaatcgatcttttgcgatcatgctgtaaacatttgattttctaggcaaaaatgctgctaaattgaggcttagctatactaaacgatacagaaaaatcaatgataaattgatgcttaatgacaaaccctatgaaaaattaaaactagtgaaaaatcgaaattttaaaatgtaattcacctcaaactaagaacgaagaaagttatgcctcaacaaaattttttaagaacgtcatcacaaattatcgctaaatcatcatttcaatatgttccattatgcttgccttgaaggataaagttttaatacggttatccttagatattgttaggtatcgattgaacatctttttataactaaaaaaaaagtttttgtaagagtatcgctaagtatttgatttagcatctattttttttttttgccaacaaaatcaagtttttatcataccattgcaccattgttgagtattgttaagcatcaatttagtaccttgtaaggtttatatttttgacagattatattaacagtgattccaatcttatttgcggtgtttatctgttctaactacatgtgaatattctgttagtgtccacgtcagtcagttatgtattaacatctgtcatgaaaatgttgttaggtcgattagaactgtctgtctatatatagctagttctattttgtgacttggttaactagctaattcattttcttagttaattcagtattatcgcgatgtattgtgtgtggtatctggtattgttctttgtttttacaggtctgattgaatagcttggtgatggttatccatagcagaaagatcagagcctgttcgagctgagttcaaactgaaggaagttcagtgttatcttcgtcatcagatctgcagggatttcagattgaagaaaagtgtcgaagaagaacttagctgatgcacaggaaatcttgtgtattcaatcaaggatcttggttgatgttggtaatatttcactaaatgttgtaaagattgtattaaatacttaattgtgaactggtgattgtaatatgaatctttggatttagtagatgttattaccctagttcggggaacccaagcactagtcggctgagatttgttctcagtgcagatgaagcttgtaaatcattgtcttcattactgtttactctttaacctgattcttgaatgttaaagttacaattgctaaatgatttcttaagtaactcggtaatctgaatctagtaatcaatccaagttgttctttcatacctaaacagtaaattttcatgggattgtcactagaccatcatcaatcattgattttgattgaaaatctgtaaaattgcatagtttcaaaatctttaaaaaaaaaaataacaaatagaaaatcttgtgcgtaagtgtttgaaattcatgaattagtgttctgactaaaaaaattatttattttaagttttgaattgaatttttaattattaaaatataaaaatgttgattcaatggtgctatcaatatgttcatgtccttttaataatggtggtggatagagagaagaagaaaagagagaaagtggaagaaatgacagagaaaaggggtagggctgaacatcgggcgggtttaccgggtttcgggttggcgggtttcgggttcaaaaaatgaaactgaacccggacctgaatagggcacgggttggcgggttggcg

SEQ ID NO: 219411 - DNA, 3092 bp, Cannabis indica
atcaagtgtgcatcagacccgttggattcctgggcacaactccttcctgccttatgttttttttctggttcacacactgatacagtttcggcttttatcactgaaaacagagaatggaaccaagctatgttgcagacatttttctcccaaattgatgttgacaggattcttacaataccactaagttatttcccaagtggagatcaattagtttggcaccatcacaattcgggtctctatactgtgcaatctggatatcattttgctgcatcattagcagatgcacgtgactgctccacctcctcttcggatgcatcctggtggaacttcttttgggctcttaagcttcctcaaaaagttaaaatatttgcatggcgggtctaccatgatgctctaccagtagcaacttccttggttcgaaggaaaattcattaatgactccacttgttcaatctgcaaacgagcttgggagtcgattgggcatccactaatttggttgtaagtacgctcgggctgtatggaaacatttaaatctgcactttgattggcaacagtcgtcctccatgaggcgtggtgattatttggtgcacttagcctccatttattcccaatcagaaatggagcaaattatatgtacactttgggcaatatggtcagaacgtaactgagttgttttatttcaggattattgttttatttcagacagattagagttgtaatcttttcttcatctcatatttatgtgtatgttttattaagagttgtaatattatttaattttttgttgttttattattattattattattattattattattattattattattattatttgagttatatttttggtttctaattatattgaagcacaacaattaaatttccaagaagctatttgaaaatgggtaaatttgtgcaaccatgcatttattgttactgatatatgctttatattatgtaatctaacgcttattgttactgatacaaaacaattacaaattaaatatacacatttaaaataaaaaaactaaaaaaaaacattacacattaaatatacacttttgaaaaagaaaaaaaaaaaaactaaaaagccttacaaaacaataaaacattataaacactaccaataatttggagagtaacagaactatctaatttaacttttacctggaataattataagttttcactaagaacttcattctcatcccttaaccaacaaaaaaaaaagtaactactaacaactcctcggacgataattagaagagtaatagagatatttaaacacatcccattattaaacattgtccttctattctccatagaataaaactggtgtggtgggcctcaattagctacaccaatataatttgtgtttgtgtactacctttcacaaaaaaatatatacataatttgtgtacaaacaaattcccataaatttaataaacctattttaaatataatctaattttataataaatcataattcagccttattttaataacaaatcaaaacaaaaagtctctcaatagactgtccatggctgatctatatttcctgagcggatttgatcaaatccaactacaaaagaattcgcatgttttatattaaattattttatttttaaataatgtatcatatcagtttcttactcatgattttgtaaccagttgtaatgctttgatttggttgttattattatatatataatagagtactagtagagtagcagtccgatattattagtaattgtttattatgtaattatgaaaatgtgacatcgcttcatatgtacattgaattttcttaaatagtttctgtcactctctctgtcctttctttaattttttttttagaaaaaacacgtgctctatttatataaatataattaattaactgtgtataggttccttaaacactttgttgttactaattccttgtcacccctttaactttgtcatttatattattataaaaattgttatttgttaatgtgtagcctagctaaaaggaaaagtcattagagatgaaaaagacgtttatcaattctttttaagagattgatgatgtaggtgtttgaaattatttgttcaatagatgagcacgactgataaaggtatatattatcatcaaaaatactatcaatgagtattcacctaggtgattcccccattgtgcataaagcttctaatcattcaagttcatataagggaaagagagaaagagaggataagtgaaaacaagaaattggattcttctcaactaaactgtgcattgtttacatgagacctttatataggcaatgaggcaaagaagagttagttaggataaataattaaggtgacgtttggttggaggtaatgaaattaatagaatggaaaggaaagaaaataattttcattccattgttttgttttggttggcatattaaagtgttggaatgtcattccaataaaagggtctttccaccattttggtggaatgattattccattttgaaatagaaagaaagaccattctaatgtatgatgatagccaataaaaatagaagcactaagtatcatgtcacttggcactagacatctgtttagtttttgtcatgctcaagatgacatgtcacttggcactaggcatcgcctcataggcaatatgttgcccaagaccaggagacatatctcttgagactttgacatagtttcgtttcgtaattttaaaaatgttccaagcgacattttcactgtacagttttctctaaaacatgcatttcacacttccttttgaccagaacttctcgggtgacttagtgcatggttacttactgcatgtttgacatcataactaaaaaactgttttttgtttttaaaaacagaaaattattttttcaaaacaatttggcttgtttggcgttgattttttgaacagtttttagaaaataaagttacaaaaaacaagaattttaaaaacagcaaaatgttgttttctgttttaaaaaccaattcccttttggtcaatattgtttttaaaaaatactaaccaaacatgagttgtgttttaaaaacattaaaaactattttttattctcatt

SEQ ID NO: 219412 - DNA, 4328 bp, Cannabis indica
ctaaagcactcgataactccataacaattaacaactctcaccaaatatcggagaatctaaagccaaacccagcaaactcttcccctctaactccactcggctaccagaaagggcagccctcgtctacggcgactgcccttcggattgtacaaccgaaccacttatacgtggtcggagaccaactcacgttgtctccgtgtggcttcatccatcgtaacatggctgagagtgaagcctggtcaagtggtatcagtcatctctcccaacgttccagccatgtacgagctgcaatttgcagttcccatggctggcgctgttctcagcaacatcaacacccgcctcgatgctcgcatcgtctcggtcatgctcctccattcggaatccaagctcgtgttcgttgacgaactctctgttgatctaatccttgatgccatctctagattcccactaaacactcaaatccctcgactcgtcctaatccgtgatcatggagtggtgtctagtacttcttcttcatcttcaaaccactttgataagtttttttgcgagtatgaggagctagtcgcgagaggagatcctgaatttcagtggttaaagcccacgagcgagtgggatcccatggttctaaactacacatctggaaccacctcggctccgaagggagttgtacagagccacagaactattttcaccgtcacacttgactcacttctcgactggagtgtccccaaacaggcggtgttcttatggacactgcctatgtttcatgcaaatggttggtgttacacatgggggacagcagccgtgggtgcaaccaacgtatgtctccgaaaattcgacggccctataatcttcgacctcatccgacggcacggggtgactcacatgtgtggagcaccggtggtcctcaatatgttgtcaaacactccaaacgttgctacactcgaaaagcctgttcaaatccttaccgcaggagctccacctcccgcggcggttctacaccgaactgagtcgctcggttttaaagttagtcatggctacgggttgacagaagtgtgcggactcgttgtgtcttgcgcttggaagaagaagtggaatcttcttccagctactgagcgcgcccggctaaaggcgcgccaaggagtgaattcagcagcaatgactgaagttgatgttgttgatccgaattcggggttgagtgtgaagagagatggtttcacaatgggggaagtggtgttaagaggtaattgcgtcatgttgggctaccttaaagatgaactggctactgctaaagctataaaggaggatggatggttttacacgggcgatgtgggagttatgcacccagatgggtatttggagataaaggacaggtcgaaggatgtgatcataagtgggggagagaacgtgagcagcgtggaggtagagtcgattttgtacgaccacccggctgtggacgaggccgcggtggtagcttggccccatgatttctggggcgaaacgccgtgtgcttttataacggttaagaaagggacaagggtgatgccaaataagatggagattgtggagtattgtagagagaagttgcctcattatatggttcctaaagttgtggttttcagagatgaacttcccaagacctcaacagggaaaattcagaaatttattctcaaagatattgcaagaaccatgagatctccgactgagccagtggctatgcttagatttgagatacccaaaaccatgagatctccaataattgggccaactgcatggattaggatctaaatgaactaaattaatgtgcatctataattggttgcccacgtcttcttaatcattcctcatgtacaatttccaaaaccaattaaaatatggatcttcttaaatttgatgttccactttcaataatattaaatgaaactaaaccaaataatggaatgggtacgtttcattaaagaactcactattcaataatatattgagcatgccttgaggtttccaatataaagtcatgtctcattagttgtcagtactccatgtgttgcccaatctctaattaagagcattaacaatgcttgatgcttaatatggtgccaatagtccccatgtaatcctaaaataatattttattgtcactcgtatccacaacatttttaatacacttatttctacatatagtacaatgttgtcaccaatattatcccacactattcatttcctcatgtacaatttccaaaccaattgacatatggattttttttacaattctgtttcatttccaatgatgttcaatgcaatcaaaccaaatactagacgtgtgtctcattaaagaactccctattcaataataaaatgaccagtactgcctagtgcctagaggtttctaatatgaagtctcgtacgttccctcagttattacattactagtacttgttcccgaaatatttaaataagaaagtacaatgaaaataatagtaagtcttcaacttttattcattttaaaaatagaaagacatcaaacaactattgggtctggcaaaaaaaattaattttctgttcaaaactcaaatctgactattttctactttaaatctaacatcaacttacagataacatacattaatcatacaatttattcttaaatcaataaatctataaataaaaccatacatttcaaccctaaatcacacaaaatacaagaaaataaaatggaaaatttagattcatggcgcagcggtcgtgattcagagatcctaggtcttgggttggtaatcgtccgtgggttggtgatcttcgattggaggcgcggtggttggttttcgtgggtagggtcttcgtgtgcgtgagaagaagagagggagagagagaaggagtgagttatgaaagaggtattcctatctaattaatttgatatatttagattcaatactgtatccctacccacgaaaacatttattacaatcccttattcaatctctatttttgatattacgtacatgtcggaatattttttttatatttttttataatggtattctttatagttacagtattatgtctataaatttttgaacattttctggtatttcaatttaccacgtgtattcaaaacacttcaaataaattttcaacacgacaaacaactcaaaaattttaataaatttacagagatgatgtcataactatagaataccgatgtaaaattttttatttgaaaaaaaatattccgccatatatttttagacacagtggttgactgaaaatttgtaatacaagaagataacgaaaataccaattctatatatttattgatgaatgatctatttttgaccgaatgaatgatcaatttaatgtatttattaatttttgacaaatgataatgatccttttttaaaataatatgcataaattggaaaataaatctttgattaaatggatgcaatgaatatgtgttatcatagttattattttcaatctgccagctgatattgaacgttgaagttctcgacaaaatcatttatgtgaaactgtcaatagtgccttagaaataaatgaattcaaataataagttaatgctaaagaatatctccctaattaatataaggtgatcaataattaaagttggttgttcaagctcataaatggtcgatttcctatttggaataatttaataaaaaatacagatggaaggtgaaataatattccagtattttaggaaaggttgtttaatgattaagtaataactgatttacactttcaaattaacaacaatgtgtaataattaattataatcacacattaaaagttgttggtttgttagtacaacacccaaacttccaagaacaaaataacgtataacaaagaaaattaaacaaacagaaaaataatcacaagatgaatagaggttcaaaactttttcctctctctcaactccctcatgtttggtttagttcactcatttttggcagtaactagctttacagactcaggcaaaactagaatgcgttctacactttactatgtacaaacacagagtatacaattcgagatgaaaccctttcaattcaactctctcttttgatgattttctctgtaaaagttcactttgaaagaaggagaaatgccttatataaaggctgccgaacatggcgtagaagattgtaatagaaataaccaaaaattaaaggaaaataatctaactaagtactagatcattttagtgtcgatttgagagacgttgctttttaaaaaaaatcaacaatataaagacctccccaattctaaggtatcggttcataattgacacataatgacttttagtgtcg

SEQ ID NO: 219413 - DNA, 3150 bp, Cannabis indica
tcggccactacattggccttcccagggtggtaaagaatctcacaatcgtaatccttgacaaaacaccaccaattacaaaaacaataacaactccaacaacaagagcaacaacaacaaaaataaatccaatcaggatccattactccttcaagaggttagaagtccacttccaacttgcagtttaggccagtcacttccctaccctggatcccttttgtgggcttgaagttccccttgaggcccactcacctcaatcacaccatcctgaaggaaatgggggagtccaaaagcctcttgaaaaagcgacacgagagggaaaagagtgtccttcaaaagagacgtgacagtctctcaaccgtgaagagggttgagatttttgaaggcctctgcaccaccattgtagtagggccaatgatagacattcaggccctagagaagcatttggtgctcaaggtggggagggaagtggcaccctttgctgaggaaatcttagaccaagtagctggcagtgcaaccaatctatcctcggagaaatgggaaacttgtagcaggaataacgtgtttgctttgactcatgccactaagcaacaaacagtaggggtaagcttcaacttttccaactccattttcattgttgcatattgctttctcatgtttaccagatgggtttgacgacaaaaagggccaacaaggaagtaggtgccttaatcgtggagcttgaacagactaatgctaaaagccaacaattgtacaatgacaacaagaccctacttcctaagctcgaggaagccaaatcccagactgatgttgaggtgaacaaggccaagaaggaagttgaggagaagataaagcaacttaataccaaatgcaaggataaaatcaagcttgaagacaaagaagctagtgccaaatattggaagttgtatgttgaacataaggcccaagttgaacaagatatcaaggatgagatgaaccaacataaatgtcgagtgatcttcctcgaggatgaaatctgtcaggtgactgaggagagggataccaaggattcccatctctcaatccaaagtgatgcgctgaacaccaacatccgagaggtcgtcaatttgcaaaggaagattgatgggaaatatcaagtgatcaaaggcatactgaatgataatgaagctttgaagaaggatctcaaggatttaaataaggcgaaagaatcattgagtgtcaaatatgatcaacagactttgatcttcaatgctactcgctcgaccagcaacaaccgcaaagacattatagagagattgtagagggaagctactcaccaatctgccaataatatcaaagctttcattgccttagaggccatgcaaagagccaaagaaatggctacgtaatttgttcaggatgctatcgaggtggaggcagaagctgaagctagggctaaaaggttttgacttcaatccatggaaatgtcctactcattgctcctccacactatctggaaaaaggacccttctgtcctcaaacatcttgggaaggatgagaaagaatacacctagtgggtgcttgccaatgacaatgataccaatctttagatttacgtcctctaaaatgatgatggggagtctggtgataaattagaagacttgggacctgaccactttgccgaagtggtagtttccttagggaatgttatctaggaccctcatgacctttctaaggacaagatagaggaccttccagctctcgcccaagatgtgcctctagtttagcctcaagactagcccatcgaccagaccaaggaaactccctcaggacaagcccataattaacttccatacaagaataaggggtcattctatccaagaacctttttttgtttattgctttaactttatttttgcggagacaatgtaatcatgccttaacagtgacgctttatgtaatagctttatagactattgttttaatctttgtatgtatgctttattttcatgcttgtgtttgctttccttttctgtcattgtttgtttactaggccacttgatagatcgccttaggatttttcaaagtttttggttccaacggcaaaaacatagcaccattaggctttttgactttagactacttgttgaatctttgaagtatgcaaactaaaaattctttagatattaatccttgtcaatgtctttgttgtggcatttcgcagaccttggaaaattaatttaacacgatgggattgtaaacttattccctgattgctataggattcacgaagtttaactcttatctacgtgtttcccgattaactaccttaggtggaatactgtagcaaatttgtgtcatttagattaatgagggaaggggtccaagtgtgaatctgaatccaggcaaggttccttatgggaagacaagtttgggttcatgctagcacttagaccatgtttccttgatccaaagtaacagagctggcttagcattatacaagtttttcccgaattcatgataagagagctgctggaaatgtagaggccttccaggcatacttatttttttcacatcttataggaagactatcaacatggtcaaaaaatcaaagcgactataatagtatctgaacaatgctctttttttagggacaagattgaaaacgtattggttgtgcttcttgtgagaactaagttggatatgcagtagacttcaagtgattcctccttctgggaaggagggttgaaaacgtattgaaatccaagcggtgttctcaattcatgactaaaggtgaaaactaagttggatatgtaatagacttcaagaaattcctctttttaggaaggagggttgaagacgtatcgaaatctaagaaatatttttgaccagtagtttgaaaattttttaaaaataaaatacaagtaaaaaattaaatgcaaataaagactgagtacacacaataagtaaggcatctgtatgttttttagggcacataactaggtatactacccctcaagtgagctaggaagtttgaacgtcttcaaattcttagtcacttatttaaaacatagcttgtgtaggagacaaaaatatgaacttttgtgtaaatttcttcaattttcatttcattacacttggaggtttacattaagaaagagaatttacaaagaa

SEQ ID NO: 219414 - DNA, 2397 bp, Cannabis indica
tatgtatgtatgcatataaatatacgtacgagatgttcatcttataaccggtcatccaccacaggtaagtgttaaatactaatatgtcagtattcttccaatggtttccatgtttattgatagaaccttttctcacaattctttcattaaatttatggacgatagcattgtctgtgtttgattcaagaagaaagggtgcccaatagaactcaattgtagcattgtactcctaataaaataaaataatcaggacacatatatattatatagatattaataattgattaccatcataattaataatatcattataacatcaaaaattaataataataacaattaaagttattattaattagttagtaccttggcagtgaaaacgatcaaggagccaaaggtttgcatggatttggcatgtggaggaatgagtgattgaacaagacaaaccattgattggaattgacctctgttaagagaatctccaacgaacatcatcctctttcctctaagggactcaagcacaagcgacgcattgaaccttttcatttattatatattgatcaacaacaaaaaccttaaattatttattattctatatattccacttctacgccttaattaattaactaactaatcatggattaatattccctcttccaacatatataaatcaattttttttagtactatgtattcattaattaattaacatgcgtgggcgtccgcctgtactattattggtttgtacatattattcagttttgatctaggtatagttcattattcttattataatgatgatttagttttgattagtaaaagagactagctaaacactataatgattgatatatccaaaattacacacattaatgatgtagtaaatagtaatgtttcaaaccatgcacacatacaaaaatgtgtggtcccgttttaagtaataattttgaatggtttaaaatgtatgctatattacgtgcgtaattaattataataggtgtatacatgatgtacctaatgttatttgttagctgatatataattatatgagagagagagaaattaataagtggattattacttgggaagttgacatcgatgaggttgccatctccagtttcgaaaattcttgtctggacgaccatgttccatacaggttaactgggattgtatataagaacaatctgactcttcataaagaggtcttgactcatcccaaacccatctcccactaaatatgtcgcaactttcttcactttcccctactgcaaacggtatcttccatttctcttcttctttttcttctacaatattaacctctttcttatcccaaactatctctgcttcacctgctatcaccaaccccacaccattattgtcattatacctaatttaaattaaaaattttaaatatactttttgttgaaaaaaatacataaactattttattaaaaaatttacatttttacattcaatcaaaacacataagtaataatatatatactaataataaaataataaaagtacaaaataaaaatacatggaaaaatcatatttatataaacaaaatcttaaaaatcagaaaaatatttaaaattttatacaactatattttcataatttttcttatttttgtattttttttaaaattatcctttttttgtttttacccggtcccatatgtacgaataattactaaattattattttttactgttatatatttttgtaaaatgttagttttcttttataattattttcaaactaagaaatgcaaaattagtaatttacaactaaaatataattcactttctcaaatgtttactctaatattgtacaaaagttaatttaaatttatcacatgtataacaagagtaatatttgatggaaattttatatcacaataaatacattacttttatatttattttatattatttttaatatttattgttaaacttagttattgaattcaattgtagaaatttacatttaattattttttattatttacataataaagttattagtttttatatttaattttcggtgaaaacattgaattttgaatcaagttttgtaattgtgcatcgaagcagatcatattaaaaaattgatgcaaatatatcacaaaataattttatgtgctaaatataatataatttttatatgacataatattaatcttcgttataagattaatatgtgtatatacatatgaatgtaaatttacatgaactatttttttgataaattctttacactttaatacgtttaaagattttttttacatttttacggtattcataaaaataacaaaaaaaataagaaaactacatgaaaataataggaaagcaacatccaaacaatatcaaaaataacataaaaaaataatat

SEQ ID NO: 219415 - DNA, 4946 bp, Cannabis indica
tacgttattttaggttttttttttttttttttttaaaaaaaaaccttatttataaaaaattcaatttataactaaacacagttttttttttggaaattgtattgagttcatggtgtgtatattaatattcaaaatgttatattgaacaactcgtaattttgtttgtattaaattttaagagcttaattaaaagaaaaacttataatataaacttcaaaagagtatttatgcttaatagttaatagtaatactctaaaattcttattgttactgttgtgtttccaaatttttatccaatcccagttaattggattagaatataatggaattttatttaatcttcaaatgaaattttaatatgtaaagacaacaaattaacataatagcctttgtaagtgaatatattttaagaaaaattcatgtgttgttgaatcaagataaaaaatcatatattaataagtgtttgttattgttatgtattggaaaacgttactgaaattaccttccataactaaattttgattcgaatgaggcaatgatccaaatggagcacaaactactcaaaatattgcagagttgcaagagcctgagagagatgaagcagacccatcttcagattctcatccatggcttccaagatagcaactttacagtacccaagctcctcactgtctcctctcaacttggttttatcgattatgctttcagggtatttcgaaattgtcattttcccaatgttgttgtttacaacacactaataaaatgctttgtaggcaaggacccttatggttgtaattatgctttccatgtttatgatcaaatgaaagtctttggtgttgctcctaatagtttcacattcactctcattcttaggtgttttgaatcttttgaagcttttaaatatggtgaagttattcactgtgaaattgtgaaattgggtttttgttctagtgtctttgttcagaatactctcttggatttctatgctaaatgctgtgaaaatttggagaacgcctgccaagtgtttgatgaaatgcctgaaagagatgtcgtttcttggaatagtattattacttcttatatggcccgtggcgagatagaatctgcagtaaaattgtgtaattcgatgccagagaggaacattgtgacatggaactctgttatttctgggctttccaaggctggaaatatggaattggcttgtatagttttcgagaaaatgacagaaagaaatgaggtctcctggaactcaataatatctggttatgttcgattgggtgatgtcaaatcggcaaggtgtgtatttgatgacatgccagagaaaactgtggtttcttggacagccatggtttcgggatgtcaagtcggctaggagtatatttgatcaaatgccagttaagaatgttgtatcatggaatgctatgattgcaggttatgttcataaccacatgtttgatcaagctcttcagatgttcagtcagatgttgatagacagaaactgcaggcccgacgaaactactttggtcagtgtactgtcggcttgttctcatttgggatctcttgaacatggtagatgggtagactcttatattaagagaagtaattttagcttgtccatacccttgggcaatgctttaatggatatgtttgcaaagtgtggtgatgttgaaaatgcaaaagtaatcttccataagatgcctaaaagatgtatcatcacgtggacaacaatggtttcaggtctatctgttaatggaaagtgcaaggaagcattaaacctctttgactcaatgtgtggtgcaggggtcaaaccagatgatgtcatcttcattgcagttctatctgcttgcactcatggaggatttgtagaagatggtaaaaggatattttgccagatggtatcggagtttggtgtaaaacctcgaatcgagcattatggttgcatggttgatcttctgggtcgagcagggaagttggaagaagcagtcgggttgtagagagcatgcccttggagccaaatgctgttatttgggctactctattaggttcgtgtaagattcatggaaatgaaacttgttagactctgtaaaaaagattattgaacaggagccttcaaacccgagttacttaactctaatttcaaatttgagcgcatcagttggacggtggaaagatgcgttgacatatagaatggcaatgagccaacaaggagttgaaaaagttcccggttgcagttcaatccaaataaggaatgtaattcatgagtttctagctagagatacaaggcatgaagaaagaaaggatatctatgaagttctatattgtttaagaaaacacttggacacgtcaagtgatgaaactttgtgacttaacatgatcaagtttctctatggttatattgatgaatgagaaaaaaagggttactggattttacccaatctctgttaagtaggctttggtaaaagaaaaattcatgtgaaaaagaatctctgcattgcgctttttacactgtcacaaaagaaataacaaggtacatttacattaccttgttggagactggatgtgaaaggtgtaccacaaggaaaaatagagaagaatcagcagagacataataacagaagatttgaaaatgcataatggatatgggttcatgctgagacagttaaatggtcattcaaagattaacattccccatgaaagtatttctttttcatcttcaagagattggagttgtcaccactattgtaaattagtgaagctatgtccataagatcgtagaccttagcatttgcttagtactttgtgtaaatgcaccaaattcaagctgtttgtcatctgcttttgaaggctaaataactagtttgcaatatgtttgtgtacactagaaatttgagacattatttctgtaaccggtagtaatattctgatcagctttacagtaaagcatggcaccggtttgctctttgtacactcgcatccgatactaataacattttaactttcagatgacataatctagttctggcttatctgcaattatgattaaacaatgttgttcatggatcctaatttctcattctaattattcattttgtttcactaacaagttaagaaagttcttgtaaattgtaattgcggaaacgagcaggaaactatatgttctagtgtatgaaatcatataatgcagaagagtgtgaggctcgttcatctgtctacacaacggctagtgctctaacaatttttattggaggaaactgtattatgtcaccaaaggacttggatttattttttagctaaatatttttgtaatggatgtctttgttacttgatgcagcagaactgtaggaaattttctcttttgaaaattttccaggcaggaaaagtgaaaggacaaatgaaaatgatgttttagtttggacacattattttttcctcctgctcttgaactacaaaaggtcgtacttcaaggtctatacatcattatactatatatgcacctataaatggtagatatattgaagtcatatcagtttatttcatttgcgttaattatattataaaaaacacttctttattggggttttctttttgtgttcaattcactttctttttcctctctaataattaattgatgactattaggctgtcttgctaggaaaactaactcaaaacttctctggtttaatgatattatactaaaattgaaggagaaatacttcagatgatatatatatatatatcatggagtattattttagttttacttgtatcaacaaaaaagacaacacataagtttgttttaaaggagagagagggagacagaaatggttgtttgtatatggcattaatatggtatttttgtttgtatatttgcatgacatgatatagtgtccaatcttaatattatgagattctcgctgtaaacttcaattctaagtaatcctctcattcaaatgcttcaattattgatccatagacatatcaacctctcatttcttatcttccttttctgttgtggccattcttaaaaactcctgttcaagattctttgagtaaattctctaaatttcaagacgagaaaaagacgaacgcaatggctattccacacccttttgtttagaaagtgtcatagtctcattgctgtgttacatgttcccatttaaactttcactcttgagcaacttcagtccatacaattcaataacagaaaaagaatgaagagaatatcattttggtttggaattaattagctgtggtcattttcataactggtaagaataatacaacacttggttttttttggtagaagtgaagtgttaggcttctgaatacctccaaatccatgtccaagacattttagcatttactttactaatcacaatcatgaatttgtatgtattaaagagacttttacctaccaaaaaaatctcacttcagtatctctaaatgatgttttatgctggtacaacactagttggcagtcttgtctcaagattcttttattctacactttcttatgaagttgcattcgaatttcgagtgcactttgcaataattttaatgatttttttttttctttcttttatttgtttttttcatcatggtatgagtgggttttcatacaattttgggtttttcttttttgtttttaatatcagtgtagagctttgattttaaataattaaaaataattaaacctcatgtttcggttccatataccatatcatctaagcttcaatgtactcagagcatcaccaacgaggtttcaaatttggtgatgccgtggaattagccctccaacgtagctgcaaacattacactaaattgccgtgtgtgctacagtacacgacatatatgctgtgcactgttcacacgacatactttttttttttttttttttttttttatatatatataactaattttgtatatgtctatattattaattg

SEQ ID NO: 219416 - DNA, 4165 bp, Cannabis indica
ttcttcccactatattaattacgtttcatttattccaaagctttaatactttcctttaatttacgaggaaaaaaaaggacaaaagaagaagaagaagaaatacccataaaagagataaactctccaactgatggatgcaagaaccatcttgcccaaaatcccatcttctttttccatggccctctgtccaatatctccaatacaggtaaagtttcacattaaagtttgattaggcattttccaccaactgtctgttttcttttgttgactcttgttttattatttttttgaattgattttgttgttgtttatggtagtaactcatgcggttattaagacctgaaaacaggtataccctgtggagacagagacgaaagcaagtaaagaaacatctattttaagagtctgatgaaagaaagcgaggtgtaatattattgggtttgaattagaatatatctttgtcgtgcaatgatttctgtctcatatacccagaaaccctaaccctagtttgacaacgcgtaccccgtagtacccctcattggcccaatcttttgtcccttttgggcatggcacgtgactagaattttgcacgtgtagtctctacacatacaaaactacaaagaccaagtcattggcaatgaccgtataatagtcttctaacccaatactgtacatataaaaagcgggtgatgggctaggctcggatcatccggtataaagatgctttaatttgcgcgtaaatggattcttggaagattaaaaagtgaagaaaaatggatttaaaaagacaatgttttgcttcttcctttactttattgacatttttcttcacatttcttttcacaacccacttttttttcattgctttagaaaaataaatgtttcttttgacaaggataataatatatatatatatatgtgtgtgttctttaattcattatataaggggatttttgaagtacacgaacggatgatcatttatctatcttttgcttcgggactaccatttgactctcctttatacattagatggtatcaaaacaaacatacgtagccgtacgtctacatatgatgctttctttgttttaacaaattcaattcgaacttgcaaaagaaaaacaaaattgatattgataataatatatataatgaaattaattgcatagacaaagttcattggttgcgaatattattctctaatctttgcatctaatgaagtgcacgtgtcatgtgtgttattattattattattctaaattgttattagtttttgtagtacggcatatatgaaagttatcatgtgttatagctgctgaaataaactctcgagcgaaagaaagggcattaaatgacgtttttactagttataagattcatgtgatatatttgattatgctttaaacgaataagaatatcattaaagcaaagaatccaacaatcaggactcgcctaagattttagtttatggtaaattacacactacaaagggtaatataataaaaagagtccaaaaagcatagaataatttcaaatcctaatttcagcaaaagaaattcaaattcttatcactacaaaaaaaaacaaaaaacaaaaaaatagatcgtctagcaacgacatcatatatgtggtcgctagaagcaaattgtggacaggagataaaattttgcccttttgcaactttttagtacaaatattgtcgctagaaaggtttgtctccaccccctcctgacctttcccctcacaccctttttttttttcaaaaatatcattttttatattttatatataattttatgacttaaaatttttatttatagaaatattcttttaaaattttaaaattacaaaaaatacacttttctcgatataatgtaagaaaataatgagatttcaacctcacaataactataaatcaactataaataaaatataaaataatatcataacaactataatacaattatatacaaattataaaataaccgaaaaaataatttattatatttagtcaagatgtatttttataaataaaaaatttcaaagaatataaatgaaaatatttcgtgttaacgtatttttgtaatctttttcaaatttttagtccattttgtaaaaaaaaaaaaaattcctggtatgcatttctcactcaagtttattttcagacagccacgaaataagtgttaaagttaatattgagtcatttataagaatatgaaaactttacttattctcaatgaatatttgatgctccttatgatttatgttttttctttctcaccatctaaaattcgctttactacattactatagattatttacgaaatttcacgatcttaattcattttaggttaaattaggtttttcatatggacaacaaatccttaggacacacagtccagggaaaagattcactaagagcatctataatggaggtgtaaataagtgttgaaaagctaaaatatagctcatttaacaaaaagtatactctaatggtgtgtcaaaaagtgatgtaaatttagcacattgcaaattttgtgctaaatttggcacaacatttgctatcatgtaaaatttacaccacaataaatacattatttttttatttacatttatatcatttctattattttattaatatatttaactatcacattaaattatgaaatatttatattattttttattgtcttacatattaaaataataataaaattgcttataaagttattagattttatttttttttaataaaacattagttagatattaaattttatatcaaaattttgtaattgtgcattggagcacaacgctaaaatttggtgtaaaattaccacaaaactactttttgtgctaaatatagcacaatttttacatctctcattggagatggtctaaccgaggcaaacatttacacaatttataatttttcttcaaaagttataaatcttgaatcaagatgttgattttgttatttaaatctcaatgttaagcaccccattgaccttcaaatatttcgaaaagaatgctacaaatgattctttacattatattataaaaattatataaaatgcataatataaataatagaataaatctgataaaatgaaacagtattcgtcattacatataaaataattaaatctcaacagttatatagttattaaataattagattgaataaatattaaataactaaaataatacttgacatccatcatattttgcattcctaactgttacaaagttatttaaataatatagaccattcattattaattaaatagataatcacattgttcttcattaacgattcactcacatcaaaaagtaccaaaattgagttacttgaaggagaagtatataaagcgagtttacaaagtttagtatgtaaaacaactataatatcaaaagatcaataatttataagatatcatgtatggttagctcaaaaaattaaacatgtcatcatatcatcatgtataaaaaaaaatagagaggttataaataatcacaagagacaagctatccatgcatatcacatcgccccctagatccctatctcccgatacttatcatagaaaatgatatccaaacctatctcccgatacttatcatagaaaatgatatccaaaatcggtaatcacgtctaataaccaccatagtatcagggctcaaataattcactttctatataggtcctaggttttacacctataagtgagtgcacacattatctacctataatgaaatagagactaagtcgtgaagaaacaataagcacaaatcattataaatatggttctcatcattagtataaccaaatacaaacaacatgaaataacaaaaaaaaatatattctcttaattttagaaagtttgacagcataacaattgtaatttaatatgatcgaaaaatcataatatgcatcatatatattagaatatatatatatatatgtgcaaattaagttttagaacagtccataaaaatatacaaatgaattttttgactttttaaatattttataaatcaataaaattagaatatctattctatataaagtatacctatataactgaaattcttggtttttgagaattttatgggtgactattaatttttatttaataaaataataaaataataaatatcctaaattaaa

SEQ ID NO: 219417 - DNA, 2340 bp, Cannabis indica
aattaaattaatttcatcaattacccctctcgggtcatatttaccaaaatgcccatggctcaccaacgaggtcttttaacatattaaaattcataaaatttcacatatattgaactatataataatataattcttcacttattcataattatctaattaggactttgctaatccttttcttaattccgggtattacaaaaaggatcttcataaggcttcctggtttgatggttagaggagatcgagacaaagaaggacggagagaaagaaaatggagaaggtaacagacacatatgcttccgatcaatactctagtgaaaattattttttctttattaataaatattgttcaatacataatattaatatatttattttaattaattaataagtatttttgtttaatttataaaatttaaaaaaatacacataataaaaatacaaattaaaaatataatactaagtataaataatctagataaataaatatagatatataataatatttttatggtattacggaggtatctatctagctaatatacatctatagtttaaatttgtgatatttatcttttattattgttttgagagaaacgtggaggttatttgaaattttgttattctttatttgattattaaaataagatctgtaacagaatgcatgtttattaaaatttaaaaatttgaattataagagctacgcctataaatacaaactggtggtacgcactagtacccatctatctttctctttctgttttctgtttcactgtataccttcttctataataatggcgcataataataagactcatgagatgactgaagatatgttgtgggggtggttttttagaggagatatgatgatgagtagtaataatattaacagtaatagtaagaataatgatgtggtgaaggtggtgaagtggtggatgctggctggtttttgtgggatatgttggtgtgtatctcttttcaatgcagctattttcttaaagatttgtatacgttgcggcttactacaacagccaatattgaaattagcatttatcttctttatgtggatgattgcacccttaagtttgtgtatgttttctctgaaaagaattttagagattagaaggatcgtcaattttaacagattattaataatgggtgtcactgcccatagagagctctattttaaaaatgcatcggctcttgtaatggtttgtattggttgggtttcgtttaatgagtccgcctccatattatttcatcattttcattatcatagtcttcaattagtagtctctgcttcagatttcttctttgctgtttttcatatttttttgactattgttttctttcaaggaggtatggcctctttggagcttagttatcattccgttacagatgaagatgatgatgatcatcatcatcataattaatgtgcgaaatatatgataaatttgtgattcaataaactcatattttttcagttttcattagttaatgcttcaattcctcctatttattttaatttatatataaattataatgatatatttatttacatacaaaatttacacaaatatactgaagacatctatttgtttttgcatccagccattaactttaatttaatttaatgttttatttttcatttattaattttgttaacaacaattacacgtatggtcacatatatctataaaactaaacattaaaaaaacttattattcttttgcatctatgaaactaaacagaaaagttattattcttttgcatattattattaattgtgttcaatatttttgtacaattcttagccaaaagacagtaaattaagttttaacttctataaattttgttttttattcgcaacgtaaatcaatatcaaacaattttttttaaaaaaaaattaaacaaattttaagttaggcattttccagtgtttatagccattcggtcatggattttataacttaaaagtttaaatttaagttgggtatgctttttaggattgacacaaaacttgtttagttagaaatagacaagatcacttaattttataagatatatatttagtatgcaaaaacaaattaatgattggttaaaaaaaaaagaagttttaaaatccaaaataacataaaaaaaataaaaataccttaaacaaataggattttataatgtttttggatatagtaacataataaaaggttatgaaaagagcacttttaggactgaatcacgttctcatatttgtaggtataaaatgaaatgcacaccaatatagctttttttaagtcttccatgtgatagagaaccaaacaggatgagatttattttttttta

SEQ ID NO: 219418 - DNA, 1730 bp, Cannabis indica
tttgtctataatgcttgccttgtatttctatttttcttttatagattatgtcattggctctcatttttaattaaccgtctctcagtgagttttacatagtttttcaacatgtcaattgaacttgtcatcaaagccaagttaccttataaaaaattataccaaaagagagagataaagagaacaaaattgattgggccactaaaaggggttgcaattttccaaaatagtgtacataaaaacgtgggtaatttaatctggccaaggcttcgtttccataaagtatcccacaaataggcttgtagtgaagaaaaagagagaccccaaaaaggcctctgttctaccacatctcacttgatctattatcttcataattctcatcagttaagtgtggtcaatttgtgaccccaaaacaaaaataaagggtgtcatgatttaatgattcctgggttactaactaataaattttatttagaaaataatttaaagaaaaaaggatggtggtgtgttggtgttggttggatagggagcacttggtattataggtctataaggaaattttaagagtcaagattgtcccaagtatttggtcattgtgacaaagaacattgaccctctctacttagcataggaaaatcaatatggtaaaaagattaccatgagtttcccactttgcttaattaagcaatgattaacaggtggcacgcgccgtaaacttaatttctaagcacagtggctgttttattgtgatgctgaaaggtttgaaatttttgggccatctttgtttgacaaacgcaacgcaagtgttagcagcaatagcattaacatcgtttctttactactagtatttaatctgttgatttggttaaaaaagaaaatgaaattacatcacaattacgaaagcaagccactttgcttgtgcctcttcattcgtaagacttttcctcattttgtaatatgactgtttatctatctacatcaatatttagtcttagatttgggtccactcagttcatagattaacctatctctgtctgctacgtttaatttatttattaaaaaatatagtaaggctatgattttccttcacgttacatattttgtgtctaatctatgttgaaccagaacatgtttggttagaaattaggatacctgaactgtgctaaatctattcagcaaaagaaaaagaaaaaaaaaaagaactgtgctaaatctgtggagtcagttgggctttctttcatatagaatatgaattgacctggattgtatcaaaacaccatgtacaactttattacacagtgatttttttttgtctttcagtgaactggttttgaattactaactgtgcctaaacattttttcttaggtaaccatgtttgtcatctatgaattgatcagatcaagcttctcattttaataccagcaaaaaaaaccttctcatttttattcctttcacttttaggttaatagcaaaaaatcttctttcaagtttacaacagtcttagattccttaacaatttactaatgggcttcccgtaaatatacccaacactgtaaatgatgggtcataattatatgggctgctaattcgaaataagaagcaatccattagcgtggtctttagccagccagcccaaccccctcaattttatttcttttaaagttttcaatattaaaaagggctattttcaaaaatatcggaaaaattattaaggttatgataaatatggcat

SEQ ID NO: 219419 - DNA, 4440 bp, Cannabis indica
ttatgagctcaaaatttgatattatgtaaaggtattcacaacaatctcgtccatcaactatacccatataggatcaaagcggttttcgtcatatcaataatgactaaacccatcaatggtcacatatacaaatatagccaaatgacatagatcaatcatggatgtgtagcatggaaattacatgcgatgtgaaccgaacattcctatttccaactggtcctccttaaaccaaagtgaggtcagacttaaacataacaaaacagagtgaatgaactgaatactttatttctgatacaaaaataaccaaatacataaatgtcttaaacaaacatataatgagtttggttaaatacataaatgtccataagtattactattttagttaaaatataagcaatacttgcattgtttggttaaatactttgggatcaaaaatgagttttgtcttactttggtctatgggctaaactctatcattgagagaaaggaattatggcaggatcttgcttctcttcctttccccgttaagccttaggtcataatggtgatttcaatattttatttatgtgggggtcgacttggtggctgacctgtttcgtccattgagcttgaggatttttgcaattggttatctcttggtttagttgatgaattgaagaattctggttctatctttacttggaataacaagcatgataacagaagaatttattctagaatcgatcgagtttttaagaacgaagattagcttgatttggatccctctactgaagctttttatcaatgggatcttcttttagaccattgcttgtgtaatgctagaagtttgcagattgggaatttggagtttaggccttttaaattcgtcaatatatggacagagcatcaagattttaaatagattgtgttggacaattggcaacagcctgcttgctgtactgggttatttcaaattttggaaaatctaaacagagtgagaaaagttcttggggaatttaataaaacattgataggggatatccaataagcttatacttcaattaaggctcgctttgatcaactccagcttcaaattcaacataatattcaatctgcaaagttatttatagaagagaaagagataaaggcaaccttgaattcttattctaaaataatggaaagctatttgagacaaaaaaaaaacaagattaattggttgcagtttggggttgaaaacacaatattttttcatgctagtattaaacaacgcaaggaatccaattgtatagcctcttttgttgaccaacatggtaatttggtagattcatatgatgaggtggtctcccattacttaaactattttaaaggttttattgtagattcatatgatgaggtggtctcccattacttaaactattttaaaggttttattgtagattcatatgatgaggtggtctcccattacttaaactattttaaaggttttatgggtagtccaagttcgtccacgagaggtatcaaaaaggattattttctcatgggtactactctaaatattgaacaacaaatgcatttgatcaagcctttcactagttctaatgttaagagagctctgtttagtattcctaatttaaaaagtcctggccctaatggatttggctcaaaaaatttcaagactctttggactgatattggtgaggagatctcaaaagttgtgttatttttctttgaaataaggattaatattccttctcaactaaataacactctacttatttaatccccaagaatgagaagccctttaaagttgttgattataggccaattgcttgttgcaatactttgtacaaatgtatctctaagatgatgtgcaacaaaatggatgttgtgttgccttttctcataaacatgaatcaaggtgcctttatcaagaaaagatccattacccacaatgcgctcattctataggatttgctttgtggttacaataggaaaggaatttctccaagatgtctcatgaagattgattttaccaaggcttatgacactatagactgggattttttagaagatcgagctcctgaaatgttaattggatcatgacttgcttaagggggtctacctactctttagttcttaatggtcatgtgcaaggaagatttcaagaaaaaagggattaagagttgcttaagggggtctacctactccttcgttctcaatggtcgtgtggaaggaagacttcaatgaaaaagagattaagacaaagggatcccatctctcttttgttttttgtgttggtaatggaatatattactcgattattactctttattgttggtgcttcagatttcaggtatcatccaatgtgtaaatccttaaagatttccaatctttgctttattgataatttgatcttattttgtaaggggatagataaagtcatttggatcatccaagaagcttttgctacctttagtagctgtttaggccttcatgctaacccgaacaagtcatacatctactttggtggaattgatgaagcgagtaaattggctattcgggatctagtcccttatgaagagggtcattttcctctcaagtatctcagtgtgacaataagaccaaaacttaatgaaaaatagtggactgtaaaagcttcatatttgggcaagtaggcatctgtcttttgcaggtagagtgcaattgatttatttagtattgttgggcattcattgttattggatgaatatctttatgttgccgcaaaaagtagtcagggatgttgataaactctacagagactttttgtggggtgcgaaaggtaatactagtaaaatgcatctaccttcttgggatcatgtctgcaagcctaagaactatggaggattgggttttcggaaaggatccaagtagacaaggcttcgattgctcatttcatttgggctattactacgaaacaagatgtcatgtgggttaaatggatcaatgtcatatacttaaaatgctaagatttttgtgtggttgtttagaatgctgatgtgagttggtactagtacaaacttcttaatcttaggaatatttttactcgagagacaattatggatgctggaaaagggggaagatttcgggtcagtaagctttacaattcttttcttactcctcatgctaaagttgataatcacaaaataatttggtgtggactatccgtaccaaagcatagatttattttttggtaagcctctcataataacttattaacaagagatcacttgttggcaaggtatcgccattaattctactagctgcccaatttctaaggttggtgaagactgttataatcatcttttctttgattgttcttttctaaacaactcatgcatgttattcattcttggcttggtaatgccatttggccggtatcttactcgtattggcttttatggttgaatggtcaccgagatcgcagtcttcctcgaattggcttgttgtggttgtttgtgcaactacagtttattttatttgatggaatcgaaatacttgtatttttgagcaaaagttttttataatttcttatgtgaataatttgattagaggtgctcttaaagtaagattattacttgttaatagtaggaatctctctaagatagaccaacaaattttttattttatttgtaacatgtaagtaagtctgtcttttgttattttatggatgttagcctttgtaacatttgttctattttgattaataaaaaaaaaatcaatcagtcaatataatatttttcgtgtataacaaaaaaaaagtatattaaaactgaggggttatttgcggtaaaactcccttatattttgatttttttacacttaaccctttatatttactttactttgaaaatttgaggtgtcaactgaatattactgttaaatacttactgaattattactgtattgacttcgaaattttactttcacgtatacacaacacaggtgaacacattggtcatctcattggtatttaacggtaatatttaattaacacctcaaatttataaagaaaaataaacataagagaatttagattaagagtaaacataagagaatttcgtcaattattctaaaattgagcacaagatatgatatgaagcttatgtattcaaattattaataagggtcttcaatgaacaacttttttcaaagcaaaatatatttggagcgtaaaaacgtctgtgttcaaggaattttgctcttttttcaaattttgggtcgttgggttacatagtatggccttgtaagataatatatatgtttcaacaaactaaatgcccagacccagatctagtaatgggtcccctactttttatctaaacttaccaagtacaaaccaggttcaagacatcagatctctacaattattatggaaatctaagcgcatgtttggcaccataattaaaaaactgtttttta

SEQ ID NO: 219420 - DNA, 1875 bp, Cannabis indica
tcataaactaatagaatagctagtaataagttcataaaagcacacgcacgtggcgtccctgcgaatcggggcgttacattatatatctgtgttaatctaaatcaatagacacttatattgagttgtctcaatacgactcaaaatttgttttcacaactatttggaaatatgtcctctagtaatttaaaacatattatgttaactcatacaaagcacgatctaacttatcacctcaagagtaaaaaacaataattaaatatgaaaaatataataataacagtacggaaaatataatatataaataaatgggatcaaacaatagtactatctcttatacataaatatatataaataaatatttaaaaagtctttgtttatgttattgttaatacataaataaattacaaccaaacaaaaaattataattatttgaaagtactctatatgtaccttacttagaatagtttttgatctcttcagttcattcactaattatcattgtataacaataaacaatacaaataaagcatgtcactatttttgaaaaaaattagtcaacttttcctaaattataaataactaagaaaattttaatgaatatataacttgatcacatacaactcttaataaaaattaaaataaagaaaaacagacttgtgcgtaagtatttgtagctgtaaaaattttcttgatgatttgtgaaatataaagaaaatttgatataatttacaaatacatataataataaaaacataatgatgagaatatgattaattattattaattatcttatgtaacactctcccatattttatgcaagaaggatttagtgtgtgaactaccttaataactctaactgtactccaacaaaaagtttgatccacctctctattctttagcaagaaaatacattaggaagaaaatatctaaatgtcccatctcatggtccaactctaaaattagttttaaattctgaattcattttcataatcttctcacaaaaattacttgaatagagaaaagaaaaaaaatagcatgacaaatgtactattacgaactaccggagaatttaaaatatataccaataatttccttttattatataaaaatcagtatcagtaaagtaacaggaataagagaacatatactactaagaaatgtgagaaagtttaaaaattacctcattaacgaattcaacagggtttgtttcactaagatttgggaacctagtattagagtgtgtaggaccattccaattaattctatttgtgaatgaaaatattaagttcataactttaaaaagatagaaaatcatctcttctaatcaaattttaatatttaaagtacatatacaaaaacttattaaagagtactcaccatgcttaacaaaaatatgtttggatactgtataatagggaataacttttatgtcgtttggttggaggaaataaaaatatagaaataggaatgggaataaaaataagaatgaaatcaaatttaaaattaatgcatatatatcttgtaatggaatagtctttaattttatttcaaaattgttagaatgatattccaatactttaaaatacaatcaaacaaatagatagaatacaaattatttcattttgccacctaaatttcttttacattctcagttaccagcatatataagaagaatcacatgtatgtagttgtaccaatgaaatgattagttcaatcaaagcatcaataatattaagttgtaggacattatcaatatatgaaactacaatagaggccttgtagggccgtctcaaatatttcggaagccatgttctaattttaaaaaataggcccctaacaaaaaaaaatatattttgcaaataatattttaaatat

SEQ ID NO: 219421 - DNA, 3879 bp, Cannabis indica
ccaatatatttattaaattctagtaattaaaaaacacaactgctataatctgtagtaacagaatggaaacttgttgctgcaaaacacaaatttacagtaacagaacagaaataaagtgcataatataaaaacttgacacaagagaattatacgtggaatcagtgttctttcaaacactcctagtctacggggccacgcccagagaatgaaattaattagtaaagtctcaaataattacaaatataattgacttaaacaagcttagaccccctttaaagctttgccgtaatcttttgtaatttacattaccaatcaaatttttgaacgccaccaaatagcaaaatcccttcatcttttgatgtgtgaatgcttacttcctcttgaagtaaggctttgacaagtcttctctcgaagacttttctcttattcaaaggagttcttcaacttattctaaaaatagtataagagcaaaactcaaagaataaaacaagacctagtagaacactctaggttttcacaaaagaacctctctcatcacaaagatgaaaatatgaaaaatgaatttggaagagatgagaaacatttggctgctctgtaggtcctatttatagaacatagaaatcctagagatactcacaaacactttttcaaagttgtacaagacttttctaaaaacatccctgttttgtagcatcaaattcagagtctgttgcaccaaatcaggactaaacaaagaactatacaaaaaggaccacgatcacgatttggtcttcattatctgccaaataaaaattatttgatttgttatatacataacaaaattaaaattagcaatttggaaaagagaaaatcaaagttttctaaaaaatatgccactttccttaaagagaattctttctcttgtaagacaagtttcttaaacaaaaatactagctgtaaataaattctttttttttttttgtaaaaaagaacaatcaaagacacaaaattaacacaaaaaaaattatttcaattgcataatacaaaaaatattaattaaaaattaaattgccaaataagagtttacaattattattattattaattagtatctatattattactattagtgacagagtgatcccctagtgaaagcttacttcaccaaatctaccgttactgcttttactcccacaaatctcactcgctttggctactctctagtctctactctactatctcactatcccccacccccaaacccaaacaatcaaaaccctctctttcgtttctggatcggatccaagaactagaagcagatccaaaatgggttctgtttctttgaaaattggtgatggaacagccagattcaagagagctaccctctgttcttcagctgttaacattcttatgcttctctccgttgttaccacaaatctctttgctctctacgcctttacttactccccgaaagacaaccaaaccaaccatcttcttccccatgttcaccacaagaacatttctctcatatcagagcaagtttctctgattatgagagagatcgattcttcgcaaaagaagttggcccagatggagaaagagcttctaggctacgacaccatcgatctctccagacccaacactgccaccgagcttaagctcttccttcagcaccaccagcttcctctcggaaaagattcaagaactggaattactgaaatggtggcttctgttggccatgcctgtgagaaatctagtgacttgctttctcagtacatgacttacaagatctctgggccttgtccggacgattggagccttgcccagaagctaattttgcgtggatgtgaacctttacccagaaggagatgctttgccaagtcaattcccaaggtgggtctcagcccttttcctttttctctttggaaacctgtctctgataagattgttacttggagtggtcttggatgtaagaattttaattgtttgaacagcaaaaaactaagtagagaatgttctggttgctttgatttagtcagtggttctgagaatcacaagtttgttaagactacaagtaagaatgatttcatcattgatgatgttttagccttgggatatggaggaatcagaataggcttcgatattggaggtggctctggtacctttgctgctagaatggcagagaagaatgtgactgtaatcactaacactttgaatatcgatgccccatttagtgaattcattgctgcaagagggattttcccactgtacctgagtttagatcacaggttccctttcaacgacaatgtgtttgacttagtccacgccgggagtggattggatgttgggggcaaaccagaaaagttggatttcttaatgtttgacctggacaggattatgagacctgggggcttgttttggttagataacttttactgtgctaatgatgagaagaaaaaagctttgaccagactgattgagaagtttggatataagaagctgaaatgggtggttgcagagaaggtagatggatcaggctctggtaaatctgaggtctttttgtctgctgtgtttcaaaagcctgctagagtatgatggtagatctaagccattaggttagttgacacacaatttctctggtttattgttcggttgtccttgcatgccattcctttccattgaaaccaataataagtgcataatctttattatttctattactgcaaactagaaagtgataaatgtcactgtgtttagcaatttagagctgtttaatctctaatattgtcatccatggttgctttttagggtatttttaatgaatcaaagagatatatggtgtattcttcaattagctctgccaagatatttgagtttatttctttcttagtattaaactcatcaattctttaacttcagccaaagaaacttcctgcatcattgtttttcgttcttgtctggcgataaatgaaatttgtactggcctagttttcttaattttttcttttttttgaaatcaaagtaaagatctgattcgtctgctggttttctaatcttgaattcacaatttttattgagtggtaaaggaagcaagaggggttttctttgtaaaacttgagcttctatacattttagtatgccaaccttaatacttccctctccaatcatctctctcgagcttcctcaaactctctttctttcaaatgtaaacatgaactcccatgaatattcactttacagcactaaattaaagatttcaaacaaatttatgtatgctttattagttttgttctttttttttcatatctaaacctctataaatttgcagtattataaataagatgattcttttgcaatactctcccataatacttttgcaatgctattatttttgatgatattttaggtaaaaaaaaaacgacacactaatgattctcttatgaaaacttgattttgacatcaaaataaactttccataggagcattctaaacgcatcgctagtgattgtttttacctagaaaattataaaaattgagagcatttttcataagtttaaatctaaacaaaaaatgcaagcaaaagtaataaatcatacttaaatgtgttcaaaacttagaagatttcttccctacaaaaaacttatcgtctatctatatatacaaggtatgtttagccaatttatgcttatttaaggttacggctaacatattatttctttcctggtgacaaaatagattcaaaaaggcaacaaaattcaaaaataacataattgggttagtattagaaaaattaggtaggtacatgttgaaggagttttttcattagcctatgatttttccaacaagactgttaccagatgtaacttctccatactgtattggtctaatgttcacaagata

SEQ ID NO: 219422 - DNA, 3192 bp, Cannabis indica
atttttctaactttgttatgaaatcccatattttatgtaattttcacaaaaaaaaatgtatttgttatgaaaatggggagaaccattctcttcgttttctccttaatttatgtgggccccatttcaaaatttagtaaatgaatgggaatcaatctcatacctagttgaaactgccctaaatgtttggggacatgaaaaaatgataataaatcttatcgttaattaatatttagttaagttaataaataataaaatgaaatataaattattaaaaagagaactttttttttttggttattattcctttaaaaagttttcgattttgtgggatttctcgatgaataaaatggcaagttctgttcattgccaaactaacaatttcaaattgtgaaatttttaaaataattatattgaatttgtggggaaaagtaaattattaaaatcgaaaatatcccttaaaaagaggtttggatttaacaagtcattaaaatggtaattaaagcagtaagaaaactaatgaaaatcaaattagttaaaattaataaataaaataaaaatatgacatttaacaactcacgaaaattaaggaagaaaattaccgaaattaaatactaaaatattcttaaaatatatgtaatccatttccaaaaaaaaaaatcctaaaatatatagtgtaacctattttaattagaaatatattaatttggtaatcatatattatttggaaactaataaaaaataatttgtttaagtatgtttttgttagtctcaattttcatgttgaggtctataaattggttaaattcatacatttcttattttaaaattgactttataattattaaagatagtattttttttttttatagaaaatttattgtattattaattaaaagtgcaaataaactaacaaaatagcatgaaaatcagtcgggacaaactcccattgaatggtcgaagcacgaaataacaaaattaaagatagtattaagtaaaaaattacttaaactattatttttttgtaaataaaattacacttttacttttacgttcaaagtttttttatatataattttacgctattcaataaaatcacagaaaagtaatacaaaagtaacatcaaaacaagtataagacaacatcaaaataacataaaattaatatataagtaacaaaatattaacaacaaaataacaggagtacaacataaaaatatatatcacaagaccgtattttatgtaaataaaatcttaaaatcataaaaatatttaaaattccgtcaaatcgtattttttaatttttaatttttgttgtgaaactcctaacatgccttctttctccttaattttgtgaaaattgttatttttattataatatttttgatgaaaaataatcttagagaacaccactttgtgaacaatggtcaaagaaggagttgaggactaaaaattgaatgatgaatggcatcagccaaaatgtgatcatatataccacattggcaatataagaaattaattgttaataaaaatgtttattaagttgttagtttggattggcacaattttgtattcagtccttctttcctatcactataaaaatcgtttctttatttattttaaattagaaattaaaactattaatgcgatgtaaattatggatttatttttacgttgtgttgtgttgtattatattatattatatagtaatattttaatatcccaatctccaaccctaaacccacccaaatcctatactaaccctaaacttggcaccgcactttggatttgcctcggaatcgtacccaggccaaatttccaaactcagactacataatctaatgcaaaacatttcttatgtattaaataaaacgattcgtattttattaaaaattgtgattaacaattcttctatcaatatataatgttctttttatttgtggtgcagatacttaagtttaactcccgtttatagataaatacctaagtttaatttttgaaggtaattatactaaagttatatatttctagaacttttataagtacctgactagtattaagtattaaatcaatggtcacatgtcaatcctagctcaatagttcaagtcattaattttttatttttttatttaaaaattcatttaagtatacaaataaaaaaataacacgcaaatattgacttaatacttaatgattaggtacttaagaaaattctaaaaattataatttaaatattactactacgttaaaaattaaaattaattatttatctttaatcaagagttaaactgactatatttacttcacaaattactctctttaattcatatcacctcttattttgtcttccaaacaaaccctacatgtattatatgtatatacacattagattggctagctttttccaattaatttgttgcttaacacgtgatgaataattaatttttgttatgcaatcctaattattataaactatatattatatattataataatgtcaattccatacatattacatgatatatatattactatatatcatgctctagctaggaatatttatatattcaaattagatttacatccatggcaatggatgacatggtgcttaccaactataaggttaagatactaagtatacttcatcaagttttttaaaaaaattctaaaaactttatagtatgaaaaataaaatttacagctaatatttttatacgcatataaaataatatgtatataacaaactatttgaattctattttcagtactataaattatttaaaaaatttattttttttttttaaaaaaagcttactattactacaacaaacaccgtcataaaaaaaaatgtcccgagatatattttgaaagaggatgatgtaccaagtgtgttatacaatgaaataacaaaattgactcatcatttaatgaatccaatcttccatcttctactttccaatttctttttttcccattttatttactatattaattttgctcctaaacatggttaattaacatttttaatatatattaaatacttatacatgtttttatattatttcttttggtgaagacataattactatatatattgattcattaattaatttttgatgacctatatatgttaataatgaaaggaagaaagataaggcactttgtttaattggtatatgtgtttcttagacatcat

SEQ ID NO: 219423 - DNA, 5809 bp, Cannabis indica
gtcgtacgagacaatatagagaacagggaagcacatttttaatgtcttcgttgaattttcactatacgactctacaaattacagggggaaatcattgtgaattacaaatcagcccagacaatggggttgatgcagaagaaaggaatggatttaaggggattaaaaaatggaagttaaaaaaaaaaaacaaaaacaaaaaaagaacttctaaagcaactcctatgaatcaataaccaaatatgccaaacaatacaaccccaataaattatcttctaatatagctacccgtaccagaaactttaaagtgggcagaaatcatcacaaaatgctctacaaagtcatttttctagctatcgaacttcttaggctgatgccattgtgccaaacttctggccaaagaaccgatgaacgatacttttgtttgagctcctttcttcccatataaatgcttacctcccagatctgtatattttggaccactatctctgcttctttcaatctgcagcgtattcagaaaagagccacaagaatggcaatttaatttcatttgctccattatatgatctgctatatgcataaatacatatatatctataatgcacgaagtaacacttaaaaattttaaatctgacataccttgcttatctttccatcctttaagtggtaccgaataccagaccaattgattgactgagtgaaatgagaacggaacgcagagattgggtataagaagttatccaccaccatagcaatgaagacctgccgaatccataaccagtttattcacattagtatgaggacctttatgtggtaaaggcctttgcaaatatttctctaccactaaactcaattatcataatgtaagaattttgacttgaattcgggccagcttttacatgtttatttatttcaaagtaaaaagtgacaattcaatcctccattcaagtgagaatggagcatattacatacagcaactataaaagtgaacacagttattttgcatgaatggaagcaagagaatcttacaaggccccaattgtaagaggcaagcgagagtcgaggtgcctcgggagataacatgttgcatagttgaacttcaatcctagtcaagttccacattgagagaagttctataagagtgcatgtagctagaatagctaccagccccagccctgagagaggtagtttacggctgtaagactaaagtgccattttcagggaaaaagtgaattttcttttaaagacaaatgaacagtagtttcatatcaagatctgattcagaatggcaggcaattgaccatagataaatgcacaaagaccaatcactagaaggtcatagagagaaaaagaattattaaacatgccatagttttcttttagttttgctgcaatatctcaataatactggtcaatagtgtaaccaaatcttacttttctgacatgggcggaaggggattcaaatttggaatttcctctttgtaagaataatagtatcactaggctatgcatgtgaccaccatacaactaaaacttactccaaacaaaccaaataacaactcatgaatagaaaagagggaaggggaccatcttcacccttgaaaaacatttcaataaaaaaggtttgccagtaatatttaaacatccatttttgcaccaaaaaatagtgagcatctaatctattctagccagttcaagacctggtaggtcagtggtctcaactctcaagtgttgagcctccatagagaagtaagaagaataacattactcagatcacggcattaatatagaaatgaaaattaaaaaagagtacatagactatcctgcatccctatattgatcctgcataccgatcaaatctaattattatcaacatacttgcaagagaaagaaagcatactcaccactagaggtgatgccagcttcgtcaaatgtataacccttaatgtagatacgtaatgctgctgtgatgtgaatcatcgacattatatatggcattacaaaaccccaagaaagatagcagtggactgtaaacagagcccgattcataaaccaattaacacttgacgtgtatgactctaatacaaatgtttgctttctcaaataattccagtacctacagaatagttacaatgtcaacatatagtcaagcacatttgagtttagaaaatgaagcaatacaaaccttccaaaactaagatcactagcaaggggatgagggaaaacagcaacgggaggtgatgtgatgagcctcttatgagcacctggaaaagaatagatgataccaaaatacacaattatttaaatatcaatttaatgtaacacttatttaaacagcctacaagaattgtgaaataaactaatcagtattctaccagctatagcagccagagtcatatcgtcagaataaccaccatctctaagtcctgataccacaccatagcgatcttgtctaaagtcatcagcatgcatctgcaaataatgtgagagaattagaaatatatattttaatcttctgcaagcagtaaattagaaagttgcagctacttgccatcatgcaccctccccatagaaagaacgtcctcccgccagtagcaaagcccatcgaacaaggctgtaaatagaagaacaaaagctccaagatattagtggatttatcgccaacagtctaaagataaagaagaagaaatggaaacaagtgatatttttataatttaaacacacaactaccacaactaaaagggacagatagaaaataagaagctcaaactacatatattgatatgataaacaaaattatttcatactctactatattatttgaaaacatgttaatgagtggtgctagaaatactatgaaagtaaccaaggatatttttttccatcaaaactcacaatgggaatccactttttcttggttactttcattatatgaatatttaggcatatactacaattatgacgatgtgctgcttataccatcattgttttgcacttattataactgctagattggagataacaaggtatgatactactacaaaattatctttgttatataaaaaacatgcagttctttaaatatatcaaatgaaatttgggcaaaaaaaacgtggtaaatggtctataccatatgatactcatatatgcagtaactgcctaaacttcctgaaggtaaatcaagagggtagccagtttgaatgaatatctgcacatcattgacacaggagttatgatcaattgcagttaaaagataaattcatatcataggtcaaaacagaaagatgcatgtgtaatatctcagtatgcaatcaagaatttgaaagttgctggcacaattacctcaggattttttaccatctcagcagtcaaggctccaattgatcccggatgaagcctaacatcgtcatccaaaaacaacacatacttgctgtctttatgcattttctctactccaacctaaattatagttcattttagtattcctttactaacataaagaggcagtagagaatacatagctacacctaacaagtttagagttagacaaataaaggaagtgctgtacccaaactccatatgttattatatgttcatgtattgtttgaattctaaatgcattcctatccactaatctattctgcgtcctatgatatagagaaagacaattctactccatcgccatgaagagatatctcgctattatctgaaaaccaaaagttcttgtgaaagcaaaaagacatgcaacaacttgtttaatttgatatgtaccaactgattgtgaattttctgactgcaggttgttgaatggccagccacaataatctttgcatcaacctcatcctgtgcagatcaaacatagataagagtcagacagagtaaacatgctaaagattatcaggcaagatttctgattctcttttaacaataatacataatgagaaagccatatatgaatttaatcataatactctgtgacttttctgaaatgcagaattgaaaaaggatcgagtgaaattattgtgcaccttatagtcttcaattaatcgagatacagcatggtaagcagggtcatctgtactttccacgatgaaaagaaattccagaggaccaccatagagagatgtaatctgcagacatgaatgaaccaggtccagaataacatcagaactaaagacaaatattaaatcttttccgttggagcataatatttaaacacgtgacaagctagcaaaaggaactcagatgacttgtattttatcctaatacagtctattaaaattaataacaaatttgaggtgctgatgaaaagttatataacaggctgaaataaacacacacaacgatttcactttttataacaaagaaaaaaaataaaaaaataacatataggcaaatgcatctttcaaacaaatcatagctggcttttagatcaattataacaacgaaaatcacaacaaaaccagctccccaaaccaaccccaataataaataaaagggatagcagaataggttagcacatttctggcttttgggagaaaaagatgcatcaacctcacctgacttctccaattatgtaaattgtgttccccaaacccctttaagggcataacaactgtcacactaggtagcttgatctgactaaagtggtcaagttcattaatatcatgacaaagaaatgcaaagctattcccagtttgcatactatccttcaatcgcttgatctctctattcctataatttagagaagggaaaatgatgaacatatctccacagcaacagacatgaaacaatgaacaagtgccacctccaatgcagttagactcatttctgaaccaaagcaagtaattaaaccaaatacctgacataagcagcacaagcccacccaagagcaagaatcaagcagattaaacatccctgcagcagaacaaagactttagcactgaaaaatctgaaatgaactcttatctgataacgtcacgatgattttaatgctaaaacaaaacgcatatagccaaagtacacaaagctactgcatttccagctgtccctccataatagcgaaagatcaccggattaatacttatatctacagagctatttttactaataaattgcaaaatacaacatttactacaatattaccaggaaactacctaaacaaagaaatttgacctgtattatgctataaggttcggatttttacccaatttcaagtaaaggtggaaaattaatgaataaacaaactctcggcaattcaaatgctcatagatggttttctacctgaggataatgcactaactaatccagattacaggctgaactagcttaatatgatcactacaaaataaaattgatctctctgacaaacatcattttttgaacaaatacagaagaagccatttttttcttcttctttgatataaataggccaccatatgggaaaactaaaatattcaacggaagctctaagttctaggaggaacatcatataataataaatttaattggaaaaaaaaaaaaaaaaaagtaagactgatgctcagcaaggcaaagagaaaaacaagaaaaggaaaatagctttaaattttgaattgaagaaccgagggagggaaaagggaataaaaatttttatattcaaacaatcggctaattcgaaagagtatatcataaaacaccacgctatggaatattcatcctcgaatctttctcggaaaacaaacagacatggatctaaaacagacgagaaagttgaaaggcataaaataaaaaataaaaaaacgagtgtaaggagtaaaaagcaaaacctgga

SEQ ID NO: 219424 - DNA, 2591 bp, Cannabis indica
ttggttagacagaggaatggacaggttatttggacagaggatccgcttccgacattgtgtttgaaatacatagtagaaattttgtacgagaaataaatatagtagcatatgtgggctattactctttctacaaaataatagaacggccaaccccttaagattataggctcttgagtagaatgattatgcatgaaaaaaaaatatatgaataatttcactgtgcttttttttttaatagcatatatagaagttatttttcattttttttttgtcatgaattatttccatatattattcttcaaaaaattcaatataaatgtgtgcatggatttttgttcaacatattgaagagctaagggagcccaatgctctgcctcataccaaaagaacccacactacaaaaaaagactattttttagtgacaatcttttagtcacaacaattttttttttttttgactaaatgtgacttttagtcacaacaaaaaagatacttgtgactaaacataatgtttagttacaagttgtcactaatttaattttaatcacaataagtattatgactaaaattacatttagtcacaataaattgtaatttttgtgactaatatttttagccacggatttttaagtacaacgtaggaataaaaatttataattagtcacaactttcttatttttagttataaattttgttttgactcaaagtaagattttttatagtgtcatgtgcatgccgaactcctttctccaccaaatacaaagatgcaaggggctccctagctaccaaagccaccaaggaatgagcacaaaccactgggacccgatcagctccccaccccacgtgtacccatgtctgatcaggtctgctcatgtaaagggcacgtgctattggatctaccatcttaagatatagtcaaaaaattataagttgaaaagatatctattttttgaataataattttattattatttttatatttgaaatgtaacttaataacttggattaagaaaagatataaccaagttaagaaactctagcttatataatgtaaacctatataatgttatgaagtcaattgtaagggggctctcttacgctcttatttcaaaaactcgattgagtactgaactattggagaatataactttcgcgaaaactcgtttcaaacattaagatcaataaaactctaagtggactagtttattaccgctaaaagaggttgaaccactataaaaacattgtattggtcatcgttaattttcctttctataaattggtttatactttgatatcgacattcacttgtgttcatcttgctcatatcgcaaaagaagtcaaaacgtgttgtaaacaatgtcgataaacactactacaatttagccttttagtgacactctttagtgacccacgtaaaagtgcgtgtcactaaagagctaggagtgatttttagtgacacgcataatgagactctgaacaatattcgttgttagtctcttataatgtgtgtcactaaaaatatgtagtgtcactaaagagtaatactcattactatcattttttttttaaaaaaaatattgacctagagtcatgccataagagactgcaaaagtgtgtcccgacttacgtagcgcgtcactatatcatagtcttatatttaattatttttaaataaatttaatattatgatatagtgacgcgctaaacgagttgggacacgtgtatccagtcgtgcctcgcgcgtcactatatgttaataaaaaaaatacttttaatttattattttttttatttaagtaaataaatcaaatctgttttttttttcaaaaaataaataaataaaatgaggtataaaatggacattatgaaaccctaaagccccaaactcaaccttttccctcatatctctctgcgtcctttcaaaaaaaaaaaaacaaatatctctgcgctcctccagaccgacgacaacccttcactgtccaacctttcaccagaccgacgacgaaccccatgaaacctcgctgctccctctccaccatattgcccaagttatgggctcttttgtctctcaccctcccaacaatcgcatcaccgggatcttcaacgaccagcgacagtcattctctctcacagcagccgcatcaaaccatctctcgacctctctctctctctttcacagtctcaacaactccttctagtcatctttctcttggtaacactgacctgcaacttttaatctcactattacatatatcaataaatgatgaaattaaccaactctttctcttgttctctctctgcaatgcacgacagtgctactccggtcaccgtaggcaaaaatggaagttgtgggtggtctcgtcgagttctgaaggccaatacccttgagccacgaagccaccaccattgttccacctccgtgaagaagtgcaccagaactgcgagtgcacgcccgattgcttctgtgaagaagctccttgagctgatctaaaaattctatggaaatttaagtatttgtttttctattttgattatgtatctatatttttttttgtttttgattgttgttttaattataattttacaaaatg

SEQ ID NO: 219425 - DNA, 8325 bp, Cannabis indica
tgaagtgttataaatcatatagttcatgtcattgcaaaacttcaactgtaatgaagaagctttcttccaattaaaaaaaataaaaaataaaaaattgaaggggctttcaatttcatagtgtcataagatatcaattcctctctcttttgtgcacatagagataaatcaaacaaggaattatttatattttccaaagtcaaactctacaaataccgttggactaagttccctatcaaagtcagttgactcctttcttttctcatcttcctccctccctatcagtttttgccgaaactttaaataatattctataaattacagcataacaaagacaataaaaacaaacatttagaaaagaatgaaaaagagcatatacctgttttatgaacacaataatgacacaaatatacagctaactgtaaacaattatctaggcttcaccaataggcttaaaattttcaagttgagatttcaaaaaagaatgctcatgacgcattctctcgagccgagcctcgaccatgtacatctcgtctttgaggtgatgcattcgcttttccaaccaaattaaagcttcagatgataatctcccaccacccaatttgctgtccatgcccatattgtactctgctggtgcgtgtacatggatgtgttggggtctagctaaaagcgcaagtatgctcaactgaaaaaggtaaaaaaaaaaaaaaaaaattagcttactcccaaaagaaattaaaagtaaaatactggtttcagtaaatacagatctcacattttccagaacaaacacatatcactagcatactactgctcatattgtttagaaacagccatacctgcattagaagaatcacgaaaaaaatgatagccacggctagggaaaggttgactttgagtttttcatggatgaatacattctcgtcataatactctgttaaccacgatacaaagaggaaacaccgcccaatttcgcttgatatagactgtttacatggcggttaacagcaacaaaatctgagacattctgtactctcaattgttcactggattcatttatcatctctgatgattccaaatgttttgcttctctttcagagggtacttcactagttggaacaacagtagccacagcattttcttctgcacaatgaaggacataataaacattaacataaattaaaaatataattgtatccaaaggctttacaaaaacatcataattttgctcttaagcaaatcagaaggtgcacactgagaactctccaactatgcaagtgtataacagtcaaaacctttttgttttgcaaggttcttcttctttaacagctcatgcgcctgaaagaaacaacaattttacatccttaatcaagtggagcaaagtcaaattataaactgaacgtgtgttagagaaaagtcgtaagatgataaaagagagtaataaaaaagataccatttttatccaggttccataagcttctcgacattcttctaacgtagattgcactattttgcctgcaattatttatccccattaaaaattgaatgaagccacaataaaattggatttctaatatcaagattattgtaatgtagcccacaatcaaaaactgaatgaagcccacaataaaattggattctaatatcaaaattacagtaatgtagtaaagatgcattcataatttgacaagaatcgattggaagtccctgagaaatatacagcttgcagcaagactaatagttgtcataaacaaacagttattgaagctaaaatccgtccaatcaaacacactacactaccctcatgcaaaactatcaaaaatgtgcttatacacaagacactaaccaaagtctagaggacttgtgcttggagtctaataatctaatagctatagtcactcagctttcaaaattatccaatattatcctactatagattgtcgtcttataatttattcaaaataatttgaaagggaaaatcactttggtctctcctaaagagcatgttaatcaatcaaaacaataagtactggtagaagaatacctttccaaacagttctctttgaaaatgcaacattcaaatacacccgtaaaaagcagccttcttttgattcatcagcatctctcttcacatcccagagcccctgattaaatgtgggataaatggatgttataaccaaactatcgtgagagcaacagtaagctatggaaatattacgttaaagttgaatataaaataaaaacaaaaaacaggcacgcgcacccacacaagcaataatgagaaaataggtttttattttctgtttcaagaaaaataaaaagttacatgttgacaattagtaaaattatgatgaggaactcatataaatattctatcatattcaaattaccaaatagaaaactcaattttggattaacttatcatgagctgtagtaagttcatagtcccaaaggataaatcagttttaatatctggagatctaaaaaaggaaaacaccgttcaatgctttaatgacaaacaataaaagcatttttaaattaaaaaaccttatgatgtccacattttccaaccacgtaaattgaaacaagattaagacactttctatatgaatacctacatcaagttgaaaataaaaaatatataaataaaagtgacaagtacctcaacatgaaaataatctccatacggaacatcactaacttcttgtgatgtctcaataaccaaatggctgcaaatcaaagataaatatgttacgaaaacagcaaagctacaatctacaatagcaccatgtagaaaaaaaaaatatttagctttaaaaaaaaaaataaccaccgcagagagcataaacaaacattgtcttccacataagcatcacaaattgcttagaatagatagctatctccacaatgtcattgtcaatcaaatatattactcatctaaactcaaacaaacacatattgtttgacaagagaacattatccaacttatagttgcccagcattaaaaatcattgaacttataaaaagaacagaaaaaaatcctgaagaaaatacatcaagaatgctcaaactctaaaaaagagactcaaacttctttactgcaggattgctacaaattagtgaatccatatccatatgtttaaacatactaaaaaacagtatgattaagcaaaaagaagaattataaatcaatattgaataaggagaaaaggtcagactgccagacttattaagttcagttcaaattatttttaaaaaccagtacctgttcttatatagccggaacttctgggtttcctgacaaccaccaaattttgcacctttgcaacatcaaaaatccacacacaaaatgagacacaagacaaataagcccctgcatacgcttgacacttaaagttgaatgatccgtgggccataccaaagtacagttttattggatgcagaaatgatacatcgcgagcatgcccaaacttgtcatgtggataccatgtattgcatttaaactctgtaaagcacaagagcaataaatgtatcaaaacttcacagtaaggagagcctaagaaaatggcattaaaattatttaattacaagctgcctacctttgtctccacagttactatgaaatgattcaacaaaactaactgcatcatctgaaaagaaataattaaagaagtcctcgacttttatctgcacacaatgattgagagtgtaattatcattaaacttgctaaattacaattaaacgtaggcattatttgcaattgatcagaatcctaccggaaattgtgattctgcaaccattgtataaccttctgcaactgcaataaaagagtacacacatattaaggccatatactaaaactatgaaaatggcacgacttctataactcaactaaaatgaataagtgagattatatctcccaacaatatttagaaaaggatttgactttcctctcatatatatagctttaacacttgagtatgttctgaaattttgaaatcactatttcctctaaacatataggagctggttcaatggacacacatttctacacaaattattgtaacatgttaatctaaaagttgatgataaaaaattacatttatatataaatatatatgaggaaatttttatttttagttttaataaatttcaatcatcagatcagctcgatctaacggtgtttatcttataaaaatttgtatagaaatattcgtccattcaacatatcacaaatatatatacacatataaatttatataagttagcatgtgaaatgaataagctttataattactctcttagaggctcttctataatttgcatgaaatataacattataaatcaacttgaccataagatggacaatgtgttcccatagatatatacggacaaataattgtggtagtgtttctatattaggaagctcaactaagagtagagaaccaaaaaatatgatggtaatgttacaaaatctagactaaactcactcttgggggcttcacaatcctcctgcttcaatatagaactggtggttgaagatgaagacttagtttccggaactattactatatcctgttccacaatgtcctgcagctctgcaattgttgtcgttgcagcaacatcttcaacattggaaggagccacaaaatcttgtgcaattgagatgtctagcttcctagctcatataggtaataccattaatatgttatcatcaatatttcttcgggtaataaaagaataattttattatctcataaatatacctattgttagaatccacttcatcaactgcctgaataatgctagtgacttcctcaatcacagctccattctcttggctgctggctacagatactgaatcctgataatataggaacacacaataatgcttatcgttttgcaatagttattatatatgaaatttaaatttctataaatgagatgaaaagaaaaagggataagaaatctttaaaagtctatccaaaagctaaaaggtacaaaaacttttgtacactatcttccaaattcctaagagtaaaaaagaagagcatctgtaaaaaaacttttatccgccaaaatccacaatacttttttgagggtcaagaaacaccattaagaaaaatgaattcctgacatatttctatggcattaatttaatttcaacattgcttgatatattaccccatcaaatataaagctaaaaaaatgcaaagttgaaggattttaaaatatttaacagctcacactcaatgagaaacgagatcaaaaatgaacattaaattaatgaaacacctgatctgtaattagtttggcgccattactatgttgcaaccacccatcattaataagcttgaaagcttcatcacgagagagaaatgacccaaaaaagtactgccaattaaagaataatacaaatcatcatagctgatactaaaatgaaagagcatgacaaatagaggctgtagtacaaagtccatgagggccaattcaaaattaacataaaaactcagcactacctttttgcttcctgcataaatttctatggcattagggaagatgcccgctgtctttgctcttcgtacacttgtcacttcgtggaatgggatcattttctgaagcatgacccacaagattctcaataattaaaaacaaagtttataatgtattgcatgtatagaaataaacaatgacagtaaaaatgtcagaccagtataaggtaccaacaaagtcgagcactttaaaagagtttagctggctgttggcaatgcaaaagctaaatcattagacaggacagcaaatgtagaaaaccttttctatgcagttatactatctagggttctctgtgcaaatgtagtactaaatctagtgctcacaattttgtccattgtccatttgccgggctttcatatggtcaagactcaagattactaaaagaatctgacataagtatgctgattgccaagagcagatgggtggccaaggtgttactggtagcaagcagaaaactttatggagcatggctgttcggtcatattttggggctgagtgcttaagacaactaataggagcttcatttgggatatagtgaaattctaggtggctaatttggtctttaaaaactaaaactaggcagttcaaagcattatctttcttggtactaaatagcaattggcacccgcggttgaaacttataatgatgtcttacaaactttaaatattaatatacaactaccatttcttatttaaaaattcttgaaacaacgaagccccaatataaatacaggacaaatacactcaaagtataaaatagttacagaattattgaagaatgagttcatcatcgtaccttggtttcatacccgaatatgttagagtaaaaacaaatatagtgaacaaaaaggtacatatggccctacaacagataaatataaatagcattaggaaccaagaaatagaatgttagaaattgattgcacagtatataaatcaaagagacgtaatacctgaattagtatattttcctggaacgcacagttaaaatcttcaataagtacctgtgaaataacagagacaatgtgttcaattaaaccagtaacatacaaccttcaaagccttgagcatgtgtacagtgtactcacttcttcaggaggaagacgaaacaattggcgatactcttcacttcttaatatagttgcagtctgacacaaaccaaacaggaacttttaattaaatatgaaaaacgaaatcatttactgcaacaaaaagaaagattctaagccaacaactaatcaactaagccaaattttctcatactacattcttaatctaagaaaagttccaatattctataattccagaataattattccaaaatttcctctcataatttgtataaaaataaaaattgtgaaatttcactacaatgcaagaactcagaagtcatttccagttgcacacaaacaagcaaaacaataaattcgaacgcatacaacttcaaaatccaattccgaccaaaaaaaaaaacaaacagcaacaacaactgaattaccaaatgacctgtaaatcatcgcgatcaggtgtggcgggaagagaggaggagtcgtaggcagtttcggaggataatcgcgagggcgaaggctccatagaagacggctgcgacggctctttgatgatctcggaggtagcggccgcggaagcagaagccacagccatgagaaattagggtttagggctgaggagaaagagagagagagaaggcggtggcgatggtggtggtggtagtggtttagagagagagagagaaaggtcggttgagtttgttaagagtcacagttggcgttggcagtggtgtttggtgtgcgagtgccgagtggttgttgaaatgaaagaaactaatagaaagaagcgaaagacaaaagaaagaaagccttttttttcagtttacttactttatttgctttgcttgcttattaattagtcacgttgacattttttgacacgtgtcatgttctgtgtgtttcttctcacgactttattacacttcacactaatacaccacatacatatatgttttgcaaagtttaaatgagctgtatttggatagcgtgattggataaagacataccattttaattatttaatcgtcttattacaaaaccatatctttttttttctttcaaaaaaaaaatggaatttaaagattggcttggactgttgttcaaaataagaaaaaaaaattgattttggatttaaaatatctttgtcaatatctctcttctttctcattctctatttatcttttctttttcctttttcattcaatatcatctcaccttcaaatcaactaaaaacttattttaaaattagcattgatagatttatctttaaagcatgacaatatacacacttttgagtagaaccattttatacttttgtgtcattcattcctataaaatggatgagatgttaatttcacaacggctatcgatgataataaactaactttgatgttctttattgattttaaatttgatagctttagtgatatgatttatgtggcattttatgattaaccttactttgcaaaataaataaattgaccgacttcaatgagttttttagataaacataaaatttacgatagaaacaaatttgattgatttcaataaattgtaagaactttgtaatttacaaagttttcgagcaaaagaagaagcagaagaagatgaagtgaagagagtgaagagtggaaaatgtaaatgaattgttgaatcttaaattgattggcattggttttattcatactcaatggttataggagaata

SEQ ID NO: 219426 - DNA, 2953 bp, Cannabis indica
aaaaataaatactaatccatctattaattgactaagaatgagtgtacaaatatgtactcattagttacaaataatcattgtttgtcattgactaaactcactgttatatatgtatatattaggtgtttgcagaggtgtttcgagtgctaaagccaggaggggttttcattgtgagcttcagcaatagaatgttctatgagaaagcagtaagtgcatggagagatgggatagagtacagtagggtacagctagttaagcaatactttcaatctgtggaaggatttactgaagctgaagtgattaagaaaacaccaggtgcttctgcacctgctgaagctgcccaaggagataataaattaccatttggctggtctctggggttactcggtttggctcgcccctttcttcagaccccttttatgcagtgattgcttatagaaacttcaagcctgtctatgaatgaagaacaaaatatcaaacatcaacatattccacttttactctttcttcatgatgtcaccattgaaagtgtatttttataatattaccacattattagactgtatattctaaattctatttgaaaatattgtaaattacattatcaaatgtgcaattttattttcaattctgaacttagaacatctttggagaaccaattttagtagtttcttgacaactatcatcaacaatcaaatcaaaatcaccacccaactcaggcaggcctattaagcatagattagctacaactatactataatcaaattcaataacatagttctcctaattcaatacacaaaattaattttttacatgatattaaacttgcgcaatagtgagctatataatatgtgtaggcattgctacgtagtactcatggtacttagcgaaacatcacactataattagttagcaattttttataatatttatttaagtaaaacaagtgagattcgatattgaatttaaccatattacagctctcaaaagtattaaataccatgagtgccctttagcatttctcttattcacctcaaagttctattttctttccttaattttttcaagatatttagattagtcataattttctttttccgtcttagttggtttgttgtaatagttaggctattccaccaaacttttcttaatttattttaagctaagaaaatttttctctactatacttatatccacggactagattttcaaaaagtaagtactttccaataaatttatttataacattatataatatagttatttagaatatttacaaattttaataaaattctaacataattttgtaaattttttttactctcactacaaattaatttatagtgcgcaatgtgtacttttgttactttacatgcctaatatttaatgggccatgaggtgagcttgttgatgtataaaagagaatagaatgtaaatattattaaagatctttttaacgagctcgatcaacaacatattttgacgattctattgagtctgaatatagttgataatctgttttctagtctaaagagtagcatcatggtttttactcgtgcatacaagttgatacaagctcaaaaaagaaattaaattgcatctgattcttttggattctggcacaagctctagaatttgaaggtaccactgaaaactcttaatttggtatggcggcaggctgcttcaaattatttacccaccttgactcaattaagtggtaagagggcccaacttaaattatgtgtcccatttgtcaaaaaggtgaggaaactattttccatgcgcttatttttttgtttacttgctgctcaatgttagcaaaggcttttggctggagttaggccgattgttgctgctaattttagcagttggtttgatcaatttttacaaaggtgcaataaggacaagtgtgagaaagttgttgtgttgtgttgggattatggaaggttcgaaatgagttcgtttggaactaaaagtatgctacagtggatggtgttattatttcatctatgagttgtcttgtggaatgaaagtcagcccaaaatagaggtgcagaagcttctttttcagtttttcaagctagtgatggagcaaaattttgagttaagccacaggagattagaatcaagataattgttgatgccactatttttcgtgatcgagcagcgtttggtttggcatagtcgctcgagactctcaaggtgaattagtgatgattaagtcagacagttttgcagctatatgcgctctggatttggctgaagcatttagtataacataagtgctaagctgatttaaaactcaaccatagcgggaagtggatctggagtcagattgcttagtagcaatccaagctattcaaaattcattacctatattttattcttttggggttaatatagaagattgtagtaaacttttagcatttttaaataatgtttcttatttttattaagcgctctgctaatatggttgctcataattttgttaaagcatcttactcttttcaaaatcgagtgtttaatagaagagatgttcttattaaggtacattttttcttaatttaacaaattaatgaaagttttatatttgttttgagaaaaataactattagaatgtagatacaccacaagcacaaactatatgctttacaatgtaatttttttttttttttttttttttagaaaggggatatgattttgagacctatgtaaaacgattagtacaaatatgttatgtttatgaatctatgaccactttttttttaccttcacttttcctataaaattgtaaacaacgtgtacaattgaaaaagcaaatacaataattgtcaaaaataaaaaatacagtaaatattttctcattaaattttgttacaccattttatttctctaacatttttctttgaatttttgagatggagaggaagaatatttcctggctaaaaaagttt

SEQ ID NO: 219427 - DNA, 6700 bp, Cannabis indica
tttgatagagatattgggtttgaaatttgaatctgggtcagtttgaattcttggttggccatggagaatcgtagtgatccggaatctagtcagtttttgaggttagttaatttaaattatatgtttttgcttcttaactcaattaagtttcgtttatcaatactaatgaattatttactttgtgatttttcatagtttgtttgctgctttgtcatatggggttgcttccatggccatggtctttatcaacaaagccattcttatgcaatattcatattcaatgacacttctcactgtgcaggtaccacctaatgaaacagacagtaatctttcaattttgaaaaactgtacttatttattgaaaattcaaagtttaagggtcattaatttctgtctttctctctatttttttggggtagcaattggccactgcggctcttatatactctggtcgaagatcagggtatacaaaagctaaaggattagagatgtcaactgccaagaagcttcttccagtgtcattattctataatgctaatgtggcatttgccttggcaagcttgaagggagttaatattcctatgtacattgctataaagagactcacaccactcgcggttttgattgccgggttcttctcaggaaagggaagacctacaacacaggtatgttatgatgcttagactattttcagttctgtttaggttgtttgtacaagtgtatctaagaaaatttatattctcactttgtgtggatatggaatattgtcaattgtgaaatatgtcatgggattacaatgactagattggagtaagtaggagttactcatatcatatgtggaaggtgataattgttggaaacatttgaaaggagtgtgcctctcctctcctgtaattgcaatttcaaatctcttaaggctcttttgtatatttattgttccttttgttgtaatataaaggatatatattaatgtcaggatggattgacaattagatgattttaacatatccccatacaaattctactcaggcatgtttgtcacggaaaatgggcccattaaatgagagcctatgcaaatggcttccctttgattttaattttagcatcaccaatttttattgttgacagtatagagcttctcagaatacaataggcataattctgacatgtttggcaagttgcaatttaattaaagcttttggctgtgttcaaattcaggtcatcctttcagtacttcttactgcggctggggttgtcatagctgcattgggagacttttcctttgaccttttcggatatagcatggcctttatatctgtgttttttcaggtttggtctcgacctctcgtgtttttttttcctgaccgtgaatttatacgatattttcgtacacctaaattgtgcacctagaaccaatactgaatttatttttaactgcagactatgtaccttgtgttggtggagaagtctggtgcagaagatgggctatcatcagttgagatcatgttttataacagctttttgtctattccattcttgttgttcctcatcatagctacaggagaattcccgaattctatatcgatactacttgcaaaggtcagaatcattactgattttgtttattatttacatttccttactcactgtgtgggaagtgaatactgcttgagcctagagcacaacggattaaggaactcaatttgcactcgattttctagttgataaatcacaataggcttctgggttttctattttgtttattataatttaatatatatgattaaaaactcgactcaaagccgaactgtggttagttagaaacgatacgtttatgtataagattttgaatattgcttgcaattaccttaaacatagagagcatagtttgtgaacaaatttggataatgtaagtgaattcttggagaaaatgtatgtttccatcttttatgtcattagaattttaataaattaaccttctgtaacatttatacatgaagctgataatacttctttctttttctttttggcagagtaattcattttattttttggtgatacttattctttcattggtgatgggcattgctctcaacttcaccatgtttctatgtaccatagtcaactcagctctaacgacaaccattgtaggagtcctcaaaggggtcgggtccacggtatgtactcttgactatgctacttcaataatgttgtggtttcaatttcaaacatttaaataaaagaagaattaaacaccacttgaagaccagatccttgtgaccattaaagttcttgcttacttttctatttcagggaacatatcatgtgattgtgtttagttcatataaaatatttatgaccaatttaactcatgctttcatgttcttgtagacccttggctttgtcctacttggaggggttcaagtgcatggcttgaatgtgactggtttgatcatcaacaccgctggcggggtatggtattcatatgccaaatatcagcaaaagaagaacaaaccaccgaaggcgctgtcagatctcgaggctcatcgcaaataagtgatactgaaatgatccctattgtcttctctctctattgttatacagattttcttttttgtcagtcatatttatgccgttgaaaatgaaaattcggttatgattcagcctaatctacaacatttttgaaacattttgtgagtggcaatgtaagttttgacaatgattcagtcatacatttttatctctcaccaaaactgtcacaaaagattctaagattgttgaaagaactgtttattgtatcagttatatgcagataatcgaacatcgttggctgaagacatggaggaagagccatttcgtagaatacccgttcgatacagttccaaccttaatattatttaccttgtatgtttcatgtttctaacctttcatctttctttgcttgagcagacatcatgaatcttctaaatgtcttagctgagcaatccaactgacccaaaaggcggtcgaagaggaagagcacattcaacccgacgagggtaaagtcgagcgatacagctcgtacaacgagcattcttactcaaagctcttgaagaacatatgtccacttattgttgctctatctaagctcatttatcacattcacatcttcaaacacaaaactcaaagctatcaaaattaaaatgagaattgggataattatcgaaatgaaaatgttactccactgcacttagaaattagaatcaatttattataattttaccttttaaacaaaatagtttagttttaggttgggtttctccttccaaattgtaatatgcatgaagtaaatcaactggagggtgcctatgtggagtagctgagatcgaatcccatatcgtacaattaaaaatttaaacaaaagaagtgaatattaaattataactcataaaaattgaaaataattaatttttttcaaaaattgaaaatacatataacttttttaaaatattgtaataataaagagaaattatactgcattaataataactaatgaaccaaactccaaacaacaaaatattgaaatggaaatgtttactttgaccttggtttagtgtggaaaatagaaagatgagatttagggcaatgaggtggaagttgagactgattataaagctctcttactttgtaaaatagaattttgttaagttgaacttgatttggtgcttcatcatattttatccttggttaagtttatgttttgtgatcgtttttcgaatcatattgctcataattttgctaaacttgcattatcacatgatgagataagagtttaattgtccgggttaccggactttatgtaagtatttagatttttgattgacattctaacattaataaaatattcatgaatattttattaaaaaaaataaggttaattgtagtaaaacctttaatacttttacttttctagcaattaactttcaaaactcatttttttggcgataaaacccacaaaactcgtgctctgttagtaattgagcttttccatccaatttcatctattaagtgacatgttagattgtccacgtgtacataatttacacgtaattttattggtctatataattatttattaaaaaatataaaaataaattaatttaaaacaaaaaaaaaaacattaaaaaaaaaaataaaaaaccaaaaaattaattaataaaaataaaataatatcaacataaaaaaacctaaatttcctaaaccatctttctcccttcaatctttcactctcattcaccccaacctttacaacttctcttcccctttgtcggcaacctctctctctctctgtctctcgtctcttctcacgccggtaacacacactagcggacttagatgacacctccaccctcgcaagccctacctaacacgagatgctaaggaggagatctgcccagtcaaaatcgcggttgtgaaatccttcaatcaatttttcgacattattgtggcactatttttaacggtaagcaatatggttgagctcaggagctcttggagaacaaaacccctctaaaggtcgagcttgaagatcattaaaatcgaaatttagtgttcaccgaaatccatggagtccgagatattcgactctgatttagtggcttctcaacctcctcttgataaatagggtttagatgcgtgtcctccttggaatgggcttcttgatcccacggttcactattcattttatcactgtcaaacctaggcaacaccgcgcatggtggttcgacagtggttctccgacgatggcctcggcgttgagtaaaatctctctttctcaccttccatatctctagattttctcttcttttttttttctttggatttgagattttttattatggatttgatttgggtttgtttgttttggtgaaatttggatcttagattgtgacaagtatttagtgtttgggtttctttaattgtgtttggatttgaaaaaaaatgttgaggtggtggtggtgggcaattgtggttttgttgaggttgatggtggtggtgctagtggtggtaatatgtttgaagaatgaaggaaacaaaatttggaaaaagaaatatgaagacaagatagtggaagaaaagaaaaaaaaaaaagtttttgtgttttgtgatttttttaattttaaattaatatattttttaataattaattatatggaccaataaaattatgttacgtgtaaattgtgtacacgtggataatccagcatgttacttaacagacaaaattggatggaataacttaattgctaactgaccacgagttttggagattttgccgccaaaaaataaattttgggggttaattgctagaaaaataaaaatattaagggttttagcacaattaaccccaaaaaaataataataattgtaatttataataactattagattttgtatatttattttgcaaaataattacacaaaattgtaaagtaattaagatttactaattacacccccaaatatttagtgcaattaaccttaactaccaagcatacatattttataaatatccaaaaaataataaaatttttacaaaaacatctacaattttcttaatatttgttcgaatttaaactttttattttattttttttatataaaaatataattggtgctatgttcttgcaataaaaagattaacattgttttcgtaaaaatctaactaaaaaacaaaaatagtagacatgtataaaaacaaaaaattatatatatttgacaaatactaaaaatatatcatattactattgatgcggcgctattcttatataatttaatttagagaaaggttgtttaagattttaatggttactgaattattgatggtgttgtaaagtgaattttttgtacaggtggcaaatgaaataataacgtgattgtttaaataattgtcatattagcaacaccatgtgaataatttaaaattaaaaataaataaataaaatttacattttcaaaatattgttaaattaaaataattaatgattaaaaaaattatgtaaaactaaattaaaaataatatctcattgtattcttattagttgaattaaatatcaagttatgaactaggtgaaaaattatcctaaatacattgattagttaagtaaatgtttatttttaaaataaatttagcaggtcaaatttaataaattaattaataaaaattatgaaaatacttttcttacacatcatttttttttaatgtataataataaaattaaattatataaatttactaatattaaatattaatattttaactacaacgaataaatatattatataattaaatatatataacacgatatatagaaacaataaaaatcaatatatcataataaaaaaattatatactataaataaattataataaaactcaaattagtatattaatactcaaaaaaactatataatactagtgttgtaaatacaggctgggctttttgacacgatacaaaattggcacaagtctggaaggtacgagcacgactaagcacgaataaatacgttggacacgacacgtcacgatactacaaattggcacgacacgagcacaaatagactagtctaaaaagcacgacacacaacaagcccaaaaaacacaacacgatatattaaaaaaatcttataatttattattaataataatatatgaatttat

SEQ ID NO: 219428 - DNA, 4038 bp, Cannabis indica
tgaaataaataaataaaaaacaaataagtaagaaaataattttgtggtggaaaaatagagggtaatccattgatttttatttatttatttaaaagctaacccataattcagttacaaggggtgatgtttttgtacaaaaacaaaccacaacttcatcatccatctccactccttccccagaaagtgggcccatttcatgaatacgtggcaacacatgacttgctttcggcccaatgggccaagcccaatcataatcccctgggatgatgttctatctctctgttttagactgaaaaacgtttcccgttgatccaaacgggtcccctctctcctcaattccaacttttgcagaaaacgactttgatttgtcttcaatcgtacggtatcatgggcctagaagcaccggagctggacaacggtcagccccacgtcaccttggatggattgaaagtactgagaattgaggtttcaaaaattgtttcttctgtattatttggacggtattccaagtaaaagcaacacctcagatatcagaagcaacgtcctttaaatcccggaagagagagagagggagcgtttcagagagatagagagatgggaagagcgtttgtttatgtaattttaggaggaggggttgcagcgggctatgcagctcttgaattcacaaagagaggagtccctcatggcgagctctgcataatctccgaggaaccagtgagtacaactctctgttttcactttataaatctgaattatggtgttatctgacgtgggtaggcatttttgagaattgggttcttgtacagatttggtattttgtctagtttgtggagaaaagtggagaagtgtcattagttttttgtttttttgaaactgtgtttggtccgacatattaaattgaacatttcagtagttgttggtctctaagtagtattaacaggacattgctgtagtcttatggaaactttttccttttttttttgtttgaagtgaggctgtacttaaacttcttggattcaaaattttttcactttgttagcagtttgacaaatcatcaaagccatttttgaaattatgaatacaattttatttgcatgcggacgtgcagatgaatataagtctatgttactttactcaaaacaagaaagcaagagtattatttggtcctttgaattggataattcataaatttagagcttaaatgaatatttgaaatgggcatatagcttaaagtagatactatatagatatatgtctcatatatatctttaaaggatccataatgtttcatctgatcctaatcaatccctactcaggttccaccgtacgagagaccagcattgagcaaaggatttttacttccagaaggtaaaggtccttgtcatgatatgtgtttttttctaaacgcaattgccagtgtagattgatatgtggggagcataagacctgtacaacagatgctttgaagtatgtaatggtcattttttggagtttgactcggttcttataagtttaagatttttgtgttcctctctttattttgtcttgttccgaaacttgtatgtggcttgacaaaattatttgtgggaatatacagagcctgcaagacttccatcctttcatacttgtgttggtgctaatgaggaaaggctcactccaaaatggtacaaggaacatggtaactattgattcacatctttttctttatcttgaattcacatttatcacatgcaatgtaatttagatcttgggctcattttctaataggaattgagttggttcttggaactcaagtgaagtcagctgacatcaggcgtaagacactaataacagcatctggagagactataagttacaagattctcatcattgctaccggtgctcgggtactaattcttaacttatattttatactatgtttatgtgtgttgtcggtcactcttgattttgcaaaatgcaactgaaaaactttggtcactctgtcattagagcatatagatttctataagtatttcatctgtgttacctttttctaccatttttaattaaaatgtattgaggaatatggtgctgtgcaccccgggaaacactaaaagagcttgtagttgttcttttttatatgatgtgaaacaaggtatacatacgatatgacatacttgttttccattaacttattatgatttgtttttttttcctttccaaaaatgattttctggttgtaatgaattttgcaattgtttgaagtaggcagtgataaaaaaaattaatgctgcaagaatgaatttcgttgttataatgaattttgcatgtgttggaagtaggcgctgaagctagaggagtttggggtgaaaggatcagatgctgaaaatgtgtgttatttacgaaatttgtcagatgcaacaacgcttgttggccttatgaaatcttgctctggtggaaatgctgttgttattggtggtggctacataggaatggagtgtgctgcatctttggttatcaataaaataagtgtaacaatggttttccctgaagcacattgcagtaagtactcctactctgacgactccttttctaacagaactgttttggtgctgcagtgcattatctcttaagagcatcttagttaatggaacaacagaatattgatcgtataattttctttgaagtgctactaattaatttcatttctctttaattttttgtctctcttccctctcttttcagtggcccgtttgtttacaccgaaaatagcaaattactatgaagagtattacaagtccaaaggagtaaattttgtcaaaggcactgtcttgtcatcatttgaaattgacaccgatgggaaggtaaatcttctaaggcttgtaaagaggcctagtttttatatttgggaatataaatacttggacacttggtgatttccaactctaattgaattatcgtacaataattttaagaggttttagaattgatatatacaggttggatttttaatatgtcgattgccatttacaggtcacagccgttattcttaaagatggaactcacctgcctgctgatatggttgtggtggggataggaatccgtcctaacacaagcctgttcgaaggtcaactaacattggagaagggtggaatcaaagtgaacggaaagttgcagtcaagcaacagctcagtctacgcagtgggagatgttgcagcatttccagtcaaactatttggcgaaatccgtagacttgaacacgttgactcagcaagaaaatctgcaagacatgctgtggctgtaataatggaaccagtcaaagcgggtgaatatgactacctaccattcttctactccagagtcttcgccttgtcctggcagttttatggagacaatgctggagaagtaatccacttcggggatttctctggaagcacctttggagcttactgggtccacaagggtcatcttgtaggatcttttcttgaaggtggaaccaaagaggagtatgaaactatagccaaggccaccaggctgaagccagtaattgaagatatagcggagttggagaggcgaggtctgggctttgcattggcaattagtcaaaaaccaccagagccaactgtcgctgcaattcctcaacctgatttcgctcttcaaaaaacactctatccttggcacgcaacagccggtgttcttgtggctgcatcagtagctgcgtttgcatattggtatgggaggaggaggcacaaaaggtggtaagaaaaggtgttgatgctattaatcctgcaaggcattggagtttcttcatgcgttagctcgtcacccatgttgctgcatgaataggacttaaaggagtttgaatttgaaatactctttgagttaatattttgataaaattctattcaagcagagaactcaatatatgaatgaatacacaaatgtatctgactaccacgtatgtagagaaaatatgtcatctatacttcttttttcttcaactaatgtgatctataaaatctgaattcaatggtgaggagatttgagcatgttcacatt

SEQ ID NO: 219429 - DNA, 2844 bp, Cannabis indica
tggcttctcatctcatattatctaaatacaggcgagttagagctatgcctagggcgaaggcctccaattattagaaaaataacaaaaattgtattggactcagccttattcttgaacttgaaagacacaactacttagccagcatcatttggaaacttgtttggctttcctcttctcatattatcaagacattggcgggtcagatcagtgcttcgagccccatttaacaagagccttcaaatatttgaaaaaaaaataacaaaaattgtacttgactcggccttattctccaacttgaaaaacacagctacttaagaagcatcggttggaacttgtttggcttctcgtctcatactatctagatacaggcgggtcaaatctgtgtctagggcctatttaacgaatgcctccaaatattaaaaccaaaaattgtattgaactcggcggccttatcctccaacttgaaaaacacaactacttaacaagcatcatttagaaacatattttggtttctcaattctcatgcatattattttgaattgaattgttttcaggagaggcctaaatggatgaagataagctcactagatgagctgaaaaccaaagtgggacatgttatagtaatgattttactagtgaagatgtttgaaaggagcaagatggtgcaaataacaacaggattggatcttctcagctattctgtttgtatttttttgtcatctgcttctttgtatatcctccataatcttcacaagggagatttggaataaattaaatctagttttacttttttttacttgagttgtttgtatttgtttttgtatatatatatgtgtgtgtatacatatggttttgtaacactcaaatttatagaaacattttttgaaagtaaaatagttgattgagtgagtatatatgagaaagtttccaaaagcaatgaattgaaaaaaaaaagaaagaattgcgtctgccgggagtcgaacccgggtctattgcttggaaggcaattatcctaaccgttggactacagacgctttctgaaagaaaattcaatataacattatatataagggggcgtttgatacaagggattcaaaataatcttaaacccttataaaaacacacattttaaacccttcattcaaatcaacctactgataaatttataaattttcaattaaaaatatctcatattaatttattaagtaaaaaatgcagcattatatgtttttttaaaataaataaatcaatttcattatcaatcggctaataaaaatggcccttaatccattgggaacaggctctacaatgaaaggacgatcacgattagaacatgaatagcgagcaaactaataaactgcttttgcagcattatattttgattagtagcaacctgaaatatataacaataacaaaatgttgaataatgaatcttaaacaatttttcctttattatttaaaccttaatttttttctttacaagttttctatatgtactcattttttcttaattgtctctaaccaattaatcaagtattattaaaccctattcaataaacaatctcatattcttaacaaggcttgatttttgtaactttgtaaaggcaatgccattaatctgtctagctctttctcttgaaagtttcaacactcttccaatctcttcaaatgatttgggatactctccattcaatccaaaatggagtctcaacacatgagcttccctctcactcaattctgtctccaaaagcttcttcatttcttgcttcaaaagctctctctttaccatcttttcgggtattgtttcttctggccccggcatgatctcctaaaacaaaacaaacaaaaaacatgtacaaatcaacttcaatttgttttgactatgtttgattgagtgtttagtgtttttcaaagcaagtaacctgtagtgtcattcgccctctatcggttactgcgcgatccaatgaaattggggggcggtttctttgtgaaactagtctcactgttgagacatctagtttgagttctttggcaacttcatcataagttggtgaacggtttaatcttctatttaagacattgtttgcttctgtgatttttgctatcatagcacacttgttcccctgcataacaaaagctatccatacattcactagttaccaactaaccaataaaaacactaaaatgtatgtatattctttttttcaattttttatgtagaaaatgtatacttttctaaaatttgaaacttcaacctacaaaaaaaaatgtaaatacatttttgatatgggaactgctaaaatgtatcacttaaatagacttaaatagactgctaatacaatgtaatatcagtaaattttaatattagttttttagggaaggccctagatgcaaaattgacttgcctatacataagatggacctttataaactaatagttaggggtggcaatttgtcggtgtatcgtgtttgggttgtgttggggttttgaatttattgtaaaactgttgatccgaacataatccgcaacacgaaaaatttatacaacacggatacaaatacgactcgaataaatttcgtgttgtatcgaacttgcaaaatcttgtgttgtgttcgtgtcctgttagcaggttataagctaaattattgtgtttagtgtcatcgtgtcattaaatttaggctaaatagaatttttaccccctgaaactttggcatgtactaaatcatgccccctgaacttttaaggtcgttaaaattaaccactgaactattgagattgttggatttaagaacttttgtctaatttcattctattttactatttcagtgattgtttatatacta

SEQ ID NO: 219430 - DNA, 2297 bp, Cannabis indica
ctaaaatacatattatgtatattatatatatatatatatatatatatatgatatatgacattattcccatagaagtggaggatcagattatgatcccaataaattataaaaaagatattgttcattattaggtattttaaaaggagtatcattatcagtatatattaaacaatattcatatgcatgtgaagtagtttagtaatactattattatgtctttttttggacatgttcaaagaggtttgattatagctcttaataacttgtactttttactaacctatcttacctttaatcttcttctttaatttcacttttcatttatattaatcaatcatcaacctttctgtttaataccagatctacacttaattaataataattaataatactaaacatttcagattaattaaatgacaaatactttgtattctctaatttattattatattttactgcacaatcagattttgcatttcaagttgtcttctcattccctgtaaatagcatagatttaattttattaaataataataaaactattataattttaactcttaacaattcaatgtttctaagttagatctaaataatctcttcaaaatctataacaaaattacattttttaaatattgcatataaaaaaggttatatcttgttcaactagttagattcatcaaatttacttcttatagaaataaaaaaaaaaaaggttcatttattgcaacactagtttttcttttggtgaatttgttgcaaaaggatatcaaatttctgccattgccatttgccaaaatcattcatagaatctacccatgaaaataaaaaagtgcaaagctaaaaagttttaaatggggtccaattagaccaatatgtacttctaaaagatatatatactcaattataacacatatacacaaaaaccatattgaaaaacacccaatttggagaaaagacttatggaatcaccattcttatttattattctatatttatttttctttttaaaaagaagcaaagttgtgagagtttgataagctatataaggttgatgttgagtaaatgaggctggcattaatagataggcacatgggagattgcaacatgtgatggtgatgttataacttggtgtgaacaaaaacactaaacacacacatatgagggtggctcacttccaccatacatatatacatttaagtattatttggtgagagatgaatatatattttttataggttaattagaatattttagattcagaattaaaaggtcttatggtggcgtttggttggaggtattgaaatagaatagaatggaaagaaaataatttttattttgttcttttatttagaatgatctttctactattttagtagaatgactatttcattttaaaaaaggaaggaaagatcattccaatgtaacaaaaaaaaatataatgatttttttatttaatttttttattgtcattaatttttttatgcattttaaattttatttcattccattcctattccgattctcattcttatttctatatttaatcatttttttacaaataggtgtctaatgtggacaaacgtttgggaggatgatagaatttaataatctcaataatttttaaaaaaatacagaaaatataataaaaaaaaaaatagtatattttgttttgtttatatatgtatttggatcacttctacatttgttagattaattgttggattgagaactatttctaatcataactcaaaagtacattaaactaaatttaatatacaataaaaaatgagatgtattttgttttctcataggaaaagggacaaaatacaatacctaatatatatttatatattatggtcacatggggggagttcatgcaatgcaagttgtttagttttgttggtcattttctcaaagttcacgtgtagtcttagacataggaatctaaagtggatcaagagaatgaaaccaagcatcattcatggctagctatagctacggctacatacatgggccacttcactttaataaggccaaattctttaatataatatcttgaaaaagaatagaaaatttagcttgggctccttttggtgcttctttatattggatgggctcttggaaaacttcttcaaatgtttttgagaatagtatttttctagtcctaatataataagtgatacattcaataaatgaaaaggatacattctttatataatcattgtatattgtcattatgtatagtatttttgttcacaatcttttgcaatgtaagttgatatatctttatatattaa

SEQ ID NO: 219431 - DNA, 7034 bp, Cannabis indica
taataaaaaaagtcaaaaattagcttaggatcctatttttaccattttggaaaatactggtttcattttgtcatttaacaaaacacatggtctaatctgtaactttatggtatttacccaaaaaaaaatacactttgaagagcataaatgtaaaaattttaccaaaaacaataatttatgtaattttttcttcttaatctcaaacgcttacatggggtccaaaagatgaaactaaataagacaacatacacacaaacacaatgatcaaaaactaaaatatgcaaaggatatttccaaagataccctagttgggaattttgagaacaccaccaatccttttattttgagattaagtactcttccctccttgatttcatatgggttaggagcttgttgcaatgaggaagggtgtccttaatgatgggaagttgcttgaaattttgaacccatgtatggagcctaggcagatttttggggtccaacaatttgagtcccacaagttgctccacacattcaaaccaatgagccaaccatccatttgctatgtccaccatgtttatagtctctcccccaaagaacttagtatttccaaggcttaattgctcttccaaagttttaagaacttccactacttcttttgctgcattttctccattttcttcaccgcgagtgcttgtgaagaatgaaccgaaagcgaggcgctgcgattgaactaatggtatcaaatgaaaaataaataataacaaaagaataatttttgtttttgatgatggtgaaatttggatttcaatcaagcttccaaaaacaaaagaataatttttctcttgctttttgttaaaattgtgcttgattcatcttcttagaaagtttaaagagtcaatatttttgttattttattaaaaagaaatttcaaatgaataacctaaattcggccatctgagcaagtactagctaggcctcgatgagcagaagggtgtcacggtcattgcaaaatctatagggtatgagcctaggcaacaaggcatttcgtcgatatagatcttagtggtagtagtaacaatttaaattagaactttgaagactgaagaaaagagaaattctatatgaacagagtgaaaatgaaatagtgtttgtgtgtgtttttaaaaaagaaaatagtgtgtagtttgatagagtgatttgagtttagttgaaaatataagatacataataaaggtataagttttatgaagtgctttgttataacttacccttttctttgtcaatggtaactaattttttttaatgattaatatgaacattaatattttcataaatatatttaaagcataaacaaagaaaaaaactaaccttatcatctataaattttacccaaaatctagccaaagctctttcgtaagggtctttaggcaagagaggcttttggggccaagtttcttcaatgtactcaagaatgagaagagactcagaaatgggtttgtcaccatgaacaagcacaggaactttcttgtgaattgggttgtattgaagaagtaattggctcttgtttggaatatcttcttctatgtattcatatttgactccctttagttttagtgcccaaatcactcttacactatatgggcttggccaaaatccaagcaacttcacttctttttcttcatttttttccattgagttttgaatcaccaaaattacttgcaaatacaaataaatatcaattagtgtagatgataactattgagttttctattcaatgattttcttgggctagttaatcaatggtcttttttaatgttaatcaatatttaattccaacaatagagcacaattttgtcttttttattttaacttcattcatcttaaagtctctttcttagaatattacaaatattcctttaaaaaatttggcagtattatttgcatcaaaatctgtattatttcattattccaagttatatgcattggatttaatgaaggttttgcccccacttatgtatatgtatgtttaacttatttgtgaacaaagtaccaaaatttttccttagcataaaaattaaagatgatccctaagttcaattcaagtactagttactgattcaaaaaaaaaaaataaattcaagtactagttacataaagtcttatatattaacaaattttggcctgtcaaatgtatttcattcatctctataattattgaatatttaacagttaaattgattaaacaagtgttaattattataagccatctcaaatcaaagtacataaaataaaatatgcagtacaatgcatttagcattttataggaatattaaattaagtagctaggctaggaacctttccctcaaacccttaaaatagataaccatttgatcataatgaggaagagtttgattgatggaatgatgttgtttgaaattttgaatccatgagtgtaacttagggaatgtttgagcctcaagtagcctcaatccacacacttcttcaatcacttcaaaccaatgagttaaccatccaaagcaaatatctactattccaatctcttctcccaagaaatacttctcattattcatcattagagcctcatcttctatagttctcaacatctctaaacattccttcttccatttctcttgttcttcaccactagttgtgaacactttccaaatcaaagaaacctatgtaacaataataaggataggttaaacacaagaggagaaaatatatatgaatgaatgatattctcataaaaaattattaggaagacgaagatctaattccctgagtttagacaagctagacccaaacttatagggctcttgcccgaaaaggactttgaatcacttattaattaggagaaactcgaaaaattatcttttggtcattttaagctaaaacttacgtctctaactaaatattaccttgtcatcagagaaagtgatccaaaatcgagctaaggctctttgataagggtccttgggaagcaaagggcgaatatgtggccatgtgtcatcgatgtattggatgatgatcatggactcacagatgggttttccaccatgaacaagcacaggtaccttcttgtgaattggattgtacttcaaaagcaactcactcttagtttgaaggtcttcttctatgtattggtaaggtatgccttttagttttagtgcccatatcaccctgcagctaaaggggctgtcccaatggccatgtagcttcacattttcatccatatctcaaaaacactccaatattgtgaaatgtgattgtatattataaatatttaatcagatagccttgcatcgattttggggttttgttaacaagttcaaagtttgaatctaagatttttataagcttaaaaatactatagcaagagaaacgaatccatatatgatatactaaattattattattgggtttgatgatggcagattcttaaaatacttcccatatatagtgttgactttgtttttgttttggatatgctcatttacacaacataatataataggtgtatatataaactataaataaatttgacaattatttatttggtaagttttttttttttgtttcaggtgagtctcaatgtgtataagtgttagaatttggggataagatgaataaggttctatctcaaaattaattggcaatgagaggagtagcacattcctcttgtatattctggatcggttggatcggtatttggattatattctggatcggtatttggattttctgtggctcagatttttttttgttttgctctaataccatagaatttggggataagatgaatgaagttccatctcaaaactaattgacaataagaggagtaactcattcctcttatatattctattatttttccacacattagcaatgtgggactctctaacgtgcttaaaatttaagtttgtaaatggtatactcaatatttatttttagcggtataaatattttatgtttgtaaaaatataattttcatgaatacaaattctagatcattggatctagatagaaatatgtagtatcaactacttccaaatgttttttttaataaattcaaaacagagtatgtggtaacaaaattaaaggaattatagtttcataaacattatgctgctaaaaataaacattaaatttatgtcgcttacaaatttaaaactttaaatacttatgtaattatttatccttaatgtcaaatttatttgtaatttattattggttacttatatgttaaagtttcgtataaatatctcgatcttatcttacattattttaaattactcatataaataaattgtctattatttatttattttgtagtgtctattataatttataatatacgagtgtttaaaatacaactactactcaactactacaataatcaatgtaacttcattgctaaatgtatcctttgtttcagtagtataattgagcattgttattatatattagtggtgctcaacaccttttataaatgtcacatacgattgattagcgatattttctaaaaataattttttaaagttatataaatcttaatacttaattatactaatagcaatttgacactaaaaaaaatactagacactattaataccttttaacaattctctatataattagatataagtcataggtatctttagcctagcataagctagttgaatagttataagttttgttgatgtcttgatgggttgtattagtattgtgtcatagcttagatattataaacaaatatcaaactaaacttgacctactcacttatattggccggcttaaaagtgggggaaacgtggtagaggaggttagctcagggaaggaagctaagcacagagagcagagcgttgtaagggcgagctacaacaaacacaaaggaaaggtccgcttcaggatcatttgaataatgtgattctccagacgcagcagctaaagccgaatcagaatattccgctgaaggtttttattccactactagaacggcactgactaaagagagagaattttctcaatctcacgagagcgacaacacgacagagacagcacgccttatgacgaaaggggagagtgaaacctagaacgacaccgccacgagaacgatacttaccgaattagattggatcagaatgatttttttaattggatattcaattacatacctaatttttaatattaacttgaaaatatataaataaaaaaaaacgtaaaaactaaatattaccctttatttaactttaatactctataaggatatcatctttacaagtttaatgtaactaaaaatttaaaataattaaaacaacaacactgacaattaataaaataaaatatcatgaaaataaacacacaaaataaccaagtgttacaaatttaacacacaataaaacaaccactaaaaatataattaaaatatatatatatttttatttttgaaatattttttattatatataaataatttttttaatatatatatatataattagatttggtaggtttttaattagattttgagatacacatccaataactaatccaatcaaattaaaattcaattttcaagttttaacattcaatccaattcaattgtaatgaatatttatcttttttgtaatttaattggattaaattaattcagttcaattcgattagattagatgttacacaccccttttatacatatatattattgatgaactaagtagccctcgctaggatcttttccctcaaacctttaaaatggagaagtaatttgtcacgaggaggaagattttggttgatgataggatgttgtttgaaattttgaatccatgagtgcaatttagggaatgactcaatcaaccttacttcacaaagttcttcaatcacttcaaaccaatgagcaatgcatccaaagctaatgtccaatattccaatatcttctcccaaaaaatacttcttattattcatcattagagcctcatcttctatagttctcaacatctctatgtactccttcttccatttctcttgttcttcacctcttgttgtgaacatgttccaaatcaaagaaccctacataaaatataataatgattaagttgtaatatagtaattataatagtaaatatgaatgaatgaaatgatgctatatacaataccaaagacggagttatagttatggaaaagggagggttgtaaggtcgggctaggattggtctcgagctaagataagctaggcctgcgctaagaatccacttaacccaacgatcccaaattttttttaaaaaaaatgcacatatttttttattaatttttaaaaataccacatatattttaaataagtactcgataataatattatttatttcttaaggccccacaaatctcaaaatcaaccccagtcaggcctaagctaatagggcgctcctaccctaaggttaggcacccaagagaaaaaacaaattatttttttggcttcttttaccttttcttcaaagaaagtgacccaaaagcgagccaaggctttctgataagggtccttgggaagcaaagggtgaacatgtggccatgtctcgtcgatgtattggacgatgatcatggactcacatatgggttttccgtcatgaacaagcacgggtatctgcttgtggactggattgtacttcaaaagcaaatcactcttgttatgaaggtcttcttcaaagtattggtagggtatgccctttagttttaatgcccatatcaccctgctgctaaagggactgtcccaatccccatgtagtttcacattttcatccatatctcaaatatttgtgaaataagaaatataattgtatgttataataactttaagtcatttatataatgtgggatcaaatatctataatgttgttctttcttccataaagtgccttacaattattttaatcggataatcttgcattggttggtgttttgtttacaaaatcaaagtttgaatttaagatttttataataattaagcttgaaaaaaatactattaattattattatta

SEQ ID NO: 219432 - DNA, 3910 bp, Cannabis indica
aaattgtaatgagagtggtcgacaagaacactaaattgatcaaatggacaacaagtgaaaatctatagtgagagatagctggagatccaaaataggtgaacggttgttatactacttctccctattgaatggttccttcttcggcgaccacgaacagccacaaactccagaagcaccgcgtcaaccagaaatcgccatgaatcgccgaaaactgtcaaccatggccagcagatataatcgttacaaagttatttcataattgttacaagtacaacaatttttgttttaaggtcaattgttgtgtatgaagtttaatattaatttgtcttcatattatttatgtgaaatttatttccacttcatccagtaccttatcacccacagaatcatttttcactatttacccagtttaatttactttataaaacgtcacttcattcatttcttaatatgggatctcacacaacttgaaaagtaaactcgtaacctttttcagttactttggactaaatggaacaaactggcttagcaaacgactctactctcaacaattaaatactacatcacttggaacggaaggtaaagctgaaaatataactgaaaatacaaatttatatgaaatgaatatctataatacattaataaacatgagagtttattctgttatttctgcaatcttgaattaactgttgaagaggtatagaccattgtggcataattgtcctatactgagatacattagtgtgaaatatccaaactaagtatattgtcacaatactgatggttgaagtacaaatgtgttgtttttccagaagatgaagttgtagcccgtccagaaaagccgctataattggaatctgtctttgccaagcagattttcgaaactaaactgaagagctcatggttttggataaatggttgggctgcatactctgcaactggcatccactgcagaaaacatatcaaaacaaagagaacaaagtcaattctcattcttttttcctgttctacttttcttcctgttctacttttccatttactatgtccattgagaaaggaagacagattattcataattcctgcattgaattcaactaagatagaacgtttaaaacttcatggttttttcatcttaaagggcttcatcaatatctattactgcatacattaatcccaatttcactttttatactccacaaaacgagaattctggtttttatggtgccaattttaaagttagttctggaacatcatcactcatcaaacaagaaaacttgctatcacctgctgtaagagcttatgataccccatctgggataaaagtgcagggttcggtatcttttgaaacaagaaaaatcacaagtgcaaaagtaaagcaaaaggagacggggaatctagaaaaatatacatcaataaactgtgcagcataaaaagggaaaggaaaaaaaaaggctaatgcaattctataaagaagaaattgtaaagtttgatgaacgattgtcaccagacattaccttggcatcagcaatttctacaacctgcttctgaatctcaaaggattgaggttttaacatgcaaacaaagaacatatcagacttgttgaagaaggacatatggctttgcctgaaaaggagatgagattcatatagttagttacatatttacatgcacaaaacaactgcaaagatttagtcaatatgtgagtcagaatattccctgcctaaatgctaaaacttccacaaattctgtgtcaacctaaagcaaaataaaacaaagagtcttagattcacaattgaatgagatgtggctgcactgaaaaaagcatatatatgtggaaacagaaattgcaattttgtaacttactcctgtctcttctttcacttctctaactgcagcatcacaaatatcctcgccctgttgatggaaattctcaatccatgctcaacaatatatttataaagatttaaaagtaattccataaaggtcacaaattaatgtacatgtactcacttcgtttacaacgccagttgggtacttccagacacccaaatcttaaacttaccatttttttcctggaacaacaagcacctacaaaaagaaataaatttaatttcaaatgaaaattatactaggtcatggtatcaagctcgtgtgttatacaaacaacttatgatcagtgaatcagtacagtgaaagcaattgaaagcatacaaagtgtatcaattcctaattatgaacttatacagtcaaagagtaaatgcaaactataaaataagcatcagataagcatctggtattgaattcaaaatgcatgaaatcgaaaaaaaaaaaagtaacaggttttcttaatactgtaattaacacatgagagaaggcattttaatataaagttgactgttggacaacgaagaaaaaaaaatgaatattcaatctagggctgttaattcctaacatgtcttgtaatgcatatccacttaaatattttggcttttccgagagatgaagctcatgaaagctgatgaaaggtagctgtttctgatgtatgttcatctggttggacaggaataggataatcttagatgaaactgaggacagtatgaaatccatatgagataaaataaaatttggggttttcatgtggctttttgatgtaaaagattttgaaggatttctgtttttcggttctgtaaggaattagcttcttaagaatttattttggtgtggactctttatacacttacaaatatgtctttgtctccctcttttatacaagttttaaatcttaagaaaaacaaaaaaaatacctctctattatcgttcatgacaaaagcaccgatcccaactcgatgggaagcatttgcaggcagagtatcagcaatttcaggaatccatttgaccaacattaagtaatctggttcagcatggtggtatttaaatccttcctgaaaaacaaacataaaacaaggatcatttcgcaaaatagaaaagatagaaagaaaacatgagccaaacaaacaaacatgaatggggttagcaaataaacttttaagtactatttaagttcaccttcacagcagcttcaacaagattagattgcgaaataggcagtttgatccaaacacctttcttgtcctgtatatattacatacaagaacaaaaataataattgatctattttataataaaacaatttaaggaagaaaagtcttggaatcatcaaatgaaaaaaggacatcgtacttgtagcctccattgagacaaagaagcactaagccgaatagaaaattcctgggaatccataggttctttcaactcaacacaaaccccgccatgtaaatcctcatctgccttaagtaagtcaacttgattttccgacatggtttcttttgcaaaagctaaggaaactgtggaagccggcttggattgaatcaagaatgaactattatttatatgatctgaatataaaaacaatttcaacacctgactcagtcttcaaattttaatagagagtcgtaccacgtgaaggacaagtctcaggtcttttataattgatgatacacttttttgtttcttttcaaagttttgatgcccaatgaaacatcttccttaacgaaagaggaaggaataagaaaacagggcatccttaattttttattgggaaatttgtaattttcccttaatccaatcaagcaaggtactaaaaaaaatgaaaactcattacgacaaagaacaatatatgacatgggggaaatcattttaaaatatatttctgtaaaatgcaaagagtcagttctgtcttcaatagaaacttcattgcaatgggtacattaccaaaacatttgcccatttatttgggactgatcaattgactattctatgttataatgaaaaaaaaaacaatgttgttatg

SEQ ID NO: 219433 - DNA, 12775 bp, Cannabis indica
taatttaatttataaaaaaatatagccttattattttgtcttttcaatcttgagaaaaagaaagataaatgtgacattgaccaaaacacatccaccatgtaaaaagaaacactccaaaacgtgctatttggcgcgctctcctcctaccaatagcaagtggagtctgcacgcgtcagaccgttgtcctcaaaatagctatcaaccgtataaatgtaaaatactaaagaaacaaataaaaaagtaaataaaaaaagtttttagttagtttctgtaaatattccaaaatactaattctttggcgcgtgatttacactctatcttgactttcctttcccgcccccatttgatttctctgcttcttcaaattctggttccttaaaccctaaaatccgtccatggagattacggacgagcagaggaaacgtgccgaagcgaaccgcctagcagccttagcaaagcgaaaggcacttactgaatcctccaatggacaacagcaacaacagagccgcccctccacgctcgccaagtgtcccaagctcgcccatcaaccacgcgaattcgtccgcacagacccagttcttaatacccacttgcctggaaagttcagggtcaggcttgaagtatgctcccccgactcattctcgatcacccccctcaggcttggggcttttgattatcccggagaagaggaatgcttgcggcaacttgccgattgcttgtccaatgtaagtagaatcttttttgttttgttttgttttttttttttttgaaaaaaatatgagagaaaaacagagtagaaaaagaaagagtgtttctcaggtctgaatacaaagaggccttaaataggcaaagcaactaactattataacaacctaaccgactgtattaaccaacctaaacagaaaaataaaccaagtataactaatcgtaataccctctctcaagatgagtgtaaatgttaattacacccatcttgaatacaatattagagaagggagtaggtagtaaagccttagtaaatatttctgctaaattctgttgggaagagacatgaagaagcttgagagagccttgctagaccttttcacgtatgaagtgacaatcgattttcacatgcttggtgtgctcatggtaaactggattttcactgatgtgaattgcggcgatgctgtcagaaaacaggttggcaggtgtgttgtgggagacaccaaggtctttgagaagagcaaggatccaagttagttcggaggttgcattggccatggcgcggtattcagcttcagctaaggaggaaaacaacttgttgtttttttgatgtccatgagacaagggaatttcctagggaaatgcagtagcctgagacagaacatttaatatcctggcaactgccctaatccgcatcaacaaaaaaaaacttgaacattggttttggataggatggttttagcatatgcaataaggttgggggcattattggaaggaaagaaaaggccttggcccagagttttttttagatattgcaagatcctattggtggcttgcaagtgagggacttgaggacatgataaaaattggctgagatgattaataggataaaagatgtcagacctggtaattgttaagtatattaatttgccaatgagactgcgatagatcattggataacagatgtcaggcctggtaattgttaagtatattaggggtagatacaagttttgcacctatgtaacttatgtcagttaataattgacgtgtaaatggccgttgggatattgaaatgcactattgatgtctaattggtgaatgttccaatcgtttgttgcagctaaagcaaggaagatttttaaggtattgaattttgcaactagtgcatatgtttgggagaagtcgatgccttgcttttggttgtaacctttggctacaagtcgggccttcacccgttctacttctcctttttggttatatttgattttgtacacccatttgcagccagtggctttatggcctggggtaattttgttacagtccaagtgttatttctttctaaagctctagtttcattgtccatggcccgaagccaatgtttgaattgagaagctttagcataattttgtagttcaatttgggtgtaagcggcaagaacaacagctcggaactgaggatgaagtttgatatatgataaaaaaatgctcaataggatgtgcagtggaagtgacatgacatatataatcttgcaaatgtgctggtgtgttgatggtgtgaccaactcccgttgtagaagagatgttggttatatcagcagtaggttgttttgtgtcaaacttgggcacttgtgagcagggagctggtgtcaatggtttgtaagttggaaggattgcttgggagaaacatttatcaatctctaagggagaagtgattgaagaaaaagggaagatgttttcatagaagataacaccacgagaaatgtaaacttggttagtctcaatgtcaagaagggtatatgctttcatgctcgaggaataaccaataaaaattgaagcacgactcctaggagagaacttgtgtctttttgattctaatgtagaaccataggccaagcatccaaaggattgaagatgttcatagggggggggggttgtgtaataattcgaatgagttgctgccttttaataatgcagagggagttctatttagaagatatgtggcagtgtgaattaggtggggccagtttacaagaggaagatgagattgaaaaccaaaggcctgagccacattaacaatatgttggtgttttctttcaaccactgaattttgttgtggtcgttcaacacacgaacggtagtgtataactcctttggaaacataaaaggaggtgaggttcaattcttttgcattatcagatcgtatagctttaatcgattgtgagtattgtgtacaaatcatgttaaaaaaatttcgtatgattgtttgtacttcagatttggttttgagcatataggtccaagtgtatcaagatttatcatcgacaatagttaagaaatatttgtatccttatacactcatgatatggaagggatcccataaatccttgtgaactaaatcaaacaagttcatgggaaagttgttgcgtgaaacaagcaatagttttttttttttttgctaaatggcaaacatagcagtggtgattgaatttcatagtaaaagaagggttaatctttttattgaaaacattcgaaatgtacattgatagatgaccaaggcgattgtgtcattgatctaaattgttcttattgaaatctaaagaagattagacaatggccttcaaaaaaaaaataaatataaagaagattgactagcagtggcaattggattagtgtattgatgcaggagatacaatttgccatgtcgtttttagctgtcccaatcaccacattccgagaatgatcctagatgacacaagaagtggtgttaaagaaaatatgatgtgaaatgttatcaacaagtgcagtaatgtagagaagattaatcctgaaatttggaacatatagtacattgtagagtgtaagaaatgaagtaatgacaattgtacccatgttagtaacagaaatcttgagaccattagagagaacaacacttttaggaaaagaagtgttagaaaaagatttaaaacacattttattaaaacacatgtggtgtgtcaagaatccatatcatagagggaaataaagatcattaccagccatgttagatgttgcaaaagtcatggaaggatcgactcgaggagcaacttgattgagttgttggctgaggaaagtcaattgttgacattgagaagaaatgtcagtgttgattgagtgaccagttacatcatcagtaaatgaactgttggaagcttgatttgctttagtcttgcctttatctggtttctttttatctccatagccagggggaagccatggataaagaaacatctgtctaccaagtggcatggtttaccacaattagaacaagaagatcaaggcttcttgtggaggattggtggaaggacgaacagaggaggcaagagatgaaatatctaaagagccaagagtgcgttgatgttcttggacgatcattgcgaaaacccgtgatagatttagaataggttcattgagcaagatttgagcacgaactgaggcgtatgactcgcttaaaccagtctggaattgcagaacttggttttggttattgtatccaagaaaaagtttcatcgcatcacaagtgcattttgtatttggttgaaactcttttaactcatcccatagggatatcaatttggtgaagtaagaggtgactgactgatcaccttgttgcagccctgcgtttgtaattgaaagatgcgagggccatttccctcattgaatctttcagcaagatcttgccacatatcagtagcaagatcaaagtacatgatactttgagaaatttcagacgaaacagaattaacgagccaggacatgagcatgttattgcagcgaagctaagaattgagaagaatattaccagtatctggttgtggaagagagccatcatgaaagcgattttgttcttcgcaactgatgccatagtgattcctcgcttccaagattggtagttggcaccattgagaacggtggaaacaagaaccaagccaaaataatcgcctgagctaaggaacaaaggactggaaacatcttcattggcattgtgattgagagaagactgagatcgccgagatggagctgtaattttttctttagatcttggagattgatgatcgagagtttcagtggcgttctgaggtcgtggcctgaaggttgtgtttcgtcgagaggcagccatggtggtagcaataggagcggaagtaacatcaagatgaatttctgatgaaggattcccaattgtagatgggggaatgccatcctgagatctcgtgtggaaggtctcaccatggaagtgggcaaagtttcctttgataccatatgagagaaaaacagagtagaaaaagaaagagctgtttctcattgaataaaatcaggtgtgaatacaaagaggccttaaataggcaaagcaaagagttagttaagtgaaactttaactaactattataacaacctaactgagtgtattaaccaaactaaacagaaaaataaaccaagtataactaatcctaataaaaaattaaaaggagttttcaagtctctaatgggagtaatgaaaaataaagagtaatgggtgtactgaatttcggtatattaattctcgagagatgaagaatttaaggctgtggtgtatggaagtgaattgagcttctgctatgtgattttactgttgattttctttccaggttatttcgtctcactacactcaaaatcatggtggtggaaaggcttgcgtgtataaggtgagggattatggtgcggtgttgaagtgtttaaagagcagcaagaatgttgaagttgaggagataccttgggcaacttttaatgttgttgagagactttcacattcgttggagagatggataccatgcaggccagaacacttttctgatgaaaaggttaacgagttgattggaaagctaccgaagacactgttggaagcactcttgccttttcaacttgatggtattaaatttgggttgcagaggggaggtcggtgtctcattgcggatgaaatgggacttgggaaaacactgcaggtatgtctacattttaaatattttaatttcttttggcttgtcatgaatggttttgtttcttttggctagacaggccaaaatttaagttgacttggggcactgtgagagcactgcaggtattacttactagggatgttttcaaataaaaacttctttcatgtgtttttgaagcagtggacttctgtcctgatgattctacctaaaaaggaaatctctatgcttggattatagatgttctacttaacaaatgcagttacaacttttaataagatgttgcattgctattcttatgtgcattgtggatttacatttgtcttttactttttctttctaatcgaaactttatatagtaagtattgtcagatcagggtgggaatgcaaaaattaagaaaatcatatagttattatagaataatagaaggaaaaaaaacagcctatgttgtcatgctggcaacatcaatctgctatgctgtttctactatttgctttgaaagagcattcaacaatttttttttgaccgtagattgactgaaaattgcatgctactcctttttctattcaggctattgcaattgcttgctgtcttatggatgaaggttctgttcttgttgtttgcccagctattttgcgtttttcatgggcagaagaattggaacgttgggttccatttcttttgcctgctgatatccatctaggtaatgctttccttcttcttgtgtatttaatttgttctgctcctccatttttattttttttattatctttactaggcataacttgattgtcaagataaacttgccagtcaatgctatttatcttgtttttcttagaattcacttggtcacttttgttccagtttttggccatcaaaataatcctgtccatttgaagagatttcccaaagtcgtcgttatttcttatactatgcttcatcgcttgaggaaaagcatgcttgagcgagaatgggctcttttaattgttgatgaatctcaccatgtacgatgtacaaagaaagctgaaccaggagaggtacatcatgttcttatttgtacgtgtaaaatttaattagtagggattacagcctacctcgtactgagttctaaacccctagatatagtgaacaaagcttgccacatcagcaacttaattacaagctgctgaaaaatacaaaaagaacaactcagccaacactcaaaacaaaatgaataaaacttaaataaaagacctaagcccggcccttaagccctttctttctatggtaaacaaatctgacctggcttatccaacaatcctaattctctgtgctatatatacttttttacgccttttgtttttatggaaaatatcaatttatttggttcattacctacatatactccctcaagtttttttttgacaaaaagagatgcatcatattcatgaacggacaaattatccaccaaaataacttgaaaagtagtagggacaagccccccaccctaaccacgacctggggaagaataagtggcaagtggcaatcgccaactaattagctgccttgttcgcagatcatttaacaaaaacacaagaaatattgttaagatcagacattcaagtacgataaccagaaatagctaaaccaaaaagagacaataaatgagccaaactatacagagcatcaatgatgcttttactatccgactcaacaacttgatctaggccctgttcttttatccagctcaaagcttccttcaacccaattgccttcgccaaaagaggagagacacgaccaatcaattgtttggaccaatgataaaggacaactccatgatgatcacaggccaatcctccaatcccaaaataaaaaggcccagaagtgacagaggcatctacattgacttaaatcatatcaatactgggaaccgaccaatgttccacacgaacacaaggactagaatccactgtgtttgcaaaattttcgtgagcaatcttccattgcttaaagtaagacaacgcagcagccgccaccctatttgtagcaaaatttactttgccaaacaagcccatttcttgctttccaaagagaccaacaaatcatcgcaacatgacaaaccaatgtctacagaaatcctatgactagttgatcaaactatcctgaaaaatctgtggtcgaaaggttgcaaatagtcccttcaacccgctgccaacaagcttggctaaatgacacgtaaccaaaatgtggagaattgattcattcataccttggcacactgggcaaacgacgaccacatcaacatgtcgatctattaactgggttagtgttggtaaacacccagaacatgccctccagagtaagtctttaactttaggagaaattttgagttgccataatgccctccaaaggcttgaattataatcttccgaccacctaccatgaagcacctggagaagcttgtaagcactcttcatcgaataaacccctgacgtatctttaaaccagtaccaatgactcgacccaagattatcattcaacacaatactcttaattaattgtcggtcaaaagcattgaacaaatcctcaagaatttcatcatcccacacccgggcccctcccaccataatttgattgaccttctcctcctccaaactaggatggaaagaagtaatctcgaacttctcttcacacggaagccacgactgccccagaatgtcaatagaagaaccatcaacaacgcaccacttggaatcagctttcaataactcttaagaagcaagaatacttctacaaatataattaggattcgaccccaactccgcagacaaaaacgatccacgaggataataccgagcttgaaacatacaaccaacaagcgaaccagaatgagttaaaagcgaccacccttgcttccctaatatagctagattaaaatcatataaattctgaaaccccatcccgccattatctttaagaacccctagcttctcccacgacaaccaatgaatacttgggccattactactttccggccaccaatacttacacatgatttgctccatttcagtacaaaccttaagtggaagcaggaaaacactcataacgtaactagggagagattgagcggaaaatttcaaaaggatttcctttcctgacttagagagccacttttcgtcccaactttccactcgcttatgcattttatatttgagtaaacccaaagtaacattcttattcctacccatagtattataaagcctaaatagaaattttgatcacctgcaacatgcatccccaaaatttcctgaactcgagcacggtttacctctgacgtataagtgctaaaaaagatagaagatttagcattattcacctaatgtcccgaagcttgttcaatctttgtcaagagctccataatcttggccgcctctttcattggctcgacaataaagataactgtcatccgtaaacagcataggagaaacaacaggagctcccctagccaccttacacccatgtagccatttattttttgaatacttcctgataagcccagacaaaccttcaacactcaatataaaaagatacggagagagaggatctccttatcgaataccacatgtagggataataggacctagactttgaccaccaaggtccaatccggtactgaatagttgaaatacatcccataatcaacttcacccaatgccgatcaaaacccatcttggtcaaaattgcttgaagaaactcccacttgatacgatcataggctttactcatatccaacttcaaagccatatacccatctcgactctgtttcttctgttttaagtaatgaaggtacctcaaaagagattaaaatgttaattcgaaattaatcttccaagaataaaagtcactttgcgcatcagatatgacattggaaaaggaatcccttaagacgactcataccattaagccccggagatttgtcaggatgcatttgaagcaaagccgtaatagccgaagggatgcaatcaataatctcatgccattgaactagagatgatgagaaaatgttggaaaataatccaccatgacctccccaaagccatcccagtcaacccattgacccatataattttttagttggtgagttgtattattcttccatctagtcgtggccttagagtgaagatacttcgtgtttcgatctccatctttgagccacaattgctttgatctctggcgccaaaaagtttcctgctgatccagtactactgccagatttttctttgcttcatcaaaattctgacgagagacctcatcacgcctggagtttctttatagcagtccgagtagcagcaatccttgctttaaaattttcagtaatttctcctccctaatccattaacctctactcacaagtagcaaccttcacattaattgactggccttgaagcaaattccaagtgtcttgttcaatcaatccgcacatttccttcttaagccacgcattttcaaatcggaacgtcttatttctcttgccactagttcgaagcaccggatcaagaaaaataggacaatggtctgaatgcccaaaatcaagattaaaaagcttagttgaatggaatcgagaattccaaattgagttagcaaaggccatatccaacctgatttccacctatcggcttgttcctctactcgtctcaagtgaattgatgaccatgaagctccaactcatataaagcgtagtctaaaatagccgattgaaacctttctagaaaccacgatggataaggcactcctcctctcttgtccatttgatccataacattactaaagtcccctattagacaccaaggcaacgaagattcatctttaagagttcttaataaagaccaagtgttgtgctgaagtacccgattagcttccccataaactcccgtcaatcgccaaccatcgaaaccaaccactcgaaccacaatatctatatgatgcctagaatacctaataacctctgtctcatcagcattcttccacaacattgtgataccccctgagtgctccacatcatcaaccgaaaacatcccctcaaaccccaaataacgaccaagcaaattaatgtgatttgtatcacaaaaagtttcacacagaaaaataaaagagagcttcttttgagaaacaatctcattaaggaattgagtgacccccgagttcccaagtccacgataattccagcttaaacaactcatgactcttggcgagctctattcacaaggcctgtcaaatccaagttttttgacaactccacccttcattactgtttccttcaaccagtacatttggcgcaatatgcctcgtagaagagagtctcctccttttcatttccaaaacagtcaaccccctcatttaatcgagtatcgtcgacactatccataatagtgccattaataaatgtagaaacagatccctcggctcctaaaattttgggagatacacctataccagctggaaatttttccccaacaatctcagcattacccgagcaatcaagggtatcagaaccccgaataagccactcggctctcggagccaacgacaccatatcagagacaacttccttttgccgcaaaccgctcccaccaccttcctgctgccgatcaacagtgcccatgtgaaccccgtccatctcttccattcttgttcgaagccatttttctccgatgagctttgtttgtctccttaacggagccttcattcactcttcatacggtttggttatcttgtccaacgatgtatcaaacagccgcatacaaaatcgttcaacatgtcccaacaacccacatatgaagcaaaacgtgggaacgttctcgtatttgaatgcaatccaaataaaatttgatttcgtctttttcaatttcatctttctttgtagtggcttattcaaatccatagacactcgaatctgcatataattcctacaaattctcatgaagtttttacgattcgattttaaaaacttcccaatatagttgctaatattcttaaggttctgctcagtcatatatcctatcttaagatcgtggatttggacccacaaatctaaagagtttaacgggatggtccttggattctcaccatcctttaatttacgcatcaccaatacctttctattgaacgtccatggactcccttctaaaatcctcgtaatatcaattttatggcaaaattgaaataagtacctttctgtatccaactcctttatgcaaacatctttacctggctttcataaggccaccaatgtttgttgcatcgaaggaaaatccactgcaccatcagggagaaaacgcccaactaaacaccaacgggcatcaaaagccaccacctcttcctcatttgcttcacaaaacagccccccatcattctcattctccaatgtaatatccaaaaaatcctccctcaaagaactactagatgccatattgaaagccacaaaccaaccacgacgagacaaaccacaaacaacaaaaacaatcaccacgaacaacaaagacactcaccacgaacagcaaacacaattaccacgaaaaaacctcaaacaaaacaaacatacacaaagccaaccatgtcagatgacaagacaaatatataaccacattactgaattctcataaatctattccttttaggtttaggaatcgaaagtcgacgtcacgtgaattctcgttaattattcctcagtggtttaggaattgatgaagcttaataagccaaaattgacaattaagccaagctgatcaaagtcaccgtcacgtaggtttcctacagatttttcttatactccctctagtttagtttataccaaaataacaaatcggtataaaagtatcatttagtattattgtgctcaaatttattttcataatggtcataacatgtttcttttaactacatattatatttatatatataatattttatacaaagttaaagttgaaaacttaatttcttttaaaaaatcaaacttaaaaaagaaaaaaagaatttccttttaaaaaggaaagtaaagcaattattaaaataattgaaaatctaaa

SEQ ID NO: 219434 - DNA, 1626 bp, Cannabis indica
agttgtttcaaactttctaagagcttttgcaatcaattggactcaatgatggcacaattttggtggggttcaacagaagacaaaaggaagacacattggaagaaatggcatttcctttgtaaaacaaagatggagggaggtatgggatttcgttcttatattcacttcaatcaagctttgttggcaaagcaagcatggcgtatcttccaaaatcctgatacattgctagcccaaattttgaagggaagatactattcgaatggtgatttcatgactgctgtcaagggtagctattcttcaatgacatggcagggtatatgttggggtcctgatttgttaattcaaggtgtgcgacttaaggttgggactgggcaaaacatcaagtgtcacttagatccttcgattccagggaacacatgtttcacaacagtatgttatactggtttgcctcaaaatcatgtctcaaactatatcacttctgacttcacttgggatctggtttcacttaaaagggattttttctgtagttgatgtggcgaggattcttacaattccccttgctgcttcagcaacagatgacatttgggtgtggaaccatcatacttctggagtatatactgtacaatcggggtaccactttgcctgttcacttgaaacacagcaacaaacttcaacttcagacacaaatagctcttggtggaaatccttttggggtctaaacattccatcgaaaattaaaatcttcggatggagggttatccaacaatcaataccagtggctactgcattgtttcaacgaaaaatcattacatatgctgcttgtagcttatgctcaaatgcttgggaatcggtggggcatgctttgtttagctgcaaacatgctaaagcagtctggcgttcaacaaattttgttcttgattaccaagctgccagccgatagacaaatggagattatatgatgttgctatcacaaacttataccaaatctgagttagaaaagattttatgcattatgtggtacatttggtatgatagaaacaacatcattcattgtaaagaaccccaaaaaccagaggcaattgctgctaaggccctggctcatctctgcaattttcagcagactatgcatgcttcaaaacctgccctgcaaacttcctctgttgcgagtcatcatccatagatagcacctcctcaaacaaagttgaaaatgaatgttgatgctgcttttgatttggccaacaataaaatgggatttggagctattataagagattcttgtggccatgttaaagctgctctatctaagcctatgcttgggaatctgcagcctcatgaaatggaagccaaggctctctactatggtctccaatgggctcaatctttacatgttcaacttgattttgttgagtcggattgcctactgctagttactggtttacaaagtttagcatctagaaatttaggtttttctgatcttatttctgatgttaaaaatcaattgtcctatttccctaatgtttgtgtatctcatgtgcgaagggatgcaaatcaagctgctcatggcttggccaagcaagcattagtgttggataatgattgtgtgtggtatgaggattttcctcctac

SEQ ID NO: 219435 - DNA, 5624 bp, Cannabis indica
tttcttctataattcagttcctgcctgccacacacacataatatgagtaatgcttttgttgttgaactgttttccagatcgtttcattcctttatgttaatttcattgtcactcagtttgtatctcatcatccttaaacacatatactgcagtttcctgtcggtagaatccaccgtcttctgaagacaagggtttcagcaaatgggagagttggggcaacggccgctgtatactctgctgctatcttggagtatctgactgcagaagttctggagctggctggcaatgcaagcaaggatttgaaagtaaagcgtatcacacccaggcatctgcaactcgctattcgtggtgacgaagaacttgacaccctgatcaaaggaacaatagctggtggtggtgtgattccgcacatccacaagtctctcatcaacaagtcctccaaggagtgatactgttatctgttttatggattgttaaccttgggagtggatttatgtgtacattttgctgatatcttattgattgtttatggtccttttttgggcttgcaataagtaactgcccatttcctgcgatgaagtttcttttcctagttgaaaaaaaaaagatggtagagacattggggtcggatatggttgtgctacattattaaaacaaattgatgttatgtctggaagattggttttttgcattgccttattaatgtttaagttttccaattcaagtgttgaaccatggtatcggtaattagtaccctttatcattcctatatcatttatcatttttgtgaattgccttattgacgtcttatttagtcattgagttggccgatgaattaaattcattgtctaattgttttagtttgtcaatagtcacataattattatttagtcatatcctataccaaaagaaatataaatgaaaaattaaccagagaataaggtcaattgaatcttcatctactgttgactcgactactccacaaaagattaacaccttgattgaatcccatacaaactagtgtgagtgtgtgtactacaacaacacttactaacttgactacacaagtcctaagtttcttcaaacagagcagagcatcaaattaagattggagggcagagaccttcggaacatccactgggaagtggtggatctcatccatccacgggttcttatcttttgccggattcatggtccttaaagccttccacactgcactgttacacttgaaaccagaaccaaatgctatctgccatgttctgtctcctttccttatccttcccttagcttctgtataagctagttcataccaaagtgagctgcttgaagtgtttccaaacctgtgaagtgtcatccttgaaggttccatatgccaatccgaaaggtgcagattcttctctagttcatccagcacagctcttcctccagcatgaatgcagaaatggtcgaaagccaatttgaagtctgggatgtaaggcttgagcttcatcttgaagaattttttcccgactaatgtggcgaaaaagagcaattgttcggacatgggcaacacaagcgggcctaaagtcgtgatgttagtcttgagggcatccccagcaaccgccatgagatcctttgacaatgaaactccaatcttccccatgtcatcctcttttggagtaacacaagagaagcacttgtcatcagcccctttgttggttcgcaccgtatgcaccaatcgatacttagatcgccttttatcagaggtgttgttggagagcaagattgcagctcctcccattctaaacaaacaattagaaactagcatggatctatcatttccaaaataccaattcaaagtaatgttctccatgctaacaaccaaggcataagaattgggatgcacttgaagaagatctttagcaagatcaatagagatcaacccagcactgcaccccatcccgcctagattataactaatgacattccccctaagcttgtagtgattgataatcatggaagacaaggatggtgtgggattaaacaaactgcagttgacaatcaaaatcccaacatctttgggtttcaaacatgttttctcaaagagatgatcaattgccccaaacataaccatctcagcttctttcctagcctctgccatacatggatttggtgggactctcaaaacggcttcagggagatatgttgattccccaagtcccgatctctcaagaattttcctttgaaactcgaggttttgttcagtgaatgtcccaatcaaacgagacctgtccatgaatatctgcctgctgcatttccgggcatcatggggtttataacacgagaaatcaacaaggtaaacagggttgggacgagtaagaaaataaagggtcaacaggaaaactaaaagcgtggagcaaaggattacagagatgagattgaatctaaggtggtcccaaaggtcatggaggtcttggagggagaatgttgagatttgagcagcgataacaacgaggagtggcgatacaaataggtacatagcatgagttatgaggtaatgatacccaagtttcacgtatttgagcttaacagattgcttaaaatctggaagctttcgattagagtctgacattctatattttcttttaggagataaatgaagagactttggaggaggatgtgaatggaaggaattattatgatgattattatcaaaagaaagtgaaaataaataatcaagaaatttacagacctgcaaaatgaatgacccatatcatcagtaacacaaactttatgtgcactttgatggtgagatctaatataaacaaaaagaaaaaaccaatgaacataagaaaatctaaattcatatatagaagaagcaaacagacctgtattgttattttgttagaaaaactggccttgaagttttcacaatgcatcgactatcgactcgaaacagagagcctgaaatgaaataagttgagagttgattaaaatagagacaaaccaaaccgctaccaattgagattgagagtcaacagagcaatgattctgagttatgcagctcagctcagctgcaattaaaggggttctccaacattgacaagtcatcgggtaatagagcacaaaaacaaccaaacaatcttcacatggtgggcaccaccaaattcatcaaaaatatatagattttagtagactcattataatctagtgtaatttattcaaactgtggctctacctcataaaataccaagattcacagttatgggttagtcaattagttttgagttcaacctcttattctatacaattgattccgattttctaaactatattgttaaccccgaaaattagcgctgttaatttttgaggttagttaactaatctcggagcagttaataaaggcacattcaaagagtttacctactcagtatgtatttcgcaacgccaccatcgatactcgcaattcccgagatgcacccgtgcaattcaatgattgaccctgtggtgatccaacgccgagagtacgggcgtaggaagaagaagtcatgcatgcatgtatgtgtacatgcaagtatgtgcactcgagtgtatgcatgcgggtgagtacatgcatgcgggtgagtacatgcatgggggcgcgtggttgtaggggtgcgagatgggggctcgcatgcgagccgtggtggtgcaaggcgtgtgaagtgtgtgcaagtgtgactgttgtgggagttgcgagccgtgatggtgcaagcagggccggccctgaaatgtagtgggctatagggtaaaaattattttttgggcccttatttagaaaaaaaaaatggtatttttcaaaatcagcaaaaaaattgtataattttaaaagggcaaaaaattttttttgggcccctggactaggtgggccctaggcacaggcctagcccgcctatgcccagggccggccctgggtgcaaggcgtttgaagtgtgtgaagtgtgagtgggtgcaagacgtgcgagtcgtggtgttttgaggagtggatgtgtgtgcgagtggggggctcgaatgcgaggccgtgggtgtgtgtatgtgtgttgtgttgcgcgtgttaggtgtggcgggctcgcatgtgggcccattcagggggggggggggggggcgtcacacacgagtcgctgtgtatgttgtgtaagcgtgtttcgagggttgtaagtgtaaggtgagaggtgaatacatatcgacaagaaagatattagaggaggaatcaaatgacgatgcgtgcaagggaagagtgtacaaccacaccttctgaagactctaaaagtaaggacgtacgagtagaggtggcaacgaacccgcaaggcttgaagacctgactaaggatacactgcaatgactctcctacaacctgttctcagggaccaccccgcatgcaaccggggaccatgtgcatgtacccggggaccatccgcatgcaaccagggaccacacacatgtaaccggggaccacatgtctgcaactaggaatcaacctcctgcaatcgggaatcaaccttctacaaccggggaccacctgacaccagacaagggtacgacgtgtaaagccacctccagcacttgcaacatgccacgtgaaaatgacgctttgtccccttgggaccactttgtactccaggccattagagcctataaatacctccttctcatatatgagaaggggttggaaaatcatgcttgtaacaccatattgagagcaatagtaatttctctattattctctccattttaagtagcaatttgagtttacattttatctttttcttcatctcatttcgatcttgaagcataagttgattttcaggccacaagttagtcgatgagttctcactgtcaacatatgcaatcttaaattctaatatggtattagagctaaattagactctaacgagtatcctatctaaatttaaaattttgtccaaaagacgagcctaaaagagtcacttgtgatcgagccgtgtaatattagtgagtaaaaaataaccaccatcttgagaggatgttagagggtctcacattggctacttctcttattgtcaattggttttgaaacagaatgacatgcaccttaacactcacctattcctacttcctcaaccatacacttccacattctaacaagaaatatatttttttatttcgattgaacgataaaagcttgttaatgatgagagtcattattaaatgatcttataactttatttagttaatgatatttttgactctcacctaccggaacaaaaatattatagattggttaaaaatcttagaaatacaaaatatatatatatgtatatatatgttagttcctaccgatactataccaattgttgcagaaaaacatgaagttatcataactttatcctctaagaccaacttcaagaagaagtttaaatcagcaacgaaaacaacgaatcatgttttagctaaaaagaagaaagataagaaagttaaaagtacatttgttttttgtaaagagaaagaacattgaaaacaagaatgtcctaagtttcttactacaaagaatcaaggtaaatagtgtttagtattcatcgcatcataattgggctttttttttttaagaaattacactctataccttt

SEQ ID NO: 219436 - DNA, 2643 bp, Cannabis indica
gtaacatagatagatagatagatgaatcaatagtcatgcacatgtaacaaagaaaaagtccactattctaaatatttttagggaaagtgataccaaaaaccaacatgaatttggcaattgtcccacataaagttacaatttttttatgatttctactttctatagacttttttttcagataaaattatattttttcccattacacaaaagtaattcatgagcagtattagagtattagaaaggaaaaagaaaaaagctaaattctcttcatgcatttgctgtagcagacatctcccattaggccatcatctatcacaagaataatgaaaatcgaaattagaataatataaaaccaacgaaaaaaaaagaaaaaaaaaatcaagcttattattttcttcaatccttcacatcatataatgataagcagtaattatgtggtttaaaatgatttccaaagtctcccattagtcattaccatattcaataacaatttataaacaaattgacaatttgccatgttttagagtaatgatacatacaatcttaatttacacactacaatattttaaacataaagtatcaattttttaagtggggactaatggttaagattaattacatatcaggggcaagatcacaacatgggatcaattcaatagattattaaacaaaaataaaggaatatttatttatagacatacccgagtttgataattgaaagtggtagtaatagtagtaatgtttgattatggagctgagtttgaaagagcatttttcatgcacttaaatccaagttcagccaaacaagcataaactacaggttgatatggtacaaccaaacaatcacagaagttattggctacacaaactccaaatttggcacttatcttcaatttcttctttacctcatcagaagcttttaaatggtcaagaactttggtgaccatttcctctttcaaaaagtctgtacacttgagtttcttaataatatttctaccttttttaccaattgagaatgccttagatgaagatgaagaaactagtattggagaagatggagctgctgttgttgttttaggatcaattctcattgatgatgtaattgaaattggtatgattaccagataaaccaacaccaccaatgtaaatattctctccattttgtgcacttttttgataatgcttttgtactataactagcaattgataatgggactttggaagttggaacagaattatatacaagaataaggaaaagggtatatctacaatatttatatatatttatatatctatcaatgggatttgaacataagggtgttagtgatactcattgcaagctgcaacaagtaactgagttcacacgttactaaagaaaagacaataaataggtcccccactagtagtgagcaagcatgttcgtgagttttggagttttctttttcttttagtagttgacttgacatttcttctgtaaagcctaaacccttaagcgtgttgagaataaggggttgtttgttatgggatgggtggaaaattgaattaccctttatgtttgatgcaattttgtaagtgggaatgttgttggtttggtgtcacatatataattttagaggctaatatcaatctagtttgacaattcacatagctcccatcttaatttctctcccaaattactagatctttacataagaaatttggtttgtactgacaaagctgcacttgaatatttatcgaagatcacctataaagtgatgaaggaattaacttttagcccaacaaatcactttataacaaacaccccttcatgacttaagtgcaactttttactactaatttactgatttttgctcagaattttctttatttcatctgatatttcagtatcgaagaattgtcaaattgagatgtgaacacaagaataatacaaccgtaaatggccacacattagtgagagttcaaactccttccaatttctcatcttgaagtgttgaattcagcagattctaactgaatgaatatagatactttttttaaaaaaaatctcaacttgacctttctgagcttaaattcatatcattttcggcttttattttggtgaaatctagataatgtgatgatgattatgcaagccataaagattgaggttggggttgacatgcattttgatgggattcttgtactgtttcttcatgcaagtttctcaaatagagaattggaaagtccttggaacaaaaaaagtaacaatcaaatgataataaacaaaatcaaacatgaaattatcagtcatgtttctccattttgctttaggactatagatcatatattggtctatgattctgcacaaaacaaaatcaacagatacatagcattcatcaaaatatattgacaagaatgacataaaagcaaataataatcccaaatgaaagtccattctggtataacatttttaaattcatagtgaatctcaactgaaactagaatcttcataagtgaaatagtagcagaagctaaggaattcaccttaacttttgtattatccaaattctccatcttcagcaccattccaaattagtggcccaactgttgagaatcattggttccatctcaaaactaattggcaatgagtggagtagcccatgt

SEQ ID NO: 219437 - DNA, 7125 bp, Cannabis indica
ataagtattagtttaaaaattaatttaaatataaaagatggatataaatttatatttccctatatatattatagggtctcaaccatttttaaacttgaaaattttgataataagtcatttctaataaagtattattatttgacaaattaactatactcactcgatatactttattgttagtcatgatttcctgtactaattatatttaaattaaaatatatgagatacaatatttaaatacaccaataataatatgtcatctttagtatttttttcctaataagagtctctttttctcccaaaaccaatttattacactatatgagttgaaaaatgtctaatctaataacctaattgatccaattattatttttatggaatttcccaatacatactcttttttgctagtaattaaatactcaaatcttgaaaaataaccgcacaagtactcaaattatcgatttttcattattcccatcaataacaactccttttgtaggtccaaaaaatatcatgtgttgatccatattcctctaactaattatttttaattcaaattattttaataattttaaaataaaaaataattcccgtatctgcccctcagactcccatgcttacctattctcgtacccaacctcctccccttttacaccccatgtcaatttcacacgatcttgtagaacgtatatatatatattagttatggttacaagtttcgttttccgggaagctaattctcaacttaacacttaagtaatttttaacctaggggtaatttaatcagaactaattaccccgaaataccccgataataccaaaaacaaccaaacccaaaaacaccaccggtaacacaaactaataatgttgtgatatttctggccgccagtcgggtctccataattgccagacttgaaaaatatttttattttaccaataacatatattatacccatatattctaataaaattttcataattcataaattatgcttattcattcaattatacttaaattcctaattaccatgtaattagattagtaaaatcataatcttaccctttatactcatagcacacatattatctcatattttataaaatatgctctaattattaaaattagattttctgagatattacaaaggtactttctatccattattgatgatttctctagtaaattatgggttattattttgaaaagtaaaactgaagtgttagagaaattcacacattattggaaaataatgataaaaaccaaactagtaagaaaatcaagagacttaagatcggtaatggcctagaatattgctcagataattttgacatgttgtgcaaatgtggtatagcaaggcataaaataatgacggaacccccccccccccaaaacataatggacttgctgagaggttcatatttgatcaataaatgtcccccaattacattagattttaaaacaccagataaggtgtggtctggaaagccatcaagctatgaacatgttaaggtgtttggatgtgtttgctatgcacatgtgagacaggacaagcttgaggctagagccctaaaatgcattttcttagggtattcagaaggagtcaaaggttatagattgtggtgcctggaaccaaaaatgagaaaatgcataattagcagatatgtgacattaaatgaagcatccatgggattcattgagaagtgtgttgaagctagagaaaattttgatcaagagagaacaaaagcacatgaaactgagcttgaggtggagcttgaggtctaacacatgtttagcatgattttgtgaaagtttagatggtagagcaagagattttccatattgacgggcatacaaaaggatttcatttcatttttgaaatggttacatttgtggactctaaaacatgactcaaaacttttgatgatagatgacctaacctcctatgccaaacatcaagcttagaaattaaagttctatcagttgcatgttgagttacatctgatgttttagacattgctagactagagaaagttgtaggcttggtattattcaaaaataaaagaaaaccagacttgtaacttggtaagagttgatagagaccatccttaagcaccccttgaagcagccctctccttgttaccttgtccttgatcaaacaacaagtaggatgaaattcaatgagtattggattatcaacagtaagttttgaaatactgattagatttttggctactttggatacatgtgaaatttcatttaacttgaaggaaataccacaatgagtatgtaaatagccactaccaatatgagcaatagataatttctcaccattatctaccgtagcaggcttcttaccaccataatcaagcttctgactcattgatgaggaatcaaatgtgatgtagttgctggaaccactatcagcaaaccaaacatcacttcaacaacttcaggagtagcaatgaaagcattagaattgcctttgaactaagattgatttgctcctgtatttgttcccataaagttctcatcataacggttataacacacaactgtagagagtccatatttgtcacaaacctaacatgttcgcctagatttatagttgttgaaacgacctctgcctttaaatcagccacaatttgcacaacgatttccattgaaacgaccttcatttccaatgattgtattttgattagtaaaagaacctctgcctcgaccatgaatttgaagatttactgacatgtttacttgaggtgttgatgatgctccaatgatctttccattgttgatcagagtttccaatcgttcgatcttgttgtcaaagctcagcaggatgtcctccaattcttaatgccaggttgtttttagcttggcttcaatctcaaccacaatggagatgtatttagtgtcaaggtctcacaacacattagcaaccagatgtgactcagggtaaagatcaccatgccaagatgtcagaccaatttttcttttgccttggatattcagccatagatgttaaacccttccttcttgtttgtacaagggttctataaactcatccattttagctcttgaataagcaccatggagactttcaagtgcttgtcaaagtccagctgatgttgtagctcccatcacctctgtggcaaaagactcggtcatagagttgtacaacaatcccattaacagctggtaattgatgatccattgctcaaattcagggttaacttgaatccttgtctctggtccagtttctccattgttgattgggctgctgcatatgggtttgttaaccctcattttcaagtgttggagtagccataaatgcaaccttctattgactcttatactaagataaatttcacactaaagcaaatgtggaatgtttattgtaaatctcaactcaatgaatttagggttgtactatcatatttataaagggaatacaaatcaaggcatcagctattcaaacactgacacgttacaaaataaatgcacagcaacaaaggagaatattctaatagaattatcaaatgattacaactaatagtacagaaaccacacacaaaatatctactgcaagattattagaggtgttgtagcattcttctataaagtagggcatacttggcacaatgactaggctagtgattgggcagctggggtggttgccgactgtggtgaattctcaacatttgtcttggtggggtgttgtataactcgatagagaagccaatcatggtaagaaaccatagcaaagagccctatgaaactaacatgtaatcaataacccttccctccatttttctttttcctttttttttaaatgaaaatatagtagcaaataatttaaattctatatataattgtgttgagtacttaaatatagtaaatttgagttaaacctaagacactgctaaggaagaaattaatctatatatttaaaaaagtatagcttgttgcatcacatttattcttcatatataaatatatattttcaaatttttttttgtgggtaagatttagtgaattattttgttaagttcttatttaatcatttatggtggctaatttgtattttgatttggagctaatagttgttagttaagggttgttattctgtttattgtacagctcattgtaactacttttctgttagttagttagttattctattgctttctgtccatagcctcagctgtatttaaactcttgagcaattgctctgtaaataataacagatcattttcactctttctctctcgttaacatggtatcagagtagcattttttttctctcttcgttcatggcgactactacttcttcttcattcactccggtggtgttttctcacaaagtttctgttaaactcaatgataacaacttcttactatggcgtcctcaagttctttctgcaattcgaggtcatcgcctcttcgattacatctcagatcctgttcgatcgccttcaaagtttctcactgaagcagatgaaagatctggtctcgtcaatcctcgtttcgttgagtgggaagtgctagaccagctgctctattcttggcttctatcttccatgtccgatggaattctgaccaggatcgtgcgtgctgagacatctgctcaagtttggcaaactcttcaaacatactttgttactcagacctctgccaagatcgatctcttcactaatcagttgcaaaatttaaagaaaggatctctctccatcaatgagtacttgcttcgcatcaaggctcttgtcgatcatcttggctctgtaggtcatctcatttctgtcaaagatcatgttgcagccatttttaaaggtttgccttctgaatatgatacttttgtcatttctgttaattcaagaaactcttcttacactgttgctgaaatagagacattgttactctctcaagaacatcgaatggacaaacatcgaatggacactcacaataaagaactcgattctgtgaatattgctactagtcgtaattttcgtggaaaaggaaatgtttcttctaactctgcagctaatgatcaaaaatctcatggcgattactctactccttattctggccgtggcaatcgtggtccttggaatccatatgctgtcatgccaagatccacacctcctggtttttctagttcttcaggtggtcgtggtttttccccaactcctccacctcattcgactactgctcctggatctggttctaaaccagtatgtcaaatttgctcaagaacatgccacattgcctctcgttgttaccagaggttcaatttcgattttccaggtgttggtgctgctaacataggtcagccttcagctaatatagccactgctgatacagttcttgatgaggcttggtatcccgattcaggtgctacttcccattgtactctagatccaagcaacttcactcagcaagaaccttattgtggctccaatcaagtgcacatgggtgatggtgctggcataccaattcagaatgttggtaagaccttttttcatacaccttttacttccaaaactctggttcttgataaaatgcttcatgttcctcaacttaccaaaaaccttataagtgtttccaagtttgccttagacaatcatgccttgtttgagttttatcctaaccaattgttttgtcaaggatcaggtttccaagcatactctaatggaaggcacaattcataatggtctctatgtcattcagcctaatcaacttcagctcacaacttctccatcctttgtgcatccccctgttacatacactgctagtcatattaatgatcagctacagtctgtcaatgtctgtaattctttttctttgtggcataagaggcttgctcatccctctagtcgtgttgttaaatctgtaatatggccaattgtaatgtccctgttaataataaagaacacattgagttttgtgaagcttgttgcaaagaaaatattcataaatttcctttctcccattctactactggttactctaagcctttagaattcatacacactgatatttggggtccatccccagccctatcctctaatggctatagatattacatctctttcattgatgcttactcacgatatacttggacatttttattgaaagccaaatctgaagctattcagactttccaaaactttcgaactcaggttgaaaaagagtttaatcactctattatcactgtccaatctgatggagggggtgagtatcaagcctttgagtcttatctcttggctaatggtatcaaacacaaagtctcttgtccaacaactcatgagcagaatggagttgctgaacgtaagcataggcaccttattgaatcggctctcactcttctagctcaagcttctatgcctctgagctattgggatgaagctgtgagaacttctacctatctaataaataggcttccttctcctgtcattcaaaatcaaactcccctgttcttattgtttcatcagcaacccgactattccaccttaaaaatttttgggtgtgcttgttacccaaacactaggccttacaataaaaacaaattagaatttcgtagtgttcaatgtacctttcttggttatagtcttaagcacaaatgatacaaatgtcttgctagtaatggcataatttacatctctcgagatgtaatattcaatgaacactcatttcccttctctcacacttcttctcctactgccagcaattcagatcagtcatgtactaatcttcccactgcttctattcccaccttgtcctatgtacaacatgttccagccatctcatcttccaccagtcagttacctacaccagaaacttcccattcacacacacagccctcaccttcatccacttcctctgtcccatctcagtcactcccaaacccacaatcctcctctcaattgcctactacatcaccaagtgaacctgttcaaaccaatgtccatcccccagcacttgtcaaccaacatccaatggtaactcgagcaaaagtaggaacttacacaccaaagacattattggtttcccaaactccattatcattggcagcagctcttaaagatccaaactggcatggtgctatggacaatgaaatgcatgcttta

SEQ ID NO: 219438 - DNA, 1628 bp, Cannabis indica
ttagaaagagtatttgggggtattaaaattcttggtgttagtgttgaaggtaagtatagcttgtggttatggtttttgtgggatttgttattttgttctcttcaagaatttaagaaagacaaaaaaaaaaattaatgtattagtaagggaggtaacgaatcaagaggcgacatttctggttgcccatgttcatgaaaattgaaaattgaccacattttcaaacttttgatccatgtctttctagctaagtctcttttcaatttcaatctcaataagatttgtccacttttttttctctttcaaagggggataagggggagacttggacaagaaaaagtgtgacaagtaatataacatctcttactatggattgccatgaaataatcttgtataatggctactttgtaggaaatagaataggatcatgattaattaatttcttatatcttacatatttatatatatcgcctttgaatcgtggagaagtatgtcctacggcaggaaccaatgagaattattctcatatagaaatgattctatgtgttccctagctctgtatgtaatcatcactctcttaataagaatatatttttaaacgttcactttcttataaatttggttgtttaatttgatacaagagacaagagtttattttgaatcccttgcggaagattattgatactcatcatattattataatatagaatatgtctttaattcaactttactttgcaaataaattacatgctcagctcatatatggatacaagttgatcagtaacatgctcttgcttctgtaatatgtgtctttaacataacaatattgttaagtttatggcactaattgtgtcgaaaggtataaagaatactcatataggtcaatgaaagatggctttagtgtcatatatttcacttgtaaagaataaaaaaaaatcagagtttatctaaattgagggcttaaggatgtaagtaaatatcttcacaatttagttatgtgctctcaaatttatggttggttcgatatgagaagttttcttgtgtgtttgcaaatgttcttctccaaaattattttgtttatttgtaatgaaatcaattacgcatatctttatttttctacaatatttttggattgatttatctaagttataagtgaaaaaagatttacttagtttccctctggttgcgtaacattcagggattcaaagagattcatttctctgtttttttttctttcagaaattggtgttacactactataaaaatggtttttcccggcatttttactttaaaacagtcgtttaaagtattatcgccggtttctataaccatcgtctatacgactgtcgcaaaacgggcaaaataggcgacagttttcgtgacggttttaaaccattgggaatgtaaaaaaaaaaaatacagatttttctgccattgatggcagaaaatttatattttccctcatttttttcctgtattaattttataattttacctaaattaaaataaaataactaattaattttattacaataacaactaactttaaaacacattaaatttatacaataataaaataaatatatataataaataaatgtatttatagagctcggagagagagagagaga

SEQ ID NO: 219439 - DNA, 4308 bp, Cannabis indica
ctatgtatctctctctctctctctctctctctctctctctctctctccagtttcaagcttacaactttcttttccatgaactatcaatttcaggctgaagtatgttgaacaagaattagcaaagaagaggggcaggacaatggatgcaactgatcaaattgagaatgatttgaagaatgctgaagatgaactctacaaaatccctgaccatctcaaagtcagtattctctttttcttctcttgctatatttttcacttgtattaggtaaatagattgatttgattgcattttcttttacaggtaaagaagcgaaactcggaggaaagctccactcagtggactaccgggattgctgaagttcagcttcccattgagtaagccccattgctctatctattctcattctgttgctgagcttgagatacgtaatcatgtcattattacttcttaactgtaatgttttgtagatacaaattgaaaaatattgaggaaactgaggctgctaaaaagcttcttcaggagaagcggctcatgggccggactaaatccgaatttagcatcccttcaagttacagtgccgattactttcagcgtggaagggactatgctgaaaaacttcgaagaggttgatttcgcacatatataactttatcataatattgttagtgtacacatattactcatttatctttgctcattgttagtcactgttacaaattagtgagtttgtttctgccttctatgcagagcatcctgagctctacaaagacaggagctcacaagaagaaggtggtggtgcacccagacaagccgatactggcacagaggcagctggacaaaggcaagctgcaactgatcaatttatgctagagcgcttccgcaaaagagagcgccagcgggttatgcgcagatgacatggtttcttgtgttcctctattcttctactaatgatatctggtccttgattatcaacaagccctttgaccatttggtggatgcttcattggagttgctgaatgaatctctgctcctgccttcatggttgaagagcgttgcggttgcaattccagttccggttccagttccagttccacacattatgagaagactttttggctaccacacaaccgacacttggtgcccctaacttacatcactctatgtcaaacgtgcaatttccctcattttcaattaaggaaatctaatacatacctttgttttcttcttcttattattctaaataagatttaagcgcaaatttgtttgaaaatgtcctggtgatttaaagtcatttcatggttgagaagtaattcttatatatttattaaaaagagataaattggattgccctatggctctctgtgctgtgtatattttcactatcagagttggaaatgattccaacttcttttaagcctttcttggtgggctttctggcaaaaaacgcagagccacaagccaagaaggcgcagtacataattacttgagtaaaagtaaaacaagaaaacgaaaagataataaaatagaatacagaataatacaaagtttagataaattagtagcagaggcgagctagtggcggtggtcctgtagtagttgagcttaaaattgaactttggtggtgaaagactggccgaacttccaattagaaggcactgcattgagaacggttcgggtcttaccatttgtggcttgaatcttaaatgacaaggtttggccgttgagatacataaggctctgccaattggaaccccagtttctggacatggtttcccatttgttggttttagagcctttgatccatacgttggaaatatctccagttcctcctacgttggatatgagcactaattcaaagtagtctcttccgttaatggtgaatctgatgcctccacttttcttgcatccaactctgaaaaacaccatatttatatgagacatatgtattataatatcaaatgggctagtagcatttaacatatttagttagtacatacttcctatagaagatgggaacgatcccggctctgtatttggcaatggtctcgaatgcaggctgagacatgtcgaaatgagggcggggagggttgcaccagccgccgttgtcactggcttgagcatagtttggtggacagaagtttgtagcagtgatggtaatggaagtgcccttgagacaccattggggcaccttggtcccatcacacactatctgatagcacccaccgcatgattttccatcgttgaacaaagcagtgctcagagcagccgtctttgttccatacccatcagtgtacagatttccataaccgcatgcaccccctaattcatccatatatatatatatatgcattcattaatatatcatacacatgcattcatgtattattcattacatatttaacaagtacaggtactgtaactcacccattgttcctgaagcatcgcttccaccatagaaagttgcatgggcttgttgccaagcggctgatgttcctctgagctgggttgaaattactccaacaaacaataaaacacaagaaacaacgtaatatgtctccattgattatctctctttttctttctctctatcttttatatctcaataagctgcttttaatggctatttataatcccataatgtcaatattgtacggcttacagaatataattcataatagaaattggaataaaaaattatgttaatgaagccgttgactgctgatcatcactaagatggtaatgtgcatcctagctatataagagtaacaatgttagccgtaatttaagagcttgtgcacttgagttatttatcaatttggaaattagtaaacacccacttgattcttatgatcttgttgttcaagtcataaacacaaactgtagatgcctaatagtgtttattacattaaaaaaaacataataataattctatacgcacatcattgcctatttcccttttttttttctttattttatatctgtgttctaattataattccttattacaacctcttagttaatttctatattttaaaattacttgctaaaatatttttatttttataataatattgtattcgttatagttacaatattattttgtaaattttttaaacattctgaataatttacaatacagaaaatagaattcttgatatttcaatttaccacgtgtgttcaaaaaccttcaaatttatttttagcattgtaaattattaaaaaaaaaaaaaaacctacagatcagatcaaaactatgattcaccaactaaaaactactacaaattcagcaatagactactataaaggaggaaaagagaaccagatactaaaacataaaattttctgagaaaactcggtcaaaaaagagacaaagatggtacttttagaggtttccgtgaaacaacgtgataaaagattatgataatctgagaaaggcgttgtaataaagaagagaatggtgaagaagggtgtttgtgagtgtatatgtattggcttgtgaatggtcacgaggaaaattttgaaatgggcattaaagattgtacctcttctttcttctttcacgtaatgccgagctttctcagcgttcaaagcgatattttgaatattgaaagagtccactctccttaagtagaactcacttctgtttttttttctaacctaataatacttatttatatttgccgcacttcaagtttcctcttcttcttcttcgtatatttattatttattcatgttactaaattgcaaaatgcattcccctatagtcaatgcaggtttctagagaggaccacaacaccacataataactatattcatctccttattaattattattttattaattgcctaaaacaaaaacagaaattgcctaatttttttttaagagcattgttattagcaccattgtgcttagcaatttctcaacatattgcgttgctagcgatattctttaaaatctattatattaaattatatagttaccgatatttaattggaacaataacaatattaacatataagagggtgctaagcggcacgggtgtcctttagcatttcttttattttttttttttaataccataaagaaaaaaagttcccgtataaactttatataaaggtgctttgtttgcttctttccttcttttttgaaataattatttgcctttcttttttattggctaagtttatatttgtatatttagtagtatttatggtatgtttacttaagggaattgactttgtaatgggaaaaagttagtggagctcatttaaattagacgaaaaagaaaaggaaatatttttctcta

SEQ ID NO: 219440 - DNA, 3127 bp, Cannabis indica
ctctgtttacttttgagtcataaacaaaacgacacacaccacaccagaacattgggcccgaacgactattaaaaaccctacatacacgtcagcaagggcaagatagtaaaatcataccacgagagaaagtttgacggtgacgatcaatcaccagaatcgacgggacccacaaacgtggcgaaaatacttgaaacccgaagattcaaaaatcatacaaacttaatcaaaactaggaccgcgggagaatccgccacgtgtacactatgagcgaagttttggtcagaggacagaatggtaatttgagtttcagtagaatggtctatataaccttaagctttgttagagttcagaagaaaaaaaagagaaaaacaaaaacagacaaaaaaaaaaaaaaaaaccgaccgcctcttctcgtcgccgggaagggttcttcggtttttgataagagagattcgaaaggaagaggaaaaaaaagcttatcagggctttttccatctcttgatatccggcggagaagtccttttttagggaatgcagagagatgagaggagctttgttaaggagtactgagatttcttttgggcgttcgaagaagtgcatcggcggcagaaattgccaccggaagcacgttgaagacgggtgatctattcatattactcaaccctttctgctcttgttttctgggtcggtttcgatttctctttatcgaaattcggctaactctgtagatatatctctgtctctgtagttttaatataccagctgtttgttattttgtttcttaagtgtctgtattgagtttttagtattgtttaaaagaaaaaaaaatggtggaaaatggtggttgtaaagatgggaactcgactttgcttaatgggaaatacgacctcggtcgacttctgggtcatggaacctttgctaaggtttaccatgctcggaacttgaagaacgggaagagtgtggcgatgaaggtggtggggaaggagaaggttattaaagttggaatgatggaacaagttaagagagagatctctgttatgaaaatggtgaagcacccaaatattgttgagctacatgaagttatggctagtaagtcgaagatttactttgctatggagttagtcagaggtggagaactctttgctaagattgctaaaggtcggcttaaagaagatgtggccagactctactttcaacaactaatctccgccatagatttctgccatagcagaggtgtctaccaccgtgaccttaagcccgaaaatcttcttctcgacgaaggtggcaaccttaaagtcaccgactttggtctcagtgctttctccgagcacctgaaacaggacggtttgctccacaccacgtgcggaacccctgcttacgtggcgcccgaagtcatcggaaaaaagggttacgacggcgccaaagctgatctctggtcttgtggtgtcatcctctatgtcctcctcgctggatttcttccattccaggacgataatcttgtggccatgtacagaaaaatctacagaggagatttcaaatgtccgccgtggttctcttcggaagctcgccgtttagtcaccaagcttcttgacccgaacccgagtacccgaatcaccatagcgaagatcatggactcttcctggttcaaaaaatctgtgcccagatctgtacggaccaaggaggaagaggagatggagaaggagaaacagtacgacgagagctactttgagaagacgaagttgcaaccggagacccttaacgcttttcacatcatatctttatcggagggttttgatttatctccgttgtttgaggagaagaagagggaggagaaagaggagctgagattcgcgacgactaggccggcgagcagtgtgatatcgaagctggaggatttagctaaggccgtgaagtttaatgtgaaaaagagcgattctagagtgaggttgcagggtcagcaaagtggccggaaagggaagctgtccatagccgccgagatcttcgccgttacgccatcttttctggtggtggaggtgaagaaagacaatggtgatacacttgagtacaatcagttctgtagtaaggagcttcggccggctttaaaggacatcgtttggacctcgccggcggctgaaaattctccggtcatttgattgttttccggccagaaatccccaagttgaaaaattcatatttgtttcattattgtctctgaattttaggaaatgaaatttgataaattggtccaaatcttgtgtgtgtttttgtgatctttgtttctctctctatttacttgtcgtttttatttgattgtgtttggatgtgttgtcgttttgaatcaaccaaataacttgagatcctttcactgttgattcattgatcaatatttgatgttaatcacttgtgtttgttgaaatatttgttgttgtacttttagtatagttttcaatataagaactcttatcacctttcatatattaaataaataaattatctgaataaaggcaaatctttttttgctttgtttcaactttaattagttgctttgtggggtgttactttattgaacaatagtttattgaagaaagaggaaaaaatatctatgatatcagatgcatacatttcatctttgtgtaggtaccaatattgacccttgagacttgagtgttcttatcccactatactatgaaaatttggtgttaatttatcctttaaattaatatcttaaaaaagaaaaagaagtctcacttgacatgttgattgaaaattgctcatctaaacttctttttggaattgggagttgtattacattatgatatatcacaagtctatttgatttcctttttccaatgtttttcgtctcaaaacattgtgactagcttttaaaatttgtaaaggggaattgaattgatggatggatgattttttttatgatagggtgaaaaaggagggtagggtgttaagttatgagttcataggtttacatggtgggttattttcttgggaaaactagctaagtaactttacaccacaaagattcaaatcgttatcatctttggctttatgctgaattattgtcctttgacatcaccatcataaataataataattataagaaaaaaaaaag

SEQ ID NO: 219441 - DNA, 3756 bp, Cannabis indica
tattttctaaaatgatataaatatgattttgagtgtagaaaatataatcaattttgtcataactcatctaaattggattattattaaattttattttcataaaaatttaattcaagaaaaataaagggtcaaaatagtattgccctaatatttatctgtataaatataataaaattataaaactatacgacataattaatgtacaaaaatgtgtttagatgtacggttaacgttaaaccctgttgacttaattaattagggtataaaattaagactatgatgattagatcatgatctagagagttagctcctagttgataataaacattaattagtctaaactaccacaacaatattttctcaaaaccccaaatcttggattactctccaacaatacacgaaaccctaattaattataaattgtctaattattaattttttcattattaatatatttgatgacaaaaagtatggtaagtacgtacaactcatgcagttgaacaagaagtagatgaagtgtagttagctattaattttatcatgtgcttaagctatatagctacaccttataaacactttaccttaataaatttcaagttattacatatatatatatataaatcaattactaattattactttccaaatcattaatcatcatcatcatcatataccctaattatggataaaaataaattgttatttggatttccaaacactactaacccaaatccaaatccattaatactttcatcctcatcactcggccaagatcaagattggttgtgtggctctaacaattataatcatcatcatcagaagccattaatatcatcatcatcaccaaattatgatgaacaatgtttgatgatcaataagggtaatgatgatgatgatgatgatgataaaaataaaggaaaaacaatgaatattaatgatattggtaggaaaaagaaagatagtagtcctcatcatcaaagggttgcatttcatacaaggagtgatgatgatgttctagatgatggctataggtggaggaaatatggccaaaaaactgtcaagaacaactctcatccaaggtatatatatactatatattatttatttttaacatatatatatgcatatcatcatattataaacatcttaattaaagtttcgatcgataattaattagtattgatgctataataattattagcttcacaacaaattagtaattagacatggatattctttactcctagctagatcttgccaaaattatatttgtacttcgttgccctatttttctggttacggtgggtgttttcttaagttggcgacgatcaacagtatgattaatttagatactgaattttcttggacgagtaatttggcagcaagctagcctggttaaaataatttaatttctttgtgtttaaatatttaatattacatatgcaaatatcattttcattcaatgtttaatatctcttcaagctaaacttaaacttatgtacgtatatatatactgacatttgagtatttttgtatatatgtagagtaatttgtggtataaatatttaagtttaacttttaattataaataaatacttaaatttaattttttgtggcaataattatacctaagttatatttttagaactttgtaagcacttgaccgttaaatgtcaagttattattcacatatcattttcttattggcatatttaaattaatttttttttaaaaaaaataaaaatcatgttctggaccaatcagagattgtaacgttgcaatttacttaacataaacaaccaaatacccaggagcggacccacataaaggcgaggtgggacagtcctctctaaaaaaaaaaaataaggaaaaaatatatatgcattattttagttagttataacatctatttttaaataaaagtgatatttatataatataagttttggtatagtagtaaagatattttcgccactgtaggtacttataaaatttcagaaatataaatttaagtattattatcgtacaaaatttaacttagatatttatttacaacagaacaaattaaagttaaacttaagtatttataccctaaattacttttatatatatacatgtgaaattgatgaaggagctactaccgttgtgcgcatcatacatgtagtgtaaagaaacagatccaacggttgtcaaaagagaaaggtgtggtggtgacaacatatgagggcatccataatcatccctctcacaatttaatgcaagctttagccccaattctcaaccagctccaattcctttccactactatataaatatatacatatataagcaataaatatagttttaataaagtaaagtacgtacttgaaaacaaagtgcatgcacacatgatattcgattacatgtgtatattaattaattcttatataaaagaaacataaaagacatacatatatagccttgattggcagcttaataaggatatgtattatacaactatatatactcttcaatatcttctaatttttgatgcatttctaatttagaagatggtgatgtgtgagggtctttgaggatcttgtggctataaatttattgatgaagatactcttccttcatgttattatccatatgaaacttgagggttggatttagggacaaggtgactatgatgtgaaaatgtatatatagttcgggaagtaacatgtttttataatcaatgttatgtatttgggaagtacaatattgatgtgtatggtaagaattaataatggggtttcattttgaaaaatttatagtaatgagtatagcaacacatgtttttataaagagtattgttatttaatattttaaggtttgaatagaggtgcttatataggtgcttgttagttagggaccaaatgaaatcataaaataatagataagaaagaatgctcgaatatttatgtgtgtatatatatttttgaattgattaatttaagtaaaaagtaatttgtgggtctagcaagcatcaaagtagagtgtttttattggaatcgtcttaattaagtgatctacatcataactattatattgatgtgacacgttataattaattaataatttttaataatatttattaaattaaattaaataagaactaatattaaaatgtaacaataatatatcacctctagtaatgcttgacactgatcttaaagcatgactgatcttgagagtagacaagttaggcttgcgcctcatgccttcaaatgcttagattctaaaattatgaagaaaaaaatattaatatatagataaaatattaaaaaataaagtaataatacaaatagtgcttagttgtggtaaggatagttatttttaggtaagaggttaatggatcaatcctaacctttattttttagttttttagaaatatataatgtgtaactatgaagaattgaatttaaaattcttagttttaaatttttttaccattacaccaaagtattagaagtattgttttgataataatgaaatagtaatgatatgtgcacatataatttacacacttatgtgggaagtcacttttaaggtgggaccattttaaataaaaataattagttaaaattacttgtcacataagtgtgtataaagtttgtatgtgaattgtatgtgcagatatcattactcttaattaaagaccttaaattttaattttatcttaaaaatcatatactttagtaggggtgttcatccgatccaatccgcactttt

SEQ ID NO: 219442 - DNA, 5482 bp, Cannabis indica
aaagttatttttttttggagtgacttgatccaatactggcacatgtttgataacaactatcccttgttgaactttttcataatgaaagtaaagatctagctagttcaatatgcttcgtcctgccatggagcacaagattttgagtaagcataatggtacttaagttgtcacacaaaacaaccgagggttaaggcaagtgaaggtgcaacttagaaaatagagattgcaaccgattgatttcaacaacaacacttgctaagctcactactaaaaaaaagtagattttttgaccgttttaaacagtcggttaatatatattgtcgttggtctctatagttgtcgcctattcgactgtcacaaaactagatagagtaggtgacagttttaaaacagtcggcgaaaaactttacggatggtattgcaccgtcacataaaaaaaaagaacgagatcaacttgaaatgtccaccatatctgcaaaccagatgcaaaactagaaaccctacacatctcaaataaaaaatagtcacaataataaactcatacacatctcaaatcaaagaacaatacaatagataaataaagacaagtgagattacccgagaatgatattgacgaacggtggttgtgctagtggttggaggcatcgtcgagatgatggtgcgactggtggtggtgccaactgccaacgtggtgcaactggaagcggtgtccacttttgaggtggtgtaattggaaaggatgccgagatgggcttgctggtgtgagtggtggtcactctgtctgactggcagcttactatgttctatcagagagagagagaatttgaaatgaaaaattaatgagataaatatttgatttggagggattttatgaaaaattaagcaaattttttttttaaccaccgaacattaaaccaaaagttaaatgtcaccttaacaaggtttttatttaagttgtagtccaacaaaaattcttaagagagccttaagccttaaaagtatactactatacgtatgcctacgtataaaagagccaaaaattagttggagtattggtcaattttctatttcttgaggtgattagtctccatcccaaaaaaaatatatataaaatattatattattctccacttatatggttaattgttatgtaatcattatgtattacatcctaaattgttaagttatattctaaattattatgactaaattaatattattttttttagtaacaaggagaacaacaaaaaaatgaaagatatactattcattagctaaaattatgcttcaaatgattattaaattaagaaatttaataacttattaattaaattgtgactgtgaattaaactattttgacaaatgcaaagttggttattataacttcaatagttggggggtttttgatccacaagaatgtcttttgtcaacataattatttttgtgagcggaaaattaatatttcttggtgcaaaaacacactggcaaagcttaattctgtcaataggaaaatttcgtgttgttgacaaaggtgagatgatatttttagaaaaaaatttgttggccgaaaaaaatgtcaaaaaaacattacattttttttgcacttttgccaacaatttttctgtttgatccagaatagtatgaaaaatattggtaagaaatttacagcacaagaaaaacatatttgcaggaaaatattttattgatgcatctcattgcatcgacaaaagtatacacaaactcaaagtaatacatcatttcatttaacattttcataaatacttttttccgtgcaacaaaatacattggattatatcgaatagtcctctattctctcctagtttcacttcttcaatttagatttctatttaatgatttatgcaatagtgagagtcatgtgaattgtaaggaaaaagattgagtaagttgtgcaatttcactttgtttggaaaaggtcaaatgtgatgattttaagactgtgtagatatgggacgacacagttgaagaatgattaaaaatgtataagatgtatatctttttttcggtaatccatcacttaagaacatgacttgagtaatcttagaatagacaacctcctgagaagttttcttgagaagcgtacgaatgagaataaagccaattagaaagactcgtgtcggtttgtaagactagttgttattccatgaaataaccagattatgatgtatatgtatataaaagtcataagtgtgtgggaggatgcccaataaaaacttgaaatggtggcattacaatttattttatatgaaaagtatattttagtgttagatcaattagaatatatttattgtaaaaattaaatgtatgaaataaatttattaattttgaataggttagaagttattaaatatttgattatatatgtgtatatttgtatgtgagtttttgcatttgaaattgtgtatagtggttttgttaatttatatttttgtaagtgtattgttttacaacaattagtattaaattttgattagttataatatgtatagggtaaatataataaatagaatttgtgttaattgtttatgaaattttgtatttatcatctaattataattaagagggtcttccattttaaaaataaaagtgtaggtgatatatatatataatcgttggtacaatttattatcaggtattatacattttaattaatataaataatgtaaaaaacattacatcagtcacgccaaggaggaattttgctagttttggtgggtgatacgtgatgtcgagggtattgtgtgggcggcttggtcgattggttgtgctggtgagtttcaagtggtggtggcagagctatggaacttcatatgggtctcctatgagcttctaatttgggtttcaaaggggggagggcagagacggatgcttcgattgtttgtaattgggttaataatcctgattctaattttgtgttcaaaccttattgaggagattatttctctttgttggggtatcaactcaattccctcattgaaagaaggcaagaggtgtattagatataagtgttccacttactctattagtatgagactttttgagaaggtgcctaaaaataaaactgtgatggcttaggcccaaaatggataatatcatactaatgtgggagtaaatgtgagatgacggcccgataaagtagaaaaatgggacccaacaagtggtatcagagccaaaagtttaggaccactgggatagtggactggatttgtaatgtatgggggaatcccttaatgtgatgacctcgcgattaaagatctttatggtgtcttgtatcgaaagtctacctaatcttgaggtagtcaagtggcgtgtcttgttgataattacggcagtacaagatggagatcggtgttaggacatgtgtcgaaagtcttcctaacaaaggtgatggctaggcgacagagccgaccctgagttgaaatagggcgttggcaaaaaaaaaaaaaaatgggcccttactataaagataaatggtatttttaaaaattattaaaaatatatgtatattttttagaaagtattttttatttgggcccctaaaatgagtgggccctaggtgcgggcctagcccgcctatgcctagggccggctttgccaggcgacaagtttcgttggtgatagcgacgacataaggtggtttcgctggaggggaggacaagagtatgtggtccttggtttgaggggaggattgttggggtatcagccgaagtcccacattagaagaagaggcaagagttatatattggatataagtgttcaacctactccattagtatgaggccttttggaaaggtacccaaaaacaaaactgtgagggtttaggcccaaaacggataatattatactaatatgggaagtcaaagtaagatagcggcccgacaaggtggaagaacggggcccaacactcttttagcagcaattagtgattattgtacaatttcacgtgttgcgaatggtatgacccacacactaactaaatttgttactagtagttcgttaagagttcatatgtaaactgatgcttgtcctaaatttttaagtgcttctataagagttgatttggtttaatatatttccacattttccttgaaaaaaaaatgactaacctttacaagacatgataaaaattaacacattactaatttggagaataattaatatacaataatatcttagggttgcacaatatataagaggcttacgcataaaaccatttaggcatagttcgtatcacaaatcgatatctccacatcaccaagcaacaacacaaacaatatttgccaaaacaaatctgttatggtgaaattattggtggtgatgatgatgaataatgcattgaaattcttaatgattatgttattgtcatgttaattaaattatatatatataaatattatggtaatagggctaagagaaccgaacctaatagctagttataaccatatataaaatgatctcaaatttgaattaaatatgtacaaatgcatgtaacatgtctcacttcaacctcatataacctaattcagaccccgcaaaattcaaaatggtgctctttgcttgcctttaaaaatttgtccactacactatctataaaataatatatatatagttctatatatatgcgttgcacaaatgtaatatattttttgtcaagattgtatttgttataattatttaagacaacctacaagattttaaaagatacaaaaaaatttaacacactaaaaataaaatttaaataatttacacatatgactcttttattttatgtctatgtaaaatagattatttaaatactatttttgatattgtaaattctgaattattttaaaattttacgatatattttaaataattataacacacacgattaaaaaaaataatggactaaattctttttcttgctagatgctaaaacaataggggatggatccattattattatctgtgcattattataaaagtacccattataagttctatatataaatatatttatatatataatcttcttctttttttctccttttgaaagtatttcattaacaagttctagaatgatgatcacatatcttgtggaaagttgatcaaaagtagaaaataattagagaatgaaggaaagaaaagttagctatataatataatgtattggatcatgtatttggtactctcattaagtggaaaatattatgttagtgctcatgtgatgtgatgcaacccatacttataacaacaagatcaactcaaaacatgttttggattttgttagatcataaacctaattattaatattttaaatcaataagatataataaaaacaagtaattaaggagcccaaagtgaaattctttatcaatatagtcatcctatatggtccacgatcaatatggatatggttctagtgtgccattggaggaatctatttaagttaattaataataat

SEQ ID NO: 219443 - DNA, 3531 bp, Cannabis indica
aaagagttttatttagggcataaaacccaacatgaaattcatcaggtaaacttgcaacgtatctttcattatctaaattatcccttcggactgacaatctgtctaagggtagaaaattgtgctaaatttcagttttgtacttatgaccctttgtaaattctatcaaaacctagaggtaaatttcgatttcctatccgaaataataaattttagagtcacataaagtcatactatttcccttaaataattcccttactaacccttatactgaaatagtaccttaattcatattcaatcatacgaaaacaaacatgcttgctattctaagtactccaattatagaacttctagtaacatcttcctatttctgatggtttaccccaattcactgtcaaattaagctcctgaatacataatctaccacatcattttgcattctacctcatcagtaagtaaaatttcaagtctttgtacatcctaatagtactaaccttataacgatttaagaagtggtataaaccttcctaaagtacaaactcgagcttattagcgtaacattctgtgatttgacattgaaaattttctgacatagccagcttaaaacttatttttgagttttcactaacattgtatccacaacttgagtacttctattttaatctaataaatttggttgaagtgttaacttattgagttttcccatgtaaactccaaacttaccctaaccatgacaatcgttaacttagaaaaaatcatggttgtaatgaaaacctgcccgggacatttcttattcaaggttccttccactagattggccttccagggtaataaagagtttcacagccgtaatttttgagtaactccaaccattgtttttatctcatttcagtctcttatgataataaaatatttcacatttccctccatagagatagatttgtcaaaacctaaaattgaaatcactaccacaagtaataaattggttaacgttacttatgctccttcaattgacgagaaggataagcaataaccctacatctaacaccaaaatgcactccaaatcttatttggatgcctcgcaatggaccacaaattttcttgatctgatgcctaagctaatacttaaattgtaatcaatcatcgctttggctcttgaatcaaatttcacatttgtttggccatacaaacagtcgtttcttcttgattaaccctgtaaagggcgtaaaaatcttgaaaacccttacacgaagcgatggtagtaattatttgaatcttgaaaacttccaaccttggtgactatttttggccttagctagtcttcattagattaaaaataaattgtgatcccatcttagctaataaaatgccctagaagggcacttggaataactaaaattcataattcttaatttgatatatacagtttatgctgccatagccactataaaactatttgtagatgttgttcataccctgcttcttattaagagtacaccataacattatggatatttactataacacatctatcgagaaaaatccttgagtaccctgaacaccaaatccataagagctatcaaagcattggttaattctcaaagacataaccagaaatttataatgactatatgcagtattataggcagtccttaagatgtcctccactcaaattctcaactaatgatagcccgagcgaagatcagtcttgaagaagagtatctttctttgaatttgatcaaaccaaccatcgatcctaagcaaagggtacttatgctttcttatcaacttgattagttcttaataacaaatgcacatacgaaatgaacaatacttcttcttaacgaacaacaccgacactttctagggcgatacacagggttgggtaaaccctaaatcaagcatcctctgaactcataactttaattccttaaattctgttggagttattctggagggtgccctagaacccacctctactccaattgctaaagtaataacaaagtctatctttgttgtagtggtaatcctgaaagttcttttagaaatacgttcaagaacacttgtaccacttaatatccataggccaaactacctcggctaagtggtatctaataccatcgttagaaagtctatgcatccataccgcaataggtccctaacttttatcatcatgatacttggagtttaagtacctcaatctagtacggtaacacgaacgatctttcttctttaattgaaaggttacaatcttctgcttgcaatcaacaatagtagtgcactcacactaaaaaatccattccaagtaatatctcaaactctgctatacccaaagttgtgagattagtattcaactcctatcctcaactctaactggcatagatctaaaccaccttttggagatgactaactctccgccaggtaacagggttccaaaccctatttcatatctgtctcaaggcctacccaatttattagttatccagactaccacatattaatttgtagctgcagaatcaattaacatagagtaattcgagtagttgactagaaactgacctgacaccactgaaggactatcttcagtattgatttgggaagtgacaaacacacaaacttttcctcttgttctggttctatcttctgtagttgtgggaaattctcttatagtgccctacataaccgcattggaaacatgtcttagaattacactctcctggatgatgcttcttttatcgggggcactctggataagtatagtgacctccaaggccaccctaaccaggtctacgaaacctcttcttctgactcaagcccactaatgtagatggagctttccctcttttgacaattcaaggaactagtaccacctctgacgagatttgatgcaaggggagtagtatccctatcaacaacaaaagttcttcagaattcatgagcaagctcgatagtgcgcgctactcaaggggtattcatcatatcttgatgtccaaaagtgaccaaaggttcttgcatccaataatttccatgcaatggtcctattgggtaccaccctaaactattctactggtaactttgaaactaaagtgatcggtacttatggtaaagacacagcatgagatccatcttgcctcaatctcttaatctcctcctctaacggttgaatcttagcttccatctctacgaatctttgcttcaattttaacgaagcttgcggtggattttcatatctacttccataagtcctttcttggcctgaacctcggccttggaaactagggggatcccattctctccattcgccatcagttccagctaaatcatcccaactcctcgtattttgctaggcatcgatctaaaggaaaagcatgcaaaattatgagtcggctagatcaagcagcagtcgaaattgtaatctacttaccactaacatggaaatttagtattcacctattcaactattaatctgctaacatgctccatatcaagccatttttttatcaagcatatcaattaaaattactaaaacatata

SEQ ID NO: 219444 - DNA, 3682 bp, Cannabis indica
tgtcagctatgccttaaatatggacacactgcccccatttgtcattataggtttgacaagaattgggtgactcccaaacatccagcacaatagccccaagtgaatcttactgaacaaatcactggttttgatcctcaagctcacctcactcaaaccctttctgattttggtgatgacagtggctggtatgtggacagtggtgccacaaatcatgttgcttttgctatggaaaaccttgattctgctattccctacaatggtcaagagtctgttgctgtaggagatggtaagaagttacctatttctcatattggtacaactaatattccctctatgcactctcatcctttaaagcttaagtctgttttgcatgtcccctctattaccaagaatctagttagtgtttccaaattaactagagataataatgtttttcttgagtttcaccaatcttgttgttttgtcaaggacaaacaatcgggtgctgtcctactcaaaggaactctcaagaatgacttgtaccagttagaagataatcactccaagttttcaaatcactctcttgagtgcaatcttgtcacttcatcttctaattcttgtcctagtactaatatcactactgtagcatctcaaaattcttgctgtaatacaactgctactgcagtttcttcatgtaatcttgctactgccaataaaagtgatttcattttatccaatgtgtccccaactgtccatcatacttctgtacaaaatgatattaatctttggcactgtaaactaggacatccagcacctgctattttaagcaaaattctctcacagtccaatattgcacactcacttaagcaactaaaattttgcaactcttgccaattaggtaaaagtcacaggttaccttttcctctctcctctactcgagcctctcaaccattagaacttgtccatactgatctttggggaccatctcatattgtctccaaagataactacaaatattacatcatctttcttgatgactatagcaggttttcttgggtatttcccttagttcttaaatctcaggcctttgagacattcataagattcaaaagtttagttgagaaacaattcaacttacctattaaggctgttcaagctgatgaagggggtgaatatcgatcatttgagaaatttttaaatgaccaaggtattaaatttcaactctcatgcccacatactcatgaacaaaatggaagactagaaaagaaacatcgacatgtgactgaaattgggttgactctgctggctcattcaggtcttgacatgagttattggtggcatgcctttcagtgtggtgtttactccatcaatagaatgcccacaccagttcttggaaacatcagtccttatgagtgcctcttccagcaacaacccgattacaccattcaaaagccttttggctgctcttgtttccctcatttgaggccatactctcaccataaaatggaatacagatcagaagagtgcatctttcttggctattctccaaaacataagggatatctttgtgaaaatcgtgatggcagactctttgttgctcgaaatgtggtctttaatgagtctcattttccagcctttcacaacaacaacaactcccaggtactatctcctgagccctctaatgttcccactgctcatttttctactgatttttctcaaatacaaactaatgtatctcatactggtgctcctccaactggtgcctctgcccaagcaactgcaactgtcagcccttctgcctctcatgaatctgctactgctgcagcaccaagtaattcctcttctgatccttctagtttgcccaacatgtctcccatcatgtcatcttctcatagcagtgcctttgcttcccaacaacctggttcgaacaacaatgacatcctcactgtgcttcctactgctgctcctcaaagaactcatacaatgatcacaagatctcagcatggtatctataaacctaaagcatatattgctactaaacaccaacttcctgagtctcttatccctcgagaaccaaagtctctcaaggctgctctaagtgacccggcttggaatgcagcaatgaacaaagaggttaaagctctcaaaaataatggcacttggactttggtaccctatcagccccatatgcacttaattgacaacaaatgggtacatcgcatcaagttaaattctgatggaagcattgatagactaaaatcgagattggttgccaaaggataccttcaagcacctgacattaattatgctgaaaccttcagcccagttgtgaagccagttacagtaaggatggtgcttactcttgctattacctttcaatgggaagtcaagcaattagatgtttctaatgcctttttaaatggagttcttcaagaaacagtctacatgcttcaaccgaaaggatttgaagatcctactaagcccaaccatgtttgtcacttacataaggccatttatggcctaaaacaagctccaagagcttggaatgacaaactcaaaaccactcttgtcaattggggattcactgcttctcgggcagattcatctctctatgtttatggttctggccatcaactaatcatcttcttagtatatgttgatgacattctcataacggggcccaacactactcttattactcaactgattcatgacttaaatcgctcatttgagctcaaagatctaggtccaattcactactttcttggagttgaagttcataggacatctgagggaatgtatttgtctcaaagcaaatacatcacagatcttttagtaaaagtccatcttgaaggagttaaaccgtgctcaaatccaaccagcagtgctcataagttgtctcttcatgaaggtcacccttttgaggatcaaacattgtaccgaagtactttaggggccttacagtacttgacacttacccgacctgatgttgcctttataataaacaaactctcacagtttattcatgcccctacaagtgtgcattggaaagcatgtaagcgcctacttaggtacttaaaaggaacacttcatgatggtctgctcctcaaaccagttcctcggctctcacttcaagtctattccgatgccgattgggccagttcattagatgatcgacggtctacgggaggttatgctgtatttcttggctcaaatctcatttcttggtctgccaagaagcaacaggtagttgctagatcatctactgactctgaattcagggcacttgccaatgcagcagctggggtcaagtggttactctcattgctttctgaactgaagtttcaactccaagacacaccaatcatctgggtggacaatcaaggtgcagctgcccttgcagccaatcctatatttcatgcacggtgcaagcacattgaaatagacttacactttgttcgtgatcaaatattgaagaatgagctctctgtcagacatgttcctagcattgatcaagttgctgacattctaaccaagccacttccaaaagaacgatttcactatctcaagggcaaactcaaagtggcttgtaccccttttcgtttgagggaagatgataaccaacaaactgtttgaccgtttttattgtttaaattggttcactacaagaaaaggcatttttaccggcgcagttcgtcaaatg

SEQ ID NO: 219445 - DNA, 2290 bp, Cannabis indica
ccacgtccatttcttgaacaatcaaagaaacaactgatatcataggttcagatttctttgttatgtgggcttcaagttcttttaatacaagtctaaatatattatccttctaactagtccaactttggctacagaaactattggagggatcatgatactgctcttttcattttgaaacacttgtatcatgatatacctgaagatcctaattcaactgaagcatctcatggagaggacatgaaagaggcaagcgacaccataggtttgtctgatcaaagagaaactattgaggaggagcttcctttgacattctctgacaaaagcgttgttaggaacttctctagtagagcaaataagctattgaagaaacattgaattttgaattgcatctacttctcaccgttacccaagtggaacaactgggctatgagcctatgaccgtttgctatgttgcgagccaaatcattccggctgtttaaagagaaaaatgattggcccttctgctatggatctggctaaccatactgtagagatgctttgcagagattaagtgatttctaacactaaaatgacccttctgaagatgatcctccagtcctcacagatgacatgaaaaattgttgggcatttttggtatggataagttgcaactcattttcttttacattacaacgtatagtatagttatagcggatcaagtttacaagaaatttctcatgatttaatatttcaaaatcagaatttaaatagcttcttgcacgtgtgtttgtttcaatacttttacacccgtgccacaagttgtttgaattttgattggcattttaaattatttgaaattttcttaaaaatttgtcggagcttgtaactaattatgcactgttatgttgaaatatatatatttatatataaatatatgtatacaagtagattttcatattatggaaaataccaaaggtaccaatagttagtgattaaaaagcaattccttatttatatataaatatatatgttccatatatataatctgagtacatgtaagagaatgaaaggttgattgagatttgcttgtggaagttgttgttttgaatggaatcatgactcacgagtggtccacctttaccatcctggataagaaatttcttacacaaatatttttctatttttctggttacctttcatctgttataataggtatctgttagtaatataacactgcattttctcctttacttcgagatgaatattgtttactttgattcttttttctagagagaattttttatggtgccaaagatagtctttctttggttgtatttcttctttcttccttttcccttttctgcttgtggcgagagcattatttgcttagttgatgcccaaaactaacaccacatcacctaaggttggagccaccattcatacatattctattaattttcaacctctagaagctcctaaaatttctttattatgattaccgagcaatacattattttttttagtggaaagatatagatttcctagaagctcaagcactattggagtttgctattgcagcttaaaacagagactaatacaacaataaataattctgagtggttcaacttttctagttcatggggctgccccagattatagacttgattagaaagatttatgacagaaggcacttgactaagtaaaagaacactccttctgaacaagagtgcaagtttattgttacaaccaacactttgctaagttttttgagttactaatcagttagaaattccttcaacaaacagtgagtattttgggctaaagatgcaactagctttctctcaaagagtcatttacaacaacagagaaaatggtaggagaaatatcctcataccataaacaatcattatccaacactaaagtttgcttagccaagtcatgagtaacctcgtttgcatctcttcgaacatgaaatacacaaacattaggaaaataggataattgatttttacatctgaaataagattattaaaacctaaatttctagatgctaaatcattaagagaagtaaccaccattaacgaatctgtttccaccatatctaattgaatatgcagatttttgcctattgtagaccatggtagagagccttagcctccatttcatgagccttgaagttccctgcaactggtttagaaagtgcagccttcacatgtctataagagtcccttattatatgtaatgtccagtttaaaatagtatttaattttttttttggtatattaattgtgcgatgataattatctcattt

SEQ ID NO: 219446 - DNA, 3340 bp, Cannabis indica
ttttttttttttgattttttataaaaattctacatagaaatttcatagcaactaacgaagcaactaaaatctacataacaactcacataaaaactactgaagaaaccattagagtagcttaaaccataatttttttttttttacaacttatgatttgaaatataaaaaagataaccaaatattcttagaaaataggtgaagaatttctatttttgtgggtggtgtgaactgttaagaagttaaaggaatgcttaaaagttttctagaaggcctatggaaaaaccacaacccatataggttgtcgggatgtaagttgcgagttggctagctagctttgtttggaagctgcccgacttgtctttactccccctctggctggccagggtctttaaactcttgctttcaggttgtgttattcttctttgaaaccttaagacttggtggtcagggggctgcctaatattaagttgtttagccttctgtaggttgtaagttgtctagtattttacagattgcaaggtgtccatccttctaatcatcctgccagggtcttgttaatacttgtatatttctatttttgctcttgacttgattgagagagatagagattcaaagataggaaagttagtgattttgagagagtgagctgagagagaggacagagagagagagggactgagagattgagtgtgttagagggagagagtgaacttttattttttttttgaactttttttttttattaaacaaggataaaaggggaagaaaatgtaatcaaagtaactattttgtataaattacttaagggtaaattttgatatggagtgtttttttaagcatggttaatgaaaattttcttccaaaattagagttgtagaagtcatatttgctgtctaccatgttataagaaagcttaatagattagtattgatcgcaaacgcaataaaaagtaattagagactataaaatatgaaaaattgattgataaatttgcttcaaagagtgttccaaagatagtcctttttaagtagaaaattgatgttagctctaagttgtattaggataagcaacaactttaataaattagtttgaatatattgatacttaacacaataatattgtaaagtattattagttttcaattgcatttctttttattagaacccaaattttaagattagaaccgacccttttacaattttgatcacaaactatttgattatatttctatgtctactcttgaattgctgttttgttactgagatcttgttcttcagggtgattccaatcactacaatatttttaccaaattctaaatcacggctacttttaagttttatgctggctgaattccattaaacacaaaaacccaaattctttccaattctttcttgtaccttacaaattcgttatgatttatgtaagtaaaaatgctatcgtactctgtggttggtaatgtagttatgatatacttagtatactaccaactactactagtactatggcctgtcaatttcaaaccaacatttcctcaagctaagttacctattgttgaccatttgacattacagaaatgtctaacattgttattgttagagtattattatcgggcactaataatatatagctagcatctctagacatgtcactttgcaatcaactaacgatacttcctaatagttattctattaaaatatatgagactcgatacttagttaaactaatagtaatattaatacataagagagtaataagcaccaccaatactttttaacatttcttctatcgttatatgtagaactcgatatttagtctggaccagataagaggatgctaagaccttctaatcttttagaaagcgatggacacaaaatggagaaccataaacaaactgttggctaaatctacaattccccaaatctgatccaatctctaaaacggctgattgtgattactctctcattttcatcaccaactaatcaaataattcaaacattaattacgtatttctatttgccactattcaaatctatatactcttctcccaataacaaccatcttagtcttatacatacccaatcacgtgactcgcacgcctttactttctctctttctctcatggcttcaccggcaaccgaccccgacgagcctctaactccggcgggaagactatttctccgacaagaaatgaaccaaataatccattgcatcatcggagtaaaaaacccgttcgacattgaagccgtcaagtcccagatccgagactctttcttactaaaacaccccagattctgcagcctcatggtcgttgaccggcacggacgcgagcggtggcggaggaccgacgttgacctcgatcgccacctcatcgttatcgattctcccgtgaactcatcagattcctccgccggcaacggcgatgaagctgctgttaacgagtacctggcggaaatgtcaaccgggtcgattctaagcccggataaaccgctttgggagattcatttgctggtggctcacaagtgcgccgtgttccgaattcaccacgcgctcggggacggtatttcgttgatgtcgatgctggtggccggttgccggaaagtcgggaaaccggaggaggcggcgagcatgggtatggttgttagtaagaaaaagaaaagaaaggataattggtgggaatattattgggatgggattgtgagattgattggtgtgatttggtttagctttgtgtttgtggtggagtttgtgatgaagctgatgtgggtttctgaccgtaaaacggtgataagcggcggcgatggggttgagctttggccacgtaagctggctactgctaggtttcgtttggatgatatgaagatcgttaagaaagccatccatgatgctgtaagtccttctcacttttattttttcatttattatttttttattattattattattactattattggcaaagcactttgatttttatcattactgtttgaattaaaaaaataagcattatataagaaagagaattggtaaaaaagttagcattgatcatctttatgatattggtattggtgtaattaaatatcagctttcctataatttaagaaaataaattttaattagtattgtaaactaattgtaaagcgctacggtgttaggtacgagatggaaatttataccgtggggatgggtaaccgcggggacccgcccctaatagggtggggattccccatcttagtggttaatggggcggtggtgggggacaatttcaatactcgaagcggggatggggcgagggcggggataatactatctgcaccatatccgaccccgatatagatatata

SEQ ID NO: 219447 - DNA, 2436 bp, Cannabis indica
ttttttttttttgagagagaaaaaccccctaaagatcactttttaagtaaaaagtttaaagaaaaggtggaggggaggttgattgtattaattctttttgatgtaaaatgagttcatggatataagaaagatacacagaccaccacaccttgttaataactttcgacaagcatatttagccaaagaatgagcaacagtattaataattttagagcaaaaaaaaaaaagattagcatagtgaaaaccagaaaaattatgtctaaaatctactaagactaaacgcaaagaagaagccaaagaaacttggttattaaacttcaaaaccacactcaaacaatcagattcgaaaaccacattttgaaatcccaataagcaatattggatggttgcatgttttaaagctgaaatttccgctatttcaaaagaaaaagtacacagcagagatcataacttcacatatggaatcacgaaccactatacccaaaccacatcttctattagaaacatcaaatacagtacgtatcaacattgattttcacatttttcctaacaggtggcacccaagcagactaggggaggcattagatgaggatggcaagctcccacactcaaatgagaaatatttttagacatgtctaatctctgatagtattacaaccccaaaaaacaacaatttctagaacaataaccttatcagtgtgcatatttttattcctcctaagctaataattcgccacataactaatttttttttatgaaaatataatctgaatcttagcgtataaattgtaaatattaattaataaattaagttgatatttaatttaaaaaacccatctacagtagttattggattggattaatgattatatgatataaaagggtaacgtttcaagtaactcattttgtaatatttttctttacaaaaaaaaagaaaagaaaacattttgtaatatgcaagacgaataccattaattctctatatcatcagtaattaacaatgatttctaatttcgtagtattaaataatgtaaaaagcatcaacacctcccccaagtcacacaaccccatcgtgaaaacccacaatccaatcgcgaaacccacaacaaaattgcggaatccacaacgtaaaacttttaattaattttaaatggatttttggattttaatcgcttgaatgttaggaataatgtcattttttcgtgttttgggttgtttttcattgttgtatgttcaagttctgtgttttcactgattatcgacatgttaagacattgttcgcgacgtttgtcgatttctctctttcaaatgcaaacaaattgtagtagttgtgtttttgtcgatgtttcacgacatgttgcaacatttctatgcgacacgtctttaggcttaatgtagtttcatctcatcgctaaaatgtcgttaatataatatcgctagatatcactaatagtttaattatgtttttattgtttgaaatttgaaattttatgtcgttagatgtcatcaatattattgctatatatcgttaaatcatgtctatttgttatttttcacgacatattcgcgacgcagtttgcgatatgaaattttaaagtttttaatatgtttgcttactgtttttgcagatggctcttgaacttaaacttacagtttcccaacagttcatcggaagtcttacctatcggggtttagatagatttaaagatatcaaggccaaatttaaagagtttgagttaattgatacggttaaggctaaccctttcaagtatttttgggaagccgaagagttaattttcttaggggcgttggtcaacagcctactcttatagaagatgaaagttgacaatgaaaaagaagacgagatatgatttcatgtggacaaagatgacctgagattcgggcggatagagtttgaacttattatcggcttacttatgggtagtgtcatttaattaattcactaatctttttttttccattaattgatagaatattttaatagttactagttagtagtgagtttgattaaatgtttcacctataagtatacctagaataaatttatctaaaagaattgttgagagttttgatacttgaatatccattttactttgtgtttattttcttttgctaatctaaccttggtagatcaaagttatatggtagcatctggtatatcaaagttatatggtagcatcttgtgaatagttactaatttttttatgataattaataaatttaaaaacatatatataatcagatacttaaattataattataataatttttagggaaattacttcatatattattttttttaaatttatggttttagtttttaaagtaattttaagtaaaattctgtaaaaatatatatatataaaaaaaaataatttaaagtttaaaaaaaaaaaactaaaaaaaaactaaact

SEQ ID NO: 219448 - DNA, 8197 bp, Cannabis indica
taaatattaataaagtgaaatactctttcaagaatttgattgtggcgtctattaacaatttaaaagatagtgaatgcaagatggtgaaaacttgtacatatacttgtagcagacaaaattttacttttttttttattttgggaggagggaactgaaggttttacttttactatttgtattattttttactttcagccgtccaacttatgccactataattcttagtaccagtttattataaaagaattgtttaagggacacttgtcaagtacttggtgataagtttcaattaaatattgagttctatacattttaatgaacattgctgtaaggcatgtctagcaccttctcgacatgtcacgttgcgattggttagcgatactcactaaaaattattatattaaattatatagaacctgataactagttaaaccaatagcaatagtgacatataggaggatgttaggcactactgatatcctctaacatttttccattttaattcaatacaatattaaaagctactaactacttataaggtattatatagggtattatatgttgaatcggtgcttttataagttgttattataatattatgacaacttttaatgtatattatgagggagacaattaattatatgtataaatatatttggaacggtttttttcagtttacgcaaaaaacagttatgttgttatgtatggcaagttttgtttttatcttgtttaattaatcaaagtttagtttactttaaatttgatttgattaaattaatcgtgacttttagtgattaaaatcaatcttatatttgtattattatttgactgtgttcaaatatatattttgactttaattttagtcgagtcaatttaggttcttttttttttttttttttttttttggtagaaaaattcaatgttattataaattaagaatcatttacaacaacagagaatataggataggaaatttctcctatccaactaatgtcatcatccaaccttagagcgtatttagctaaaccatgtgctgcttgattagcagagcgtttgacatgggtaactaaaacctgagggaaaaaggataaaagacaacgaacatccataataagattagaaaaacaagataagtctttagatgcacaatttaaagcagaggagactcacaaggcatctgtttcaatatgagtaatagctaattgtttttgcaatgctcaatttagagcgtgaaaaagagcttttgcctctatttcgtccgatctgaaatttccttgaacaacctttgaaaaagctgcaacaacaacaccattgtgatctctgatgatagctccaatacccaactttttctgttcttcatttgcatccacatttaatttaaaaccatttagatgtggtggctgccattttgcaccctgctgaaccgtagcagtaaaagaaattgcaggctgatcaatgcttagtgcagcagcaggtggagaaatctgtctaacccgagtgaagttttcatgaaaccggattgcataagttacaatagcagcaggttgttgtggtgaacccccatgaacaactttattcctatccgtccatatgccccacaatatacataacatcaactcaaaatccttctcactcaaaattgttgataaattgtgtaagtaatcaccattgaacatgttttgagccttggaaaaatcaagctgaaacttagatgatctccatatggcttttgcgtgcttacatccaaagagagcatgtcaaatagattcccaacttgaggcacaaagagaacattctacagaagttaacacctttttcttaaaaagagcagctgctgttggaaggatattgtgaagcaccttccaaacaaatattctaatcttggggagtaaaaccagattccaaaaaaacttccaccaatgtctgtggttatttgaagttgatgagctaagttgttcttccaaggaatttacaaggtgaaaaccagattgcacagtatatgacccattggaagtgtaatgctatatcaactgatccattttagcaaaataactcagcggtatagttaaaatgcgatcttaatctataggttggaagtttcgattcaacattggtacattccaaactctttcctcagtgatgaagcttgaaactggcagtgagatggatccagaaaaacttgctggtttgaattcattaaaaccagggatccatggatcatttttgctgtcaatatgagtaccatttccaaccttatatctcagccctttaaccacaattccccaacaaatgctttgccaagtcaatgatggtgagtgaacaaaggtggaaacaaaaaaagaactattagagaaatgcctatgcttgagaagtcggctcaatagagaattgggcatatcaaaaatcctccaagcttgttagctaagagtgcttgattaaaatgaacaaatgatcgaaaacccatgcctccttcaaattttgatttacataaggatttccatctcttccaatgaattttggtaccattttgattgctaccccaccaaaaattggccatcatactctccaattggttgcaaaatttcttggtaagcctgaaacaaatcattgcatatgtagggatggattgcaccacaactttcaacaagacttcctttcccccaattaaaaaaaatttctcattccaagaactaagaagtttccaaaccttatctttgatgttgctgaaaagttcattcttgtcacggcccgagtaggaaggcaaacccaaatatcgctcatggcactcggttataggcatttgtaatgtttgggagaaaaaattctgagctgctggtgaagtatttggtgagaaagacatgacagatttggcattgtttaaaacttgtctagatgctttatggtaagtgtcaagtgatttcttaatggatatggttgattgttcatttgattgacagaataataaactgtcatcagcaaaaagcaagtgagaaacagaaggggagtgtcgcgtcaatctaaggcctgtcaacataccagcttgttcttccgctggcaaaagtcttgagagcccctctgaacaaatgagaaataagtaaggggagagtgggtctccttgacgtaaaccccaagagggttgcacttgtccaactatgtcaccattaagagaaaaggagaaagagctgctagatatacacttcataatcaatgaagtccatgtatagtcaaaccccatctttagcataatagcctcaaggtagtgccattcaaccctatcaaacgccttgctcatgtctaacttgagtgttgaatatccaattcttccttgtgtctttttacgaatatgatgaatgagttcaaaagcaatcaagatgttctctgtaattaatctattagacagacaagctgattgtgtttcaaagataacaaaaggaagcaccttcttgaatctgatgacgatcgtcttggaaataagtttatatataacattacaaaaacttataggtcgataatccatcattgagctcgggttaggcacttttggaatcagtgtgataatggacttattgagatccctcatgtctagtccttcgttaagaacactaagcaccagttgagttgctgaattaccaacaatattccaataatttggtagaacattgccgacattccatcacaaccgagactcttatcaggactcatagatttgagagcatcatacacttcttgacttgtgaaaggctgaattaaggattggttcatatcatttgagataatagttgggacagcactgagaacttcctgcagagacacttgatcaaccccatctgaagtaaacaagttatcatagtaagcacatatggtgttggtgagatcagccttagatgtaacagtaatgtcgtgagagttgataagtgatctgatcatgtttttggacttccgagaagtggcatgagcatggaaaaatttagtgttttgatccccgctttgtagccaatcaactcttgatctttgatgccaagatttctcttcttgttcaagcaattcatccgaaatagattcaatagtctgtaactccaccaaattccgagaagttgctgctgcattatttagcagcgagaccttcttttgcacctctgaaatttgttttttgaagttaccaaacttggatacatgccaccgttgcaatgcttcagtgcaagagtacagattgtgtaggaaatgatcaactccaccacttgaatttattgaccaggactcacggatgatggtagcagcctcaggttcatctagccacattttttcaaatctaaatcttgttttccttgctgttttttcctgaactaaagagatggacaacacattgacagcaatagcctgatggtcagaagaaaaataatccaaatgtgaggttgtcatgggttgaaaagtggtattccacaagtcatttgtgaaacaccaatccaagcgctccttgatggcattaacattatgtctacctttgatccaagtgtaaggatccccctcaaaaggtagctgagaaaaagaacaataatccaacactagacggaagtcatccatttgtctttcattccttaatcctcccccaagtttattttgatttgaaagaatttcattaaaatcacaaattgccatccatggaagtggaggggcaacatctttgagtgtttttagaagagtccatgttaaaggtctattgtgaacagcaggagcaccatagaaagccgaaaagtgccatttgggatcattttcaacagccatataaccatcaaatacactttcattaaaatattgcaaagttacatctacatcatctttccaaagtaacataagaccaccacttaaacctactctagggacttcaagtccattattgaaatgtagaagattgtgaaaacgggaaatagaattacttggtaatttagtttccataatgaaaagtatattgggggtttactctttcacaagcaaacaaagtttacggatagcagtcgggtttcccaagccacgagcattccagctaatgaacttcatggctgattgcgggactggtaaccagcccccgcaaatttatccattacaccaccaaaatccatgttgtccacagaaacttgaaggtggaaatcatcttcatctgacaaggaagaagttgaagttgttgagggatttgctctgcatcttttcagagtttgccttagtgaaagactctcattctgcctttttgattgaacattgggattgatattttcctgaccataagcagaactagtagccatagtggatgtgagtgtggcaaatgccatcgatggtgaagttgacgaacacacttgattagtggtattagggactggtactggtgtagtggcaaggggtaagtggcaaaaaggttattgttgttggaaatggagtgtattggattaaaaatcccagtaagatcagtgtagttttcgaagtggccagagatttgatgtgtagcagattggaaaggatcttttttggcacaggtaaaaggaatgatcgatgacttatcaagatgtgaaggtgcaaaagtgacaggctgctttaattggtttaagtttggagttaaaccaggggaatcatgaatgggaggcctatgcattatggtggtaggtatattatcaacatcctcttctgcaccagtaacagtcaaacgggaggactcaccaaagagcaattttcgtggttgaggcatacctctctgttccaattggggaattgctgaagtgagactctttttagcaagcctactcaagatcgggttccaccccattgtcaagtttatcaagatagacaaggcatttgttaaagggatgtccaataattccacactccatacaatattcggctagtctttcatagcaaaaatccacccaaaatttatcccgaacatttgataaagagatcatccgtcccctctttaaaggatttgaaacatccaatttaactctcactcgcaagaagggtcgccaaccttcatttaaagaatcctcaaacacatcaatgtattcaccaattatattcccaagtgccatagccagtgattttgttttgctaagaaatggtagacgatagagttgcacccaaaaaggtgcaagtttgagatctgcagaagtgaagtttttaccaatttatggtgtatgcaaaactatatgatggttctgaaaatgatagggctcacgatcaagaacccttattttgtccccttcacagccgaaggttagcaaaaacatatcaaaactggaaatctaccatcccagtgctctgccatttggttctgtaatgtggataaccagactttcttcttagtaaggactttggcatacaacactagatccatggaagtagcaggggcaaccgcttcagtgtcatggaattcaaacacagcttcttcatcttcagttagagtaatcttcgacttcatcttgttagttagaagatccatgatgagagactataaatttcttagaacaataggcagtcagagcaaaaactattgaaaactactaagggaggaataataactgctaaaaactagaaaaacgttgcaggaaaaaggatgagaaacatatgaataactataaaactatgaaggacaataactgtcacagagcactagagagggcagacgctcaatacttcgtttttttttttcttttgaagataagtcaattgtacttttttttgagggaaaattcaattgtactttattatacacttctttggtaattttctaataatgttatcttaatgtaatatagttaatgtcaaaagtggtcaatttacatggaaacaatatgctttcaataattagtttaccaaaaaaatataaaaataataataaataataaaataattaatcatctcaaacaatttttatttaaaaaaaaaatcttagccatcagacaccaagagcaacaagaactctatgaaagtggagcagaaaatttattcaatgatagcatcaactatcaacaaattctaaatacaactgggattacttggccaccaaataatacgactatgtgccgaaaaagcaagtttggctagggtataagcagcaccattacatgatctattacaatggaccaaactaatacctggagcctattacaaagaccaacaatatcatctaaaacaagacccaaagaagagatgatcgaattgttatttttaattttaagcacaacattcaaacaatcagactcaaagatgatgttgtcatacccaaaggagaggcattgaatcaaagcatctcgaattgccaaagcttcagtgacttcaggaacaaaacaatattccaagtgccaacttcccgaagttttagccgctcccaaataattacgaattaccaaactcaaaccacaacacattgctcgtcgaattaattccaggatctgtattcacgttgaaaaatttaggagggggaggagcccatttagagattggaggaactgaactcagtgtcaccgccaatcctccatgaggcatatccactctctgctgggaagggaaactagtcaccacctactgtttgttttgccaaaagggcttgattaaacaaatgaagatttcagaagcccataccaccatttttcttatgtaagcaaagcttctcccagctacactagtgcatctttttattaacatcattgccacccactaaaaacgagcacacatatgataaacattttttacaaaagctttcaaaaacttaaagagattcatcgtatatgtagggatagactgaataaccactttgatgaggatctcatgaccgaccatagaatatagttttgattttcacccattaagcttcttccaaattttgtctcaaatggtatcaaacaaaccattcttgctatgccttgcaaaacaaggaagtcccaaataattctcgtggcaatcgaaccccttaacacccaacaaatcaactaatttatttgtctcaaaactcagaatattgtgactaaaacaaactgaagacttttcaaacttaaccaactgtcctaaggccgctccatcccaatgtaataactacttgaatcttacacaacacacatctgaggctttaaagaaaaacaagctatcataagcaaacaaaaattgagagataataggatcaccacaactacaagccaggcgatacatcaattta

SEQ ID NO: 219449 - DNA, 3058 bp, Cannabis indica
gtaaaatataaaaaaaaaaatgttaaattttatttagtgtggcttacaaaatataatataactttataatcgttagtgagactatgttgtattactttgtgtaatataaaataaaaaatattttctataaattttaatatctattattttattttaatcaaccttacaaaaaatatatatttaattaatttaattataataaaataattaaaaattatatttatttaggtaatttgtttttcaaattttataaaaattattttattcatgtcaatatatttaactaaaataaaataaaaatgcttaatcctaaaatcatatcaagtagctcctctcaatatagcactctaattttgagcttaataattcttttatcaactcggtttattagataacgtgggttcaaaatttgctgtgaaagacttttgaaggatttcataaattcatattaagttgagaaacaactaggtaactacgtttactttttatactataatataatggtagatgacaattaactgaattttgcagcaaatctagaaaaaaattctccaaggaatcgtttggtacgccgtattataatatattgtattatattgtgttagattatgttgtattgtattgtattagtattatttaatacaatacaatgtttaatattgacttgtattaattaattgtgtaaagttataatatatttttaatacactcgatcccaacaccaactaagggtccgggtcccgagttccaagtccgggtccacgtcccgggtttagtccgggtccgagtcagagattggtgttgacctcaaatcctttgtaaatattataatacaagcttatatagatcatttattatgtattaaataatacaacatacattatattaaaaaatttggtcgtaataattaatacaatacattacttattctaaacatagtgtaatttattatttaatacaatacgacatttatacgacataccaaacgagcctcaagtgactataaaaaagtgtctgcgcattaaaagtcttgaattcgaatcctaaaatatatattataatatataaacctttaaataaaaaatcatttaatgtcaagtagatgggaaataccatcttgtgagcaagacttccaacacagctctttaattaaaaagacgcaagacttccaacacaaggtctttatttaaaaagacctttccaacattattgatcagtcagtacttagtagtccttttccacataaaaattcagcttcattaattattgtatatattatattgtaagacttaatgaaacaagtcatctcattggaatataaaatgaatttcacaatcgatattaatacgtgttttgtaaattttttttatttttctgattagaaaagtaaatacttttttaaaatatattttctaaaattattttcactttttaatttttttaattgagaattaaaatttaaaacaaaaaaaagtcatttcaaaacttctttaaatatttttgtttgatcaatattttggactccgacctaaacttagacattgacacctgaaccgcgaactcgaccacgaccctggcccaaacccgaacccaaaccccgaaccccaaactcggcctcgggcccagactcgaaccctgacctcggccctaacctggacccaaacatggacccaaaacccaaaccttgaccccgacccctatccctacccaaacccagacccaaccacgaccctggacctcggctctggcctcgtcctcaatcccagacagcgaacttcaaactcgactaaataaaatcaaaaaaatgaaaacgaaaataaaatttacagaacactcaaacgtagcatttggtaacccttttatttttaattattttaatgaaagtaagatttctgtttttaaaattttgtttttgaaaaataaaaatgtgctttgtaattatttttgtttttcaattttaaaaacaaaaaacaaaagtatgttctgttaattttattttttgttttttttttaattttatttaagtcgagtttagggtcgggtcccgagtccaagattcgggtctggagtttgggtctgagtccgagtttgggtcaggagctggggtcggggtttgggtccaagtctggggtccagaccgaggtctgggtttgggtccaggtctagattgttagtttttatagtccatatcagagttagaaaagcagcttgaactcttactgtattatcaagttgttcaatcaaagtagataacctaacgacgggtaaatcctttaaacatactcaggtttgataaaaataatttttatccattatgaactataaatccaaggatctcaacataatatatatatatagatgccatttaaactaatgaattgaaaacaatacatcttgtagcctatcagaagatcctcgctatcttttagtacaaattacgattatccaattcaagaactatcgttgaagaattcacactgcaatctataacttattatagatttggatccaactattagcactcccaaaaaaaacactataagagggaattaatattcgatccgttaggaaagcttggattccactatcgtataacatgttctcaaccactcatgttattaagctctcaaaacaataattgtaagaatcattttctctgataaacattaacgagtaaatcaaagaactcaaagaacacaaataggagttcatgtatatcaagattcaggcttacatactagtgatcatcattgtgatatgagtaactctttcattataaacgacgcgttaatgaaagatgtctattacatattggctcagtcatacataatcgaattatacacaacacatttactacatgtctatccacatatatgattcaaatcaaaatcacacacacactaaaagtatagtgtatagtaaattgtacttactagttccatattaaagattctcaaaactttaatacactatcgacttgttttattcatatcgtataatcttaattctcttgtacatctttacaagattatacctctccatatgaataagaaatttt

SEQ ID NO: 219450 - DNA, 2435 bp, Cannabis indica
aataataataaataaaaaattaaaatataaatataaatattttaataacaattaaaatgtcactttatatgtaaatatgtgatcattcaataacattttaaactaaaatttatagtgatgaaattagataaaaaaatataattttattaatattagatatttatattattaaaaaaaatattaaatttatactgtttacaaaattaaaattttaagtatttatattatttattttatatatacaacaatatatatatattgatgtgtgtatatatatatatatatgcttaattatattatacataacatggtgaatatgtaattaatgtacaaaatgaattaagtaggcaaccagcaaaacctttgcccttttggaagaagataagagtaaattaataacattatcctaagctctttgaaaattaagttaattatacttaattgcttaattatatattaatgagtaacatcatgacttccaccaccacaacaactaaaccttaatattttttttaaacaaaaaaaaaatacaacaatgagtgcactttttggttattattatgattaaattaatgtatgatcaccacttagttaattaagtcatgattattcataaactaatttaattaactaattaatcaatgaaattaaattaaattaattaattatgtgtgggccaagccagccggaatttgagaagcacttttagttaggtgaagaaaaaataaagaacatggcaaaagtgcaaaaatattaaccaataaggttttgccaagtgtataaatttcctttttagtggtgaggtgaggaccactactagaaatactaaaaagagatttagtataattatgttttatatagattatcagtaattatttacaaggcgctaacgacactagtagtgtttaatactattggaaaatatcatatcattattagtgtaattaaatatcaaaattttacatattataagttaataatattataggaaactacttatcactcatgtataattggcaacagattttatgatgtttgacaccttaaaatgctgagttaggtcgtaggcaccaatagtatcttttggacctttggactaagtaagccttatgcacaggcttgacccacatatgtctagtgtcgggcttggatattagcacattatagcatttctttaaattgccctaataacaactcactaatcaaaatatttatgtaagcattaatatattattaatctcattataattattgaaatgagtagattaacccctccattaatttttcttttataggcataaacacatgtacggttcaagtatacatagagtcaaattagctgaggtttttttgctcaaatttaaggtgtttttattggtcaagtttattctctttttagattattattattattaattaattaattattgtcttaggataagttagtttactttccacaaaaataaaaaaataaaaacaatctcaatttatttattaaaatatcacataatgcaatcctagccacaacaactccattaattaacaacacaaagtgtttaggcacttaattgtttcttttcattgactttttcttattaattaaatgtgttttaactaataaaaccaatatagaaaatgaaccataattatgtcaattttgtttttgttttttttaaaaaaaaaattacttaaacaactaattttagtaaaaattttatatttttacatttaatttttttttatatatttttacgattttctataaaaacacaagaaaacaacaaaattatctcacgaaagtaacaaaaaataacatcaaaacaataacaaaataataaaagtataacataaaaatacattaaaaaattatattttatgtaaataaaatcttaaatatcgtaaatatatttaaaattttgtataactatattttattatttttatatttgtttgaaataattcctttttttggcaaataattaaaaatttaaacagcaaatataattattaaacctaactcgaaaaataacacacattttttaatttgttgctgcatgtggttgaaaaaagaggttattattattattccaaaaatgataggcatggaattgggacgttatatattgaattgtttatatatatatatgatgtgtatatatatatatctctatatatttatatgtatatattatttggataaatatagaataatatatataataacgtagtgtagaagaggcgtgggtagcacgtcaattttaatacacctatacaaatgttcactataaatatatgtacctatataatacctatatatacgtttctttatactagtatattgttacgtgcgatgcacgtatgctatgttttatattaagtattatattatgagttcggaaagaaataaatgaataaaaaataaataatatttaatt

SEQ ID NO: 219451 - DNA, 6414 bp, Cannabis indica
actcgaagagtgcgtttgtacaattggtgctttcattgttcttactcaccatgaagaacgaagagattgctgggcttttgcaagcgatggaactcaatttcaaacaacattcggaggaccaacttcagaagttttcagccatgttggaacaacacacgctgaagacggaagaacgattggctcacatgagctcacacagtccgggaaagtcggatggtcgatcaagtgcagaccgagagagtagtcgatccgaacacaggagaacggatgcgatcgcggatgacagggaattgaatgctttgctgaaaaccttgcgagtgaaggtgccgcggttcgatgggtcgaatgtggacgattggatctataaaattaataagttctttgacctgcacaaggtagatgatgatttgagattggcaatggttgcgtttcaccttgatggcgctccatcggcttggtttcaatggatggaaaagggtgggtcgattacggattggttgtcttttcttaaggcacttcagcaacgatttggaacttcaatctatgatgatccgttgggtaggatttccaagctaactcaatctgggcgtgttgcggattacagagctgaatttgaggagttgatgccaagaattacaggagtttcggaggcaatgttcatgaacttctttgtttggggtctgaaaatggacattcgaagggagttgctgttgtcgaaaccagtggatttgggcgatgcaatggcgaaggcacaactgtttgaggatcgaaacgaagacttggcgggtcgaaaacggatggagacacaacgttcttcttggtacagcaaaccagcatcatcgtcaactccgggccagtctacttcattgatgccttacaaagggggagtcactagtgtgttgtcgggaggtcctatgcagaatcagactaacaataagccacctctagccattaagaagctcacaccagcagaactaaaagaacgccgagataagggactgtgtttcacttgcgaggagaagttcgtttatgggcacaagtgcaagaaccgtatgctcattttgtgtgcatcggaggatgaggagacagagccactttcagaaactgtaggcagcgacttggaggatgttacagaggaagaggtgagcctgaattcactatcaaacccgctgaatccaagaatatttcgcattatggcacatcacggagcagacgcagtagaggtactcattgatactgggagtaataataatttcattcaagaatcattagctactcaattaaaattgccttgggaggaaactaaaaggttcaaagtgtatatgggtagtgggcacttccttctgtgttcaaagctgtgtcgaggagtggagttattactgcaggggcataagtttgtggtggacttgtatattctaccaatttgtggcttagatattgtcttggggatgcaatggttacaaactttgggtccttgtgtacatgatcataaggagttgactatggaattttcatgggcgggaagtgtggtgaaactagcaggcttgaaagatgtagcagcccatcaactttccttttcacaactgcacactatggttcgtgaaggtgatgttcgggattgttatcgagttagtgcagcaaaggcggaagtggttgaagacctcacacaatcgaacctaagctcagcaacattacccatggaaggacaaaaagtattggctgactttcaggatgttttcgctgagccaaaacaactcccaccccacagaagtatggatcacagaatttttttacagccaggatcaatacccatcaatgtgcgcccatatcgatatccttactttcagaaggacatcattgagaaattagtacaagagatgaaagaatgcgggtttattcgagctagtacgagtccatattcatcaccggttttgctagttaagaagaaggatggcacatggagattctgtgttgattatcgcgcactcaatggcattacaatcaaagaccgttttccaatcccaacgatcgatgaactcttggatgaattggggcatgctcgggtcttctccaaattggatctccgtgcaggttatcatcaaattcgtatggatcacaaggacattcataaaacggcttttcgcactcatgagggccactatgaatttgtggtcatgcccttcgggttgaccaatgcaccatcaacctttcaagctgccatgaaccatatttttcgacctttcttacgccgatttgtaacggttttctttgatgatattttaatttacagccgtacgcaggaggaacatgtggatcacctcaagtcggtcttgaacattttacggagtaatggattctttgctaagctcagtaagtgtcaattcttccaggacacggtcgaatacttgggccatattgtctctggccaaggagtgcaagcagatcctagtaaaacggcggcaatggtggattggccagtccctcgcaccactagacaacttcgcggattcctcggattaacaggttattatcgtcgatttgtagctcgatatgccacaatagcagcacctctcacagctttattaaagaaggacgggtttcattggactcaagaggctgccgaagcttttaatcaattaaagacagccatgactaccacttcggttctacatttacctgattttacaaagacgtttattgtagaaactgatgcgtctaatgtgggtattggaggtgttttaatgcaggagggtcatcctttagcgtttttcagcaagaaaatgggtccaaaatttgctacagtctcaacttactccaaggagatgagagccattgttgaagcagtaaataaatggcgtcaatatttgctgggccgccactttattattcggacagatcaccggagtctaaaggagttgctaactcaggtcatacaaactccggaacaacagaaatttttacacaaactcttggggtatcaattctctatcgagtataaggcaggaaaaattaatacagcggcggatgccctttcgcgaaagtctgaggaccaacaatctactctctatcttgcaatcagtacagggtcttttgatttcttggatgagctcaaactggagaacacaacttgccccgacttacgattgttgcacgaccaatttaaacaaggcgaactggactctttgctatattcggtgcatgatgacttactgtactaccgccacaagctgatgataagtaagttctcgaatctaaaatcccaattactagctgagttccactcatctcgggtaggaggccatgctggggttgaacgtacttttctgagattgggggcaaattttttttggcatgggatgcgtaaggatgtgaaggaatttgttcgttcgtgtgctatttgtcagacggtcaagtattcgaccacagcaccttatggtttattacagccattgccgatcccggagcgtgtttgggaagatgtagctcttgacttcatagtgggactacccaattcgaatggcgccacaaatatcttggttgttgttgacagattaacaaaatatgcccactttggagcgctatccaaccattattcagcctctcgagttgctgaagtgtttaccaacatggtcattaagttacatggagtgccacgaacaatagtttcagaccgtgatccaatattcactagcgctttttggcagaagcttttcgagtttatgggaactaaacttcacatgagctcagcctatcacccccaatcggatggacaaacagaagttacaaaccgctatttggagcaatacttacgagctttttctgcagacaacccgaaacaatgggctcggtttttgtcttgggcagagtaccattataacacaagtcatcattccgccatcgggatgactccatttcaggctgtttatgggcgtactccaccaacaataccaacctatgttagaggctcaactaccatacaggcagtagaagaggacttgttatccagggatgaaatattacaacacttaaagactcatttacaagcagcccagaacagaatgcagcagcaagtaaacaaaaagagagtagatattgagtttggagtgggtgatttagtcttggtcaagctccaaccgtaccgacaaacaacagtagctaaacgcttgaattcgaagctgtgtcgacgttattttgggccgtttgcaatcatagcacgagtagggacggtggcgtataagcttgccttaccatcagatagccgcatccatccaacgtttcatgtgtctctgctgaaaccttattatggcaatagctccattccgtgccacccattaccggagttgagcatcgctaatcgccctttgatgttgcctatggctattttggcaacacgcacggttgagaagaaccattctccagtcagacaggttcttgtacaatggactcttagttctcctgaagatgctacatgggaagattttgctacattctgtgatgcttacaacctctctaaccttgaggacaaggttatttttgatgatggggggaatgttagagaggtggactcggcccaaggaagaggcccaataacattggaccaggaagcactaaagagtcaagcccacaagtggactcagctgggggaaacgattcacaaaccagaacagaggactgaggaagcaagctctgaaggtatggcttcagtgagtcgattggaagaaggaggactcgcgcgtggacagaggaggcgcgtaaggcccaactggttgaaggggtttgtgcggttagagaggagctgaaagttgttttccttttctcaataattctgttgagcaatttctttgtagagaattgtggatttttcagtcatttaaatagttggttgtaatggaacaaaggtttttatgcaaagaaatatcaagccgaaaggtggattgggagtttggcactgactcgaagagtgcgtttgtatcagaatcctgtaaaatttatttacaaaaatattacaagttattttgtacaaaccgatctaagcggcaaaatagaatttcaaacaattttctattggacccgactctcgtggtctagcatggttggaacatgtacatattatcctcaaagtcctcgatctcatggctaactcgatactgctttactcttgcctggacaatagagcactcgtaagccaaagtccaacaaggcaaaaaataatatagtatgataattataataataattatatttcattgagtacaccactgcgtatatatactgtgctatcacactttatattacattattccatataataattctactacaataaatatttatgtagcataaatttatgtgttacgctcacacgtctttttacatttaaggcattactagagtttgtttcggtcataatcaccgagtctaaccaagttatgccttacacgcataactctttacagatattcaatcaatagattattgcacacttataacaatacgcacttaaggtaataatcctaagtcgcgaattcacaataacaatcaaatatcatattactgccccactgcgctatattctatgcgcttggttcgctgttttacttaattttcaatgtatgaggaaaaatctcgaatcacaaggaatcttgaccaagtgtcgtatttttaatcacaattttatagtttcacgcaataggctaattttaaaatcacattttataatattcatatttaagattccaatattagactaaataatagaactcaaaacgaatttttcaataatataaaaaatattcaaattagagtttagagtcaaaagttatgactaggaacatcaagaatactgtagcaagagtgtggccgtggcgacacattctattatcattttttttctttaaatgaaggccgagtagaggtttgatgaggatagagaagagatttcaggtatttgggtgtattttgatcaataaattcttgtgttaatcgcatcaacacattttattattaattttttgtttgaaagtattcatctaatttaatacgtgttattttctaatctgtactaaatacgaattttattttttaaatcaaattcaatccaatttaagtttcgaaaatacaaattaaattagttatttttttatttaaattatatattttttttttccacatgtaacaaattaaaataaataaaataatataataaattaaaaaaaattatatccataaaaaaatattatttattttaaattttatgtaaaaaattatatataaaataaaatatatattccatccattaattataaatataattatattatatatatatatatatcaaattttcaaattattatttttttaataaggattaaatcgaatcgtttattagattgaaccgattatttgacgaacacc

SEQ ID NO: 219452 - DNA, 1793 bp, Cannabis indica
tatatatataaaaaaaattaagagaggaaagtggaacttacataattttggtgttggttgtgttgatattagacaacgaaagaccgatcaggtgattggttttaaaacctctcagtgggaaagcttgaactaattctctattattatggattctgcaagggttgcaacgatggctcgacccgtaaggaactttacatattgtcattttcagcatttttaacaatcaaaataaataaataaattaataaatactgctatatattctctcttttatataaatttatgtgtagatatttgaaaaaggatatagctgtgtaggctaaattggctctggagaaaaataatagttctaaaagcttgtttcagatgagagctatctcgatcaagctggttcttattaattatgacattcaggagatgtatgtatgtatatatatatactcctataaagtggataagaaggtgtgtataattgctgtaatattaaccttaagaaaaactttatcaccaataaattatataacctattatatatattttaagatccagtcttatatatataaatatatatatatttatataatggattaggtttagatgtacgacgaagcttaccaaataataaaaaagaaaaatgttatttaatcatgtaagatcttgaatgaaaagataaatgtctattgggtatgtagtgaatatatagacggtcaagtgttaaatcttaacgtacgtgtttcaagaaaaacgtgtgttatatttccatgaaattttaaatatatataatcgcacaaaggtccaaggtttaagttgcattatatacatacgctgcattaccattatatatgtgtttgtttgtattatacaaccatatacattataatatatagtagctatagtatttttcaaacgtttagaagataataagttgactagccgccttgagataacaaataatttttaaatgcatatgtcattcgaacaagggaataaagcttcaacataatatctaaaagggaatggagtacagttggattctaacgttagaggtgggcgtacttattatacctattataccatcattagttcaagctataagcattcatgcatgcatgataataagagcattgctattagacactagtagtgtctagtattttctcgacatgtcatattgtaattgactagcgatatttcttaaaagttattatattaaattatgtgggacccgatacttaattgaaccactagcgatattgatacataggaaggtactaggcaccactagtactctttaacatttctctgataataataaagcttttcagtttcattggtagctattagatttcctactcattttgggaagaagactgagagaatgaggaagaattgtgaacaattatttcttattgatgcaccaatatggtgacttatatataagttgaactacaagaatctaaaaaagtaacaaatagatttcttgacaactgacaaaactacctccactatatcaatggaactaaagttgacggtaagaacttatcaactacacgttaattaaatagtcaaatgtaaattgctaaagataaaaagcttaattaagagaaactaaaaacatcaatagagtaaaatagtgttgtattgaaaatttaagctcctttacaaatagtaatttttcaactcttttataagaattcaaatggagtatttatacttcagctcccgtcactacaacaaatgtgagttttaggggccacaaaaggtcactcttaatagtataggtattaggagcg

SEQ ID NO: 219453 - DNA, 2567 bp, Cannabis indica
cacacacacacactgtgtatggtaatttttgatggttgcataacatgatgagtatctttttacagttccaattctactatcgaagcttgtcacgacagcaatcccaacagcaagcatggcttcagaagagaaggtgaaaattttgtttaattgttagtttgtttttgtcgatgtctttgtcatcatggcttcctaatattggaaatttgtatgtacatataaatgataatattttgcattatttgctgcatattggggatgtgggtagtcaacaatcttacaaagatatggttttgttttgttttcttgtcctgatggttgcctactttttttccctggtggatgcattaggattctatcatttattctagaaatactttaaaagctatttaggatgcttgtatttgtggtagaataaattatcatgtttgttctacaaactataagcgttaagtgatgttttttgagtaagtaatttactttttctttcttcatttatttccttcgtaatggtatattgttggtaacttaatatcgaaaatgctttgtagggctgagaatgctgcaaggaaggcatctggtgaagaccctttgccggaggaggatgctgcaaatcctattttcaagcctcttcccgagccatctcgtttggagagtttccttatcacaaatcaaatatcaaactactgcaaccagattaatgggtatgttacagtttcatgcatgtaattatgtcctgtttttatttttctttctcaagtatgaagatttgcgtttgattttgctctggctaccaattgacattgttgacctgtaattaattgatgacaaattcacatttttatcttgggtgaaatacttatccagggttgctggtcaaagcttcaacagattgtatttgatgaaggcattgcacgaagagtaatgcaacggattggtaaatgccgtttttggtcgagaactgatccaactagaaagtcataagtagagtttttgttttctctaatatcatgcaccggtcggtactctgatagaagataatggttgccatgtaattgtttatgcttattatcgttataattataattatattctgccctttgtcttaaattttgagaattattttcctgttttagggaagccaattttttttgtaatgaatttctcgctgttttccaagcccttacagttacgatattttaatgcttaaatagcaaaagatcggaaacggtgaaaagttgtagttgtgaatggatgagattcgagataagggataccaggggccagtttggttaagtggtaagaaaaagcagctgtgagttggaaaagcttcatacgagttagctggtaaatacaaaatgaccataattatcaatatatctgtgttttgttcatataaattcatacgtgctatttataatttttttatgaaaatatttattaacattatacttttctaataatatttatttatttattttaaaaagtatctattaaaaatgattagaaaatttatcttttaaataaaaaaatcaatataaatagtttattatatatatgtattaaaattaaaataaatatagaccataacaagtatttcaaaatattctaagtagagtcaaatatatatgacacaatacaattattgtatatagatatatatgacacaatacaatactttggacttatcgtacagagtccagtccatgaggcagtgattgtatgttaacttggcaagttgagcacgctgatagttgttcataccatgtcctttgattgtggataattaattgtgcattaattgtttgatcatcaactatgtagttttcttttttggcttgatattactcctgtttgagatttgttgaaagtaatttcctaattctatgcaaaatggtaaaagggaactatcgttggcttctaagaacatgctggtagaccctttcggctacagggagctataagtcctccaggtacgggctacacttggtagagactcgtctgtgtgagtaatgcgagtgccttctcgaaaagccagtctaatgttgggcttggcccgatctgtcttttagggcccactgttgggctttaataatccatcttgtgtccacgtgtcttgccaaaaatataaataacattcatccataagcttccagaatgttgtggattgtggaagcttgcttcagtctacatagacagataaatgggagctaaaagtgaaacgtttattgttttctaaattaattcgaatatgaaagacaaattctatttacttggtaatgtggcattgtttctttagcttgcgagatctccgttcaattgacgaaacatatgtggcaactcaaacgttttgatggctatttaattcagcacgagcttcaaggagcatattaccgtgcaattttacatcgattttaagcaatccattaaatgctggatggagggctttctaaaccgttggatctattttgtgcttttggaagatttctctcgtctgtgaatttggaatttatacggatcgtgttttgcaactataaatatttctaagtgccattttttaccacctt

SEQ ID NO: 219454 - DNA, 3710 bp, Cannabis indica
ttaggcgcccatacacctgtccataagacttatcagataagtatgaacgtttctttattaaggtacaatcactgtaccacatgcattacgtaccgctactatacgattgttggtagggttttctccgtaccttgagtacccttatgtgttgtaccacatacactctttacctatctgtactagtgttggtaacactgtattgtactctttaaacactatatgttgtaccaatacacttagtactgctacctactagtgatggtagtgcacgaatcacaaataacatgtatatatcacacatacacatatttatatataaatacgttctatgctagtcttaccatgtttctgaattcaagtgtgatggctgacctaaacaaaaaaccacatgcaggatggattttatgtcacatttacgtaaatgggtaaataacatgccaaaacccgaaccaggaacctaaactcaccactacaagtttcactatcgataattaacatgaaaatatcctaattatcgaagaaataacaaattaaggctctaaaaataacacaaattgacaacaaattttttggggatcctgcctatgatccggtaaactggtttgcaccagataacccaaaaaaaatccaaaacttgcctaatttgttcccaaacttcatcaaaccttccaaaaaacttatactaacttccaacaatagaattcaagtagaatcaacaacaaacaaacacaaaaaccaagtctaccattaatgagtgaagtttgaactaacacaaccaacaccctaaactcaaacttgctcaatctcctctcaaaccaacaaaaccaactaaaaacaaccaaattctattcaaaataactttagagatcatactagagcaaaacctaccctaaacagccaccaaatctcaaaatggcaatatcaaaccaaatttaaagcttaaacaacatgaaagtgagagctctaggatttaccttgatgaaattcttccacaaactggtgactaacactcagaaatcaataagagttattcagtgcaaagaagaagaaccctatgtccttggtttgttcttcttggtttgaaaaatagagagagaaagtgatgagaattctattctcttgatttttcctaattgagtgtttccaaatattcaataaactaagattgaataactaagtggccagctgccaagcttaaaacaagccacctcactctaataaaaattcccaaaatacccttacttacacttcaagcaaccataggcttagaggtaaaatagtccaaaaccataaccccgcctaaactcggcgttgtaaatacctcaaattttttatcccgctaagaattaggttctaaacttacctatgtgactctaacggccatctatcgtattttctatcgtcgccgagcaaaaaaatttatataaattccataattcatatttagcataaataatactcttagagtttaataaaatcttcagaattgagaaattgtaactctaatgcccatttctaaaaatcaggcccacaaaaaatataaaatcatatgtaattataaaatgtcaataattaatgttaattgcctttactaatccataatctaacatgtggtcattacactagggtactttgtgctttgggtgctcaaaaacaaaagtgcttcgaatttgattctgatgcctcaaacatattcgtgacatgtctaattcatttctcagtacaaatttggacccatttgcaataagacagtctcaaaaactgaaacctagttgggctgtcaacttgggcactgggttaaaccctaggtgcccaggttgatttttgtggtgctatttcgtgtatttttggtttcgagccttggacttggatgcttcatgtcttcatggtacatgatattgaaagatagtgagttggaaataacttgaagggatccaaacacccattctggagttcccaaagtcaacctgggcacagggctaaggatccctgccaagtcactgctatgactctggactacttaactctgagatattttctttcttgcctcatgtcaaacattgatttcaacgtcactatggtatgactcaggaaacgtaatctttaccatatgaagcatgcaattatttaacctaggaaaagcaataatttctatggatataagttaatctaggtaacaaatcaatgaagcatataatttatttaacgtacgctctatttttcatcacaatcaataatacctttgacattactattaatttcaaatcatcactctaattagaatcctaaactattaagtgagaagtaattctaagatgataatagaagagtgcaaaatcttaattagttgtatacctaacaagaattcacaatatacattacatccaaatagaaaaatagaaataatttgatatgacagaaattataaacaacattcattatcactaatcaagaattcaccattttagaattttgaaataatccttaaactaaaagaaactactccataataattatcataatccaaatcgtaattaaaaatgaaagagataagagaagaaaagaactagattgatgaataactgatgatgtaatcttcctcttccccattttctacgggtttctctattaaaaatgcaatacaaccccctaaaatgatgtctgaaaatcttatttatgtaaccctaaaaattcattcaaatttgactaaaaacttaattttttgcaaaccgtacgaacgtcatacaaccttcggcagccccatcggtatttaagtggcgtcagggtagaattggctgggtaatttatatcgcgtgctcagatcaatatttcggccaaacatcttcaatacaagtcaaaattggaagaatgaagatattctaaaaagtagagaatgagatctataactttcatgttgagctccaagtccatttctacttttaaagctgtcaaaatttgtaattacgttttgtttagtcaaaccgagctcccccacttccactatttttcaccaaaatgtgttaaaaacccttcaaatgactctaaatgcatgattaatcttcaaaatattctaacaatttaaagtcacactaatcaataatttaaagaattaatttaaaaatattaataaattggtcattttatataacaaatatggactgatcatattccctcacacttgactcttgctcgtcctcgagtaagataaaatgaatgatgcttaaataaattggtctatagtttcaaaaaatgtaatcttcttctaattctaagaaaatttaaattcttcaatcattagaatttcaactcaagatgattactttttaaacttaatttttgtgtgtgtactcaatcaactcatcatatactaacacttaaatcaattcaggcatgccgaaaattaatttttatctcaaaataaatatgtattttaatgaaaacccactccataagcttaattaacaaaccattctctactaatataattacacacaatatttagatcaatagaattttataggcctataatgtaaggctaaggcgataggtagatgagaatgttaatttaggctcaaatcacaccaaagcatacatatacaacattatctcaaacaattctaatttgtatttcccaataacttccatcaacaatttagagcatgtttgatattgttttttattttttgttttcaaaaaattgcttttagaaa

SEQ ID NO: 219455 - DNA, 2971 bp, Cannabis indica
gtacaatgcataataagtgggtgtgaaacatggaattacacagcagctagacctcactctctccatgaaaaaaaaaaaaaaacattaaagatactcttcttcaccacagctaaaatatttccgggaacatcaaatatttttcttctgtcaagagactattaaaatatggacacaaaatcaaagtacaaaaaaggcacttctctctcatggtactctcttttcaaatctgttcttcaagcctgttgggagttatttgaaggtttcttgtgttctactatactaggttgaactagaactttagaagttgtagacacattactactgatcaatacatgtactattaacaaaattcactctcatcaggaggagaaaatcatcgtctccgttggtcacgccaccttttgttcccatgtctattactatccctgtatccaggagaactcctcaccctcgactgatcagtaggccaatatccgcgtcctggatccattctgggttcaggaaaacttcttcctaacccactatactcggaatttctagatgggctattatctggactccatgactcaaactcatcttcctccccatatgatccacgatgatagttactattgttttggttcactgtagggttgtaatttgatggtaaattctgtctaggcctccacgaatcaggcacattactcaattttccaatttgtttgaagtatataggcgcagaaggcgaaggggaaggggaaggctcagcataatgttgttggggttgataatgttgttgctgatgttgtggtcgataatgttgttgctgctgctgcatatgcatatgctgtagcataggtcgcgatgatggtgctgctggcaacaatggggttgggaaagaatggtgtcgtctttcctctacattatacatgttatttgacattgatgcttgtgatttggtgttagttgtggattcatgtcgtagtgaagacaaatcttgagaatgtaaattatacatgggtccagtgacctggggtaaatgtgtatgtacaattggggagctagttaaagagagttgatgatggagagatgaacctatggaggtggagtatttttcatgcaccgtgctagttacttgagacagtgaatatgaagaaattactggcgaattgtgaggcgctaacatatgtgatggcagcactgaattagcagtggccattgccaggggtgggggactctcacccactcccttaggcaacgtagcctgtgaaaatggattcctgactccttctggcctctatccactctgcaattttaagaaattagaggaaaaccattagagattgcatattacatggataattacgtttgatttctattgttattattattattatccttgttcagtcttctgtttcaaaaattatttttatctagcacaagaaaaaattgcatctactattcatggatccactaaccaaaacccaactatacataacatggtgttcaaatttaaaatgcattttggtcttgatacccttcactcccaaccccaccagaaaattaaaaaacaaaaaccataataaaacagagcaaaataagcttagcggtaagccaacactactgctggtgaaaaaattggctatatggttatggtatctaacaaataggccaaagtgacgcaccgttccagggttggttgaaggtgttggagatggaagagaaacttcgaccttctcttccacttttctatttattccattgttactactagtgttaccagctttaatcatatcaagcagtttcactgtttcctcgctcgataagttagcagcttgccctgatgtcaaagaaataccaattctggatttttaagtagcacagcaagcaactctagatctggctcagccgtgctagcattaccactctgcgaggtttcaggtgctgccaacggaacagaaccatttgctctttgactgtcaagaatctgtgttattgcactatctacatcatgcttaggtgaaacaagcgcctctgcattgctgcccccattgggttcaggcatctgctctattggaatttcaagggtcaaactgtcatcatagtccatctcctgatcccatggttccttcgggttcaatggtatctcctggtttgtctgataaaaggtttccttctcacgacggttcctgtttctttggaattctgcttctttactattatcgccagcaccgaccctccattgatgatcgagttttacttctgcaaaaaggaaaattgcataaaaggctacaccaccaacagaaacttgttacagcactaaataaattcatccaggctacactacaccattaaatgttattaaatcgctattcaacttggcaaaaaccataccagccgtttttccaacatgcaaaaagctaaacatgaattggattaaaatattgctcccccttataagttgaagggtccaaaacagtggtaattttgaattaattccaattacttattaaagttctgtcatgtttatagtttcatatccaacttgcgagagaaaattttcacctatggcctgctgagaatttaaacgtaataattatttttaatttcagtggatttcttcaaatttatacaagtacccaactgcatcaactgaaactaaaacccactaagctttaatcctaacaagtccacgagtaaaattaacaattacaacaattcaattggattgcttaaaatagacttggtattttgtgtacacggacttgaacccaaaattaaataaagcttggtaataacatccactcatccaacacacattgctcatttctttattttagtttgagaaacgcttggtaatagcatcacactgggagaataattaattatcaagtttcgttgtacttccgaattatcatttttcttgtaaaacagactatgattgaccgaagcggaaagatatttgaattttgaactgaattggctattgcct

SEQ ID NO: 219456 - DNA, 2961 bp, Cannabis indica
aagaaaaagaaactgggagacctcttgagctaaaagaccttgggcagacttattgggtctcaacaaaattattgaatcatttacaaaagaaaatatgacatttttaaaataaatactaaaataattaatgcatattttcaaagtgatttattttttatttgggcgttggcttttgtggattctaaaagtagacttagcctagtccaagctcaaccctgagcaacagtccaaccgctctacttagctctttaattaattaaggtgaacattagaatgataatacaagctagagattactgatcattcatatttagtatataatatagattaatttcaagctcaaacaatatatataaattcctctaaaaaacaattatataaatttatttaattatatatgtagcaaatgcacaaatatatatatatatataattatgggtgattaattggaattaattttatgggatacgttaatgctagctagaggttgcatgtgatgtataggatcacatatgaaattattgtgtgtgagatatgcccacatatatatgtgtatctgtacattattgtacattatctttagctattataaaataaattgagtaatgctatttattatctgttcaaatcatcaccactgatgtatattacaatatgtcaacttcgaaattcaatagatcatgaatagatatttgattattttttattatttcttttgacaaagatattacaccatgttactatttatatgagtaccttagtatggaagtaaaaaccaaccatatgtcataaagttctcctaacacacaaaagttataattatcttctggaccacatgcattaaaagaagttgcacgttcaagcaatacatgttctttctattcttatctccatattgggaaaagacttttaataaagttggatgtattcacatcactttatataatctcatgggacagttgaccttgttacttaattaagtattaattacattatttcattaattggattatacaacagagtaattagtgtgatgttgttttaattaataagtttttgtttatgtaattaatgcagggatctggtttttgcactgtcatttagaggtgcacacaacttggggtttgaagatggcattcatagtggataatggttttggcccaaatgagtctttgccaccaccgcctaatgaccttccacagtgttaaaatgtgttcattacatttacggatgcaaaaatcagaataagcttttatttcattcatggagagtagagagaagagttggttattatacgtggggaagtattaaattttagacaataatcatcatcatggattagtggacaagaggttgatataacaaattggttttcttgtacatgtagtgaatgaataaatgaagacaacaaaaaaaaataaggaattcaattagttgtggttgtggtcgatgtacaattggaatgcccttgtatggttgtggtctttcaggaagtaaaggtagtttccttctttcttttttttttattttttattttggaataaaaaaatagtttccttctgagtgtggaaaataaaattttatgtttcaaaaaatgctaatatttttatatcatttattacaattcatattaacaatatagaaatatataagaataaaataactacttctttttttacagagtatatcatgcctactgtctagctaaatatatatattgctaaataagtgagatgtattgatccacaaacaaacaactttactacctaatagtacaacacaaaattacaaatggcctataagaacctctatacacaatatctatacaaaatcataattgatcaaatcattctttatcatgatactttagtttctttggtgttattttctggtttgcttaaattaatatcatgacagttattataggtagttagttagcctaggtgtcacattctaataggttagttactgttagtttgttgttggcagttaatgttagttactactcttatttttgtaatcccttgttctataaaaaggtatgtaactcaattctttaaactgttgtaattgacaccattactgaaataatacaataacagagcattgcttttttgctactctattaagtgttctagttttgattaaaacacattttagattcaatcttgtatggttgattgatgttgaactgtagtggacttgtgtaacaactggtatcagagcttgggagttcgaagttggatcttggatcgattaacaagagcttagtgaactatatgagaagaaattgggagcacaaagttcgatcttgagaaatttacagggaagaacgattttggattatggcgagtaaagatgcgggcattgctgttgcagcagggattacaaggtgccatttcaggggagaaagagctatccgcaagttggtctgagaaagaacgatctgatattcttgaaaaggctcacagtgccattattttgagtcttggggacaaggttctcagggaagtttcaaaggagacaactgcagctggactttagttgaaattggaaagcttgtatatgaccaaatctttggctaatcgattgttcttgaagcagaaactgtactctttcaagatggcatgaggaaaaatgaagatcatttagatgatttcaataagatcattcttgatcttgagaacattgacatcaagattgaagatgaggatcaagcaattatagtcctaaattcacttcctagtaaaaactatgagcattttgtggatacaatgatgtatgggaaagattcccttacattagaagaagtacaaaatgccttgatgtcaaaggaaatgaaaaggaaatctgagcttcaagagagtagttcaggggaaggattgctggttcgagggaaatttccaaagaaggagaataaagatggaagtaatcaaaataagggtaagtattcttcttctt

SEQ ID NO: 219457 - DNA, 2097 bp, Cannabis indica
ttataattaaatataatatgatagtaaaaataatataaacatattagtaaaaagtaataatattgtgatttattacaaatttaatgttgttttaaattaaagatattcaaaatcgaaagtacatgttgtaattgcaaatacgttctatgatccatctagagtcatatatattgacagtgacaaatgtctataaagaaaaaaaaaaattgaaaaaaaaaatcacaaacatattaattttggggaccatagagaaagctactcttttttatttttgatttttgattttttatttttttgagaaaaaaagaaaaacgtagtgcaaaacgcttccccatcctttccgtcattttaataattacgggaattacgtgttacttataggagttttatacctcagtctttcttaattgagttatcagtaatcactttaatggttcccatcacacatgacattaactacaacaagctaaccttcagagggcaaagtcttttttaatctttttaagaaagattacggtaaatttcgaacctttgacccaaataagttaaaatgtcaataaaaacaatttctaccactatatcgacacgtgattaaaagctacaacatatatgacacatttatgctgtcattggattttttctatgtgaacatataattaccaaaaataatatcttacacaaataagttatcactatcataacaaaattccaaatttcaaaattaatacatctgaacaaaacattataaaattcaaaattttcatatattttttttcaaatggtgatttttcatattttgaaaagaattttttttttatttgtatcgtttttgtaaaattttttttaaaaaaatatagctttttttttcaaaaaaaaattaattttgtaggaaaaatccaaagaaaaataaaaaaaaaattaaaaagcagtttaaatagccagttgcatagtaagaaaaaaggtaaccggttaccttatattatttttttcatatttttttaataagttttacccataaaataattattttttgaagaaaaaaagtatatttttatataaattatataaaaattcataaaatattaatattcaaaataaatatttaagtttttaattataactctcataagatacaatactatagtaattactttactataaaaaatatcagcaaatgatcaacgattaattaattttaaatatatgaaagaagatgtttcaataattatatcaaatatataattattatgattatgtttatttttaattattagattaatattaaacggttgtgattaataaattactttgtagaacttctagtaaattcaaaggttgaagaagagatgaggtgtagtcatggttaatttgcaagtctcacactcctttgtttgttgtcctacttaattggtttttattctacaaaaaaggttatatattcttttaaagtaaaatagagaatagactacttgtatttcaaaagtaaagagaatatttttgtctttgaaaaagctagggtatttgccaagtaatgctagtttatagaatatgcaataatatctagctaatatctagatgaataggaaatatgcattattttgaaccacaaaacaaaaaccaatgtcttgtgttgatttttttccaaaggggtcttaagaataatctaaagctttgcctaattaagggtataagagagggtttaaagttcaaacatattgatcgagtgaatacatccaaatggagagataacttgtataattagtcttgtttgtccctagaaaacccatatatatatatcatattattaaaggggaaactaattatattagagaataacaaatggaaatttacatggtttactaacttttgttatatttttacaaaaatactgccagtacggtttttttactttttactgtgtttttataagtttcatactgcagtatactgtgttaagttttcgctgttgttctactgtagtttttagttgttctactattattttaagttgttctgttttgtgttaccactggttgtttataaaaatactagttattttaaaaagtatttccgtgtagacagttattttgtaaaaaa

SEQ ID NO: 219458 - DNA, 4036 bp, Cannabis indica
aaataataattgcacacaaacatgacatgacaaaagtcacttttgataagtgaaacctatcataaataaaaattattgattgaaattacttattaaatattacgtgtcaagcgtgtttgaattgtctgcacatattattactcaaaattttatttctagtcaatgtggcattacagaaaaaaaagatatatttttagtcacaacaaaaaattacttatgactaaaacatattatttggaaacaaattgttattgatttaattttaatcataacaaatattgtgactaaaaatacatttagttacaacaaattgtaatttatgtaactgatacttttaaccacggatttttttagttcacaacataaaaatagatgatttataattagtcacaattttttattttagttcctaaattctgttgtgctaaaaataaaattttttgtagtgtgagagaaaccgcaaagctattttattactcaaaaaggaacatttctttctttttttaatgtttgatgattaataagttttacctgtaaagcccagaagtggaaactgatatatgacattggataacgccagaaaggttttgggatgtcattggggagtctaaagtacccagaaaccagcatgaatatgccctgtaattaaaatgtgtacaatgacaacaaataagtagacattttttgttacatcatttgtttcgattttttcgggttaggggtaagaagattatacctgaattccagctcctatgataattcccatgagaaagtttggtataacacttgctatggccatcatcaagctctcaaccacagtcacacttgcataaaggcaaagcacaaagaaaagatagtgcatgaaaccagggtgaagatgtaccatgaaataacaaatggttccagacagaaatgtgatcaatataaggaaaggcattgctgaaagtgtgttgcttatcacaaatgcacaaacaccatagtgcccattaagcctctctctttgaaaaacctgttttgggaatcaagggaaaaaaaatatcaagacatgttaagaaggtaactggttaccattttggttaccctaaactgtttgtttttattaccttcatatcctctacaaatgaaggaaaaccacctattgacatgaatgtaacaaagccaaaaacaaaagatgcacaagaaccccttgcctgaacaaaaaccaattaaatacactagtattaataattaagaaaaatttcatattgcataaacaaattaagaggttaagaaattaatttacataccaggattgaattgtagcctgttccaacattcaaatagattgttccaatacaaattgtgacaacaaggtaaatcacaagtctaagccagtaataaccaaagtctcttgacatgttgatgaatgaacgtttagtcaatgtataggattgcatcaagaaactagcttgacttcctcctgattctagaacatttcctttctacaattgaaaacaaaattttgttgttatggtcaaaattttgagtaatcaatttggtcaagaaaattaaacaacacttacaactttggatatctcctctactttttctctagctgcatagccaaattgagaagttcgatagttttcgatgagtgttcgtatagcctcagctgtagtaatcttctctagaggatcatcacttgcctcaaactgaaaaatacaaccatttaaagaaagttgaaaacattaagtcaaacatataaaatctatacatgtatagtacttacttacttacttacttacccttagtttcatggacccttttaaagtggcttttacttgtcaaaatcagaattaatgcatcttagaaaatgatcagatgggtttctcaaagcagggcaaggaaagccagcttgagcaaaaaactacaccaaaaccaatcaaataatgttaagaattaaataacacacaaagaaaaaaaagcacttgttagttattttggttattttcttacctcgtatgcatcagaagcttgaccaaaataaacagttttaccaccagaaagtaagtacaatcgatcaaatagttcaaaaacttcactgcttggctggtgaattgaagcaattacagttctaccatctcttgataaagcacgtaaagtttgtgtaacaaagaaagctgaagcactgccaccccataatgccaaaaaagaataaaaaaaaaccaaatatcaatcatgtacaacttaactaatcattaatgaatttcaacaaaatgacaaattgggtaaaatggggtacctatcaagtccactagttggttcatcaaggaaaagcaatcttggtctggtcaagatttcaagagcaatgctgacccttctcttctcaccaccactaatcccacgaagatgccaatttccaattacagtgtcagcacaatcttgaagacccatctcaactatggtactctctattaaagctctcttttctgaccatcccatcttatctggtaaacgtaattgagctgagtaagagattgtttctctaactgttagtgttccaatcaagttgtcatcttgagtcacatatgcctgaaatttttgtatataagaaaaagataacatattatataacaacaaaacaaaaacaaagaactcctttgttggcaaagaccccatataatacttagtaaaaaaaaattatattattattaaggataatataattgtgttttcttcactgattagtaggtgaatattaaaatactatacttatattcttatcctcactttctttaaagtgtccttattttttattatttttttttcatttttataccattaaagaagagcaattttctaacaaataagacaccaaattagcataaacatcactttaattgaaataaataaataaatagtaaacaaaaatagctaacatgtgtcaaattaaattagtttaacacaatatatgatacactattttttaacagacaatttcgatttcaaaacttcaattatgaaatctcttcgatacgactttacactttgaaacgcatcgtttttatataaagagagctttcacatcttcttaaaccgaaacacaaataaacaactaaaagacactatttatttaaataacgattagactaattagtatttatataaaattaattacactaaacacaataatcaccaaaaccatcaaactaactaataacaaacaagatgaagcagaattattatttatgttaacaaaaacaaaaagaatggatgatataattactcacagcagttccataagagagcttttttttacgaccgttgagaagaacagtaccagaaaggaaagcattagtggctaaacgactagaaagagaatcaagaagagtagatttgcctgaaccagaaggacccattaaagctgtaaaacttccaggctcagcatacccagtaagattttctagaactttctgtgtctcaccgttacttaaagttacggtcacagtcagatctttccatgtgagtctagcagaaacatcacccaaaaacaactccctattattattattattactattactattactactcgtttctctccatagactctcactcagtggactcaatccacaactcgtcattacaagcccatttccacttggctttcctgcttcaatctccatcataacatgattagcttctgagtttctactcttctgatgatcactactactactctcgttattataacccattttcaaaccaaacccagaaatgaaaatctgttgggattgttaatctttataagaaggagaaagaaaatacgtgaaggagagaaagaaaaagagaaatgggtttcgtgtgaaatttgaccaaagaagagagaaggagattttaatggggcatgcaaaaagagcctcttaacaccaaaaacaagacttgcccttttggtgtgacaatatgtatgattaatggtaaaccattacagaggaagaagaaactgttatgatgatgaagaagaagaagaagtgaatcatatcatattcattcattc

SEQ ID NO: 219459 - DNA, 3258 bp, Cannabis indica
tgtcacttccaactgaaaggtcactcagttggatgttagcaatgtttttctcaatggattgcttactgaaactattttcatacatcaaccaccgggcttcatagatcaatccaaaccagatcatatttgtcttctacacaaatctttatggcctaaaaaagcacaagagcttggaatgataaactcagaactagcctacttcaatggggtttcacagcatccatatcagacacatcactatttgttcatagttttggtgacacccttatcatcctacttgtatatatcaataatattctagtaacaggtccaaacaagaatcttatctccaaacttattactgatcttaacaataagttttcactcaaagatcttggtgatgttcatactttcttggggtagagatctttagagatgctaagggaatattcttgtctcaaacaaaatatattacagacatgttagtgaagctgcatatggaaggatctaaggtctgttcaaatcttataagccacaccactaaactgtccgtaaaagatggagaattatttgaaggtcctagggctgagcatgaaatccaaagaaccaaaaaaacttcgaaccgacctgtcgaataccgctagaaccgaaactgttaaaatcgaaaacctcaaacaattaaaaccgccattgaacagtcaatttttatgtcggtagcaaaccaaccaagaaaaatcagaactgaccgattaaagtccagtttatagataatattacatgttatatgataataataagtaataacataccagtttaatattataaaaaaaaaattacttacctttaccaaatttgactctccaaattccaagttctctctcgtgactttcttttcttctctgccagtctgcctctcttatctctctctccattctccatccaaacctcaaaccctaagtagctagcccatgtccatgatttcaagcctccatattctttctccatctcacatcaaaatttcaagccacctcatctactccatgtccacgattcaatctcagtaaatgtttatctaaaactttaatactcatcttctttttttatcttacatattcatcccgtactctcacacatctttctatttttctagaaccttaactaataaggcagaggtgattgacagcaaagaagaaaagcagcttcataatcctttccactggtatcattctgcattaatcgggtatctcaattttttttctgctttaagttttacatgtctctattgtgagaaacttgttttttttttacatactggagtggaccaggtctattctatttctacagcaataataaatcttatttttcattaatttttttattttgtatttgtcaataaaatttatctaataatgtgatgatagtttttagattttttttcttttttcttcttaatactaaaagaaggaaggggattttctctggttcatcttcttgtcatagttttgagcttggtcacctttggtttcaccattgctgccgagagataaagaagtgttgtaagccccttcttctctttttttttcttttctctttttttttctttctttcgaatctttgtccatttggtttgtttaactatgtgtattcttgctttttgtaggtgcaaagtggtgatcatggttgcttgttggattcagaatccattttctattactgttttaatgctttgtgtggttttagaataatatatttatggactcatatttaatttgtgttgtattatgttgtgttttagagtttagatttttaactagacattataatttgtatggttgctcttgtaaattgtagaatgatgtatttacagtttgtattaatgtgcttacaaaataaatttgattatatttttttttttaaaaaaagaaattcagttttggcgttttaaatcgaccaaactgtggttcacattggtcggtttaaaaaatgtttttggattggtcgatcggtttttggattgaaccaatccaaaccaaaaacccaaatttggattttgatatgtaaaaaaatcgaccaaacagactgatgttcagccctagaagatcctactttctacagaagtacgataagggctcttcaatatctctatctaactagacctgatgtagcttttctcatcaacgaactcagccaattccttaaagctcctactgtgtcacattgggaagcctgcaagagatcactcagatatcttaaaggaaccatctctaatggtttatttctcaccccagctactgtcatgactctagaaagctactcagatgttgattgggttagctgtgctgatgatcgaagatcaataggtggatatgtggtttatttgggagacaacttgatctcttggtctgctaagaagcaataagttattgctctctcaagcactgaaagtgaatttcgtgctttagcaaacactgcagctgaactaaaatgaattgtctccttgcttactgaattataggttactttgcctcacggccctgttatttgggttgacaactagagtacatctgctttagctactaacccctccatcctcgatcaaaatatatcgagattgacttgcattttgtaagggaccaaattctagaaaagaagctatatattcgatatcttccaagccttagtgccaagctggcatgctcaccaagtttttgtccaaagaacgattcatctatcttaagtccgaactgagaatggctcaacccctttttcgtttgagaggagggggtgttgacaccattaactgatcctaattagttttctgttagctcaggttagttaaagggtgtttagttagttaaggtagttagtctttctgttaaaaacttaatattgtaacatcatgcttgtataaatacaatgataatcaataatagattgagctttttgcaattctattttctgtgttctctttctccttacttcctttccctacatttactatattaattttatacatttttaggtgtagaacactattaattttataaatatttttaattaatatctagctcttatatatttcctcattagtttgcactcatagatactaattcataatcttaaaataaaattgtggtaatttgatcaatactataaatttgaataaaatttatccaaaaaaaaaaaataccgaataaagaaatttcttacaaaaatataaaggacggaagaattgacgtatatagtattataaaaatattagggtaaatggcggttaaa

SEQ ID NO: 219460 - DNA, 1783 bp, Cannabis indica
tacatgttcataaacactacaaaatgtgtccatgttcagttataagttataatcaacacgattctacttttcaaaataattgtagacaatctaaagagtcccttctcttatacacccaattgtctatgcatgattttgtgtccttgatttcatgtacaacattgttagagaaaaggaaaacaaaactcttggtgcacaagtcccttctcttatataattttatctatgttattttggctctttttctgtcattggattacctttagtatctgtgaatatttcgagcgatgaagaatgtctggtttagaagatagtttactgcaggataactgacagtcttatcaatagcactaacatcctatctgatcttatcagggtaagattgttccaccgaggggacctactgatttcggatgggatcctattttccagcctgacggatatgagcaaacgtaggttcattcatcttcttattgaaatattctgtttgtctcagtggtccaaactcagtaaatcacgtttgaatttattgtgttctgtttgtagttatgctgaaatgccaaaggaagaaaagaacaaaatatcacaccgtttcagggcacttgcacaagtgaagtctcattttgctgaagctggatacacatttcagaccgacaccactactatctgaatggtttaaccacccttgtctgcctcaaattatagttagaaaagctctacctcttaaaaggtaataatgatatttcatgaaatgcaagaagacaatttagttaatcatttactttttatcctttgttgctatacaaaatggggacagtttagttaaatcattttttcttcccaagtttctgggcaataaataatgccgccaagccatcgaaaagatttcatcgaactaatctcgttgtttagtctaaactctaaaggcatatactcggtcaacattgtgacccacatgagatagggaggggagagataccccgaaaatttagacaacttgaaccggccggcagtctaagagctgagctagtagtagccttataaatgttatttaatttggtcaaattttatgaccagtgagcttgaaatgaaatagagaatttggtttgaaagggcattgtctgaaaacattgaactagaccaagaccacctgagttgtcactgtccccacaagtagcggtggatgattatgttgactgaagttagagccttcttattctggatattaactctctcactgttggaacaaatggtatgcaactcatggaagggacaaacaaacgtgttgaaaaatgcacctaaactcatttattactttacaagaaagaaagaaagaaaggaagaaaggaagaaaggaaaaagtgataataatgagctgtgaggcatgcatggtggtcttgaacttggcatgaaatatattaataatgcttcttctttatgtatgtctaagttcagttatcttcaacaggagtgttaattacaatctcttaatcaatttctacatttaaaatcacacgttggaaatttttttcaattttttcttttcatagtggtatttcgttatagttataatatcatttttgtaaattttcgaaaaattctaaataattttcagtatcgaaaacagaattcctgatattttagtttactacgcgtgttcaaaaaactttaaatgtattttcaacattgtaaactgtttgagaatttttgaaaatttacagggataatgttctaaacatataatgaacactgctataaataaaatatttcgacatgtgttttt

SEQ ID NO: 219461 - DNA, 3911 bp, Cannabis indica
agagagagagagagctaaccagccaaatgcccaaaagtttctggaatcaggattccaacattgtcttgggaattggaaaactaaaaaaagagctaatgttggtgctatatcaacctggttaaacaaatcaagatacgaggtgaataggaggtcacagaattaatttggaattatcaatctgcttataaagaacattacagttgaggattaatgccaaagtttatatttactgaatgtttttgaaaataatgatgggtaacttaatgttattgttaatctgagttagctttgttaatctctgagtgctcaagtttaatcgttatgttaatatcttatgcatcaatcaatgggtcattaatggaagggcttactgttgtctctttttcagtatttggataaccgcataacatgacagtacagcatgccttgaatgcatggagtagttacaatccaaataaagattatcacaccttgaaaacataaaacaaacaactatataagcaaactattgtaaatgatttacctggtccacagttttctgagagaatgattcaaaacgggagacatcgttcagaccgataaataaagccaaagaatcagtctcttcatatgaagatcctccatgattaccattctcagtcatgccatgatcacttaccactacctgcaaggaaaactcatatcagggaaagtttacatgtgagtagttaattacccacgctcaggcgagtttctaaatatatgattatataaacaaaatgaattcttaggaaatgaaaggtgcaattaagagatactctaaattagaaaacattactgctatacaaaaacgtaaaaaacatacagaaggcaaagaaattatcacaaaccaaaagtgtccttccatgattattcatttgattcagaattctatttgtatgaatcatcttaaccacctcatccatctccattagttttggggccatcaagacactgaaatagttaaacaatactcaagaatcaaaagtatagaatcagttaagcaagaaatatacgaaactggggaaaagaaaaaacctgttgcggccaccaatatgtccaacatgatccaagcctaggtaatgaagaatctgaatcataaactcagtcacgaacatatattattatgaaagtgtcagaacacacagtcatcgttagataggtgagacacttagattcattatttatgtcaactgctatgtaagccctttgtttttcatagaagaagttcaatatttcctacattacatactcatttgagagcaagaacagcaatgacataaatggtacaacaatttcatgaagaccaacatcatgctttaaggcaaattgtttcagttagtacggaatttatcaacaaaaggtatttggaaaattatactaaccatgagatcccaatcatatctactaagttcatcaggcaaatgtcgagaaacattttgatcaacttgtatagtatctttaacctgagacaagattttgatgtatagtgcaagtcaatgtatcatacaactctcatagaagcaaatgataaattcgccaggcagaaacggcaatggagatcaatcaaagctaagaagaagttgatttgccactccatgatatccatattaggaattgaatattttaaatttgtaatcccaatgagagcattgttatggttgatatcaacaatagaaatacttacaaaaaagctactaactccatcatgcctcttaaataatcctggaaacaacttcagccatgtttcatcaccaagcatcaccattttccaaccaatcttaaaaaactggtctgcaaaaaaaaaaaaaaaactaaacaaaaactagttctattgcaattacaggcatattcaggaaaaataattatggtggacaatgtccagtaaatttggatgaactaaccaataagattgtcatctaagagagcttgcgtgttaaaattaaaagccacgtcaagaaatcctccaattgctccagaaaccatagcctgaaagcatcagaggattagcaggtttacccaagaaagctattttcaggtgaacatgatattgtggtaatgatacccactttcaaacgaggcattgtaacagtaggaggtgcagcctttgcatgatacccaattgccatgccatttgctaacagtgattgagtatatggcatggcttccaccaattcccttcgaggagggttaccatccttgccaagcacaaattctgctggaagaccatcaataacctgaactaaagtcattgagagtgacattttactagcaagataattggcataaaccaatatagattgattgaaaagctaactcataaagtggacataccattagtattagcttatcaaatgggggaagcccagatagttcctgcattgcaagaacaagataactttacgaatttctctaaattcataacccagaaactgtaattactgaacaaaaaaaaaaaaaaaaccaagctttgctaaaatcataacatctctattaatttgaatctatgcattcaatgaagcaagaacctgatacagtgatctgagcttatcaggagggggaagtgccatgctatgattttgaactgaatcagacctcggtgcacgaaatgcctccggaccactgagattaccaataaagagggaattataaaaataaaaaataaataaataatagttggttttgtacatttgagttgccaaaatccataaaagggtacctaaaaccagagagagctggtttgacggggaagaatccgaaaacgaagagtgaaaggccaatgatttggatgagtactccagttaaggtgaagatggtgaggttagtacacgttaaggaagacattttcagattatttcataacccaaattgatgtagtattattagtattcagattttcgagcgtaggaaaacaaagaagaacaaacactcaacacacgtttacccccttttctctgccatttcaaagtgtttgtatttcttatttattttgagcaattagtctgaagaatatgtccaatatcccttgttttgtgatgtgagataaattttttttttttgaaagaaagtatgtcattaatcaaatcaaatcagctgttacaggaggaccaataaatctatgacaagctcacactataaatttgattggaaaatttgataaacacgtgactgaacgttttggtcgggtttgactcggactcgacccggccaacctgtttatttgggaaaatctattctctatggatgggtcaggtccaataaatctatgacaagctcacagtacaaatttaattgggaaatttgataaacacgtgactgaacgctttggtcgggtttgactcggactcgacccgaccaagctgtttatttgggaaaatctattctctatggatgggtcgtgtccaataaatctatgacaagctcacactacaaatttgattgggaaatttgataaacacgtgactgaacgttttggtcgggtttgactcggactcgacccggccaacctgtttatttgggaaaatctattctctataaatgggtcgggtccaacctgattaactcttttaggcgagtttgggtttgatttttgttaagagattatttcacaaatacacaaaaacaacaaataaattataaaaatatagtttcacaaaattttaaatatttttacgattttttatttattttatttacagaaagtacggtttttttatgttgtactattattaatttgatgttgattttttgttatatgtatgttattttttgttgctgttttaatgttatttagatactattttcatgttacttttacgtaatttttttgttattcgtgttgtttttatgacaaactacaaaaatgtaaaaaaaaaaaatatatattctttaaa

SEQ ID NO: 219462 - DNA, 3818 bp, Cannabis indica
attttaataaaatataatattagggtaatttttattaatgaataaagtattttttaacctatcccgaaataaaatacttttgggtccaaagctcaacttttcaaaaatacaacaaaagtttcaaagtttggaattttacttatttattggaaaatggatataagtcttagattgagatgtagagtttattaattacttttgagcttttcaaaatatcaaaagagaattatttttattaaaaaataataagcacagcaattcaactaaaaataaaaaattagtatttttctagaagaataataaagaataagaacatgataatgggcctttataagtaagatttttctttaggtactttgagggaaagattcccagggttgggatatatgtattacataattaacaagaaataataaaaaaacatcatagtaaaggatttgtttccttaatgattcttgagaaatttaaaaacttgtaccgaaacattagtaagaaacctaaaaatataaaatattgtagattaatcttagtgcactatatacctaaaagtatcacataagtttattagagaaaggtgacgagggtcagaagatgggattcaacaacacactaaggaatccaaaataagttaatcttacccctagaacaagaaacatactatcatgtgtgatgtgtttgttgtgatagaaacttaagggtgtattgttgtgagtgatagaaaacttataagggattgttataaaaagcttattaagggatgtattgttgtggtagaaaacttaagggttgtaatactataaataaattgctatacattattaaatcaatgagtagttacgagatactacttcaattatgatatgcgaggtagttatgagttactgtccatataggaaacttctaatatgggaaattggtcacaactctcgaactaggccagaaaatgacataggtaaaggtatccgaaactttaataatttactttattagttacagaaaatcagtcatgtaatgatcgtattctttttggtggaatcatgggttaagattagataatgatagtttgggaaatgcatggggaattggttagagaatgtaagtttgcatggttttgaaatggataggtttgtggaaagacgagcttggaagctcatacaaaaatggaatcggtaaaataagtttgcattagcatgatttttcatgtattggaatgagagtgccttatgtcttggcgtttactaagaaattgctagggccgataaattcaccggctctttgtactttataattcttgtatgattgatgaatgaactatattagggttatgttgtgctttaatttagcattagagttagtctcacattgttaatgtttggagattgtcatatataaaatgaatgagttacttctctcattgttaattggttttgagatggaacctcattcatcttatcccaaattctaatacttcaatttctcttacctttgttgtagacaatggaacttattttattaaatagttatgattatgtatttttttggaatttcaagacaagagcaacctagtattttatgaactatgtttttatttaaagttagtgtgcgcacacgattagttatactttgttaaagggtttctacaatcaattttttttttttaaaaaaataattaatggcttttatgggtaatgtttgggtttaaaagttgggttgttaccgttggtatgagagcactaggttgagtctatttttaagacccaccacatgcacattttgcgagtcagtcttaacaccaaatgagcccattcccaactatgtatgggcactcaggttgacattttaatttgggcaccaattttgtttcaccgggtgacgcacataaaaatttgatgaaattgaaatctgtggaatacttatcaccaaaaagaagattaaatatcaacaagatgaaaatcggagatgttgccccccatctaggtgcctagtgtaggcccccagaccatcttcgacaacctggttaacatattttaacctagggcactccagaacacctttccagagatgtttcttgggcatttcccttattctcatccacaatgaagatacaaatgctttcgagaaacaaacaaagccatgtggagcccaaatgaaaagctacgcgcctaaggtgacaactcccctaacactgggcacccaggttgatgtgttctacatgaacacatagttttgttgatttgattgggattttgtctcgagaattattctttattttttctcccaaacaagatatgaaacttggaatcagtagaaatatcacccgagtggtgatttagcgtccaagcatcactagacatttggcttgggacttagtgttctgtccatcaaaatggcagttttgctcctgggacaaataagatttggatgcttcctcaagtcagtatcttatgcacatgtgtcatgtggaagtccaccgacatccatgtgcactagtgatcatctagtcgtcactaaagatttatcgagcatcatccacacatatcaagtaagattgctaagagaacttcaccaatgtcgaaaaatgaactaagaatagttataacatcattcaagcatctcaaaatatgcctaaagcccatgaaactaagatctggaacatttatctcatcatgggcgcccaaatgtcaacctaaccactcagtcactttaaaaaacacacattgctcagtaaaaatgaccataactcagtcaatttttatccaaattatgtgattcaagtggcatataaaagttgtaatgaccgcataattagaatatgaattagtaagacaattaacattaattgattatattatatgattatgtgattattatatactgtgggctttattttcaagaaatagacattaagattatacgtggggcagccggggcctaggccccaagctccacaattttagaagaccccaaaaattaaaattatatatataaaaataaaaatacaatatatacatatatacattttggttcaataattttcataaaagtcttacaagacaattggtaagagagggtttatacagatgtgtgggtgctaggttgattcttatctccctcacattttggttgttttaaaattttaagggatatatatttaatttttgtaagagttttatgtattggttaaaatttatagagattatgtagggtttacttatttattttatttatttgataagaatgtaatattttaaaatataacataatattttagggatagatatgtaaagaagaattgggatttttttcttaaaaaaagtacatcatctaaaaaatagaataaatattatgttatatatatttttggtaaggagaaaatattatgtttaataaacaaagttttaaaaattattgtgtaatcaaacggataaaaaaaatttattgtaataataataaataaatcaaatattttaacactactacaaaaagcttaatttgcgtcggtcaacgcgtctcaccaaaatagttgaccgaggcaaaaaataagtggagattttatgcttcagagtataactgaagataaaaaatatcaattggcgtcagttgatattccgacgctaaaagaagaaccgatgaaaaaagtcaaaattttaaaaattgtcttttacattttgcttcagtggaaaagtgacactaattgttttaaaaaatttctcacgattatccaccgaagcaaaaaagatttaagttttataagaaacccccattttcaccaaaaggatttcatttcatctctttcctcatttcaaaaccctagcaga

SEQ ID NO: 219463 - DNA, 2895 bp, Cannabis indica
gttctttaattaaagagacataattcattgttcatgcctctcttatggatgaacttgtagttgggtactaatgaagtaggtccatcctgaaatttaatgggctaggaaaaaaaaaaattaacccttatttagaaaaaaaaaatgtattattttttttttgagttaaaaatgtattattttttaaaatcagtaaaaaatatatattttttttaaaaagggaaaaaattaggctcttaaaataagtagactctaagcacagacctaaccacttacaccaagaacaaagtctgtcttgaagtttttcaagctagaatctcttccgtttgcatgtaattaaagtgtcgccagttactttctcaaagatttttgtagcacttttttttttgcatgaaaaaaagggatcacatagtaaatctttcctctactctttcggtaggtttgacaatctcgaaaaccacatgtcagctactcattctgtcttaatttgattatcaatatgcatcttattaaggatgacaccatcacaacaagctagtctcccataggatcaagtacaattcctttgaataaagggttgtgctgagattcgaactcttgactcaaacaaaaaagatatcagtaaaagctttcctaccactacattggtgtgatgattttgccgcgcttttgatatcagtattttactatcttgatctaaattccctagatactttgtagtccactccctatataattagtaattacgtacaaatactactatttatattatatatggttttcaaacctaatctagctactatgcatgtgtgttatatttaatatacatattaagttttatattatataaatgaattgcaaattgtgttcatatataattcctagtatattgcaactatatatataatgagtataattaatgtcacagcacatttatatgtgtgtgtttttcttttcttcaatatttctatcatctttgaaaattaatggaaaaaagaatgacaagtttgatcttatattctcttgtagttcttttcacaaaccaatgaagcttacataataactatttaaatagtctttgcatacataatcactatttaaatagtctttaattgttcgtattattagctttcgagaaattaattttgaataattgattgaaaatataattcaaaatagttatgacacgggtgaaactaattatttaaactctatttttcagcgagagatttttgaaaaaaaaaaatatgtgtatatattataaatataatatataccgtcatttaaaaataattattgttataattttcttttaagtgtcataagtagaaaatcacccctaaagacttttttgatgttgaatttctcaataatattatatataagagaccatgtagagattattcaattgatgattaattaagttaaattaatttatatattgatatgtacacatgatgaagcccacgttgtttgaatctgtttatagtcaatgagacctttgttttccaaataattaatcaatattactattagtatttaaactcttttgtcttaatcaggtttctataattattatagtatttaaattattaattaaatttagccatatgaacacatcattatcatttgccagcttcttataatgtgccatttgcaaaaaatatatattattattattattatgtacaatttggtttttgatgttgaaaactagaatacaatgtgataattaattcacaataattatttatgccttaaggtcctatagtattattattgcatgaattcatgattttgcattgcatgtaaatttcttaaattttttatttttgtgtgtatatgccacttgagtgaagttaattttcttgtatatatttaaaataaattaattagttaatcacgtgttgtgtggtgtaatggtaagaattgtttttactgacatcttttcttgtttgggttaataagggttcaaaatccaccatagcttctcttgaaagcgattaaagaaaggcttgattcttgctggagatggtgtcatttatgtgatggtaactcttgatgtgactaccgatgacccaattaaagtaattgctaaggtataagactcttgtagctaacatatagtctctaagattgtcaaaatgatcgaagagatgaggaaaagatatacagcacgtaatctcctttttattcaataaaaaaaaaaattaaattagtaatattccattaataaactgttatgatttcaagtgttaagtgggcaaaagagttcatgcatcggtttatatatatagggatgatttaaatatattttttcatatatatatataaagtcaaaatatttggtggcaattttaaataacaacaaagctttgttgtaatccaaaaaaagtatcttgtaacaaaatattaatatattttttcatttacaatattataagattgaccaaaaaaaaatgacaaatactattgttgttatttttgaacaaaatattagttttgttatgaaattgtcttttataatgacaaataatatttttcaaaaaaaaaaatggaataggcaaaagatatttatcatgtttataactcttaactatcattattttttttataggcaaaaaaaaactatcattatttaattggtaataattctagttattttataggaattatgggttgtaaataataaagaaaatattatacatagaacaaacttatccaaatataacaaagtggaattctacaatattatttggtaaaaatattaaaaattattagttggcaaaatattatatgaatctgtttatttcagttttggcaaaaatctaattgaccaaaaaaaaaaaagtaacacacaaactaggattgttctagttaaaaaaaaaaagtaaaaaa

SEQ ID NO: 219464 - DNA, 3529 bp, Cannabis indica
gtttttagatgagaaagcaatataaaccagcctatagaattggctccgatgtcgagtctgcttacttttgtaagagtgtgaatactaaggagattacttccttctgaggaggctatttttattcgtcaagttcctattctggcaaagtctcttgttttgcttgtcttttttactgtggtatcaaagaggtagtctcattcgtgtgtggtcttttccatgggagaaaagggaaaagaaatccaggtagtctctgtagacttggagaaggaggagattatgaagcgggatagtaatcttgagatggaaatgctggagctttttgaggacattactcttgaagatgtggtggtaaacaaggcgtgtgttggaaaggttgtgggctgtaaaaatatgccagcttcagtggtgaagaaaatactcacaggagtgtggcgtaggcttggattctggcgaatgaagaaatgtgaggaaggtgtgcttggattcttttttgatgaggaagacgattatcagtttgtcatggaaaggaggccttggattattaatggtgtcctactcaacatcaagccgtggccggtggaggggaggttcacagtggagagtttgaagtggcggcgttctgggtgcagttccatggcctgcctacgcgtttcctggcgaatgaaaatattcctattctggcaaaaaaagttggtcatttagtgaggaaggaagagaaaaagaaggaagaattagtaaggagaggttatctgagaagtaaaatagagatttggttatctcatccattcccgtctggtttcttcctcaaggcggatggcaagccggattcctgggtccaatttaaatacgaaaagcttccccatttatgcttcagctgtggaaggcttgcacattgggaaaaggtttgttctgaccagcctacgatggtctattcaaaggttggtccagcagttccaatgtatggaacctggattaagagtgaaacagggagtagcaattgcttcaacatgaaaggaaaggggtcggcccaactgatttttgaaagggaggatgtgccggaatgggatttgagtagaaggagagaaagaaacacgtggaaacggtatcccaaagtgacggaaaaaatggagaaaaactccggtgacattgtggtggctgttccagaaacgggggaggagaccggcaaggaaaaggacaaggtggatgatagtacagtgacaggtggcctcaaacggaaaggtgtgcaggagggcacgtccactactgtgtctggtgaggtgtgtacgggggaagaatgtggaaggacaggtggaatatccgttagtgatgaatctggaggaataaatgttgaaaacgtggggaatagacagttggagattttgaatgctgagaatgggcctaattatttggagttgcctaacccggatttctctttaggcccagatggagaagaaaggatcccggatactgggccgaccatagcccaaagtcttgaaattccccattcttggctttgtagatctcaaaggccccatgattttcctgagcctatccctcttaaatggcccaatgatgacccaaaggcccaagaaaacttctttaatttgtatggtcctgatctaactgacatgtacaaggcccaagcttctttgatatgtaatcctcctgatctttctatgatgatcgtgcaactgctgggaacaaaaaaacgcaagcctcatacctggtaccacccgtggcctgctgtcactagttttgaaattcctcgttgtccgtctgtggaggaagaggaggagaatgataagccacagaatgaagttgttgtcaccccaaagttcagccttggatctaacgaaggtggagagaagccaagacgcaagagttcccgtcgaagtgagcaaggatcggtcatgtttaatagaggctccggcgttaaaacccgacgtgggaggaagaaggctgagtcacaacggtgcgagattaaggagttcgaaggtaacttagaagttgttttggaaaattgtattgataatacttttcaattggattttggcaatggcgaggaggcggcctcaagcatgcccccaccatcctcatgaggtgcctatcgtggaattgtcgtgggattcgtagacccacgacggagagaactcttcggagtttaatccttgaaaacaatgtggatgtgatttttttagcggagactaaggtaggagaagaggacgtgaggatggttatgaaccgtttgggatttcctaatgtggttggcatcccttcggtgggtatcggtggaggattttgtttggcgtggagacaagttggattaattgaaataaaggaagtgtttgcggctgggtttcatgcttatgttcctgcaatccatggaaatgtgggctggcacttgatgtgtttatatgggactccttatgctgaggagaaagttgagttttggaagtgggctactgaaatggtttcaggtttgagggagtcatgggttgtcttgggtgatctgaatgttattttggaaggttcggagaaaactgggggaagggaattccatagacgggagggggcttttctgagggagtttttggatgaaactggaggtgttgatttgggctttcatggggtccggtgtacttggaacaatgctagaaagggaatgaaaaatgttcggaagcgacttgaccggggtttggcggaggcatcttggtgtactcattttcctaatgctaaagtgacaaatttgccaattctagcttcggatcactctcctattgtgttatcgaccaacgaagaacaccgaaggcttaactatccctttcggtttttggaagtttggacttcgagtcctggttgtgagaaggtggttgattgggcttggaaatgtgattataaggggaggaaggatgaagtcctcttaaagaaattgggcaagacaaaaagtgagttgaaaaaatggaatcaagattcattcggcttttgtgatcagaaattgagaaactttaaaatggagctagtggaaattcaaaataaggcgccgactaaggaaaatttggaaagggaagcttcggtgcagttgagtatcatggaaatggaagcaaatttggaaagagtttggaaacaaaagtcgcgggagctttggacccggaaaggggatggtaatacaaaattttttcacgcctcgacggtaattaggagacgtagaaacaagattgaaagtgtggagaacgatggtacttggttacatggtcgtgaagacattggaaattttatgagaaaccggtttatacaagtctttgaatctcagaatactgttattgatgacgattttgattctttattttctgagatggtttcggaggaggaaaacgacagcatttgtagaacgccttcggaggacgaaattaagcaggttgtgtttgctcttcacccgttgtaatcgccggggcccgatgggttcccgggtattttctacagaaaatactggaggatagtggggggtaaagtgtgtgagatggttcaagga

SEQ ID NO: 219465 - DNA, 3424 bp, Cannabis indica
actcttttcctcatcttatcttttagaaagctcaacaccgcatttttgttgtgcttcataatgttaggcaatcccagataaaagccatcatcaccggcttccaccatctcaagactagagcacacccgtctccttacatccaaaggagtatttttattgaaaaaatagaaaatttctgacgattaactttctgacctgaagcatgttcaaaacttgccaatagagccatgattctttcagccttcgtctcaagagcccgacagtacaaatacctatcatcaacataagacatatgtgacacaaaaagagccccacgagccacttgacaatgtttgatccaacctctagcttcgtatctatggataagagttgataagccttatgcacagagaatgaaaagatatgaagacaagggatcaccctgatgaattccacgtgacagattaatggatccataaaaatgaccacccgaagtgatccaataccgcatagacaaaacaagagccatgataagctaaatccatataacgtgaaaccccattttaaaaagcaacgtctccaaaaaagaccattctacttgttcataagccttgctcatgtcaagtttcaaagccgtcagaccaacctttcccctattttttcttttgagataatgcataatctcaaaagacaccaaaatattattcgtgatcagtctacccgggcaaaagcactctatgtttcagagatgataccatttaggagcaccttaagtctatttgccatgactttaagatgatcttgtacacaacattaaaaagagcaatgggtcgaagatcactcatgcttttaggatttttcttcttaggaataagcaccaaagtgttttttagatcaataggaagagaagccgagctaaagagctgttgaacaagttttaccacatcagatccaacaatatcccaacacttttgaaaaaaactcggggtcataccatccggtcccagagatttatccggatgcatttggaaaagagcagtcctaacttcctcgattgagagtggtaaataattctaaattcatttcgggagtgatagaaggaataatatcatcaatgatatcggacccaagagtaccaggggaagtaaataaacctgaataaaaattcaccatatgatcagccaaccccgtatcctagtcaagccaaacaccagcatcatcttgcaacttgtgtatcatattttgacatttacgggcactagcagaggcatgaaaatatttgctattctccttattttagctaaagttatttcgatctttgtttccaaaagatctcccttttagttaaaacttcaaataattctttctcagcgttttgataagccaagatagaatcattgtctctcttttccttcaaccgcctaatggtgttcttacaggcaacaatagcttgcttaaaattcccagtaacatcctttccccaaccagccaacacctcaccacatttagaaattttatcttggattgaaagatagatgtgttcattctaacaattatggataagttggtagcaaagaggctcccttgaccaagcattctcgaaatgaaaatgcttaacaccagtgaaaacattatggacagtcggatccaaaaaaaattggacaatgatcggaggatgatgcatgaagattaaaaagcttggcagataaaaaagtattaacccaataaatagaagctaaagctctattaagcctaaccactgtctagtgagcagttcctcttcctctttcccaggtgtacgggtgcccatggagctccaaatcgactaagttaaagtcggccatcacctgaataaaaccttgaatcaatcactcagtgtatggacaagcacctcatttgtcattatggtcggtgatattatttagatcacctatgaaaacgtacgatcgacttctattttcagcaagagaacgaatgtgggtccaagtattagcacgataccctctgttagcttcaccatatatctccaccaatctccatcgtggcataccaggcacttgggtaagaatgttaacatgcttttcagaaaaattaattacttcttcctcttcactgtctttccataacatagcaagccaaccactatgtccacagacctccaccacaaataatccctcatagccaaaagacaaatggactctttcaagaacattttttccacataacgtttcacaaagaaaaacaaacttgggcttcttttggaagactaactcctttaagaactgtaaagcctgagggttcccaagcccccgacagttcctaaggtactcatgactcttggctagcctaggaagccagacccgccccaaataagtttttttgttacaccttcttcctcattttcaaaaataccatttagattcaggcccatagaacctagcccaaccgaatttaatctcttcttttttaacttagaaatagtcaacccatcttccactgtgtcatgcgaatccccacttgagtgattgagcatatttatttcaacattagtgccgatattctcctcaaaattagggccaaatttttgcacaatcattggctcttgaattccacaatcaactccttttccacgattcttgacattgtcaactgcattatgaacctggacaccaatcggatcatcttcagttgtctcgccgccgtgcattctggtggagaacgactgagcttctccctgtttgtcttttcttcccgatcgaagccactgtgagccaatcatcttattttggcgttgagtcgtggctctcataaaagctccatatggtttgacaatcatcttctctggcgtctgaaaaatccttggacacaatttatcagcatgaccgattaatccacatatgaagcagaacgttagggcatgctcatatttgaaattatcccaaaactagttggagttattcattcgatgaatcttcattcggcgcttcaaaggttgatcaagattaatcatagcccgaaccttaaaatattctcgccacacaccagagaagttactctcatcggactccacaaattttccaatgtaatcccctatcttctgtaaagttctttccgttcgaaatccatgttgaaaatcatagacttgaacccacaaatctagtcgattgagagtgatagttctcagattatcccctgccttaagtctttcaaatatgagttgtttacgttcaaatgtccatagacttccattaatgactctcttgatatttaattcatgataaaactgaaacaaaaatctgttttattccaattccttcacatataatcccttgcctggcttccaaagaaaagccatcatatgttgcatagcttgtacatcgataatcccagcattcaagaaccgatcaactagacattaccgaatgtcgtattgctcttcctcttc

SEQ ID NO: 219466 - DNA, 6304 bp, Cannabis indica
ggctttggactttggaatcctactaacactgagaacctgcacaaaagaccaagtcatgtataaatgagatatcttatacaaacaatggcacgaacattgtaaagctgcacacttaattaccaagaattgcagtagtactagtaccttgtcttgcagattaacaactccaaataacatcttcagacgtgaatgctggtgtgctaaatgcagaagtaccttcagaaggtaagagtaaaaaaagtgtaagtcaacaataggatattctaaccaacccatcttatttatataaaataaacatataacaaaatccagttgcaaataacagcacattaaatatttcatgaattttgcatgatctgaactatgtaaatgaattacaatcacagttaagggtggcatttgttcacctacaaattacaatataattttaacagattgaaaaagacaacagaataaaataacatacttcttttgctcagcttccttttcatccaaccaagtctttaacttgtcagcatcacttaacacctgaaaatccctcaatgtaagtcatataaaaaactaacttctgaacattcaataaaacaagagattatgagcacccagactgcaagagtataattaatcacctcatcaattttctccttaggaagccaagatttgttagtctcccacttacgcacaatctgtgaataaacagagttgaatggagacgatcagtaccaaatagcaagttagcaacagtagaaatccataaatgagtgataataaaacactaaatgtagcaaatgcagcaaacagtgagtgaaacatctaaagtgaaacaagatgcctatcaacagtataacccatatggaaataatgaaggctccaccaactttacagaacaacgtgaaatgtatatacttgcactcttcatgcttgtaatataaatgcaccataatcttaatgaattgcacccaaattctcttgaaccaagaaacaaatacaccaatatatttttgaatcagaacctggccctcaataagttaatatgaatactaactaaagatggcacaagttgaactctgagatggttcgaacataaaggcaataacatttgtcttttgataggatgacagtgtgcattggccccaaagccaaaagccttgtcagacttgtttattgtatatactataataaaaaaaggggttactgaaagaagagagaaaggaacttgaagacactgaactggtctctcaacacaccaatggaaaatttggatttccaataaaaccaattacttcctaatgacaaactaatgatttgaacaattaatgcttcttcccagacattcacaaattgcaccacaagaaatatgcatacatatatacacaatctgaacataataaagattagctttcatcataaaagtgtttgaatgacctgctgcagctcgacaaggtaacttcttgcttgtttaacagctgctggtcgggctgtaagctctttcaatctacatttgggaaaggaaaaaaaacaatcaaccttcagtaacatgcaccctcagtctcaactctcaagtgatatcaaattcacatataaaagttccactccaaagaaagttttagccaagtcagcaaatcaatatagaatgtacctgaaaaacattggatcaccaatagcttttaacatatcaaggtgttcctgaaactctttggcagaagcattttcaccatccatatatagccactcttgaacctggttatttttttgtgctttatttgtaaaaattaaaataaaaagaatacttgtctaagttatatggcttagctgtccaaaaaagaaggctaacctcatcaagcttttcaatgaaagatttccgttcatcatcagtagaaatcttttgaacctcctcagatgtttcaagctggtatcagaaaaatatacaagaaaaagtctattagagagtgcacaaatgagcaaactgtctattttaaattacttcattcttaaaataacagaagactaaataaataaccggaatctgcaaacaaccatcgtaattggaggacattcaccaaaaaaaatgataacatcgaattaacaacaatgatcaacctctctaatatatgtctcaagatggatgctaatggaaagcattgggggaaatgtgaggatatgccacaatttcaaaacataaaaaggttaagaaactggagaattcctaccttgtcttttgtattgtatatgtacgattctaaattatttttcagctctgcagtttttcttcgctctgcatcctttttctctattgcttctaatttacttttagcttcagcaaaggaagcttttggcagagacattgcgggccccatagtcttctcaacaatctatatgtcatgaaagtaaaaatcaaaaagaagagagaacaagactgcacaaaataaacatcacataccaatttgaggaatctaaaagctttaattggctgcaaaaaagaaatacagggaaatcaatttatctgtaccttcaatggaatcctgaaagttctttttttaagctttttttcggtaacaagatctgaagcattctgctcttcaccagattttgatgaaacattagtagtgtcagcatcatcaacatgtaaattagcgctgctttcttctgaagtgttgttagcaccaacttcaagagatatgttggcagaagcaatagttgagttctcaactgtcacattcttcttaggaacttctacccattcagttatttcaataacagcatctgcccgatccaaagacaaaattccacttctactcagagagaaatgcagatttgctttaattggggacgacaaattccgagatgcatacctgagttaaataagtagacaaacacattataaccatattagtatatttctaatcctcacatgataatgtggtagcagagggctatagtaacaatgtaaattatgatccacaaatgaaataaaagatgtataataatcttacttttcagtagcgtctgtcagaccagacagatcatactgagcaactataggagaggtcactccaggtggtagaataattttgctcccataagccaatgaaacttcaaaatctttgtcatgaacaatggatctaaacatctacagtatccataaacaagtatatagttcgtaaaattgttaagaatgacataattaaaccagtgatctaacacatgcgctaattctaatctcacaatttctatgagttgcaatgtattaccttgctgggtatttttttcattctctgtacaagtgattgtctagtactttcatctttcaaaagcccagggccatctaactcaagtacaaactcgtagggagaaccatcaaccatcccaagcttccgattcaacttaattccatcgcttaaatttgcagcatgcagtgctgcacccagaactatagcttcatcagcatcaagatgtctatccaagtctttcctcccaagaaattcctgaagcttggcctgttatgaaggaaaaaacaaaatgtttcccagtcattcttctaatatctaacacatgaaagtatatcaggcaagccacaatatcattctttcaccaaatgatgccatctacctacttcaaaaatcagtatgaagtaacatgtaacatgaccccaaaaaaaaaggaaaacctaaataacatcattgaatggaaatatacttttatgcaaacagaattgaaaccaaggagtttttcttgcacataaagaaaaccaacctgcaatttcggtactcttgtagcacctcctatcaactccactgcatatatctcatcaattgttagaccagaatccttaagaacatctttcacggggataagagattgttcccacagatcctgacagagctcttcaaacttctcacgagatatggtgctcctaaaagaaatataaatcgcattcagcttactttttttaccaacaattaatatttgcttacaaatacaagttcatagaatataaaatggaatatactcattttagtaccatgctgtttacttaatacctttgtaaatcagttcaaagttgtacattgtcattattcatggagaaaaaaaaaggtccaataaattctctaatcctgataaaagaatagggtgagccttgttttaagctatttgaatagcattcaagtgagctttgtatctttagcaacataaaatggtgtcaacttgtaagataaagacttaagtatgataaatgatagaataaaaacgatacatatataatactctaagaaagttgcatgtatactctatggcaatagtcaaaaaaatcctcaacttctaatctaaaagcccttgtgtaatagagattttcacacaatatttctcacacacgttatttagatgaattcttaccagggattgtaacatgattaagagataaaattaataaataaactactacattcaaaccgatcttatctgctaactggaaaacaatcgtgtaacaatgatttgaaactttttagtattatattatcagttttcaaattccaaacctgaagtctcgatcatcatagagtgattctactgatattggtgccatcgtgttagcacttagaatttcctttgttcgtttgacctgcttcttcagtttagccattgccttgggaaacttcctcacgtcaactccattcccaacctgtttattgaactcatctgcaaagtattcgaccaatcttaactccatattttgaccaccaagttctggattccatctgacatccttgacctgcacagatgctgtgagcttagtaggtgctagaagtaaaaaaaaccaagtaaaacagctaaacaatatgcagaatattatacctacaaaaggtcaaattaagtagaaaccctacctgaaactggttaaccgagacagttttcccaaactccttggacttgtacgctgagaaatacacaagggctgcataagtactgcttgaccccatatcatagaaaataacatgtctagactcgtttgagaaatctttgtcaattccatactgcaaagcagcaccagaatgctcatttagcaatgaaagaacattaatcccagccaactgagctgcctgaaccaacccttttcgttctgcctggccaaaatatggtggcactgtaattacagcatcctttacaagaacttttgcatgaaactctgctaaattagcagcataactcaaaaccattgccactaattcctcagcagaaaaactacccacattgtcatcaattttgaaactcgcagttcccctggagtcttccttaatatcaaatggtaagtataatgaatctatagaagtcttcgtatgtttaaaaggcttcccaatcaagtccctaatttgggaaaagactttatcaggatacctggcgactagccctgcagcttcttcacctagaagacgatccccagattggaatgccacaatggccggagacttccgcttcgacatctcattgattgcgattgaaattgggctctgcccaggtttcagattcacaaccgcaactttcagccattctgaacctagatctatgcttaaaactgcggattgtgagggagacaaagcgaggcaaaagacgcataagaataatccaagcttaaacaatatcgaagccatcctaaattacgttagcaaccctaagaaaacttcaatcttcgtctctgtacatcacaaaagcaagaaacgaacactaattagagttcagccaattatttcatcaacaaacatgaatttacattatactttttttacccgtgattaaaagtaaatctgaggttcaaatgaggaaaattagaatataaagcgttgtcaaattcaaaactcgagtttcatttgcttaatactgtataacataaccatggaattagattcggcaatgcttcattctataaaaaaagctaaaagaagaatggaatcgaacgatcgaaactgaccagtaatttaattttaagatcgcattttccagaagtctgtatcgagattttttctgtttggttgactggaaaacgtaacaaacagaaaatgaaaaagtttctccgaaactcgcacagtcgcacatgctccagaaaatactgagttttcttatatacgttaatgacagggatgctgacgtggaaattattaatgcttcctaaccaataagagatccacaaatggcaaaaggtacacgtggtgatcactgagacgctctgtggtgttgtgctcacgctgtccgcctccattttgtctcagaccgttccgtgatcttcagttcacaactatttaactgggcc

SEQ ID NO: 219467 - DNA, 1821 bp, Cannabis indica
gtgcctaattatttagggcattagacatattgttccacaatactccaagtctctcatattacgactagaaattcagttctccatgacaagcatggcgaaaagatccatttatttggattgagtcagagatccgatctgacaggccattattgatctaaaactttcagatacttatcagattttgatcagatccgctctgccccgcctaatttttttaaggatcagatctaacccaacccattttcaatatattaaaaaaatattgaatcccttatccttaattaattcttaaatggaccaaatcccaatcaaattttccctttcctactaatcttgttgagataatccaaaccataaaacctcacaaattcaacccagtgtgactaggccttgagttcttgaggtatcgctatatgatttgaaagaatcaaaacaaattcaacccaatacaagtgcgaccaagccttaagttctcaatctcagtgttgagaactcaactaccactatcgccgagatcgacacagataaattagatagactcgacgagagtagtgatgacgttgcgaaggctggggatagtgatgttggtagtgggaatgttggaagagatagagtaaaagggccttcgtcctaaagaggacaccattttgagtaaaagggccttcgtctagactagtcagtaagttaggggctaagaattggagcctcatcacccgaggaatctctggccaatctggcaattttcgctgcctttgatggtgcaatcagctcgatccaattgttaagcgcaagcccttttttggtacaattctcccttcaactttgcatactacttttttaatgtccttaattttagggttttttgtaatttgacataaatgtttttcactttgaaaattttactattgattctaatatcaaactttgatatgataatgcacaaatatcctgttttagaaccaaaagatcagtgctttgcgagaattgtaagaacaatattttcttaatgtgaatatgtgtgtttgtaagtttgaacttaacgtttgtgtttcttttatgatctgtgaaatcctgatttcagattttccctagatatatgaaaggggatttcaacgcaccattcaaaatcattgcaatcaataattaaaagtatagtgaaaattacaaaaatcttggttcttcccttgcttcttgtttggtttgaagtttttgtatgacttgatgtattttttgtcactttggtaatatgggttgctttaactctataagtgattaacattttcatgtttacactacaaaattgatagtaggagaaactcatacatttgagccacctaaagaattgtattgtctcgattttgtgccacatgcatacatttgagcctaaagcttcttaggaatgagatgagataatctttgatccttcatgcattctattgaattaaaaccaaaatataaagattttatttatcaattattgaattcgattcacgatgtttcaataacttgaagatcacaaattggtttgctctaagagagtgtctttcctaaatctttgatacttcatgcattctattaaaaaaaatggcacttttattaatttttttcattgagaaaaacatgcatttgacttgactacatatgaactctgatcaatcttaattgtttgattctttcatctaggttgatctacaattgtttggttttttttttaatttttaattttggtacatatttgaaaatattgtaatttattaaaaaaaaaagaagaaaaattgcaaagaatgttgcttgattgttgatctctctctctctctctct

SEQ ID NO: 219468 - DNA, 3414 bp, Cannabis indica
agaacacgaataacactcttgacattgaacctaatcacatcaggattaagaacattttatctaggatcaactaagtgatattgaattgaatagatattatggtaagtttaataaatctatatcaaagttcaatatcgatccattccgatgcatactccatgcatccaacccgagctttactttaaccaatgctctggaaagaacatagcatttgtccaaatgcaagtaaactatgttgtagattgtcatattagtaaaatcccaatgttctgataaatctaggaatctttaatcacatagccatgtttactttccactgtgctgacaacataataaacatgatcaagtatgtgaaaagggtttggatgtatttacaaatcaaataggcaaataattgataaggtgaaccaaaacatacaaaaatgaatgaaaaatatttctgtttctttattgatattgaataatctggattacattgaaatggagttttatttagggcataaaactcaacacacgtgtcttgccttgtgaaaatacggataacatttactcccaagcttctgggacaccctgtgggccaggagcttgcaatatttctttgcttattgttgaaatttttggacacgtggcgctagccgaactcacagatatatcccatgagatgtcatcatgcattgggataataacaacatttatcattggcgtggcccacatgcgacgcttctaattcatatgctgacaagataattgatatgacacctcaattaatgtttacaagacaagagacttgtttagatattcaagtcgtgcattaaatgcgatctttttggttccccacctgtcggatcaaaggatgctttttttggaggaaatatctgggccatttatttcgaaccaccaggatcacaattggattataaatttgctccaatctctcatttttcctatttccatcatcttttatccttgtaagccttcttgttgttttcttgaactagagcctttttttccaagcacttttcattttgtagatgtgatcaattggtgaatgcaagaggcttatgactgcctcattcagtacttccttaatatccattcattttgttttccaaatgctgaacccctaaacccgactgtgcttcaccccctagccagacaagggcttcgactcttaggccggatacaaccatgtaatagactaggttcaatgtttttggacagatttacatgataactttccagcctttatccaaacaccaagtaagttttctgacgctctgttgactttacactattacatgcttacgataagactgctcagttcaagctaggaccaaaacatactatgtgtttgattgatcataggctgctggtagaagtaagttctacgtaaaaaatttgtggcatgaacgtcgtggtcatgaaatcagttacgttgtatccaacagtagcttgtaagctttatatgctggtaagaatttagggttagtgttgaacaaagatttaggactttcgaatgtacttctgagaagttcattatcttatgcctatagggagtcagcaacaccctacaatagcccttactttttaggattgtttgtgtcgacatcatttttggttatttcgcataggtttctgaccggtcgttttcagcctcttgtgacaatttcattactagaaacgacaagtccggcagggacctgtccaagaaattttaggtgagaacttccccaatacccagttcgtcttttggatagtggttatttaatcacttggtgtgtttctttcatttattagtgatggatttgaacgaggtgttccaacttgatgcagaggagattgaagaaaactccaccaaatttcttgccggaggaaacatcactgagagaactgaagaggagatttctatagagggaacgtagttggcccccatcccagaacaaaccctatctggcaccccaaaaatgtttaaaagaaaaaggaggactacggctaggctgttgtttagaggtaaatgactccaattgggagatggatcaaaaagaaaacatcatcctctcgtacgggatgcttaagttataagccatcggggctggactactcaacatcctggggttgatgaggcataggatggaaaattcagagaatcttcctccgtgagcatggaggagttcaatgccttgagttagtcccatatttaaaatggtgttcacctcctagttagaacttatagctctgttgctgctaatacctccatcctacaagctcttggctagatggtatattttctgcaagacgaacacgttcaaagtgccctccctagaggaggtcttgtttttctacgcaccaaagtgtcatttgattaggacaaactatagcaaactaggattttataagcttgagaaataccctgacgcttactgtcccacgagctttagcaagtgcacccacaatcttaggggatattttgtttttctctactggctgtccagtaaggaggctgcctaatctccacctcagtttcctgctcataggtaaacattttttctcctctttttctggattcatttttctcccacgtcttctgttttggttcaaatgctaagtgaacttctctattttttgtttcttttgacaaattatgttcccttgagtgtcgagaccgaggaaatgatcataaagaaggcccagtacaaggctttcatcgaggaccaactgaaagtcaaagaatttttcactacaccactactgcaggagcatggacttattgcggccttctaaagcattgataatgttagcaatatgggccatagtaaaactcccaaggagtttaaggatgatttggctcgttatttagccaaacttatcacgggggctaaggacgacagactcttggaagcaaaatggaagctccggcatatgagcacgttgagtaagcctaaggagattcaggaaaggtatgatgtaacctatctagacaaaggaactctaggggctagcacttttaggaaaggaaacaggcatttcttcgtcctccatacccccagccttcatcgtatttccttgaaggatcaatggggatttgatagttaatttttaaatttaaatcacgctaagaatccaatgagagaattcatagatagaatagatgagattgttaggagtcatagtaacccaaaatttcgtctaaacaatattatagtggacccttttttcagatatatcctttcaattcttcagagaattgttggaatttattttacgaggatctgagatctactcacaagtatgttgtttaacaccctaaatatgaactttctaaaaccatagataaacacatatcaagataagaaaaccttacattgatggcagcagaataatgtctccttctagtcagatctctaacccttgtat

SEQ ID NO: 219469 - DNA, 2395 bp, Cannabis indica
tattaataaagtaattttttttttttggtgtattttcaaatatgaactaaatacatagtatttcaggtatacatataacaccctaaaaaaagatatgcacataacataattacataaatatatatattttcatactcttaccttatcttaaatcttaattcaacggataatatcctactcagtcatgtaaggtatccacgactaaacatatttgtctccctatggtgcgaacactatttttgtttttattggtaaaaatatttcagatcctatttttttttcgagaaaagaagataaaatttccttaattaatcaaatcattcatcaatacagaaataaacttcgagagagtattgttcactcacaaaatacggtcaaaaattaaacaagtggatctcgctaaatagcgagccacatttttcgcaaacgtttaataaactttaaagaaatgttacgaactttcaacgcaaccaagaagcacttacactcagctataattctaccaaaataagagagcaaggtaaatgagcttcgaatgacttggacaacaataagacaatctgactcattttcaactttgcaccacccgcgcgcattgatctagctcaaagcttctcgaattccaatgactttggctaatttaggctccacattaccgctaaggcaactaactttagcttctctagcaaactaatgtgattttgagcaacacaggaataactgaaaatattagaagtactagcaaaaagtgcagcatcagtgttcaccttaatcgtgtctttgtttagagtttttcaacgctcaacaccatcttctaaactcataaaccctatagagagagagagagataaaatgatttgtcttgagcatattgccattgatttaggatagttctagccaacaacacaacatctgctacatcagtacccttttgattccaaaccaactcgttcttatatttccataaagcccaactcaccgttgcaataagttgcctttcctccccacaaaatcgatcaaaaacacagagtaatcaatccaaaaaagtgcctgttacaactggtgtaaccccgtagcgatcaacttatcccaacatgcatgagagaagaagcaaaagatcaaagcatgggagatggatctcctttcttcgttacacagaggacatagaaaattaacatcaacatgatttgatcttagttgagttttgtgggtagataacttgttaaagctctaccattaaaaaaaaaaaaaaaaatcttttcttttggcgacacttttagattccaaagtcttcatcaaaaccccaaattatcattggtgtgtgagacttccatttcttgcaataaggcatagacactcctcactgaataatgggttttctccattaccaagattcaacctctcgaagagggatagacacaattaatttggcatctctctcaaaaatatcataaagaaactctatatcccactggttttgtcccacaaccaaaagattagagaccattttaccagttaaagcttcagtaaccatgtggacatatggatctgcaacatgcgacaaccattgatcttttaggacatcaaccgtagtgccttaaccaattcgacaagttgtaccttttttaatcaaagattgagcctctagctaacacatttctccatataaaacttagattgcttcccaatggaaaaaactcaatactagctgactatgtcaaaaggtcagactattttttattgatctcaatatttcaattttcaataattcaaaaaatttcaaaaaatttattttattgaaaatatagtttaattttattcttagtattattatactaatgaagctatcttttttaaatcatgcttcaatactataaactatttattttcttaaaaaaaaaattggtaaagtatctattctaattacaatgtatatatcgtcatataaaaagatagatttatacctttttccactaataaattattataattttttcctgtaattaagctttacttttggaattgaatggcactagttactattactaaagctaatgtgatgtgatagtgttgtttttgcagttttataggagcaattataattgtgagtggattttatggagtgatgtggggaaaggccaaagaagaaaagatggaaagagagagttgtggtgaggtagatgaagcaattgcacatggttctcaatcattatttgatcacaaggcccctcttctctcaaacaaataattaccattatagtacaatatcatcacatatgatcatttcatatgagacataagtgtacatgtatatatatgtttcgacacattaatgaagtgtttattattacttatagaacctctatttaaaaatactctattcaagaataacctc

SEQ ID NO: 219470 - DNA, 2361 bp, Cannabis indica
tttatcattttataaaataaaaataaaatcgataatttttacaaaaacaattaagctaaaaataatatttaatcaatattaaataatgaaacttaataatgagtagcactcaaattatttacatgtgtaacttcttaatattagatacataaaaaatatatatatatatacatatatatatatatttataatgaagattatgttacccaatttaaaaaaaccaatgaaatcgtgccttatgtaatcaattctaacctatcaaaagccgaagatgtttgcttctataaaaggaaaaataaagattcaatctttggaatcgttattgtatttccaaatcagatattcccgaaaaaaaataaaaaaagaaagaaagagaaacaaaccaaaagaaagagatgaaaagaatggtaagttacttctgactgaaacaatggatttggctgggtaccctaaaaagggcagaagactaattcttcaagcaaccaatccacactactactaataataataacagtttcaaagaaaggaagcaaaactcataagagagaaaagagtgagttgaagaaacaagaggaagaaaaagatatcaactttggttattttaatggagcaagttgttatggaaaatcttttcaatggtgatatagaggctcaaactgaggctgctaatgaaatagctaatcttggtagtaatcaaaggcataaattagtagaaagaggtgtaatcccagctttgatttctatgcttcattaccaaaattatgaagccattgaagctgctctgtttgctctgcttagtcttgcctatggcagtgaaaggttagtcttttctttttatatttaaacactatctgtcatcaatctacattggtttgaaaccttataccaattatcaaatattcaaggaagaacaaaaaaacatggtcagaaataacttttcatttttgtttgtttttctattaggatttaatttgtggaatatattcttaaaatgatgttcaatcaatggggtgggaccaaacttcaccccattgatttattctgtcacttgagtaaaatctaatcttttaaccaatgtaacaggaccaagaggcgtatagtcaaatccggggctgtaacagctttattgaacctctttcaatgccaaaacaagtctttaatagagctcactgtagcattcatgttaatcctatcatcttgcaaatcaaataagttaccaattgcctcatctggggtcatccaaattttggttgaatttctcaatgaagacttatcaaacgattatattagtcttcaaaccaagcttgatgccatagcaactctacacaacctttcaacatgtcatgagattatcccattgtttgtttcttccggtttagtcttttccttgcttcaactaatccacgtctcagaaaagtcatcggagtttgtcctcaaagggatcgcgctgcttgaagacattgtttctttgtcaaatgatgcgctgcaggaaactgcaggaacgtcagggtcaattcgagcattagtagagacgattgaagaaggctcgcctgagtgccgagagcacgcagtgagcatcttgctgtatgtatgcaagagctgccgagagaaatacagagggttgatcttgaaggaaggagtgatgccggggcttcttcagctgagcattgatggaacttggaaggctagaaaattggctcgagagttattgttgcttttgagagattgctcgaattacaattcgaagaatatacagtcaaagcgtgagcttatagagcagatcatgcaagaaattgatgcagaagaaggtagggttttggagaccactacgcttagactcgtcgaagagatgatagcaaagcttagtgtatgattgaaatattgatgggaagttaatcattgaaatattggaagttgtaatttttcttttaatgtaaatataactgggtttaaatttaaactaacaaactattgtccccagaagattgtgagccgaaatagcaaaaacaaacctagcaaagtagagaaggaccaatccaccaaacaaaaatgtgagccacacgcatactaaaagaaagtactttatagtttatatgggtcattttgtagcatctacacattatgagacaataataacaaagtaaaagtcactgctaatgccacattattaagcaagctgactaatgaatacattttttaaagtaaaaaaatcacctttaaccaaagaaacttataaaattatctcctttaacataaggttatgaaagagtatgcttttattgatgtcgaaccaccaaactccctacaaaaaaaccaggatacagtgttgcgagcacactggaagccatggataacagtagt

SEQ ID NO: 219471 - DNA, 3627 bp, Cannabis indica
accttcaattgtatcaatcatagaagaattactagaatcactttgactatcatcaacataagcaatattcccgacatcggtatgctctcgacaagtagggcactttacccacttatcgtgaaccttgttatctcgaagtattctctgttcagtcattgcaaataaacctattggaatgaaattaaaaaaaaaagaattaaatcaaatttagcttagcatgtgcagtagattctacaaattgaatacagaaattctcacttggtcaactgtataacatttattgccttttactataaaaatacatctcactgctaatgcaaacaattttaagaagagaaaaattaaagatcgaaagaacatacatttacagcatgtaatatgcccacattggaaaaccatctttttagtgctcaaagtctcttgacaaactgggcatgattcatcaactttaagtatgctttcacttttctgttcagtgttcgctgatgaagaagctgctgctgcctcttcagttagcgaggagctgtttggactttctaatggcaatttctgtttagcttgcactaaaccctggttttgttttgaagagaattaggaattagcatagccaatttgaaggaaattttgtatatagcaaagtacatcagaataagggacttagtctattattgtttactattgcaatgctagaggtagattaaagcgaaatattaggacacgagcactaattatatggaagcacaagaaatgtagaaattaggcacccacgattctatctacctttgagcctgacattaatcattaaaatgcccaatacttcataatggtaagctatactctaaatataaacagcagaaaatgaaattcggtgcatgtacctttaaataacgaagtttccctttaatacacgataacaagtgcaaggccatgaacttgtcactagagtactgcacgctagccgaaggtaactcttctttagttaaggcattcaaggatttatcatcttcatccacttgtaactgcaaccttgtagtagccatcttgatctcatcgtgagcttgcagaacttgtgcttgagaaattgccaaagcccttgcatgagcgtactcctttctcatgcccttaaccaggtacaagaataaaaacaattagatatgaataattgaatgcaataatataacttgagcatcctgtaaaatctgagatagagcaagcatccaaacaaaatgatcgtatgaaaaatgttaaaataaaaaaaattctagtaaaatcagtcaaccaaagatgagactttgtcataagtagctgccactaacaaaaggattggtaatgcaatacctcaagaatgtgtaggtgtttacttgctgctgacaaaccatctcttcccaagtgagtcttgcaataactctttataactccaagaacaacctccaattcagacggagattttgaaacctacaaatccaaatccaaaaacaacaaggcagagaagataagtttcaaataattggcacaattctgcccattaaaatgtcaggtttaatcagtagctggcagagttagcaaaagaaactgatcacattcttgctgatgcaaacacatgagaataaatcatcagtaatgttccctttttttttttggttgcctgaattcttgtgtgagcgaaccaagaaccttatattcaataagaacagttactaatattgtttaagtttacaaagttttttcccctatgtaggttgttaattcattaacagcaacaacaaactaattctggtgaggtagagaaaattaaatcaagccttgagttatcgacaactttaacccctatatgtaagtacacaaaaaaatatatattcttgtaacgcgtatcatataaataaaatgaaggcctcacatgaaaaggatctaatgggtacaaaatacacatgctaaattactctgcttcaaagatataggaaagatagtatgtgtcagggtaactgaccaccactttttctcgaacatctctttttcttgattcttcataatcattggaagctgattttaaagttttattttgctgtgacaagttccaatagaatcgattgagagcagagttctttttctgcagatctacagcctcttcagcagacgaaattatcccaccatgtgctttattgagacgaaaaagtcttgcttcataacgctattgaagagcataaataagttaatccagaaaaatgaacaacaaaactacataaatcaaacactaacagttcctttgttgcaaacctgaaacaattcgtctagttcacacataacacatgaaggtccatcgccattaatttggcagttttgacaatatcttacacgttcaatatcctcctcccttggattctccatagtctgatcaatttccaaaagttgatcaagtagaactttcctagaggattccagcaggtccaaaccactctgaatatgatacttaaggccacttatcgatcggaaactagatcaaaattatttgacattaatgaatgtccacacaaaaagctcgaaatccattaacaagttgcaatccaaaaaatattcttatcaggggtacatctatgcttcagaaagagttgtccaatttatgagttagaaaattccatttagtgacactgagacttatggtacatgtccactatgtggagcttatggtgcatttctaacacctatcatagtaagtttcttaattctcagagattgccagattcagggggttgaaaaatatatattcatattaatttgtaaaaaaaaaaaaaatcgcttacccagatggcatcttcgatgatcttgaattgtttagagttcctgatatggcttcttcaatctttctgattaattcaaatgaaaaatctttgttctgctcggcatcaataagggcttccatccaccaatctgtgcgttgattttttctttcactaattccagaacaaaccttaaacagataacatttagttgaagattagaaatagcaaaaagaaataaacaggggacacttcaagtgaatcgacttggtatagttagactaataagaatgtactctaaattgattttacacatggatctctcacactgaatgagacatctgcaagaatctatcagttaacacatacgagaaaaatattgtgtgttgcatgccataaaatatgacatgaaatagtctgtttgtagtctgatatacagtgctacatattgttcttgtgaccatagtagaggctagataagatttacctgcttaaatgactttttaaattcttcttgagcactgtaaagccttgcactaaaagcagataagtatttctgtttcatattctcgcaggaagttctcaaaggttcatcaccagtggaactgcatgatgtgcgaggtacattatcaccttctaggttggcatttacgccattttctttaatgtcagaagtaatatcctgtgggttgccagcatcaattgctgagttgtctttcctacgaactttccgcctcttaaaaacaagctgctcacacttctcattgttctgtctcttgaagaccaccatgccagggcttaccggtagattctccccattcagggaacactgttccaagcactttgcttccag

SEQ ID NO: 219472 - DNA, 4773 bp, Cannabis indica
gggcacaaaacccaacaccaggaagatcataatattatgtgcgatgaatcttcctttaataaaacctccttggcttggagcaaccaaaacaggcaggacatgtttaagtcttgagcaaatcagctttgtggctgccctgtaaagtacattacagcatgcaataggtctaaagtcactaactatgtttggacacttgatttttagaataagtgacagtagtgttaatctccttaagaatttgacctgtttggagaaaagaattaacagcatcaaaaaatatcttgcccaatactcccaattatcctgaaaaaaataacttgaaaaaccatcaggacctggagctttatctccaggtatatcataaaagactttcttcacttcttcctttgtgaaatccccaaataacttctctgcttgttttggtgctacgaaagggccttgctggataactccttttaatactgatttcctattgaccattttatgaccaagtaaactttgataataggagaggaaagtttcttgtacttgagctagttcatccactcttgttccatttctgcttttaatagatagaactctgttttgccttcttctttctcgaatgatgttgtaaaaaattgtcttgttttcgtcttcatccttcacccaatagagtttagctttttgttgcaggaaagaaatcagagctttgtgcaattcggtatagttaattcttgttgccaactccttggcatgtaatgcttgattgagggggtctccttgaagattctcctgacacacaaatagataagtttttgcttgagcctcagctatttgaatgttggaaaatccttgcttgtttagatctttgagaacacccttaagtgtcttcagttttgtcacaatttggaacattctcgttctatttattgattgttgcaaagtcgatctcactaactctgagtacctaggatgagaggaccacatacaaaaatacttgaatggttttctaccactttgtattttgggatgcactgtaagaacagcaggtgtgtgatcgaataacccttctgacaagaatagtacttcagcattagtaaacttgaaaatacattgctggttggcaagaaccctatcaatttttgaataaactcttatcatttccttgttgcttgttgctccaggtgaaaaagcttccactatatttgacatcttcaagttggcatgtctcaatacaacctacaaactcatttgctgatatatagtttattctcttgccaattctctcttctttcaacaaaatctcattaaaatcacccaagactatccatgcatctctggtttgaatttgttgaagatccctccaaagatcatttctcccctctgtgtcattcaaagcatacacaaatgtagcaaaaaaattgtttttaccatctacagttgacacctacaagtgtacaagttggctagtacacttcaagatgttcactgtaaagatatgaggattccatgcaacaattattctccctccaatatagcacgcaatgttcgaggtgaaacaccatccattaaacatatttacatacaaagccccaagtttctgaccctttactctcgtctcgagaagaccaacaggcccaactttttgtgtataaatcaacttcttgacaacacttcgtttctgcttgtcgttgatcccttgaacgttccaacttagcactctatccattgctaagaagagtatctccctctcctcttgtattatcacttgtggaagccaatcttgagtcttctgctattgttaggtgcaccaatttgacattttttgctaacaaaaatttaaactattgggttcctactgcgtaactggtctttccttcatctttccctggcaactgagacaaagcctgaaaggagttacttgtttaagtctcctccacaactttttatcttttccttttctccccttgcttacttgttgaaaaccatctacatcaataactggttcttttggtttatttgatgttgcatttcgcccatttgttttaattactcattgttgttttgcttccctcttttggcaatcatgagtagggtgccctatacctttgctatggccacatatgacaggttccattcatctgagaccaaaatagaggtatcacgcccgaattatcttcaaaccagattaatttaaggagagcttgattgaggccaacttctataagtattctgggataattcagcttgtgtctttgctttgtaacagtatccacttgcaatggatttcccaattgccctacaattttgaataatgacttccccccccccaatatttcaagtctaaatctttaagttgtatccaaatcagaatagttttgatgtcttcttttttgaaattaatgttggggtcccaaactttcataataactagtctgttgttaaaaaagacatacccaccattgataatctcatctctatcttttatggagaaaaaattgacaagataaatcccatatgacagcactaccaaccctgtccaactttatctttccaaactcttctaatgtaaaccctctaatattgacagtggtggattagcaccaaggacatagcaaacaattgagccttagaggcatgagaaacagagagaaagaggagagaggattagggttttcaaacttagagttgatagcttaaggagcttagaggcttaatgacttagggttttaaatataggataaggctctttatatagtagagcttacatgcctaatatccttagaaataggtaaataaagacattatttatataattaattaataaaacaaaaatgactaaattgccccttgaaaatagatattttgcctctatttttgtgggttgttaagcctcagtttgttgtttaacttgttgtccacaaatgacagctcgacatcaaaatcttgctaggctaaaggctggtcggccatgcatctacaggatgtaggctggccagccattcaatgcgtgtaggttgaggtctggctggccatgttcctaccagggtctggcaggtcatattcctacaggggtctggcaggtcatgttcctgccagctttgtcaggagttggccaggtccttgcatgtgttggtcaaccttagtaggtgatggacaaccttggtaatggccagccttggtgatggccagcctttataggtggaggtaggcctttgtactctttttcctggtagaggtcaggctttcttggtcgaacggacccttacttggcctgaaagtcacctttggtcggccagcttgtgctcaaaccttggccaaccatataagctcatcctggccagcctatagactcaccttggttgggcagacatggtggtacaactccttgatggctcgcttaactcattttgcttgctgcttgacagttttgctataccttgtaaggagactttgtcctgctattggcaaagttgtattccatgtgtacttggtcttcgcttacgtagacatgccacatcaagtggacaaaatttgggataacattttcccctcaagtcactgtttgaacatctagtcggatagggactttccaactctcgtcttgcttgtagtagcctcagttgagtagccttgtctagctgagtgttggcatttagaatggcatgcttttagatctttgatcttctctctccatacatgcctcatcttctcttctttgacatctcttctttgaacctgccattgataagtttcaagttgctagaaacttttttattctcgtgttagattgtaatcttttgggtatgttgatctacgtgacagttttagaatgtataatgtatgatttccaaatagaaaatattcgattttggccttcattgtgattcttgactctttaagtcatgaagaacacgaagaaaacaaataaaaattttaaaaaaaaaacacacatttggattcaaaactaaccttggcaggccctaggggtcttttttgagacctgaccggtcttaggattcaatcatgggagttgttagctttagggtttcaccgtaggaagcttagcttattcatgcttgggtttggtgaccttggccggttctgggctgagtcatggggccctagtcgaccttccaaaagcttgggaaccttggtcggcctaggccttggttccaagtgggtggccagctttctgtactcttttgactttgacaagaatcttgtcatggccttataggcatatgcaaccttagtcttatgcgtgatttccttagaaactctgtatgaaacttaatgatgagtctattatagttaaatggtcaacttaaaactcaacatgagtccaagttgttacacttgaaacttgtactttgttgatactcggccttgtacaatgacattatcgggcaagtacccttgggtacggttgcctagagttttgtctatggcttgtgttatatcccaataagtcaaatagtaagtatttaaggtttatagttatattatggattaattaggtaataagtacgattatgatcctactagtatatcttagcaaaaattttaaatttgttataagtgagtaaataagtgtaatttacaaattacgaagatttatatagtatgtttgaatgtaatatgagctatatgtggaataaaaatattttcacgtttggcaaccttggagactctattgggagccagaaatattataacaagtttaatcgatagaattggtgggaatattgtgataagttgataatgtaggtattggggtaattaagagta

SEQ ID NO: 219473 - DNA, 5213 bp, Cannabis indica
agactggaaggatttgaaatggtgccaacaggatgcagcgaattgcgagcaatattccgagccagtattccccgcttcaatgggcaaagggaaagaaaattcaagtagaatcatttcaggcaccttactcaaggacgtggtgccctagtgggtttcttgaactggctcctcgacatgtgtgatggttggagtatgaacctgaacttgatcttctaaagaatctggggttataaattgtgaggtgcgcttcttatttgcagttgcattcctggatcttttacggggttctgcattaacccctgacaaagtttccgaggaagcaatcctcttttttcccttcttgtttgaagtgcttagcaaattttcaagatacatttctacgagacaaagagatacatcaatacttattcaaaaatacataaaaggaaaatgagaagttaattccctcttaaagaaggttaccattatcatcagatgatgaagaagggggactgtagtattcactaaattccctgaatcctgtaatcatgaatcgtaaggattaattggatctaaatcccaatctgaatcagggtggcttgccctatccaagttggtcccatactgctcggaaatcccatagtacgaactagtgcaactaagttggacacaaaaccttgggtaccaactatcaaacctatgggttatgcaatctactaagaaaggattccaagtataaaagttataatgacaatcttggaaggttactagcgaggtacattctgtcataagcacagtaggtgaccatctacattgaatacctcgagatgctccttcttcagcttctcgaggggctattctctcgagatagtgtaagcgagccacataatcctggctctctttgtcggttggaattgggaccttctctcacaaagaatacttgggaaacttgtaatccgatcgcagtctgaacggaagacctagtagaatttcacgtttctcggccatctcaggagtaggaattggtcttttcgagactgttgtcaacactttcaaggatataaatatgaaataactcaaaaccatgtttttgagacaaagattacttacatattatgcgaaatgcagttgtgttgattggggaaagaccagttgtccaaaagaaatcttccttaaaaaggggtcttgttcggtaatcctatgatgatcctacgatcatttgtatgggtcctgaggtaatagaaaccccctacacatcactttctcacaggatcaaacttaactgaataaaaataaacaaattctagggaagtgagacactcacaccaaaaaaagaagtatagaaccttcaaacttgcaagaattctgtaagaaattggattcagcttaaagggagcaactccaaggtaattacagaattctttgaagtaatctctcaggggggaggactactccggccctaatgtgctcgaggctccaagcgccgattccagccgagccactagtactagcttcaccacactcctcatgaataagtctttctggtggatagcaactatattcaccaggggcaacagatctaatgcggcatcctcgcctttgattgatgccacaagttcttaggatgccaccccacataatctcctatggctcttattcttgattcgatgagatcagcctcaaatgtgacattatggtcctggggagtcttaaatttatgaggcttggaagacataatttcaaaatcaaggtcacttggtgaaaaagcaatagtgactttcggtaaaaaataagggtttagccaaaggaatagaagataatgacaaaggtttagaccaggtcgcatctcgcaagtaacgatgtttactcttagttatctcttgtagaaaacacctatagcgactaacaacttccacatgattggtatttattaaatggtccctaatttttgcatcatttatctcaagtttggattgaggtttaaaaattttgggtttgaatgggagggctaattccttaggacactctatttctaagaattctggacaataaacttcaaaaccagattgggaaattcttacaaaagaaaaagagcaatcctaattcctggagttaatttattaaaactagaaacttataaatatgatcaacctaagttttactctgattaaacccaaaaattaaatcaaaattactaaaaccaaaaggagcaaataaagatacaattaattacaaagtaagaatcgtaattcaggtaaaagaaaggaccacagaaaaagggatgaatcactaactgtttgaagatgggtttttgcacaacaaaaagctttgcaactgaagtcgagatgagtggcatgataaattctgtgaactcctgaggatgaagaatatatccgaagaaatgcatagaaaatacgtcaatgacaaagtgggcatgcaaagctttgagaaatcagaaatggttttttgtagaaaaaacttgaaattttttgaaaagcataaatggtggaataatggttccttttcagttttataccttgagattgatcaccgttagattaaatgaacagagatccaacggatagaacaagagagaattggaaaagaagggtaattaatgctaatgatgtgcctcgaaatcatgaaccgccaaaattcgaaagcattcaatttttcaaattgagttaagacaaatatacccttgtaatcatttaaaaagacttttcactaaaaggtacttttaaggggcaattattatactcaaaattcggctacactttagagagtgacacgtgtcaattaagtagaatatgaaacaccagatataatcacgattatatcatttaattgaagaaggaaaactcattaaatatagaattaatagtgtatattcataactcactaactgtataatcttaggcgagagaaggatacacaaactattaattcctatattgacgagacaccatccagactcggaagacgtagattcaaggacaagattcaaatgaagaagtgaattcatctgaatcaaccacggacaatatatagcgaggcatccacctcgctatggataagagaatactaacgaggcaaatcattaaacacttagcgtatttttcatattataataactaagggtatcaacttgaaaatatgcaagacatgattgttcagtctgcaaggcctcatggtcgaagagcaattcttaagtttgtttagtatgatggtgctcatgccattgctggaaggcatatgattaaccaagtcagcattggtcatctataggcaaagcgagataccagggccaaaatcaacatcaaccgtttgtaaagataagaatgataagcagttatgtggttattaattgttatccacacgtggttaaatgaaacgtgatcaattcccacatttcatgaaacggttatgtaattcaaattaaaatgtaagtaactgccaacctatattcatataaataggggcaaattctatagaaaaaggaacaaaaaatctttgagggaaagattaaaattgtatattgtatgaaatattcagaaatatcttgaataagatagactcgtggagtatgcatatttaactgcaatatcacgtaaaatacttggtgttattattatatttattatattttagtaatatttattatatctgtgttagatttattacgaaaaaattcattgttggttaaccaaaatctgcgttaacaaataccaagggtaaaatggtcataacccataaaccccaagaagcaccatggtcggccagcttgtatagtgccaaggagatgaacatggctgacagcataactcaccagaaaaaggtcccaaagttcagcggagtatggcctatcaggcccactatcacccaacccgttcaaagcctcatccaagaaagggatagccctccatatacgttgagtagctgactcagcaaccttctgaccagtagctgaccccattcctctgctgggcctccgtgtaccttggccggtaggccgaatcataggttgctcggctggtgcaagccctagtagagggggatgcaatgatggtccactagcatttacaccaagggaggtcttggccaccttggccctcacacatccggtaggctcatccgaaggcccacctgcaagacctctcaacctagaagacatgtctacaaaaagaaagtagcaaagtcagaatgcaatcataaatattcaatacatgaataaaagcatggtgttattaactagcaaataccattaacatacaaagaggagttatcagagatctcaactacagccttgcccttgcccctagatctaggcacaggcgtgaaggtctatcagaaacttgacctctaggtccgatatggagggaggcatcacctactggaccctggaggccaggcacctacggagagctctctctctctccactccaaattttgtgcaatacgagacaaaggtacttcttcatcatccaagtcaaggccttgcccatctccaaggcaagccacatcagcagctggcagtcttgcaactccacgagtaggaggatacaagccatacatctggaagttgtccacactggtcaaccgaataatgttcctctactcagccgaaaaagaaagaatgtgattcgctctatcccttattttcaaagtaggcatggaacatttaaagagcggcacaaattgaaatttgtggtgctcaattttgcgaaaaccttgtgcaataaaatattttttggcgtacctgccaacctttgacatggctgcgcagttagtgtcgcctagccattggtgaccaagctggctgaaataaaaatagctggttctgctctgcttcggcccaaacttcaacttaaaatagtacccaatcttgtaaggggttggtacgggccaacctagctccctatacaagacaaacatcactaagagatacttaatgctctttggcatgagctgtgttgggcacatcccaaagtaagttgcgacgtctagaaagtagtaatggagtggcaacaatgccccatgttcaatgtagcacccagaccatgccaactaacccaaaggaggcatgtgcgccctacagtttttgcaaggaatctcgtaatggacaccccttattaggccgctagtaaagatcttatcaaaggcctcgttatctagccttatatagagtttccacaggagatttttaagatctatagaatgatagaattgctacc

SEQ ID NO: 219474 - DNA, 4584 bp, Cannabis indica
aaaactctaatcataagagaaatcataaccttaatacatctgggcaaccttcaaatttcacggcaaacacattctaatcagacaaaaaaatcatgagcctaattatttaacagaagaaagcaaagtttttttaaaaaaagttaaataacatttatcaaacacttaaagtgcacaaaccaaaatacttggaaagattaaacttttagtctgagcaagacccaaactcaaattcaatccatacttcaaatttctcagtaaacaataaaatcaaatacttacctagaagaagagacatcatagatctgacccttgatagatataagaagaggcttattagggtcagaaccattataagcgctaagttcttgatgagtaatctctcccaattgaacagaaggcttagttggggtttgatccaaaaccccattggaaaactggagttgttgttagggttagggtttagggaaacggcggcggcaactggaggtttgttgaaatcttcgggagagacgaacatggcggagacggttctgaagacgacgaggactagagctgcgatggtgaagaaggcggtgggtgaaagacctgtgtggtgtgtgatctcttccattacgattgagtaaatcgccatggattggattggattgaagatctgaagattttgagttgttgttatgtaaaatgggtttggtgagtctaaaataaataaaaaaaaaaaatgagtagatgattttatatatgtttgtagttaatgttaataattttaaattttaattataaattttattaaataacttcattaaaatgtttataagaaagagtatcaaatctctccatgataaaagagagaaataaaaatatttacgaaaataaaattaaaaatacttgtatgtgtatatatatttactacaatttttacctaacttaactaactactaactaaccaataaccattgatgacaccaaaggtaaaataatttaggtaaaaaatgtacatgttgattctgactcttagtagtttgtgtctgcttttgagaatttttttttaataatttaggattattgttagataatacactaagtatgttatttaaattttcaagtgttcataatttatgtatatcaaacgatcagctgaaaatggattagatatatatatgttttttttaaacggatgaactacttgtttaactagatgataataaataaatctacaacatatgcgtgtatgcttttagttaatgtgaataattttaaattttgaatataatttttatttactcttcgaagaacaaaaatagaagcagtagctaccacattttaaggggaacaaaactaagcacattccttggttgaatcttcaaacttactcccaactcatttttacataaatagaaaaaaattcaagcaaaattcaatattttaaccatttttcataatcaaaaccagaaaaaaggacttattattgcacagagatattgtaacatatagttacaaatatggtaaagaaattgcttggttaatacaaatagagctacattttctaaatcaaataagaatgttcaacaatggttaaatcaactagtgcttccagataaatctccagaaatagcacttccatatgatgctgaacccgtttgtgaagctgttctccgagctttctggaactgtcgtatcctgaaagcgtctctcggtaatggctggctctgaactgttctagtgtcatcgtcgtcttgtcctgtcaataaagatattttgaacaaaaccgaagtatgaaattatttgcttaacttaaaggaaaaggaaggaaacacatactgttgtcgggttctttcctttttcccctagttggtttgtatgaggaaacactcggagcagggtgggatttggttgaaccggagagatcacttgtagtaggaccaccaacaccggaagataactgctttgtggctgtccctggcctcacattctcggtttggcttctcggtatgtcactctgtaaacaaatggataatacaacatccacatttggagttggacctgaaaaattataagcacaacttaaggagtttaagtccatgaaaagtacacattttatggattttttatacaatttgttcaagaataaaaagttgaaaaatatgagaaaaaaagtaataaagtaactgattatcctaaggaggtaactgattactcattttttctcatatttttgtgaaacttcgctaaaaaaaaacctataaaaatgaaaattctcctaagctaacaaagaatttaaagcgaaatgactagaaatacactaactacaattatcaaccgaaaatgaaaagggaaaacttaattattaccctcgatagcaggcaaatttgttaaaaaggctaacaaagcaggcggtgttgatttcagtatttcatcgaagggatccgttgcttgagcttgaccactcacaattgtaacgacgggatttgacaaattgttaggaggaactccgggtactgtagtattcaaaggaactccagtccctatcgaagaacttgctttagctataacataatgcttaaaagtcaaaaactatttaaaaatttaatagcaattatgacaattacacaccgagcttttgtcgtggatcgtaggtcatcatttgagtaacatccggatatacaacattcgatgtcacgtttgcattgctaattagccctgcagtacttttatctgcaacataaagaattgagtcgaaaacaacacaagtagtgagttatgaccaagctgcatttacataaggacaagtacctatgaaccccgagccaccgagaatagtagatttatctgatttcttgttgatgttgttaacaagccactgaaaagtttgcaaagataattgagtactataattaatgataattgagtattataatttaccaaaacagaaaataaatacctcttgtctagccaaatgatccaagtcccttgttgagcagggccaaagatccataaaactgtatctcgatacaacatcctgtaacgaaccctcaaataccgatgaattctcttcacttattcccgatagcgcttctttccttctttgttcaacctataagaacgagcggtcaaatgtcaatcttattgataaagttaaatggtttacaagaagaaatgataaaagaaaatcatgctgaaacaacagaatcattgttcctacttttaacatgctagccaaatctccataagtttgttcgaaacggacaaaccttttccaaacctgaaaagggaaacacaaagagaaaatgtgaaattgaatgtgatatttctttggcttaacaagatcatgtcaagaagtacagagaaaagcataacacaaaagacatggaaatttctttgataaaggattaacagctacctcaacagaatcctcagggcgaagtgagcttagtgcacgctcaaataaagccctgatatttctatcatcattcaaacgagttaagaagtctgcatacctaccatatcgaaaaatacacaaatcattcgacatggttagatgctataagaggcttcatgttcaccaaacatagcatgaatccaaacaacaaagtaattcatttacacacttgctgaactacaagtaaaatcgctaaatatcaagttcggttaacacatgttccattttccaacaaatattgtataagtttacaaatgacaaataaaatcaaatagtgacaatgttttgggaatttttgtttataaaattaactgtttttgcttatcaatagaacacaataaaatggttatttagtcaaaaacccactcaagaatgtagactggctcctgcataaaccgtttcaatccagcttcaaaaacattgtgtgccatctgcaagggatttttaaaagaatatgaccagaatatttaagatagcctcgaataaacagtttgcatcgattttctttggaaactttaaaaaagaaaattatagatttaatttaaaaagttagataaaaacctttggatctttgtctaggcaaaaggcagtcattgcatatgccacgtagacatggtatgtacagtttggggatttccgagcatctagaaaatatttacgggctgcttcaactccctcggtcctcctaagaaagcgaataaactgccatgtaaaagtagatattcatcactgataataaacagttttcattaggtgagcaaagagaaacacaaatacaaacaatacaagctcaaaataaataaataatccacaatgaaaatggaccataatggaagaaaaaatcgtagtttttgaccatgaaaacctaaaccaaagactagctcattggaaatcctaaatcttcaaatatttgggagctttccaaatatgggttttcggttttcctatcaataatacaagtagttttgtagaagcaatagtagccctccttccaaacttatttcactttcatacaatagttggatcaaataccgtttccataacttaagcttctctctctctcagggctttccacactctcgctcgttctatcattttacaaaaaagtatggggtagtaaatcttacttgtatatgtgcaagagcagt

SEQ ID NO: 219475 - DNA, 3619 bp, Cannabis indica
atacttgttagtaaatctagatcttggtaaaatattcccaacacgtgcctcattcacttttttgccagacggttattaagacctctacttttaaaggtgaaatcattaaacaacatgtgccctctacttttagaagctaaacctttgggaaacaagtgtccatggcgtacaagtgtccctaattgtccacctgcatcttgcataagcataattgtttctagaggtcccaatggtcagctctcttttgcatgtaatttaccccattagtgggctttttgccaaaacccaaggcatttcatgggcatgtccatacccgccacatcaaacacgccctttgaggctcaaagaaaaatcttcatctcattttgcattttattatttctttagcttctaaatatttagtttccgaaaatttttgtaaacaagtttgatttcattgagttccaaagtcaaatgtcttgagtcatgattttaagtttacctctaagttttcagaaatgaatgggtatcaaacacaggtttaatatagttttttgttaactgacgaatggacaatttgagaggattactcaaataacgaaaaaacatgttgtggggatgtgtgatagaagatgaactgttatgaaataaatttattcctttgactgagttttcatttaatagtagtctgctatttgcattattcaaaactatgataggtggcatttaatgaggaagattaatctaatacttccgtaatccaagctctttgacacaacctaatcatggagaagtctccatgaatcaagaataacttagttttgaagagtacacagaagactacatggtcctaacttggcatcccgaatatagaaagcgaatgacttctcctggacccagaagagcctagttaaggaagcttttccaaaagatactcgcatgggtatcaaaaggtctaatgcagatatcaaccactttggagcattgtagatgtcgacttttctcacatgccaaatcaccaactgcctttttacacagatgaacctgcatgacttgttgagtcttctccacgaggaccattgttcaatttagactgccagctcttcttttgagagttcttcggacaacccctcaagtgattttgaagttagtagtggttctccaaaatcatagactcaacaccaccattattttgagcaaatagatggtgagttttatgatcaatccatatgggaactaaaccggaggtggaaacagttccttcccaagtcttggacttatattttccaagagggcgtgtttgacacatttcacactagacgggaaattcctgcaactagagatctttgtgcaactgaggttgtagttacctttgtcaaatattctgagccatacttaattgtggctagaatgaagcaggcgtgtcgtagagcacctctaaaggaccctcatattgctgagttgatcgcaagaggaagggtttgagatattgaggaggctgaacagcccgaggctggccagtctgaggagccttttgtagggcgacctgaagtcagccaggatgaggaacccttggttggtcaaaatgataagttaggggctgagcaggctaaacctgcagctaggccaaggactgctagggcgcaatataagccttgtgtcataatcttgggtaaaccccttggtactgataatgagactggacattcattaaatagaaagggtcaaccgtcatagcttgaggttgaccacgttgaggatgaggctcctgagccttggatccttgagtacgaggatgaggagcattgattgtctcctccattttctctgtctgttggcaagcttgaagagatcaaagcaaggggactcgttggaagggtagagtgtggtaggcctaatagggcttagctggcacaacgtccaccatccatcatgttggcatggtcaggtttccttatcgagaaagaggtgttcttgcctttgcatccctacttcaggggtatagctaacctctttaagttgtgctcaatttagatcactctaaaaggcatctagtacctttcaacactcttcgttttgtatgcggagttaggctggccacaaccttcaccttgcgaggtgagttacaattttgagctaaaattcacccttaagcagggcaggtcgggatacttttactttagctagctgggctattagtggcttggacgtaccaatgacaaggccatgtcaaaggttggaaagaacacctggagccacttcattgcttcggatgtcaaggacgtccaccattactttcaaagggtctcaacttacctttgtctacttcctatcgccacggtgagggatagagttatcatattttgtttctccctactaaaaagcgcaacatcttcaagttagcctgcgaggagattttcaaaaaatacagcatgtatccttctaaacaggatgctgagagtgttggaaaccctcctaaatgctcttgctgtaaaggaggttagcaaacagaaaaggtctaggcctggatgggaaaaggatgagtctaatgacgacatcccaatgccaaaattgctcgagatgtagctagaagggaacaagtccttcaaaattgcgtgatacggggaggcacagttagcgataccatcgtctagttaaacctaaaacacaggagtatgctagacctatctaggcaacacctgcgtctaaagacaaaggcaatgatgagtggtttttggaaaacactcctgacggtagtagtttttttacttttacttgcatttagtacttataacttgtattctaactttgttattttctcttttacagatatgggatctaggatgagagacatgctgaagaggtcttcagtcagtccttattcaagtcactcccaagccaaggtggccagaataggtgggtcttctaatgtgacacaatccaacctatctcctcctccttcaagtcttccactggccaaccagcctgtggttttggatcttcaattgaaaactactcctcctcctcctcagggatcgttaggcaaggctatcaagaagcatggccaggcaacctacttgagcaaaggagagaagaccaaggaagtcactcaaaactacctaggtcagtgtctgccaagtgtggatgactagctttagaagctagatgtcgaaacgttagattacttgacgacaaacacccttagagatgttacctatgtatgttgttttagtacttgtctcacttttacccttcatacaacttttctaactttgtttcctcttaattttgggccatgttacagagtccataaagcctactttggaggccccatccatcccagatgatactattgctcagagctagtttgaactcgcctactcctcccattattcatgaggatatatgaagactcatgtttatctcatgctttttttgcgcatttgtttttcttctagtatcgcctttaggccctttactttcaaatagatgatatttttattcttagatggccttagggccctttacttttaaacaatgttcgtgtatggcctgagggccttttacttttgaatagatgactggctaggcagtctttaatcctagctttaacttcttttgttagacatgtagctgacca

SEQ ID NO: 219476 - DNA, 1520 bp, Cannabis indica
cactataattatgaataaatatgtattttagatttaatagaatttatatattagatataaaatcacgtaaataaatatgtaaactatgcaattgataaagtgaaaatatgatttctgatctttattaaattaaaataatattaaattgaatttaaattttatttatgacatcaaacccaacaagtataatcgaattgcaaacagacaagaagaccacacaaaagggaagaagcctccgccacatgaagctcaagcaatacttgtataagggaagcaagtgagcataagatttcaccatttgacgagacaacactacccccattctgatcttccaccgctcaacacaagtaccatcatcgacaaaaaaattaaactcatccaaattaaatttagggaccaccactacaacaaatgcgacttttggcagtgcatttggctaaatgcgccagtaaaagttaacgacataaaggggctgaaagaagagccaaggcatttagccaaaacttttatctgtgcaatagtgcatcgacaaaagttatttacgccggtgcatttagtgaattgtaccgacaaagcaagaaaataaaccaccacatggcgtgaatagtttcctttggttcatagacctttgtcagtttacttatgcgccgaaaaaaatcctaaacaaaaggagaaattttttaccacattcaaataattgttttattgggggggaaaatagtttaccaaaattttttacatatttttaggggtacttttttttacttttttggtgcaattatgcgctgcaaaagttaccaaaagggggcgggggagaattccccacgcggtaaaagtggtgggtgggaagactttgtcggcccacttttgcaccgacaaaggtcttcccaaaagttattgcgcgaaacttttgtcagtgcattattgtgctagaaaaagttcttttagctgtggattataagatttaggaccatagtttacactggtatttagtttatccgaacgcaaaatagtgcctggacaaggtagttttgccagcgcaaatatgaattgcaccggcaaaagctcttttatcgatcgatattcgtagacagctttcagtgacacatttagtatgattttactagtgcaataatgcttcgacaaatgccatattttttgtagtacaccctccttctgttactagagttagtcagagacaaactcacagaaattagtagatcaaagtaatattagacttcatgataatgccataaaaagctaaaagcctaacttcttatcatatcatcattaatcaacttattttcatgcacaaaggtaataatatgatagcaaatcctccaacaaagagttagaaattatttaacttctcttgtggaaagaatatccattacaccagccaaaaactcataaaaataagaagatatcttcaaactatccaaacctcacacatgaccataaatcatgtaatgtagtttcattattctggaagcagataagacataccttagaggtattca

SEQ ID NO: 219477 - DNA, 3896 bp, Cannabis indica
tgtgagatataagtattttttttattattatttattttagatttttaatagccaacagcacataaaatatgttaatggactaacctgtctataatatactgtagtcgaagcattaaaaaccattgcattgttggataccaaatatacatcatgctgaacatcaatgaaataagaaaatgatcttaaaagggttgcaagaaaatttatttagaactcagaactactgatttcaacatctaaatttaatatttttcaaatatgtatgtaatttaaactttggaaagtaaaaaactcctttaatgacagactcttaagtagaaagctgcaataagttgagcaaacctcaaatgcatctattgacttgtagcttccaccattaagttttctagaaatggttccaaaatccattggctcttttatggtatcataatatccatcaaccttttcaaattcaacattaaaaactattatgaactataataataacaagaattaagatagagcaacaaatataaagtcacaagatattgacctcatttgggtttactggctctgcaaatatttcaaaagagtccctcctgcaatttaagcaaacgaaaatctaatttgtcatagtgataaagaaaaatttagccattagaagaatactatagcaatttatgtcctaatctaattaattagaagcacaaaccacaagtcgcaataaaacattgtttgaaatttacctcttcaaaatactcagcaatagttcaagcttgctttttttggatacaacaatttcaggtccagctgatgtagcagctgataatttgaaaagaaaaaatattacatattttgtgaggatcgattttattataaatgattacataatatataatgtttcaatacacatcttagaccaaaaaataaaataaatgtaagaggttaccgaaatttgtatgatggtcttcattgccagattttccaacctgtatcaaatctaaattaagacatttacaacaatgaaacctgaaacatagttgtagcaaacttaccccacaaacgcaattaaaattttttagggattaattggaaaaggaagctaattctcatgagattgaaacgcttgtacatattcataactaaataaaaaatgataacattgacatttctaatgagtattatggtaactattatttaataccatttattcgtttaagaacttaaaattgtattttagaagtaatgagaacgtcacaattctaatgaaatgatctttcattaatgtttatctaacacaacaagtagaaagttcttagttcttagttcaagtattaggaatactagttttcacatacattttaacatagaactaatttttaaaacatatatttatatatatacatgcttagcatatgcctatctaacccataaaataagtataatatgtaaataagtcagagagaaaaaaatattaatacaatagaatataagtttacaatatcacaatctgacttggaaatttcagttttttatcgctcaataaagaagtgtatgaattttgtggtccaatatgatgtagtcaaagttaagacacatcaaacaattaccagtggcgtacacaaaaataaatcatactttcaatgtgctatatttaaaactgattatcaaaaacaacagataaacttttactttctacaacatgcttaaaagaaaaagattttaccaattactacttaaggttgtgctagaaatgaatcaatgatttaaagaattaaaataaacataaaaggcatcttctaaacctgatatgtagctgtgtccataatcaaatcttggatagatctagtcttgaccttttttttcctcgattaaggttgaagtctctatgtccagtacttgaatcctttattgttgtctcacatgtcttcttacccttattttgaatattttcttgttcagcccttcgcacattgagttcatatattcgtgcacttcttctacgctcactagttgacattaattctataatttttggagcaaataaacagcagaactacctttgtcaacatcagtaaatgctctgttattgttttataaaattaaatcaagttaaaaaaatcgcctttcgaaagaacttaactaaatcaataatctatttatgagcaatgaatctaacaaaaatcaaaagcaaacaaggccgttagcaaatgattgtagcaagcaatagtcaatacacacacaagccgaagctataaagatctgtaaagaaaatttatcattttttcttttccaatacatttcatcggtgatccttatatgctaatagtattgatacactgctttggatattttggctcatttgcagacaattacatggcataaaatgaaaagatactcaatcaagaaaagaaaagaatagaatagaacattaccgaagatatccttgacgaaggtgaacaagagcttacaaaagctgcgcctcttaaaatgaaaaacaaaactccatcggtgttgccctattgaagggcttgagctttttgaaggctctgtacaaagtattttaataaattgcacccatttaaggaaatcttggtggatttccatagaggagaatgaaaattattgtccgttatggtgctcaaatgcacaatgcgcttgtattgacaattgtgcgccgggtgaattaatgttgcatcacatctggcaagaaaatactaggcaaattagatcattgagattaaaagataggaattttaatgaaaataaattcattctatatcacatagaagtgaaactcaaatgaaaaaaaaaacatatatatgaaataactttgctctaaaacatgtaatatattgtaaaaaaatgagcaattaattatccttccacttaattccgttgtgtatgcacctactaaaaaaaattcacttaacaacttaaagaaattagaagaacttttgatgaaatgtatagtttataagtatatgattaattttaacaaacaaaaaaaaatcttattcccctgtaagtcatatgttaaatatagtcaatataaaaaaactacatattatatatatttcaatgcttatgctaaattgttgtactgaaactagaaaatcaaacactttacatataataagatggtaaactagttagtatttctcaataaaatacattgcttcttcataaactaatttgtatttcattccaccatttatgtatgtgttccatgaatgtaattattctaaaatctttgaacttgcaaacttattttactaattatgaccttagaatttacctaaacaacaatgagatatacaatgaacaaaggagaaaaatcttcaaaattcacaaggcaataaaacaaatcgtacaagtttttttcttttcttttcctgatgggttgaaaaaaaaataagccaatattaagagataaagtgctttacttgtatagcatattgtcaagcagatacacaattatatttaaaacttgaataatagagttattgcattcaaacctgaaattgtttgaaataagccaacaagtatcgctgtgcgtagagacgaaaatttgaagatgattattttccacaatatattggtagaagcccattgtggataatttgttgcatccaacactactgtaaaatcaggagagaaaataaacattataaagctgcataaatattgtaaaaatgaaagaaaacaatttcttagtttgaaagttgtacctcccaaattgactatctcattgataagaaaaacaacaaaattatgagacctaaaagcctcatagaactggtcaattagtttctgtagttggaaagagttattgaccttggaaaacccaatacgcattagggtattttgtcttgtgacttcaaaaacaagtttccccatcacttgaagaagaagga

SEQ ID NO: 219478 - DNA, 4627 bp, Cannabis indica
taaccgtcgttaactgacaaaccaacgaagttctgagaaaaagaaaacatttcaaatggctcaggaacagatatttaggatgtcaaagcaaaagagcaaacattagggaaaaattaaaaggattctagtatatatatagaaccttttcattatcgtggccggtaagggttaagctgcaagcatttgcagaatgacttctctttagatcccatagctttaacgtgttgtcggtggaggcagaaacaagggtatctgagtccaagaatttcacatagcttacagctttgtcgtgaccagccaatacacaccacggtgttttagcatatcttagatcgtaacagtaggttctgtaatctgcagacccgaaagccagtaagtgggtcgaatgagcagagaactggacacagcagacatttgcaaggctcctaatcgttcctaaacagtttttctgcacataaataaatatgtatctttttattaaggtaagaaaagaaaaaagtgacaaagtatagcaggcatatttggccacaacagtatcctaatacattttttccattaaaggtctattcgtataatcatgttaaaggactccagtaaaaacattttctaattcctgaagaatatatcatacaaacacaaaatttcattaggtgctaaaatttactttggtgtgaaagaaaaagatccaaaggcgatgaactttatccttgtttgttgacaccttactaattaaataaactagatgcctcattacataaacatctctctatctcacctctctctcacacacacataaagagagagaaagagaaagcaataatatatatatatatagagagagagagagcatacctcattgatgctccacagtttcacacagcaatcatcacttccactggctaattttgtggggtatactttcgaaaagtcgacggaccatgctctcttctcatgctcattgaattgagagaaaacctgaccagtactagcatcccataactgaaaattcaagccaactatttcatgagaaagttacaagcattactaagcaaaaacaaatttgttaaatccccacactataatatctaaaagaagaagaaacaaaaacacacaaacatccgctctttacttgaacacccttaaaatattacctccgggtgtgagtgtgtgtgtgtatgtgcagtaacattaactcataattatagcacaagatatacaaaccttgactgcaccgtcataatcagaagaagccatatagtttttgatgtagtggttccaggaaacacagctgatctttgatttgtttgacatctcaatcactggataatgaatatcaacagaatcgctaaggagagcattaaactcaaatatctttattttctttgaaactccagcagctgcaaagtagtcttcatccctgtcgaaactcaaggagcatatcacattcaaagcattactaaattccccatttctcaagactccacgcacttcaaaattactgtaacgggcatacttgcacaacccatcaaaaaagtctcccaggcggtcagttgaacttggattctgctcctcttcatctttttgtgccaaatgccaattatcccgatttttcaataactcattatcttcgcgcaatgctgcatcagtctcgggaagctgaacattggacctcatagagaagtatgcattttcaagctgactaatatttttcatcaatcttgattcacttgtgttagaaagtggggacaattgaaaaagtttatctgaactggaagactctctgtgagtaaatacattttgccttccgtgcacaaaagagtcaacaagcaaacaagaatgagccaagtgttctttggaagggtttcttctcacgatttcttcaatatctccttctaagcactgtatgctttccactaacttagaggcatccttctgcttctgtacttgtaatgactcgaggaaatgcaataataattctgattcgccatcatcctgctcaatagctaaagacaactcctctgaacatggttcctgcaatcccttaactacttcagattgcaggatttccctgtagtcaaaagcaacaaccaatgactgagaacattgtacccaaatttaccacatgtccaagacttccaaaacataaggaaacaaaaaaataaataaataaatagcagaagcacaggaattgacagccaaactgcatattaacagaacaagaatccagttacacaggtcaagaggtttgcaatttgcattatcgttcatgagtgaccatagtagggcaattttgaagactagtttccgaaacagaggactaactgttgcacacctgaaatatatccttaatgacctgagagtatggtttacttttagtagcaaccagaaagcacatattgacattcaccatgttatggaattggggattggtgggtatagaaaagttagttctcatatagtcatattctacaaagagtcatctatatatgtgatgcaaattttgacgatttatcagatcacaatactcagagatgaggaaccaacttatgaggattctaatatcctgcaaattaccatagcctaattgttaacaaagccatttcagaagctcatatcacagaaaaggaatttagtaatattatcaatcaaaattattttctaatacatcaagaatattcaccaaggcaatatgccttagcaaatcttaagagtttttttaagaaaatatacacatctcatctcatatgaaacagctactatttcccatcttcaaatttatcatagacaagaatttagaccttgttgttgggcgtgatgatggttcgggatgaagtagccatagacagaatccagcttccttgggattttctgaaagaaaacttggaggaagaatcctataccgcaaatccgacatagctgtggccagtgtgctatccgaatcaaaatgaccaagtaactgaaagatatggcccaattaaaccctcagggaaaaaactaatggaaaataagtacagtagaataaaacagttctcttagttgcttctctgaaattggaaacattcacaatgtagaaaaaagagatatcaagaataaggataaaaagtaaacaaatgacatggctgcttcctgaaatgtgaagctctataaaagattcaattcttattgaaatcaggaagaaaaaaatgttcagtgatgtttttaacccgctcaaagtgcaaaaaagatgtctacaaccataaaattgagggggaaaattcaatctccgataaaataaataaataaaagctggaatttatataacactgcaacaataatgtgattatgcagtacctctatacttcacataaaatgaaagaatctaagtgtgcatctatacttcacattatcagcaggatatagatggtaggtgcaaccaagtgtgcatctaagtgcctgcgcctgtacatgtcaaccatgcttcaattgaagagaaaaaaatttgctgtgtgacaatttccatacctcaaacaaaaaaacacccaaagagtagatatttgataacattttgcagctcctctcagtcagttcctcgggacttctataccacttctcttccaactgctcacttgcatatgtcatctgttctcttgcattagaggttggggggctactaggcttgctttccgttccatgttttgtgactaattcacctgattcactataggtaattttttgctctgtaatgctaatgtgactggcatttgcattttcttgcttaaagcctgaatttgaaggaaactggggccactgtttaagacctcttgcattctgaatgaacttttgtttctttgcacttgaaacaattccaattgaggcaaaattattctgctccactggcctcttcttcctatgcaaacttttctcagagtgagaaggatcttgatcatttgcactctgtaatatctctttcctgtcaggtgatccaacatacttgaccttaactgaaggcaacaacttgaaataagatggacttaggttctgcaaggcaactccctcagagtgagaatgatctacaagttccacaatctgtcgaaaaatatacaggcgctcccctttgttaactttagagcccccaaccttgagccattctctcaaattgactccactacaatcagaaccaccagccctagacctagttttcaactcataggaaggtggattaacaattttggaatccagaccctttgatgtgtcaggagctgccacacttccaataccaagcctggatttactctttactctaggctcaggatgaaaggcaacttttggcgggcctttacatattacccccttgcctttcaaggtacttttcacaaaaaactccgaaaaatccagatttagatagaatctttgttcggatagaacccgaacccggagcattatctaatatcaccctattttcagaatttctaggttcctccacaacttcattgtggttatcatcacatgccttttgtgccagaaagtcgttgaaagatgagtaacccgcatcatccaaaccgcttgtggttctcttgccgttatccctatatgcaacatttgattgtgaacttccactgcctgaaccacttcctaattggtatagatg

SEQ ID NO: 219479 - DNA, 2556 bp, Cannabis indica
tcggattggggaggtgaatatcgtaagttggcaccattcttagaatccattggagttcactttagacatccatcccctcacacacatgctcaaaatggcaagtccgagaggaaacaccaacacatcattgaaatgggtctcactttactatcccaagcttccatgcctttgagatattggtgggatgcatttagcacagccacctatctcataaaccatttaaccactccaactctagcacataagtcccccattgagacattgtttaaagtcacaccaaatctgaaatttctcaaaatatttggatgtgcgtgctttcctcacttacgtgcgtacaacaatcacaaattagattttagatcttcaaaatgtgtgttcctaggatatagtcctaaccacaaaggttacaaatgtctccatccaagtggtagaatatacatagcacatagtgtctcattcaatgagcttgaatttcccttctctactggttttggacagtccacaaaccagtccccttcctcaccaatcatccaatacagtcattggcttcctttcatctcatctcctattttttcggacaatgatagtgatgatgcatctgatttctcatctaatattgctccttgtgttgcaggctccacggcatctcctcactctcccacatccgaatgtgcatctaccaactctcagcatgaacattccaccacatctcagtcatatgaaaccgttcctcctgccatacaccttcccattcaacccctttcacccacatccacgtccagccactcacatacacctgttacaccagcaaacacatcacctcatcaacccgtgccttgtcctattccagcaccaacacttccctcacatcccatggttactcgctcaaaagctggcatcttcaaaccccgaacctttctcacatccctccttcaaaatcctcatcttccagccctctctctctccactcccgctaccccagaaatagccttaactatcccagcctggaaaaactgccatggatgatgagtactttgcgctaaaaagaacaagacatggtaccttgttccccacttacctcatatgcatgttgttgacaataagtggatttttcgtcacaaattcaactccgatgggtctcatcaacgatgcaaagctcgccttgttgccaaaggctttcaacaacaaccgggtgtggatttctttgacactttcagcccggttgtcaagccatccaccattcgtgtcattctctcccttgctgtcaccaatgattgggatgttcaacaaattgacatcaacaatgccttcctcaatggcaccttggaggaagaagtttatatgtcccaaccaacgggctatgttgatcctgacttccctacagccgtgtgtaagctcaatcgcgccatttacggtctcaaacaagccccgagggcatggtttgacactcttcgcacaacccttcttagccttggattgcaaaactcagtttcggacacttctcttttctacttggctgaaggtgatgctcggctctatgtcctagtgtatgttgacgatattttgcttaccggcaacaactccaaccgtgttcttcacatcatttctcagctgaaccaacaattttctctcaaaacgctgggctcagtcacttattttcttggttttgagacaagtagggggcaagatggacttcacttatctcaaaccaaatactctcttgaccttctcaaaagaacacacatgttggaagccaaaccaagtcctactcctatgattcaaagcaacaagcttcatcttcaagacagtccaccatttgaagacataacccaatatagaagcatcattggggcgctgcaatacctgacattaagtagacccgacattgccttctccgtcaacaaactaagccaattcctccaagctcctacccaaaatcattggcttgcttgcaagcgcatactaagatacattgctggaagcattggcgaaggcattcaattcaccaaagcaaccaatccagtcatagaaagcttttgtgattcggacttggccagttctatagacgatcgaaaatccacctcgggcatatgtgtgtattttggaggaaatctcattagctggagctcaagaaaacaaaaagcagttgctcgatcgagcacggaagccgaatatagatccttagctcaagcgtgcacagaagtcacctggctacaatccctctttgatgaaattggaatagagcacaaccgcacggctgtaatctggtgcgacaactccggggcaagacaactcgcatctaatcctgtgtttcactcacgaaccaaacacatcgaaatcgatgtccacttcattcgagacaaagtcatggataagtcggttgaagtaaggtacataccatctgaagaacaaatagctgatatattgaccaagtcactaccaatcacaacctttcattacctcaaagacaagcttactgtttgtcactcaccacagcaaagcttgagggggcatgttgaaatgaaaggcccaaagtcagcccaattagaagatgaa

SEQ ID NO: 219480 - DNA, 5383 bp, Cannabis indica
cacacacacacacacacactagtgtatagtaaaccgtacttagtagttccatattaaagatttcgttactttaatatactaccgactagttttattcatatcgtataatcttaattctcttgtacatccttataagattatacattctctatatgaataaggaattttaagatatttatttctacttttataattaacgtattcatttatcttataattatattttatatattttatgatatattattcattaattatattattcattaattacttacttttagggcataaatcccaacacggggtctgagtccgctcctgtttgggtatgaggtccgggtctgagtccatgtttggggtctgggttcgaaagctagtctggggtcagggtccaggttcgaggtccagagtctaggtccgagtttgatttgggtttgggtttaggtttgggtctcgagtctcaaatccaggtcaaagattggggttgactctgaatcctttgtaaatattataatacaatctaatacagaccatatgttatgtattaaataatacaatttacattgcattaaattttttggttgtaataattaatacaatatatttctttatccaaatatagacaatacaatccttatatggcatagcaaacaaacttaaaagatatattaccgtaaagctgattagaattttttctattaatgtattgttgaaaagagcccttaactttttatgtacaatattttgcaacaaaacatataaaaaagtgaagtattaactaatttgagttaaaaataacacattgcatcatcatattaatcaaaaataattttgattcaataattattaaaaaattaattaaatatttttgaaaatataaaataattaaaaagttttaaactaagctaaaaatcaaaattttattattaaatcaagaaaaaatatcaaaaattagaaattatatttgcattaattttttatttatttattttaaggtgataaattatatacattttttatacatataaatgtgatttttgtttaaattttagattttaatgatattttaattaatatttagatatattttaattaactcttataataataattgattaaaattttttttggactaatataatgctatcatctgttattttttttttatgaaacctaacacttgacttaataattagtaaaatttaacaaaattttcactgtaaataattttgctaacaaatactttatgtataagaagttttacaaaatgaatcaattagaaagtttcgccactattatttcttataacataaattggacatgcaatgattttttttttttttttgaatatcataattttattaaccatcaaactcagctgccaaaacaagtagcaaattagttggaacatactccaatctaaaattacaattcggatacaataagaaaactctaataaagttatgaggcaccttattagctgatcgtttataaaatagacagaaacatatcttaactcttttaataaagttttacaaacattaaccattttactcaacttgtaaacgtaacgactgaactacgtaaggcttgtacaatagataaatagccagtttcaaggattgtttgctgcaaccgattctttttgatccagctcagtgcttttttgacccctaatgcttcaacaaattctggtgttgccggccattaaaaaatttggtaccaccttctaacaacatgccttatgcatcttgagccacataacctaccccatattggttagtctcgataaacatagcaacatcaacattaaccttaatgctatctctttgtggtggctgccattgctcagctccgtcacctggtaagaaaccaggacctaagaattccaaatctaaattatgagtaattaaccattaattaaggtaacttctagttgacaacactatattctccacacttaccactttgttttgccaaagcttatcatttctaggatttttaaatagcccaacaaagagctaccaataattttttcatgtccgaattaagcaccaaaaaatttccacgcaccagtccaaaaatgaggaatttgactgcaatattgtactgattccaactttgtcccaacagagcttagtagcgggacaagtaacaagagcatggagtatggattcaccctctaggttacaaactggacagtgagaagtaacctccacacgtttagactgaagttggacgatggtagggagacatcctcttccagcactccattacagaattttcatttttggtggaagttttaaaccccaaaaattcttccaaaacctatcaattgctgtctcatcatgaatattatcaccataaaaacattgtgctggtttgtaagcacttttgatagtgtataaacaaataatttcacctgtccatgtaagagggtcacgcccacactccaactgaactggtgtttagaggatcaatctcgatcacgttggtcaaaaaaattgccaaaagttcttcatcccaacctaaaccatcaatggaaaaaaattgcaaacctttgcaccaataggaccatgatgcaatgaagtcatcatggggttcacaggaacgagtaaccaaggttcacccaaaactacgatgcctgtgccatccataacagaccaacaaacccctttagccaccaattgtcgagcttcacgaatactacgccggaccaagcttggattggatccaatatcaactgtaaaaaatgagccttctaggtaatacctgtctttaaaaacacgagacactagagattcaagtttggagagaagtcgccaaccttgtttgcccaaaagagctaaattaaaatctctcaaattacgaaagcccataccacccttcgacttgtgtttttacatagtcacttctaagacatccaatggatatctttggtagaactattagaagattgccaccaaaaatttgacatcaagctttgtatatttcttgtaatttcatgtgaaagcaaaaacacactcatggcgtagcttgggaacgcttgagccacagttttgatcaaaatctccttacctgctcgtgatagaaacttagttccccaactaagaagtcttttcgtcaccttttcctttagaaaacccaagacatcaaatttattacgacccatagagctaggcaaacccaagtacacactacattcagtagtagtaaccatgcccaacaaaaaaacagtcctatctttcatagtgattaaggtatttgaactataaaagatacaagattttaaaaagattaaccttttgtcctgaatctatttcaaaattttgtagaacttcttgaatctgaaaggcctaagtttctatagctttgcaatataactaactatcgtctacaaagagcatgtgggagattcttggagcgccattcgccactttacaaccataaagccaacctcgttgttcatatttacgaagcaaagttgagaatccttcagcacacaaaatcaataggtaaggtgaaaacagatctccttgacggatacccctagttataatgattggacagacttcataattaccatgaattacacgatctctcactgatggagttttctgaccagtgggcaatgtatcgggcacaccgtcttagacaatgtaagtccatgaactagggatgaattgcctccacccttgggtcagctcctagacaaatcagccataaaattcactgcttatttgctccgaatagcagtgatgttggacttcaagatctagggaaccacttgtaacctcgagatcactcgagtaactacttgaagaactagctagacaatggtctttaaagagaaggctaagcaaatcttcatctatctgattatcacctccccaaaagtcacatgcgggttcatctgcatacaaaagacaagggtaggtgagcaactggataaagtaaaaatacttagacaaaatacaggtcagcaaatcctaagggtatactagccatacacttctattgtacaaagttgggaattagtaaagtacgagttaattccatttgcaagaacttggatgaacatttagtcttaagttgattacttgactacaatagattcgccttgagaattaccatacaaaattctcgaggggatcaagtatttgacaagggttgatcaagcttataaggccgtagtaaagtccttgctagagtcaaaaaagtatagaaaattggccatcaccttgggaccaaagccatgtgtcagccaagatcccaaggaattaatgtgtgtcggctagggtccttaacccatgcaagaactggccagggttccaagcttaagcctagaaccgaccagcttccccagatggcaccatgtgctggctaggtctcaaataaggccctataggcttgccaaggtgtgcaatggatcaaaaaaattatttttcaaagactcgaatgtgttcttcgtgactcaaagagtcaaaaatcaaaacaaagctcaaaaattgaatctttttcatcagaaaatcatgcattatgaatcctaaagctatcatgcagatcataatgcaaaaaagattacaatctaacgtgagaatcaatattgtaaaaaccttgaaaaggcttaacacaacaatggtagatttaggataacaaatagagagtgatatttgaaagcttacccactaatgaagtccactaaggatgcctgtggaaagcttggatcatcaaaacggagcaaaaatctcgtgatgtggagacttggtggcgtcgggttcttagggaaatgtagagccttttttctttcttctcagtaggaatttgaaaagagagtgagagaggaaatagtaatgtgggaatgaggcatggccaagtgaaccttatataggtctatttttgtgggctgttggattgattttgcaactgagaatgagccattgtccgtccagggtgaaagctacggaaacaccaattgtggctttcataagagaagctggccggcctaccccttattatgggttggtcggcacatgatactccttggctgactaggggtggtgttacgaaaattatgaacaatacgcaagtgcacgtaatcaagtagtaaactcacgcaggtgaggttgaaccacatggaattgaactgaataccactaaattagacttgtgattgtatttggtagataaataattttgatagattttgaaataaagaaaaacaagaaaattaaagaaagcaataaaggtgtttaatcaaggatgagaaattagggaaaagaatcatgttgatttagttacccaattgttaatgctaattactattcctatttctttatgtgaatgacagattataaaattaacctaactcttttcagatctt

SEQ ID NO: 219481 - DNA, 6068 bp, Cannabis indica
ttttttttttaattttactaatggaagtgtgatgtagatcaaagtttaagggacacgattcagtacgtatcaaatctcgagggatataatttagtagatatctaagttcgaagatataattttgtacttaaacaattgtcacattagtaaaattgaataaaattaaacagaatttcttaaatctaacaatttcaataactcaaggagaatttttaactaaggcaaaatttagtacatgtcgaaatttagagggtaaaaattctaattaaccttaaaaattgttactatttttttgtcaaaactttattaattatattgtccaattataggggacgattttaaactgtcgggaatactaaatttttctcgacggttttaaatagttacttaatttttttagcgacggtgtccgaaaaaaattgtttttaagaccgtcgcgaattttgatatttgtagtagtggtctcaatttcacacgaacatgccagcaccctaaacgaaatatcgggtctcacatattaatatttgaattatacgaaacccactactacttaattggaataataataaaacacgctctctaagaatgttgggcatcataacgtcttatagcaatgctcataacaatcaagggagttcgcaactcatattcatatacatattaattattattattcatgtatcaattgtaataaataagagtaagtgaagttgtaacaagtaagttattcataggattctttaaagaaaatgaaataaataataatacaagcaatggaaacaaagagaatgaaaatatcaatggttagagcagtcattgcctgatcactaagagccatgttctttccaccaagacgatcaactacgtcagggacaggttcgtagttgctcaaatcttgttcgtaaggatcttccaacttcattctcaacttctcggcttgtcggcttgctgcctcttgagcaagcgtccagtcatagaaccggcgactctcatcgttgctcagtacatcatacacttctctcagcctcaagaacttttctgatgcggcttttagaggaagagcggttgtgtctggatggtattcttttgataaccttctgtaagctcctttgatctcttctaagtctgcttctgatgatactcctaagaatctgcataacagctaacccaaccgtcatcactacgtatagtttatagtactaaaaataagaatttacacacttatttttacacatgtataaaacaaaaacaaaaacagtgcaactgtttgaactttatttttaacgaataaatataattaataatttaaatttcagttggtcatggtaagtacgacccccgagccctggactctggccccgacccatgcccatgtcaggcaccgaacctcaaccacagaccccaaccgcaaccccaactctgactttactatattacaatctaagtttataaatatcacaatacgggcttatatcccttttcttatgtattccatgctataggttgtattaaaattaagtgtcgtaataattaatacaatacaacttatatttcaaatataataatttactaatttaatacaataccaaagacttataagatttcacacaagtactatgtgcaagccaatgttaacaatgaatattctcttaatttgtatagctctgattacgtttcctttttattctctaaacaaaatagtgaaaagatatgtttatatgtatgagaactcactggtaatgggaatcagtagagtcattgatcaaatcagaaaacttctcccctaagagattcctctgctgatcttctgaactcgttgattcccaagaagtaccggtggcgccaccaacccaaccttcctcttggttgtcccaatggattctagtgtcaactccaggcggcgctctcccccgttgttggggccttgtgacactgcgcatacccgaaaaccaacacgcccacttgctctccttcttgatgatgttattgatctcccaagtgacaaagagtataaagcttgaaaagcactagctgttgtggaagccatggactagacacagattatcttacagacactctctgctgcagtggttcaaaatttaaacagagtaagctttcattgtattactattccaaatattttacaaggacatatatatatgcactacagtgatgtatggtattcaaataacaatataacatcttcatagtttagttgagtagaaaatgaattgagttgttataacttttcactcaaaacttagatataaaaacttaagttcaacaaataaacttctccatatgataaatccatacaaacttatagctgttacaaacagagcttctatcatccccttcaaaatttatatacataaacagattatatggtgttattaacaaatcaatctaattgtgttttgtgtgaacaaatgaagtattataccaaattgaaattagttttttcacacttattggagtaagctaaaaaaaaccacacaaaattcaacatttacagttgattgaggaattttatcaaacagttcatatgcaaaaacaaaacccagaacataagtaaaccaattcaatcaaaaagttcaaacttatcaataagaaacatcacctaattaaatgaacattcttttctttttttagtgatacctgtgataaaggcaatggaccacgcagtcaagagggccgccggcaagtgtccatctgctacagcccaaatgtatataatatatgtgtgtgtggctatatgtatcggagcagcaccaccacacaaaatttggatattaaatattataattatgtctttattgtcaaattatttatttaattttttattttaacgtattttgttattatttttttaaaaaaataatttgtgatttaaatatttaaatttagttaaatttaatttttgatagtaaagatgattgtctcaagcctgagagaggcttaaggaaaaaattgaaacgaaactttttttcatatttaaatttgatagaatatgagttcgatatttaattaattaaggacgtttataattactaataataaatgtttagtcaataatttaaattatttataccgcataattttatataatatattaatattaattactctaaaaaatttatattattattattagagcgaaatgctaaagggcactagtggtgcctagcaccctcttatgtgtcaataatcgatattagtccaattaagtatcgggtcccatataatttaatataatagcttttagggagtatcgctagttaatcgcaacgcaacatgtcgagaaagtgctaggcacgactagtgcctaatagaaatgctaaagggcaccagtggtgcctagcaccctcctatgtgtcaatatcactattggtccaactaagtatcggatctcatataatttaatatactagcttttaaggagtatcgctagccaatcataacgtgacatgtcgagaagatggtagacaccacgggtgcctaatagcaatgctccgatttattgtatattatatgtttctttactaatatttatatatggttgtccgtgttgtctagtatttatatataaaaaatttttgaattttaaaaagataaaagattaccctttaacaatggtaatttagttaaattttagcatttcaattacattttctaattacgtaaataaaataaaataatttcgatttatttttagataatttaataaataacataataaaatattatcttcgattattttatattttaaacttatttattttttattaaatattatgattctagataccgtataaatatagtaaacgtgtcgcttaagttaaaaagaaactaactatgaaattgaaaggttaaaaaactaagaaaatgtaaagttacatatgaaccggtcaatattattccccccaactccacatctctttgtcatccatcttaattaggtctaatcccatccattcatccattatcatagtggtagtggttagttgttgctgtaattggacactaataaaatcatattttgactttaaagagctagtgagtttttcttgtcatctcatatatgaacacattgacttgaaagaaaggaagatatatagcataatatataaagggaaatattggtctctaccaaattacaaatataatttagttacaaaaaaaaaacataagaccatacatacatggattttctttcattattagttttgatgtttttaacacttattgtactactctctcatgctcaacaaccttcttgctatgatgaagagaggaatgctttgattcatttcaaccaaagttttaaaatagattgtgataaggttagatcaccttattctgatcttattctccatccaaagacattatcttggggatcgaatggtactaattgttgctcatgggagggtgttgaatgtgacatgttgaccggtcgtgtcattagccttaacctcagtagttcttgtctctacggttcaatccattccaatagcactctctttcaacttgttcatcttcaggagctcgatcttcattataataacttcactttctctcctattcctaatgctataggcatattttcggagttgaaaattctcaacttgcgatcttctttctttcaaggtcagattccattagaattttcgcttttgtctaagttgtcttttcttgacttgtcatataatgttggtggtaatgatccattacttgtgaagcttttgaaacttaaaaatcccaatcttagaagcctagtcaaaaacttaacttccttagatactctttttataaattatgtggatataggttatgaactaggtgatgttttggcaaatttgacttctttgagagttcttggtctagggaattgtgggttgtatgggcctattccatcttcacttggtaaattaaccaaacttaatgctctaaatctcaaagaaaatgatttcattggtaccatcccatcttctattcagaatctcacacagctttttttcgtaagactaccaagtaaccagatttccgggccaacttccttcttggtttgtaaatcttactaaattaacatacatgaactttgatttcaaccatttgagtggttcgtttccaccatcattgtttcaactcaatcgtctcgaaacactctcgcttcagggtaacgatttaaccggacgttgcagttggattcttttcttaaactgagaatatcatgatcatcgatctaagtcacaataaaatttcgttacacgttgaagaaacaaaaaaaggatctcctaacacaacactttcaaatttaaaatatctatcgctggcttcgtgcaacttaagtaagtttcctgaatttattgctcatcaaactaatcttcacttattggaccttgcatataatagtctatttggtcaaattccccaaaatctaatgaactcaagcattcatagcttggaagggatatatttatccaacaacttgataacagggtttcataaccatacaaccattctaccttggtctagtctgcatttgttagaattgcaagataacttgttccaaggacaactaccgatcccgccatcatctgtcatacattatgatgtctctaataatattctcagtggtgaaattccctcagtgatatgcaatttgagttcaattttagttcttgatttgtcaaataataacttgagcggagacttcccactttgttcgggcaatgggattagtgattctttgttagttttgaatttaaaaaacaactcttttcatggcaccgttcctcttcaatgtcagcatgaaagtgagttgaggatggcagatttcagtaacaatcgttttcaaggaaaacttcaacgaccactcacaacttgtatgaatcttgagtatcttgatttctctttcaatcaactcagtgatgtgtttcccagttggttagggagttttccacggttaaaagttattttgatgagggaaaacaaatttcatggagttatagggaaacctcaaaacactacgagtgagtttcagatgctgcaaattattgatatgtctc

SEQ ID NO: 219482 - DNA, 1419 bp, Cannabis indica
tttccgtacggttaaaatcattttgaaataaaataaaatcaaaataagggctgttttgctttagcaaaataaagtcatttgaaaattatatttcatgtagttgagatttatttattttgaagtaaaatgatactatatactatagctactattacgttgtatagtagctggtattgatgctaaaaattagctcaacaacaaactaatattacgacataaaattctttataccatatataatctaattgaataataattttttgttagtttacacaatctcctttctacatgaatattctcttgttctctaatctcagttcaaaagggtttcgatgatgtatttcaatgaaattttgatttgtctgatgtgagtaagaatacgtgtatctttttgaatgatggggtctcctatttataggtagcaataactgttggtccttcgtgcgtcttttgttcggattggcctacgtggattcgttcctcatgcgtttttactgttggttctccttatccaagctcttcatatactctgtctcacaatcaatccagctctgctctactttcttatctagctctgctcttctagttctacattttttctttttaagtgagacagtacatttaattattcatgccatatcactttattattttttcaatcaacttataataaataaaattacctttttattcctaagatttttttatcatacacaattttctctcgattctcagtttttgggctcgtgagtgatttagttcagctcagatatcgttgaaccggttacccaaaataattctcatacgtgtcattaataagtcgtaactgatttaatgggcatgtcatttcaaatttttggaaaattgtccgtgccctttcttattaccctgattttttcatttaagtttgttatctgtgttttcggatagaggacacgtgaaattccaagatggtttcagttcaattgttctaggtggatatccattagggaagtcaagtcttccggatgcaatgctagacaaacgactcatccagacgagatacatctccatatagtgtatctctagataacttcgaataaatttttcgaatgagtaattaattggtatctagatatctagttccgtatcatagtaatttaatgccaaattccataataccaggactttatttataggatcacatccaaaattcttatcttccaaataatgaaataaagtaattggcaatcatgcattaatgtgtctttattatctgcaaaagtaggacacaggttgacaattatcaacgtgatcatgtagcctccatgttagtagaagatcagaacctcacgactcggtctcactaaatcggcccaaatgtcattagggatgaacatattgaccgggtttgaaccggacctggccaacccgcccaga

SEQ ID NO: 219483 - DNA, 3513 bp, Cannabis indica
ttcgttttagttattatttttacaatattatatatatttctttattggagctctagttcgatgaatttgttttgcgggcttctgaaaacagggaaatgtgggaacagtcaatgaaaggtctgtcgagtttaattaggaggacaacaccatcatcttttacatatatttgtgagaagaatggagagtctttaaatgacaaggtgtgttttagtatactacttatagtagaaactatgccaggataacagtaatacaataatatttaaacttccttcttttttttcttcaactaattatttgcagatggatgagttagcatgctttgcgccaggaatgctggctttgggatcaactggctatggtcctgaagaatctcaaaagatgctatcacttgctgaagaggtgcttaatcatactataaatgagttgatttatttattttttacttgcatatttatgtctctgattccttgacatttgtattaaaatgttcagcaacttatgagagttaatgaaaatctaagttaaggttcataaaattgatcttgagaaagcatttgatcatgagtgttgagaattccttggttttcttatacaaaagatagattttgccaatacgtggatcaaagccttgagagatcattggttcattgaggcgtttgaagcgagtggttcctgtttatgtttctcttttcctttttaacttctgttgttaatcttttttggggggatggtttagtaatctgtaacggtcggttttagatcactcatttgcagtttttaatgatacttctatttcaaaagaaaattacataaattcttttgttctaaagatcatctgtgatgttggattaagtacaaaagaggctgttttactaagttttgtcaccaattcgggattttgtattcactcttgctctttgaattgtttaagcatattctattgaaagagaagcatttagatttttaggaaccggttgaactaactatatggcttagtcacttagaaaggacttgatctaaattctctaagctcagacttagaaaacgataagaaatcttgtgaagtggtcaggaggggtgctggtgatcatgtggcagctcaggatttggtttgaatgttgtaaaaaatccagcaaggacacatgactttttatatcgaaatggttgtggtcctttagtcgaacccaaccacttgagctagccttaagtagctagagtgaggcaagtccaggggggttttatcgtcaagtttctaggatgttgggtggtagattctgttgtattagttaattataaagcttgtaattttctaacagttcctcttatggcagttttgaattactgatgtttctttctttctcttttttttgtcattcgacagcttgcttggacatgctataatttctaccagtcaacaccaacaaagctagccggtgaaaattatttctttcatgctgggcaggttagttatcccgtctatttatgtgttttatttctttctttctcttccattgttcgatttttatgtttgattataaaataaaattcaggacatgagtgtgggtacatcgtggaacatattgagacctgaaactgttgaatcactcttttacttatggcgtataactggtaacaagacataccaggaatggggttggaacatattccaagcatttgaaaagaactcccgcgtagaatcaggatacgtcggactgaaagatgtatgtacctcttcactcccatcgctaatcgctcaaaatccttattcaagctttcttttgcttttattttgtagcgaagcctcagtctcatttcgataacttgttccggtttattatcatcaggtaaattctggtgtgaaagacaacatgatgcagagcttctttcttgctgagaccctcaagtatctctatcttcttttctcaccttcttcggtgatacccttagatcaatgggtgttcaacaccgaagctcaccccttaaaaatcgttgccagacatgacgacaacagtggaaacgatcttaaatcctccacaggtgggcaacaaaggccaaagattaagttacgtagcaggaaggagggtcgaccgtgagtatgagctaagtagggggggctttattcgagtgcttattgtttcaggttgaatccgttcgatttcatgaaagattggaaaatgatagtagctcatgaaaatcggatgtttgagcgattcccttacgaaataatgggggctcgggctttggctctggcgatttcatttcatttttcgtaaccgggaaaggttgcatggcatccttgttcctttatagtaagtaaagaaagaaaaaaagaaacatgtatgctactcttgttaactcattatgcatatgtaacataggtaatattaattcttttttctttggcatcctcttttgggtattttggtttttggggaaaaaacatttttgtttcctattttgatacttgtttattatgccttttctttttcctttctatttgtaatttttggttggaattttgaacaaatggaaagagcatacgaattgaattaattattattattatgttatggatttgttttaacatcatatattatatatctataggaaatttgtagttgaaattaacaatgattgtggtaattttagttaatgcaaaccaaaaacttaacaaacaatagaattgtactattacattttttggttgtatgattaagtagtgaatttatataatttaagaaagatttataattgttaaaatgtattattagtatttaatatttaatcttatataattttaaaaaaataatttttagaatatatagctaactaattgtttagtactacttataaaaaaatattgagcatcactagttctcaatagcaatattctttaaaaaaaatattttaaaaaatattattaattaatcgtagagtaccacttgtaaagagtgtcgagttcgattagccaattatttattaataatgtaaaattggtatcttggtggcttctattatttgtcaattctcatcttcttcttctttattccatgccctctaaatctaattatattcttggaaatatctggattcttccagaaatatctattgagcatctatgtttaaagataccctatatctaataaatgtgctcactttaaatgggatttggaccaacatatccttcactctctagattctaaatgatttttctaaaataatgaaaagagtaatattataataagagtaataatgcatgcaccaatctagatattatatattgttaaatgtagtcctactatattattgtgtatattgtttaagaaatgcacccttcattactcaattaatatttatctcaaattttcatctagtcttaaagttaaaatagagccctttttttaatgttaatttctatttttttagttaaaaaattaaaatagaaaatcatttttattaggggtttttttatttttacacttcaaaacagtttttttttttttgtatttt

SEQ ID NO: 219484 - DNA, 3024 bp, Cannabis indica
tagtactaatataaatgtgatacgtgtaacataaacagttacggtagcggttaatcggatgagattagccgccaaaaattctaatttaattaaccaataagcaatgtttagtagcactcttgttgtccattaattagttttgaaaacttgatgatgattagggtcatccaatattgtctagctagtcacaatttccatcatcatcatcgttgcacttgaataatacatgtaaattgccaactatatattatatatcgtttattaaaaaaagaataatatgatatgtccacacaaattatacacaaaattgatatgtgaatacttatataacaaatcacttttaattagaggaattcatctccaaaaaaaaaatcttttgctcaataaaaagtttcttctccatttcttcagttttaataattatggagaccacgtgtcaattacaaaggtctaaaacttcatccaatcttaatttgatcatcattttgcacttcaaaagttctcatcccattgagaatggtaccgccacatcaagttagcctcccaaaaggtcaagcataatccctctcaattacaagctattaataagattctaactcttggccctaacaaaaaaaagatatcagtaaaaacattccttccactacaccacaattcgtctcaaataaagattattggtttaacttattgttactctaaaaaaagtagaaaaaaagcactaattctaggttaaatgtaccaagaagaaataagggtatataattagtaatgaaattcatgtatatatactaatatcattattaattattgagagagtcatgatcttaccctttaaaaaggacaagtgaagaaaggcaccaccaaaatttgaagcattagtttgtgggagaataatataatatatatataattttttttttaaaaaaaaaaaaaaaaaaaccctaccaaacagcatggatgtagataatgttttccatatgactggaggaactggccatactagctatacaaataattcctctcttcaggtcaagctcaaatcttctctctcaatttttatttttctcatatatatatttatatatatttacaagattttgtttttgtttatgtttttatgtagaagaaggcatcagatatggtgaaacatataaccctagaaacagtggaagaagtttatctgaaaacaactccaaaagtgttgggaatagctgatctgggctgttcttctggaccaaacaccttatctattatcaaagatatagttgaaactgttcaaacgacaagtcgtatgatcaatatggtttcaccaccacagtttcaagtttacctaaatgatcttccaacaaatgacttcaactccatctttaagtctttaccagatttctcaaaacaattaacacaccatattccttctatcttcataggagcttatcctggctccttctatggaagactctttcccaataactgccttcactttgtctattcttcctatagtttgcactggctctctaaggtataattatatacatctatatattatatagttatatgtatatctgtattgtttcatattttgttgatatgataatgttgtatgtaataggttcctccaggtttgtatgatgagaaaggaatgtctataaacaaaggaagcatttacatctgtgaaagtagcccaaaagggatttcagaagcctatttgaagcaatttaagaaggatttgtcattgttccttggatcaagatctgaagaagtaatccaaggtggaagaatggtgctaatatttttgggaagagaagaacatgatcatcatcttgatagaggcaactctttcttttggcaactcttatctcgctctttttccattttagtatccaaggtacacgcgctaataagaatagaataaataagtgcatgtttggcatcataactagaaaacagttttttgtttttaaaaacagaaaattgtttttaaaaacagtttggcttgtttggccttgttttttaaaaacagttttcagaaaacaaagttacaaaaaacaagaattttgaaaacaacaaaatgttgttttctgttttaaaaactaattcacttttggtcaatgttgtttttaaaaatcactaaccaaacgtgacgtgtgttttaaaaactttaaaaactattttttgttctcatttctaaaaacaattttttaaaacaaaaaacagaaaacaataccaaacatgctctaagatttttgtcctctcgaactattattattatcaaatcgtgcacttatattttgaaaaaaaaaaataagtagtaataattttgtgacaaatcctaattagtttagtaattttagcttgtgaagtaagtaaacatttcaccaatttattatgtacatattttgtgatatagggtgtagttgaggaagagaaggttgattcttatgatgtgcatttttatgcaccatcaaaagatgaaattgaagaagaagtgagaagagagggttctttcgaattgacactattagacatgttcgaaatagagaagaatagtaataattataatgagatgagccaaggaagaaccattgcaatgacagtaagggctatacaagaatcaatgattgctcagcattttggagaagacattttggatactttgtttgaaatttatgcaaacatgatagatcaagaaattgctaaacaagatattaggcctatcacttttcttgctgttcttaaaaaattgtgaactattattgtgatgaatttcaaagtgaaaaaagtttagaaatattaatgtaatgaaagtgccttttttttctttttcttttttttttttagaaatgaaattgcgcatgcgtagtactccttaatggagggccagttagtgtgaattattgggtctaaaagccttacatctgttctgtctagttatccaaactaggggttcataccaacatgacaacatataataatagtatatatgacatgttagatcgaaagcatttgtctcaaaaagtaataatg

SEQ ID NO: 219485 - DNA, 5134 bp, Cannabis indica
tgaagtaatgaggaagacaatggtaaaaacccttcttatattgaaagatggggaaccgttgatctggttctaaattgtatcaaatggtcggacatctttccaggaaaaatgaaaagacatgtaaaatacccgccatatgaagggacatttaattaaaggattaattaacttttctcgcgaaaaataaaattgccaaagaaatgtactcattaccaattaaggaaagaccaaattatcccaactaggatcttttaaagaaactcttccacttctacaaagagcttttcaggggcaattgttatgctcatattttgagccataaatatggacaagacatgtgggtattttcctcgaatattaaaagatgatcatgattacaacgactatcctgcatcgagagaaacaaccataaatagatatcagccttgtgctatgctacgatatcactaacatataacaacgataaagtacacagtattgtaagatatcaacttcctaaagtcatcttggagctaaccgagatcactcgaaagcatgcaagaactgaaacaatgtcactggaaatggtagataacaagttctttaagagcttgcaacttattgacccacatactcgtgagtatgttgaaagactaagggaaatatacaaaatgtgacttatctaaggattcttaacagactaatcttaggagttgacataaaaggcaacaacgaggacaaacatcctaactagtgtctcgcagaatacgaccactcattcccaaacatgtttgaagaatgcgtgctatattttaaatatattatctcaacgacgaaaactatttcctaataataacaaaaacagttttcaacaattattctattttatctacatgtttaaatatgaaacgtgggggttattcacgttttatgagcggttacctagataagattcaaagagaaataactgcctctctaaaaaaacctataaatagggacagaaccttaggggaaagggattgatcatttttggaataaaaggaccttataagattgagtgaatattcatagtaattctctcgtaatctatacatatcattaggaaatattcaaaaataacaatgactcgtggagtatgtagattttaactactaaaccatgtaaaattcttagtgtttcatacataaaccatcaattttttatttacaagacttcatttattgttagcaaaaatttgagttaacaattataatattatacttaaaactactaaaacattaaaaattaatattatatataattttatttatagggtgcgatataaaagtttgagtatttataagtaaatattcaaattataatgatgctaataattttttttatataattatctataaaatattgtttaagagttatataaatataactaaaactgtaaaatgtacatattctttagtaataaagcacgaatttaagcttaagatatgaaaatagactcacctgtttgagaaatacatgctcacacaaccaaacttgtgctagagttatccattaaagatattgacacaacacaacacgactcatatttttttatagcacgatacaatacgattcgatttattttttaaaaaatacgaattaaataatataaatcgagccagcacaaaacttataaatttcttacatgactaatcataaatacactaaagtagggtctatgtaaaaggtgtctattgtagacattccctaaaatatttatatatattttacatggtggtagtaatgtcaacagcaaataacaaattcaaaccctaggaacaaaattgccggaagaaaatgataaaatactaaccgttttgattccaaattaaataataaataaataatcactgttaataatgactacacatgtatgcactgacaaaatgaagtttattttaataaaataatatatatatatatatatatattacatacaaattatttgttgttttttttttaaaattatttgttgtttgttgttgggttacataaaaatgtcttctttttttttgtgaaactaattaaggttgcctttttatttcactttgtttaacttttaattagatgcaaagacaaagaaagctatgtacattgaatggttaattgatgacttcaattttgattaaatacaaaacaaaattgggacactatcaccagacacgtccattgtacattgtatgtgaactatttaagtttattagattctctcaatggagagaaacaatcatcacgtgtattctagagaattttaaaggaaaacaaataattcaatttttcttatctaccaaacatcattttcttggattatcttttaatttgttaggtgaagattaaaatattcaaaccatttcaagtaaggaaaaaaaaaagatattacttctgtgttgtgatattttgatctgtaaacagctaggtagtattaaaagaagaagaataaaaataattaagttcacacttcacacatcaaaatctataaatgggtcctaaaagtggcccgttaaaccaaaccttatacaaaaataacacattttattattacttattacaaatattgatatattttcccctttaagggagacaatttactctcaagatttgtattataaaactttacaaaaatgtaacattttattattattccaccttgaaggagacaatttactctcaagactcttattataaaacctaacagcttagactatatatactttcaagatcttgttttagtaatactatatatagtatttgcagattagtaattaggacataatatttttaagccattggattaatatagaatataatactataaatggtgacataataatgtctctgacttagtcttttcatatcaattatttaataacaatagcatgtgttagttaatgcattggggataattttagttatattggctacgacatccaaggaaccttaatataacatataaatataaacaattataacacaaataaatttggttcatgaagattcaaatagcaagctagtgacattatgattgacttattctcttttaattagtaagataatgtatagataacttactattaaaaaaatactacattatatcaaatgagcttcatctacatccacttgtcaataatatggtgttaataaaaatacaggacaaatcacagtgttcatagatcatattaaaaatataaaacctaatattatataatatatatatataaactaccttgaaaagagttatcttcaagtggttggtattgataatatctgcaattatttaggctatggacaaatagcttggagaattaatagatagatagtaatttccttttatattgttttggtattaaaaactgaagttaaaatatgaaataacaagagcactccctctaatggtgggatgaactaaggtggatttggttgtgaagaatgaaaatataagaataggaatgagaatgagaatgagaatcggaataggaatggaatagaatagaataaaatttaaaatgtataaaaaaattgataaaaaagaattattaaatttttcaaatctggcattggaatggtctttttttctatttcaaaatgaaatagttattccaccaaagtagtaaaaaagtcattccaccaaaatagtgaaaaagttattgcattggaatgatattctaatattttaaaatgcaatcaaataaagaaatagaataaaaattatttttttttcattccattatattttattacctccaaccaaacatcacattataaaaaaaattaataaaaaaaaaaaccaaacgccacctaaggataaatttttgttttgtgttttctttggcttattttgtgtccctttaaacttgttttgtgtttttttaagattgccaagcttgtttagtatcattgttatagttagatattctacgacttttaattttatatttataagatctcaaatttatggctttaaaaagtattttctatgagtcggatattttgacacaaaacaaaattgagacgagcatgatccaaaaaaaaaaaaaatagatttagacacgacaatacacaacacgtacaatattataaaaattaatcaagctatgcaagtgtacatagtcgcaatttataataaatattgataagacgaagtatcatctcataaaaattgattatcaattaccagttaactaaattttttgtttctattaattaaataaaattttagaagttttaacaagaaaaataacaagcctcaaaagcaataaaaaaaatcaagaaaataataatgagcaattgattacaacacacaactttcatttaatgcaaaatattttgtcggcgagcttaatgttactgacaaaactttttcatctaatttttcgctcacgtttttattgtgcggaaattaaaccgccaaaaattttacaatttttgtcagcgtatttacttgacgacaaaagtgaaattaaactaccaaatatttattaacttttgtcggagcacatattttcatcggcaaaagtgaaattgaatcgccaaaagttgcctcttttcttttggcagttgatttaccaccttttgccaaagaaactactttacttcgcggtataagtcacttatgccgatgaagtaactcgctggtatagaagtttcccaaagtggagaataatttgccaccttttgccagcagggttaataaattgcgccgacaaaagtcaacttttgtcagtgcatttcatgaaatgtgccagcaaaagctctttaatttcttatagtgagagtgtacacgtaaacaatccattttgaaagttaactgagataaatagatatcaccttaaatttactaacggttcagtagctggaagagtttaactgctaaaaacccttaaaagaataggtcatatttttaaaaattagtaaaaaaaatatatatttcaattttatttttattttgtttggacttctaaattgagtagaccctaaacacatacgaccttgcaagaagaagggtgaccctttcaaaaaaaaaatcaatgcaatattttattcaccttttaaaaataaggtatattaattaaaaacgagaatatagttatttttttatatattcttcaccaattttttt

SEQ ID NO: 219486 - DNA, 3703 bp, Cannabis indica
tctctataaaattccataaaataatttcttcttttagagaaagaaaagttagtgggtatggtatctaggcccaattttagcccacccaaggcccagtcaacatatgccatgttgttgtccatggataacaaggcctaatcaatgaggattgaagacaacaatttgcaaattattaacatggaaaagaaaaggacatttttttatgttctttttatgataagagtacaaaataagtactatgagagagagagagagattgaagaatattcacatgggatctttattatccattatatctgttccttcttatccagtgtggtacacctcagctaccattcagtggggcttgtcaaaattaatcaagtttcttataatattatgtaatatataaattaaaaatttataataaacctaaaaatttttcatttaatttttttaatgataacgtgtgttataatttttaagaactaactgtaaatttaaatttttttttttgaatattttataatatcgaatatctatttttagtattataaattatttaaaatttataaataattacaatatatataatcgtaaacaaatattagactaaaaatgtcttgtgatattgataaaaaaatatatggaaacgatactctcaagggtgtaatataaattttactcaatatcataaaagcatgttttacaatatcactatccaattttgaagtttcattacaatagttctcaaacccaaaccaaagaaaaatccacacatcattacaatttacaaatactaagagtcaaaatatgagcacccacaaattaataattacacccaaatattttttaaaccaatcacatttacttaaattagaactcactcattgtcaagtcactatgtataaaaattaattaattaatgggtttaatttgtggatagatactcatatcatttatcgtaccaaaataacaacaacaataaaaacaaaacaaacaaaagaacaaaaaaaaccaaatttattacactcctttggttcttcttcaagggaaataataaagcctcaaaataaaactacataacagagtagaataacaaagtcatatatagatatagtctcataattataagtaactagcataattatatttacaccttacaagataaccatggttgctatgcaatgcaaagatctcaaactaccaaagtagttgttaaaaaccaaatctttgaatgtagaatcatggtgttaaaaattcaaatgctgaacaagtagcatcagtagtagttcttcatagaaaaataatatagtagatagatagtactagggtactgctggttccaaaagctctcaatttaagtcaataaaaaagtaaaagtttttttttttttaatgaaagagaggcattttttgactcatatattgatactattgacagaagcagcttcaggatggtaatgaagcatttcactccacatcatttcccttatcattggttccatcaaattctcatctatatcaaggctgattggtacctgggcaggagggtttcgtctcgaatcgtatagtcctgacatgtaagggtgttgaagtgcttctgtaacagtgatcctctttgttggatcaaacacaagcattctctctagcaaatctattgctaatggatcagcatggggatatagcctggaaaaatgtgtccccctagaataaggcagggattttatgaactttctggcctttggattatcaataaactcgatatctgtttcacgctggctgccaagaacattgatgattagtttaagctggttgaggcattcagttccgggaaagattggttttctaccaaggatttcagcaaatatgcatcctacagaccagacatcaatggatgttccatagttgtcacaacagagaagtagctcgggtgcacgataccagcgagtcacaacatattctgtcatgaattgcccatttcctctactggttctcgctagaccaaaatcgcatatctttaggtcacaattagcattgacaaggaggttcccgggcttcaagtctcggtgaagaatgtttgcagagtgaagatacttgagcccacgaagcaactgcacaacagtgaaacattcataagtaatggcactgaaaattgcatcaatccactggaaacagtacttaaaagaactgtaaaacacacaggcatatatatagtataaacttgatattcaatcttgtacctgaaataaaaagtatttgcagtgatcactagaaagcggttgtgaggacttaataatttgatggaggtcagtatccatgagctcataaaccagataaacatctttgaaagttgctctatgaataggcatcataacatcctttaaagcaatcacattctcatgtcgaatatgcctaagaagcttcaactccctcagagtcctcagggcatctacgcggttctcaaacacgttgttgatcttcttaattgcaactttctcgttcgtttccctattgatcgacgagcacaccacgccataggcacctctccctattggtttgataggaacatacttggtgtcaatctcaaacaaagtttgccacattgagtagtaatgctttccttgttgcctaactccattagggggatcaaccaaagttgccattttccctacaaatcaccaaaatcaatcaacacccatttaagattaaatcacaagaaaaataattacaacaacataagttttacaacatacacttgttcaaagcttattaaactatgagcaacacaacccagttatacaatgagttaaaactaagaaaaagttaagaggaatgtacagagtatataaaagatgtgctgttaagactttagaatcaatccttacttgccaattctacttctgggttatgatcttctccctgtaaggttattctctacactttcttctcccctcttttttaaatagtaaaattcccacttttatgcctttttcccttagacttctctctctccttttcctcactttgttcacttatgaccaccctctcatatacttaatcctcttccttaaaaaacctctcaaattcagttcacacacaaagctaatttattgaacctcaacaaaacaacaatcttttcctctagattcttacaactccttaattcttctccttatctcaaaattaagccaagaatcaaacttttactctgttccaagtaaaagattccttcaaaaacaaaaccaagcaaaacccatctttccaaaaataaagctcagtactttcaccctccaattaaaagaaaagaaaaaataaatttttgcagaaaccccaaaaaggaaaaaagaaagagaaagagactaacctcaataattgacaaccaacatgaataatcagaaaaatctgagataatagaaggcaaatttcatcaatatcctttatctgaaacaggtctgtgcaatcagatcacgaaagaaaaaagcttaatgaatccttcaaatcgtcttgaacagaaaaaaacttaggcgatacccaccattaaagatacaaactttaagaaaacccaatacttaaaatgagaaaaatggaaacgggtttggggagaatggggcaggagatcatgagccaaacccacccatgacactacccacacggcttcgtaagctaccccaaatatacagaaacgacagctatggattcttttctttctcttcttttctttt

SEQ ID NO: 219487 - DNA, 5016 bp, Cannabis indica
agctattactcctatgagagtattgcaagatcctcttattggatcagaatgtagagagatgtttgcagaaggggaagtggatgataggttcttgatgattttgtttctaacagtagagcgcctacgtaaaaattcttcatggaaaccgtatgtttagcattaaatttgttaaatttctgtgacttatttactctagttggtcaaatttgatgttttagtgaaatatcaggtactttgatatgctaccaatcagttttggtaatccactttggtttagcgatgacgagatttctgagctgaaggggacaacattgtatcgagcaactgttttgcaggtatcagatccacaagttgatcatttcgtacttttcttcttttcgatgggcattcgaggaaattcactgagaaatgattcttccagtcacagaaaatagtctagattgtgtttcacggatgcatgatgtacccaaatgtattaaactgttaatttcatgcattcagcccatctcatggtttgatgtctgtaatacataatagtgtctagaggcagcgtcatagaacctaaacattgatttgccaatggaagttgtatcgattctctttccgctcatttggcttttctatgtgttgaacattttaatgttttccagtgagtgtgtagtctgtcttcatttgcagtatgcatgacaaaaaatatatttatcttacagagaaaaaatttgctgtctttgtatgaagacaaagtcaagagtttggtggagaaacttttgactcttgatggaggttcagacaggtgtgtagaagtagaaatttttttcttttaattcctcttccccttcccctatatatccgtttcatttcttccctctctttatgacatacgaaaatcatcatcgttaattagtttttgaaactcagtttttgtgtttgttattgtctgtattactgttaaggtgaattgtgggactcagctcatgaataaattgaagatcaaaaaattcattgtgaaaattataaaggattgctaaatacttacacataactttctgcttctttgcagagaggtctgctttgaagatttcctatggtaagtatcttattcttagtgtagttcacaataataattgattaacatgaagtcttgcttttgttatgcaattgtaatgtagggcaaactctgtattttgggcacggggtttgaacattcctcttccacgttcatatgtatttccacaaattcaaggaacaaaagatgatagctcttcaactgaaaaaagttctgagatttcccccaaaattttcagtggagagttggctaaaggagtggatgagaaaggtgaagtcatgtttatccctgcctatatttatgaaatgaatctttgggatttaattgttacaggttttctaatctggcttttcttgaattcaaaatgttgcttctcaatgcaggattgcaggctcatgggcttaacagtcaagtgaatgaagagacagccagttcaacacaaggggagactctctgggttgagggtcttgttcctggcattgacttttgcaaccatggtatctatttgtattctgtgaagtctattaagtcttatatgatccataattggttttacagttttactttttattccatagtaatgtgctgtttaaaatccattttgtataaaccttgtccttgatattgttgcaaaatcctagctgaatttgttgtatttcattcatcttgctgaagttcttgttgtgcagatttaaagccagcagcaacatgggaaattgatggaactggttcaataactggtgttcctttctccatgtatcttctttccggtatgtcatcttttcccacagataaatttttgtcagttgtcaacattatctagtatggtgcaattgaggttcaggagtattactatttaaataaatagtagctgtatgacttttcatgacaatcatttttaattctttttacctccatggggaagctggacaaagttctcttcagatcaacaaagaaattaccataagctatggaaacaaaggaaatgaggtactaactactagcaattgtcatctaggggaatgacattttgtaataccattaccattattaatctcttttatgactgtactctgcattatctaaattctctggtatcgcttgctttagcttcctccagctataacataaatatgttctttataacagttgtcgcttttggtacaatccttagtaatgactttcctgcccttagggcaacattaaaaatgtactgatttcctccggtttgcccaagattatgttacaaaagcaatcccatggcatagttctaaataatattttgtagtaaaaacgattctatctgtttctggttgttactatcttttcttttcaagtcttttgttgtcaagtactgtatggttttgcaatgttatgacgcattgacatgtctagaattgtctatccagtgaatggttgtttctgtgcaggagctactctatttgtatgggttcattattgaaaataatccagatgactatctcatggtaatgccttgccaatatgtggattacaactacataatttggttacctggaaggaatcaaataatagaaaaatagctaatgggatgattatatggtcaggttcactatcctgtagaagcaattcagggtgttcctttctctgattcgaaagcacagctccttgaagcacaggtttgcttgttgtctggtttctaaatttctgtttaatatttcacgttatctatgtagtaggaaaccataaatgcaatacattttttttatcatatgccctgtacatcctttttctctttccctttttcccctcaaaaaggaaagattatacaaagattaattgtttcacagaacgctgaaatgaggtgtcttctacccaaaagtttgctggatcatggatttttcccagaaggtgttcagaaaggagaagatgagaaatgcaaacgtgaccatgtttgcagctacagctggagtggacaacgcaagatgccatcatatctagacaatttgatattcccagataattttctgagtgtcttgaggactatagccatgcaggaagatgagctttataaagtttcaactatgctggaagaggtagtttttttcaagctacttctttgctttattgaagcacatagcaacatgttgtttcattttcactcttgctaattgtttgtgaaatagagcagctaatgatgtttctttttaagcaacttatttttggtttcatttcttgttttccctaagtcttgaaaatggttgaatgtttcatttttgcttaaagcttgttggaaccgaaggggagaggcaaccaactgatacagaagtccgagctgcagtgtgggaggcttgtggtgattctggagctttccaacttcttgttgatcttttgaatatgaggtaatcttcttgttcaattatgctgatacgagtagaactcatgtttttcaatcgccatgttgcttttccttgatctgtgtatgccaggatgactgaacttgaagaacattctggaacggaggactctgacacagatttactcaaaagggcagatctcactgaagctgcagattcgctgcttgtagtaaaggatgacaaatcagggtaccgtttcctccttctattgttattcctccttctattgttattcctccttgaattggagtccttagactaatttgcattacatagcaaattgattcgcatagtatatattagtaccctaaatgtagatacggtagtagcaaagatacttacttggacacaattagaggatgagaaaataactttgagctgaaagaaatctgtattgaagatgagaattcggttcccaaagccttgtttggattctaatttacaaagaaagaaatttaaggaaaatattgagaaaactgttttcttaaattttctcaataacttttttttcgtaatatctttctcttttttataaaatattttcatggtttttctaaattttctaaattattttatatttagattattattatttattttctttagaagagaacaattggggggcctatgaagtattaatatgtttcttatatgaatactagttagtttgcaattggttgaagtaaaggaatacagtacactgctgtatggattttctatgattttcagccgaagatgccctttatttagtctaatttgtttattgtggatgcagtgaagaagatgataaatctacagaacgttacttggttagtagacacaagtggtcgtgtatagtatatcgacgaggccaaaagcaactcactcgtctttttttgagagaagccgagtatgccttgcgattagctcttagcgaaggcaactgaacttagcattttaaccttattacacattaaaaaaaaaactatagaggcaaattttcagtgccaattttgctggcaaattttcagtgccaattttgctctgattgcagcttttgttatttttcttaagacttagttcaatagcgtaatatttttcttaagctgagtcagttcaggcggtaccgagttcaaaattgagcgtacacacctgtacatctttaaacaataccattcaattttctggttgctaatttaaattagaaagagagaaccataatagatttatgattttcgtcccaaaagcagtgcctgtccctgacatatatgttaacacaacacaagagaaagcatatgtgtcccggaaggggcgttggaaaaatcggaatgtctgctactcttggtccagcaatgttgttcttgttttgagactttttttgggtgtaactatataggggttatgtttctgtgtccaggcctgctatgctcctcagtatccaccccaaagcataagcagcgccagcagcaatagcaccagtaaatagagtcgtgaaagcagataatgcatagttttggcctgcaatctttgccttggccactccaagaaatgccaaggcgagcgcagaaagtaaac

SEQ ID NO: 219488 - DNA, 2819 bp, Cannabis indica
agaaatttctatataaaattctataaaaatgcaaaaaaaaaaatgtttggaagtgtaaaaataagaaagacctaaaaaaaaattaaataaataaatataatagtaaaacaacacaatttccacacattgaagataagataaactttgaagtaacaacacattcaagcgacctctgctcagaggcagaggtttaattattacagtactattacacatttccacataatgagagactctatattttaattacgtttcaccgtacaaattaaaatacatatattattcaataatttgactttcattttaatcaagcctgagtatcatcatcagggtagcgatataactgaaaagaatgattaacagcagtgaaaccaccatcaacaacgagattaactccactcacacaacgtccctcgtcactagccaaaaacagagcagcattagcaatatcttcagccttaagcaccacattctttaagttacccgctttgataaacatgtcctcaaactcttcatcattaaccatacaaaactccgtagccaacggcgtggccaccccagatggggacacgcaattcactcttatcccaaactgtcccaactctgcagcagtgctcttagtcaatccaactaccgcatgcttggctgttgtgtatgcgtgtgtggctaagcccccaacgcaagaggcaacactagccgttgatatgatgctgcccccagttttagctgagatcatagcattggcagcgtgcttaatcccaaggtagacgcctgtgacatccacccgaagcacgcgctcgaaatcggacaatttgctgttcattattttaggattgggctcatcacaaatgccagcgttgttgaacattatgtctaattttccgtaggtgctaatggctttgtcaactgcggctttgatttgagattcgttggttacatcgcagtggatgtaagtgacgtcgttttgggaagtagagtaggatgctgcgatagattggcaaactgaatggcctagatcgtcttggagatccgctatgacaactttggctccatggtaggcaaacacttcggctgtttttcttcctagtccactggctcctcctgtgatcagagctaccttaccttctaacctataattaaatttgtattaatgtataaggcgttagaaacataatcaatatttatataaaaaaaaaagaataaaaaaaaaacatatgaaattaaaacacatgaatattaatatattatacctttttgaggctgctgaaattagtgccatgttgcttattgagagagagggtaggtggtgagaaaagagtttatatatggttaagtactctcggagacttgattgttaatgttatgatcgatgattataagttgtggatgtatttatagtaaaattgttgggtattaatataaatatatatattcaagggttatttttattgtaatatgatggttacattataatataggttcccaataaagtaaaattttcttttttaaaattaaattaattatttttaaatatttaataaattattttaacaattaatattaataattttacttttatatttaagtatctattataatttttttaatagttaaactatttaatttaatatttataataaaattatatgattttataaaaatcaagcttccaccctttttaaaataaatttttgaataattaatcacgaaattcaaaaataatacaaaatattagaatatgagaattcgtggtttatatattatatctaaactcttatttcatctttatatcttcaagttacatattttccgagacaacttgaaaataatcaataacttcatatatgtatattttatcaataacacatattcgagatcaataattaaccagtaaatgatgtactaacttttgttgacgatatatagtcataatcaataataatcaataacattcgttgctaagtttatcaagaacacatgttcaagatcgatccataaccaataataattaataactttttaaattttcaataatacatattcaagagcaataatcaataataattattaagatcaacaactgataataattagtaaattgtgtactaattattaatattaggtggcccaataaaattttatcacgtgtatacttgcgtacacagtggcaggtctatgtggcacttaatagccaaaaattaacagaatgagtgctgacgaaaacgattgtggagtttggacagtttagccctaattttttcagtaagggggttaatccgtaacgaacctcaaagtatagggagtttgaccgtaaattaccttaattattagaaatttaatttttaatataattaattttaattaaaattttataagaaaataaagtatcatgtttttattaagttatggtttatttattttaattttttaaattgatcacaaccatttaattcaatagtaattaaataattaaaaataaatataaatatgatgattatatataatgtaactattaaatttttttctatatttatatttagggtgtttctacaatacatcccattaaaatagatgtactgatacaacctctaactatttcggtatctataagaattttttagcctaaattttttcatagtcgtgtacattatagttatttaagacatcctgcaaaattttgaaaaatttagaataatttacaatatagaaatcaatgtttaaaccgcctatttcacacgcgtataaaataaaaatgtcacgcatgcaaaagactctttgaacactgttttcaacgtgttaaattttttcgaatttctcaa

SEQ ID NO: 219489 - DNA, 6466 bp, Cannabis indica
catattattattttattttttctttgaattggatatctaatccaatataataagtattggatttaaaatattaggtagacccgatccgttcaaaaaaatattagatttaaaacattatggtaaatatgaactaatctaatagatatacttaaaatatataatgtggaagaaactgatcaaatctaaaagatatacatgaaatacatctaatagaaggaatcgatccaatccaatattttattggattagattaatagttcgaaagattgaaatcaattagatcggattggttggcaaaatccaactgttccaacatccaatatataatcaaatcaggcctaaataagcgtaaaaatattaaatgtggcccaatagacacccactacactgtttaacacacagtcctagcgaaaacatacataatgatagggataattacaacacatactgcaaattttaattttttacttttatactgtggggcggaattttttacaaaaatattgagttttttttttttctaaaatactatataagttttatactgtgtactatgttaagttttcaatgttgttctactggtattttttagttgttctactgttagttttagttgttctgttttgtgttctactggtgttttataaaaacacagtatttttgaaaagatttttgtgtgacagtatttttgtaaaagttaacccaaattccagtatttttgtaaatttccctaatgatattaatgaatattcttgtttcatttgttagtttatttatttttattttgttacttgaaattcactattttgtataattaatatatatgtagaaagaagcaactgaaaaagctaaagaaattttggtggccgccataactgaaaatgtagagatcaacaaacataacatttgcgccatctcaaactcatttcggatcgccgacttcggttgctccatcggcccaaacacatttatggccatggagattataattgaagctatttacaaatcctaccttgatagtacttccacgtataaccccgaattccatgtattcttcatcgaccatgtatcgaatgacttcaattttctcttcaaaaacctacctaaggaccgaatttactttgcggctggtgtgccgggctctttctaccatagattgtttcctagggcatcattggacctcgcctactcgtcacatgcattgcactggttgtcgaagactccaatggaggtcataaaccctagttcactggcatttaacaagggcaagattttttatgccaatgctgcagagcaagtcggcgaggcctataagaatcaacatgaagaggatatggcaagcttttttggtgctcgatctgaagagctcactcttggtgggctagttgtgattcttatgtcatgtagggaagatgggagttcgccaactcactcctcgctcggccctctttttgaaccacttgaatccaccattatagatatggctaacgaggtacgatcaactcgagttttcagttgttttctatcaaatatgtaagattcgatattaaattatactatattccacacatatcaacaaaggaaaatgaaagaataataatatcaaattttggtttttagctatctactcttctatatcaataatatacatatacatacatatttttagtaggagtatatatccaattcaattcgtactatttttcataaaagtgcggttttcatatattttttttaaatttaaaataagatatatatttttttttgactaaagagaatattcatttatcaaagacaaaccaatcaatcaccaaggccataaccaaccggcccaaactcccatgaaacaacaaccactgagttaggcataaaaacatgcctctttcagtttgaataagtttcctatcttttaagctatacaacctgtatttaactatatcttttatatcgtttacaattttcataatagacaaacaactacaataatgcacacaattgttcctattcttccaaagcatgtagaaagtagcagcaagaatcaaaatgataacacctaaacccttccctgccacccaacataaccatctgttataatcaatcgaccaagccacaaaaccaacccaatcgaacacctctttcacaactgccttagaaacaacacgaccaaaaaagagataatgatgactctcctcctcttcacaacaaacatggcagctgattgtgtctagatctatacagaatctagtgaatttatcccttgtaagaagatggtcatgaaccgctgccaaaatataaatctatactgggaagggataaaatacaccaaacagctttgtagaacacatcaatatcatgctgaattaacccattatagagtctagttgcaagaaacttacctctactaacagcagcaacaatattatccttgctgaatttctttcttcattggcaaatttttctctaataccaactagcatccaccttcaaatcataatcttaaatttcatattttggatccaattaaatatgcacaaaaactcaaatctaatctaattttgaattgattactcttttaatattatattatttaatatttattaaaatatattctttttcaccttacaaaaaaaataaaaagttcttaaaattatatatcttcaataacaaattaaaataaacaaataaagaataccaaattccaagaaagaggacaagaaattatatgcagaaaaaaaagtttattaaatatatttagatataaatatatacatttcatatattaaattttaaaatatatatatgtactatatgtattagtttttaatttttttttttctataaaatatgaattatatatttataaccttttttaaatatatataaaggtgcggattggttggatttaatatctaatccgattttaaatttctcaatcttattcaatctacattttacaaattgaattgaattaaatcgtgcggattaaattaaattaagtattttattaacacccttaaatttttgaagttgtattcgtattgaatgaaattatatcacattgttttgttttgtagggaataataagccaagaaaagcttgactcattcaacttgccaatttttagtccatcacctgaggagattaagaaaataatacaaaaaaatggatgttttgaaatattaaaattggaagttctaccacgaactttttgtcctatgatcactacagaacaatgcagagctggatttgagaatattatcaccaaacattttgatgataataataatgataatgttataatagaacaactctttgatcgttactccaagaaaattggaggatattctcctatatctgcggacgataaaactatggccactggattattcttgttgctcaaaaggatataattagctaaaatattaataataagccaatttgtgatgtttgaattattaagttttgtgtttttaataaaagttatgttaatgtcttcaaatgattattatttttttatttaagtactaaaaaattgagtatttttacttgaaatgatgtgtagaaaatatcatagtactgccagtatgaactattacttcattcatcaccaattaattattatataaactttattgtgcttaattatcatatattatataaacattattctctctagctattctattttcttttgaataatagagaatttttattgtctgaatcatactatgtaaattattgtaaattttctctttgaattgaatttattaatttttgtaaagagatagttttcaaatataagattgattggttatttaatttttttttttggtataataatactatgtgaaattttgatttataattttaaatattgtacgtgtatatgcacataagttaatatcaaatatatagcctgttacaccctgattttgtaaaaataacaatcacaatgataacatttcacataggcacctaggtggtgaaaccaccatgcctcatcacctcaacctacacctaggtggtggcacgatgtcaactcaccttccccaaggtcgaggtactcttcatcagggcatcatctcagccctagctgagatgcacatcattatggcatcatcttggacctagccgagatgcacatcctcataagtgcgtcatctcggcatcctcaaacatcctcatttcgattccaagagtgttaggataggctgttagaagttagttaggatggtggttaattctgttactacctaccataatgttattttccacatgttcaattctttctcctttatttttcacatgtatataaactgtgtaaagctcagattaatcaataagagatttctttctctcttctctctttttccctttccctctgtctttcctcttctttctttcctctgtttcttgttcatgcattcatggctaagaggttgaatacctctcacatggtatcagagccatttccgccattaacgacgaacatggcctctattgatcttggcaactcgaatcatcaaactgcgccccagggaaaccagttcacagctgcaagaaatcacaccgaacctcaagatgatgccaaccctgtctacttcaaccacactgtctcgatcaagcttaacgatcaaaacttccatttatggaagcagcgaatcttagctgccattcgtggcagttggttgcaaaaatttatccaagacgttccacctccacctcaatacctcagtgacaccgatcgtgctactcagagattcaatcttgagttcttggattgggaagtccaagatcaacttcttgtctcctagcttctctcttccatggctgagagcctcttaactcgaatgggtggctgcaattccacacgacaaatctggaaagctttggaacaacatttcacactgaaagtctcatccaagattctggagttcagaaccaagctccaaaaattaaagaaggccacgatgaatcttaatgactatcttcttaaggtaaaagaacacgtggatcttctagcttttgttggtgaagtcctctctgaccgtgaccatattgctgttatattcaaaggcctccccagcgattatgacactttcattatctctaccaacacgcgtgttgaaggctacaccgttgggtgagatcgaagcctttgcttcttgcttctgaatctcgaattgagaaggaggatcaagaagctgaaccaagcatcaatatggccatggttgatcaagatccctgccctttgaacgcctttctatgctcaagctaatcgcgattttcaaaacctctgcttatcctccaagtcagtactttcccaatggtatcaatttttccaattcttcttccttctcccatttcagaggaaatgttagaaatcaagtttctccttgaggatctaatgtcactacacaaggcactaacattggcagaggaacgggtggacgatttcctgcagctccaaaccgtgtccaatgccaactttgtcacaagcttggccatacagtcatcgactatttctactgctttgacaaaagcttcacaggagtttttcttgccactaatcaagctcagttacaagccaatgttacccatatagctcaaactcaagatgataactggtatcccgattctgttgcaacaaatcactgcacaccaagtggacaaaatatcatgacagctattgaatatgatggtcctgagcagctgtatgttggtaatggtgatggtcttcccatttctcaaattggtaacacttatctcattcccaactcatgcactaaacttttaattctcaataaattgctacatgttcctgatcttaccaagaacttgcttagtgtttccaaatttgcagctgacaataatgtgtattttgtgttttatcttgatgtgtgttatgttaaggatcaagtgagcaaagctatccttgactgggaaacaccacaacggcctatatacttttgactctaatcaactacaattatctgcctctcccaaatcgtgtcctgcctctcagttttctcatcaatcgtgcacaaatcttgccacaacttctcaaagtccaagttcacaatctagtgtctgtgtcaattgtaacaagtgtactcgtaattttaaattgtggcacaaccgtcttggacatccctctcagaagattatcaagactgtgctttccaattgtaacatttctacttcaaataaaatgaccaattttgtttgcaaagcatgttgtttaggaaaaatacacaaagcatctgaaacatgttacactaagccactccagcttattgtttcagatttatggggccgctccttcacaactccacagttaagcgtgcttgacttggggtaatttcaggatgggtgacctcctgggaagttttcacagaaagcgtgcgagtgaggacaaaacacgctgttaacacttgtgttggtctgtagggtcagtcatcaatcc

SEQ ID NO: 219490 - DNA, 1465 bp, Cannabis indica
atctacctcaaattctccgaatgcctgtaatctatcaagaatctgtttcattggtgcagagaacatctacattcaatgaacaagtcagatacacgtaatccatacacttcatgtgtgcgagtgaagtgtatgcgaattatagaaagaaagaaagaaataaaaaaaaatgtgctatgatttggatcatgagcaaaaatgtcaagacacaatacaaaaaacaaagacctcgggactactcttcaccttcttttccattacacatactccaacggtgactttctttcccaaaaaatctccatcatcttccatcgttctctcaaaaacaacacaatccgaatccaattgcatcctcaatcgtcacttcctactactttcacaactcaaatccaagtgctaacaccaaaaaaaaaaaaacaaagaaacaacaaatcaccgccattgttaatcagacaaagctctacaaaacgcacacaaacacaacatacataatacagagattcattattagcgaaaatgagaggaaaaagcaagcgcgtaccagagaagaaagagcaaatctcaggaaactcggttggccgagtagagaggaaagtaatgaaatgagtcacggttgataaaaatgaaaatgaaaatatctgaatgaaagaaagattaatatatatgtaagggttgtgtttgtggagataaacccaatcatattagttagattctagaatatacacacaaccaaaattgaggtgtggctttggaaaacgacgtggaaaggctatatagagagagagagatttggattctcttagtaatgaatgtatagtaaccatctgtgtcagtttacctcaactccgaatattggttgtggtccatttaattttcttaggctattattattttctcacctctgtgaattgaaaactatggagaaaattaattaataaataaaaatgggtggtggtggattttgtttggtactagtttaaattatttatttggactaaataaatgattttatttggtttggaagtcttgctttgggatctatttatctgacgacagacactatggtggtcctatctatctcctatatattttttttaattatttcgaatggttttttttttcccaattaatttcattcttgtaaacaaatgcgaatcttacaagtacttttttaattccataaaaatatattttgagtatatttattatacactagtagtgtacaatatgctaccactaccttgaaattgaatcaattaggagataaattaataaatataaactcccacatgatggatttcgtttaatttgttttattaatcttattcatttaaattgtgggacaatacatctatttctttttatttatttgtatgccaaaatttaatgccgggtcaaatggtctaaaatgccttttgagacacgtgggaacagtctgattgaccgttgactcatgaaattgtagatg

SEQ ID NO: 219491 - DNA, 4570 bp, Cannabis indica
ggtgtcatgattgtgagtacaatcttagtgacacttgtaatgcttctcatttggcagaccaacttgtttgtggctatattgttcccactcgtctttggatcaatagagctcatctacttatctgcagttctaacaaaactattggaaggtggttggctacctcttgtttttgctactttctttctttgtgtaatgtacacatggaactatgggagtgtgttgaagtaccagagtgaggtaagagaaaagatttccatggatttcatgcaagaacttggctccacactcgggactgttcgagtcccaggaataggattgctatacaatgagcttgtccaaggcattccctccattttcggtcagtttcttcttagccttccagctatacactctattgtagtttttgtttgcattaaatatgtcccaatcccagtagttcctcaagaggaaagattcctgtttcgaagagtttgtgaaaaggactaccatatgttccgatgcattgctcgatatggctacaaagatgtcaggaaagaagatcaccatgcatttgagcaactcttagttgaaagcctagaaacttttttaagaagggaagctcaagatcttgccttggagggttccttaaacgaattagaccacgatagcgtttcaattacatcgagggaatctagaatcccatctggagaagggtatgaagaagagcttaggatcccattaatggaagaaggaacttcttttacagaagacaatgctattgctaccacattaccatctagtatcatgtcatcggatgaagacccgagtttggaatatgaactctcagctctaagagaagcaatagattcaggattcacttactttctagcacatggggatgttagagcaaagaaaaactcattttttctcaagaaacttgttataaattacttctatgcattcttgaggaggaactgtagagctggtgctgcaaatatgagtgttcctcacatgaacattcttcaagttgagatgacatatatggtttgatttcttcattcatagttacactttctcttttattttttcttttttaatttattgactgtgttgcaaaaaacccatgtcaaaaacaataatgataaataaataaacaaattaaacatacaaagtcttgtcctgagtcctgacattatatgcctttttgacttgtttcacatttttgcttattcatgtttttttgttgtgattgtactacgtgcatgtcattttcaggtttgactaatgttctcccttgttttctggttttgacttatttttaactataaatcccagattggattctctgtttttgctatgatggcataaagaataataataatccatttctcttttcactttttttttcccatgtaactacaaatgttatatatattcatacacatgtaagtgtaacaacaagtgttctattcgtattaaaattgtctttaaaagggttatcaaaaaaaaaaattctttaaaagatttttgttttttgtttacaagaatatctttgatgaaaagttcaagttgtggtctagaacaacttcactttgtttggtctactttattattattattttttttttctcttgattttttgaaagcttaataaggcataaaagcaataaacactacttttgacttggttaaccctcaagcattactttcttgccatatttcccaagaccaaaaaaattaaataataataatatcaacatcaaaataaaatattattaggactacttcttttttctttcttataattgaaatagtcattttttttctagaaagaaaagcaggttgatatgtatcacaccattttcaaataattgaaatcactcattatttacctttcttaaaattattttatttttttaattaagtacgtatttgagactcaattcaatgattccatatgggagttatttaggtgtctctcaaatactttttgtgtagggattgtcaaagtgttttccatgggaaatgaacctcatattatggcatttgatacgcaattaaaaggtagttatgttggaagaattattaatactaatattaatattaatattaatattaacaaaagagaataataataacatgtcgaatttattcttcattgttgtctaatgggatgtttaaaacatagttatgatattatcatgagtcattttcatggattttggattaggttgggctaattatgaagtggggtttgctatatcaaatcttacattgtaacatgctaaaaaattagtatacattgataatgatatcatcacatatataatgatttcatatatataaatatacatattagactatgaaaatgctatgtaaaagtctataaatatgtaattatgtagctattattagatatggaaggagaaaataaaactttggtttaattggaatttggcacggacttgaagagtgtattttaagaaatttgtcatgtctcgaagaaactattatctaacaattggtgctttcattgagaaaaattacagtgaaattcactgtaagaactctctgccatgaagaaaatagagctttcactatctttataaattaataataaacccctatagcattttcatagtctaatatcttatattcattcaagaaaaatgtcaaaagatgattacatgtgatttataataattataatgagatttaatataaattattagaaaaaaaaaatgaatgaattccaaaacttttactattgccaacttgttttcactaatttttcttttttttttgtcaatatttataaatttttttaacataaatgaatagcccttacaaaaataaataaataaatagcaacatgcaatagctaggtcctattaactataatgaaatagaacaaaaagttctatacctaatattattaaccaatctttaattaatcatcatgtgatcatcacatttagtttttgtcctctaatatcaattatattcaattattttatgagcaaaaaaatcatcatcaatgatgaaatttaagtctttactataatacaagttatggacaaacaatgcatgcatgcttatgcttgcatatacatcaaaagaaattaacacatgctattataactagcatatgtcatattttttatagcaatgttgtttatataaaaaaaaacttagaggtttactattattattattattattattattattattattattattattataatggaagttattctttttttattgatttaatagaccctaacacataaccaactagtctggttaaataataatgataagatattaagtaagataaatgttattttggatcttatgtttggtaaaaattattgattaaacaatttattattgttaaattttttttttttgaaataaaaacttattgttaaataacaaatcagatattgcactattaaaatgatacaaaataatataccatgaactcaatttttgtcaattttttttaatataactaacttaaaactaatttttagcacgaataaatagaaaaaaaaatataattggtctaatcataacactttcatgtcaaattattattaagttttaatttaataaaaattgagctcagataatttttttgtgccattttgaaaaacgtacataatatttgaatttacatttaataaaataaaaaatttaattaatccataacttttatatagagtctaaaataatatttattctattaagtattgtatcgggtcacaaataaaccagtgacgaaaccaaggagaactttgtgggattatgtaccctccttcaagttttttagttttatattttattcctataaaaattatacttttgtcccaatatatttttttattcaaatatattttatttcaattttacttatatatatacatatttttattttttccataaaaattatttttacttttatccccaaaaattataattttccactaatattttcttaaaatttgtgtcctctctctaaaaatagctagctagctcggccatcaataaaattgatattaatttttttagaagaatattaaatgtaaattattatgattaataattggtaatatgcaggaccaggtgtaatgagtgagtttgtattgtagtagtagtgaaatttaaatatgtccacccaattaaagccaaatttacgtcattggaaaatgactacaaaaacgtcaggcaacactctttttaaattttaggtaaacaaagatacttaatatcaattatattaaattatatatattcatagaataatgttcttatatttatgaaagaaaaaaaaaatcattcatatatttatatatatacatatttctcacaaaatcaaatggccagggaaaacattttcgaacaattaatatgaatttaatttcagtagatatatttgtgtgtggggtataaattataaataatattccatataccctttctccctctccacttgttatgttgcaaaatagatatttgatcttgtgtaaattggctattcaagcaaaggaaaagataatattttttttgaaagaaaattgtg

SEQ ID NO: 219492 - DNA, 4226 bp, Cannabis indica
tactgtattttttttgggcactctcttttgtcttggaaatctaagaaacaacaaactatctctaggtcctctgctgaagtcgagtacagatcaatggcccatgccacttatgaactcacttggctcacataaatattcaaagactttggtgtatccattaaacttccctcaattttatattgtgacaacagtgcggccattcacattgctgaaaacccagtataccatgaacggacaaagcatgtaaaaattgattgccacacagttcgagagaagataacaaatggtacacttcaaatgaatcatgtcacttctcaaaataacttagcagatgtattaactaagccacttttcctcactcaattccataccattatatccaatatgggtgttaaggacttttacacactaccttaaagggcctattagagttagttttctgttatgttagttatcactcaatcagttagttagttttaactacctcttgtatttcaacactctataaacactgctcttgtaccattttctcttcagttcaatctatacaaagatttcatgtactttgctcttctaatatatttgaacattttatacatgccaaaaagttcaattttttatttgtttattatttgttttagaaataaaatgacaaagtccaatttactataacattcttctatcatattctttatcacttggtagttggtagatttatcgcttaaacaatctttgagacgataattgtacttattactttactttaattgttactatatgcttggaatttccagaactggataattgtacttattactttacttaaccaggtcatatttatagaagagagttgctttactttcagcaatcaactatggtgaactatgataattgtacttattagtttactttaattgcaccagattcagatgatttaatcatagttcaccatagttgattgctgaatgttgatgataacctaatcctaaattttgagtatccttatatatagtttaattttgaatatttgtctctttctttatctcaaaaacacaaatccccatgaagctaccttttgtgagcaacaagtagaaagcaaagaagttttattattcaaggaaacagttaaacacacaccagcccatttatttataattaggcatttggatatcccaagtaaaaactagaactggctaaaaacacacaaattttagcaattttcttttactaacaaactgcaaacaagcgtagggtgaaatgtcttcaaggcaaagtgtactctgcaaaaacagaataaataattatgttaccaaactattaaggagataagaaaatgtagtacaaagattttataaagataatataagaacaaactagtacaaacctccacacttgtaaccaacagggcggctatcaatgttgcatcgcttgggaatggtcacagccacttctggcttcaccccggaacttcttgcagtgttggaaagcatgacagcgcagaggcaggccgggttctggccaagcttcttcacttgagcacagcatcggctggaaactgaagcgttctcatcttgcgctgcatatgcacatggtgctagcttgaaagcctcgttgtcaggggaagtacgtttcccacactcaccagccccatgaacctgcaaactcaactcattgatccctaaaattacaagaaaagctagaaagcaaatgcatttggttgaggcctccattttcagctactgcaatgaataaaaccatcgacagatttcatgtttttatagcaaataaagtggctcatataatcatattgttgatcaaatgacattaaagttaattcccactttcaaatatggtggagatggcactatggattaaaaggaaagaaagaaaatgtattttgttgctcaacctactctcttctcaagtggtttttgtctggccactatggataagttaaactgcatatttaattacacaagcgtttcctgagaaaatgattttaaatgagaagctgacaacaaagcactagccaatttcggctacttgagtattgttcttccagaaacaccacttatgttatcgtcgacctttgataaaatattattatagagtaaataaattacaaactattgcattaatctagcaaaatttagattcagaaaagccaaattatagataaccgaccattcacttgtaattcctcaaacaaaaccactatctcaatttcctcccctgctccaccacattacattagtctacagtctacacactcaatcaaatagaatctgagtcagctattcttgttcactagctatcaataatctaatgatgccgtaaatggtagacataaaaatagatcaggttagatatttttccttttctttccattaaataaagacttcatattttgttaaaccaaataggagaaaatggattatcaaagatcttgcttagagacagtattaaatgtaagtaataattgttctgtaatcacaagcaaaatggtctaattcaataagtaactagccaagaattttaagggttacccagaactaagattcaatttagatattattaatgacccatagaaagctctcatagccattttaacagcttcttctgtcaatttaattaaatcaatcattcacattttatttatctctataacagtagaagtgttcttctatcattagtcattaacagagcataatacttttgccaatattttcttattaaattaatttcctcaaaaccaatttgaacaaccaaatgcaaactcaaaggacaactatacaactacaaagtaaaaccccaataaaatagagatttaaatagtaatcaattatgattaacttgatatatgtaaggctacagtgcaatttccactaagagatttaaaggccaaaataataaataaaactttaaatattacaaaatttagaaaagtcaaaccctagcgactgaagaaagcgtacagaacaatggagatatagatcagaagcgcggccgggacgaagatcacgagcgggactacagcagcgtaggtgtgagaactgccacaacccagggtaccgagcttgatctgaaccacattgatgagagccaacatgaggaatccacagccgcagactgaaccgataccagagatgagcattccgacacggagaatagacctgttgatccggcagaggatcccaacgggatggtaggcggggctccggcaaatccggatcccttgtttgagtccgacagcgatgaggctggagaagaggaatgagctaaaggagtagacatggaaggcgatgaggtcctcggcgacagagggacctgggttgcaggtagggtcgtcgatgagggagttagacgggtcctttgggttccaggcaaggccgataaagacggctaaggtgaagagagagttcacgttaacgatgccgtccagggccgtgatgtggacgctcgtaccaccaccggaagacatcttggagagacagagagaaagagattaggccgttgagatttgacggaggattgagatcatcagtaagtttggtttttagtaaagtgagtttttgggtattggttttttcgagtttggataaaggtgaaagatgatgctacagttacaacagcaatcaccttttttaatattttcgaaaattaaacagaaaaagtaacgacaccgttacctataaacggtttagactactgttctttccttttcagaaatcagaatgaagccggattgctggcaataattttttaaaaaattaaaactaaaatcgccgttgccggggatcgaacccgggtcacccgcgtgacaggcgggaatacttaccactatactacagcgactatttggttattgttaacttgattagtatcagatcaattaacaattagagaaaaaaatttaaatcaaaatcgccgttgccggggatcgaacccgggtcacccgcgtgacaggcgggaatacttaccactatactacaacgacacgttgcgggaatttgaatttagtcattattaataaaaagtaaacgatttccttgcaaagccaaataaatgaataaacccacccacactacacattttaatgattattttttaaatggatttgattatatttatttatttaagaaaatgagaacaatttcgttttgacgagaaggttaaatctcaaatattcaaaggcccaaacatcatacatttaggatttttaacgg

SEQ ID NO: 219493 - DNA, 4588 bp, Cannabis indica
attgatttggtacacggaacttgatgttgtttgcggcacggtggtgtcggttcttggactgttgttgtgttgattattgggaatattttgatttagaatatgtaactgagatagcattttcatttaggttgttgttggtgttgttgcttgttttgttcaatcactactactgttactaatatataaagccaatagttaagatcccatgatattaagtgggcacactttggtttgtttatggtacagaagaatttatactcaagactcggaatcacattgctagacatgatgtgtttttgttttgttttgtggagaatgatttatgtttgttcattttcgtctttgcataatcttgtttctgttattggataggtctctttgggcatggagtctaaatcggtagcggatttaatagaagcttcctcaggggttcatttttctggatttcacatgaatggtctgcaggaaagacattcaggtgtggagcaagcaacaacttctgctgctgataacattgttatgcaaccttttgtcataggtaaagtttgattggaaaacatttttgttttttataaaaaaaagaaatttttttaatatatatacatgtatgtatgtacttttttacttgagttggaacatgtatacgcagccaatagttcacttttctttatttaaaagatatcatcctacgtagtgggaaaaattatcctgtgatcaaggacggacctacaaaatatttatttattgtatataacttttttaatatcttcctgaaatttcaatttcttatgtatgtcgttcttaatttttttatatttttttcacccaataactacggtctcttgtatttctaaatactgggctatgttctttgtgcataaagttttcttcttttacctctttttaatatcacattattctttgcatggcaggggttgctggcggagcagcttctggtaagactacagtttgtgatatgattatacagcagcttcatgaccagcgtgttgttcttgttaaccaggtaatctcatgatgaaatttgtcatgatttgtgtgttctaagcttctggttttcttacctgaatagaattgaaatatacttattaaattatttgcttgtaagaaatttaattatatatttttcagctgaacatggtaaaactcatagcattgagggtaataatatttttgtgttgattctgaaagttgattttttggcatgttttgggaaattatggattttctggtttatgagattatgtttaactagatggaaatccatatttctgctgtttgtttgtttcacaaattttcttatcttcacttcattttatgcttgaggtaaaatcgagtaggtttttatttgtacaaatatcactgtgtaagtgtgtttcatgtcattcttataatactttttttatgcttcctcaggattctttttaccataatttgacaccagaagaacatgcaagagtgcatgaatacaattttgatcatcctggtgagggaaattctgttttactcacactatgtctaggattatatagtttttaacttcatttgaacttagcaatgaggtttgtgctatttaactttacgtgattagtgcccattgtaccttgtttctaatatctgtatcctgctaaaatttcacaaaaatataatcttgttttaaccaattattaaggtctattagaaatttagaactgtttggtttgaagccataactagcataactacgatgtatttctcctatctggtgcggactgtctctttcatgtcttttgatgcaaacttgcttttattgtcagatgcatttgataccgaaaaactcttagcttctatggaaaagtaaaaacatcaagcagccgtagatatttccaaaatatgactttaaaagctacaaaaacaccagcattagaagggtaacttttgttttcttaacatatcggtttaatgtactgctttctgtttttatgcctctttgtcatactatagagaagaataaagagaattaaagtaattcagtaattacattacacaaatatgtgcatgcatgcatttatcagtatgtttcttatctctattactattctgaatttgaggaccctgaattcaacaatatgctctgcaggtaaatccttcagacgtgataattttggaaggcattctcatttttcacgatccccgtgttcgagagttgatgaatatgaagatatttgtcgatacaggtcatttattttcttttttatcattaggctgcttgatgtttttactctctaattctgatgtttttgttagttactactacaaatatgtggtcttgagatgcttatttaaccatttatttatttattcagtattatagcattgcttttgagatttctgctttaacgtatatgggatggcgtggtatgttgatttatagtgttactaagttgagacacttcacattgaaaatttttcagtgcagatgctgatgttcgtttagcaaggaggattaggcgcgacacagttgaaaaaaacagggatattggtacagttcttgatcaggttagtaactcttcatacagttttgttattatgcttattggaaagagatagtatctttgaattatatggacctcaattaagtttaatgggtcagtaaatatacttggtggtaattatgttgtgttactttttagtagctatgaatgtcctgaaagtgatcgttgcgacagatggtttactcttatcatttaactaagtcttgttgtttacacattgtcattctctttctgaaaatctccactcaattgggttcagggttcactgccagtctctgttacttgattcactgtttcattttcttaaaatgtttatctttgatttgatgcagtactcaaagtttgtgaagcctgcatttgatgactttattcttcctacaaaaaaatatgccgatatcattattccccggggaggagataatcatgtggcaattgatttgattgtacaacacatccgtacaaagcttggccagcatgacttgtgtaaaatatatcctaatttatacgttatacattcaacttttcaggtatttgactatttttcaagcttcattttctgttgttaatgtaatctcagcaacttttttatggcactaattaccgactgacttgtacagatacggggcatgcataccctcatacgtgattctcaaacaacaaagcatgattttgttttttatgctgatcggctgattcgtttggtgggtatatctgtttctttgaatatagacttatttatcaatttgcattttgagaatgagataagtcattgagtaatgaccctgaaaactattaccaggtcgttgaacatggtctcggacatctgccatttaccgaaaagcaggtggttactccaaccggtaagctgatattcacatgaaacatttttagttctttgtaccttttcctttcatgatcaataaatatagtttgacttcagcttactggttaagtgtgactactcacattagaaaaacaaaccattatgttgtcagtttaggactcatgcttcatctgcatgtttcctatccaatgactaagttatgtactcttcatcattttgagatatcattatgctgtacagatgatacccttccttattttgtttcttttttctaattttgatttggctaagaaattcgaatttcttgaaactgtaattgtttatagtttgtttacatcttcttttttcgcagagtcggtgtatactggtgtagacttctgtaagagattatgtggtgtgtcagtaatcaggaggtaatgtttgcaaagcattgtctcatttcttcttttgtttggtttttcgtagttctctgagcgtttctaaatattcttctcattgcagcggtgagagtatggagaatgctttgagagcatgttgtaagggaatcaagattgggaaaattctaattcacagagaaggagacaatggccaacaggtttcgattcgttctatggttgtacctactgttctctaaatgtttcatttcaattttttttactgttctttcctatgctatgtcagctcgtctacgaaaagcttccccaagatatctcagataggcatgttttactattggatcctattctaggcacaggtttgtttattgacaccaaactaaaaataagtccttggggtaatcttaatttatttgtttgttaagtaaatctgtatcgattgttatcgatcttttcttcagggaattcggctgttcaggcaatctctttactcttaaggaaaggtgtaccagaatccaacatcatatttctcaatctcatatctgtaagtgttttgagttgagtcttttttttacataccgaaaagctgtaagttttatcgagtttaaaactcacaatgctgtgaaaaaccaggcacctcaaggaattcatgtggtctgcaaaagattcccaagaattaagattgtgacatctgagattgaaagtggtttgaacggagattatcgtgtcataccgggcatgggcgagtttggagaccgatatttcggaactgatgatgatgactggcaagaagtgac

SEQ ID NO: 219494 - DNA, 1026 bp, Cannabis indica
actagaaatgagaatctggaattggataggcctttagtaaacaaatctgcaacttgatcatgtgtacttgacttcaagttgtttttgtaatactttgtcacgcacatagtgaacatcaatttcgatatgctttgtcctagcatggaaaactggatttgaagctagtgcacttgcactaatgttgtcacaccaggtaattgatggcagaccaagagaaaactttagttctttcagtagggactctatccatgagatttcagctgatacatttgcaagagccctgtactcggactcggtgctggatcgtgagacgacagcctgcttcttagacgaccatgacactagagtttctcccaaataaacacagtagcccgcaatggacctcctgtcatcagggaaacatgcccaatcggcgtctgagaaaccagtgaggttaaggttgttacagcggctgatgtgcagtcctaaggttgttgtgcctttcaaatatctcagtacacgtttcaaggcaccccaatgaactatggtaggattctgtaaaaactgactcagtttgttcactgagtatgctatatcgggtctggtgtggcaaagatactgcagagatccaataatgcttctgtacacagatgggttgtgcatttgctcaccttcatttttggacagtggtttgcctgcagtatttggtgtaggtcacggcttaagattgcccaaatttaccttcttcaatatgttttcaatatacctggtttgtgtcaagtacaaaccagtgctgtctctaaacacttctatgcccaagaaaaagtgtaattgtcccagatcctttagagcaaacagttcattgagcttgactatgaactcatttactctggtagagtcatttcctgtcactatgatatcgtccacatagataagaaccaaaatcacaattttccctgttttgtagaagaacagagatgtgtcagccctggaattttcaaatttccagtcaatcaaggtgttcttgagtttgtcaaaccaagctct

SEQ ID NO: 219495 - DNA, 4706 bp, Cannabis indica
agtattacttaaaacttaattcaaaaattaatttttaatacatgtaccctgaatgacatgtttatttacacgaataaacatgatggactaagagtattacttgaaacttcattcaaaaagaaatttgtaatacatatgccatgaatgacatatttatttatacgtataaacatgatgagcttagtctattattaaaatcttatttcataagcaatttacaatacacgtgctagtttaacttttacattttgtaattttttcttttttatgttactagtttaactttttctgttttggaccaagtttttaaataataatttatacatatttttaaagtttctttgtgaaaagtttcatcatgatattttttttttcatatctataattaaactcgaagttatcttctttttctggttgtgaccaaatagaagttttcttcttcaattgtaactactttaattagtggtctttgggcatgccccctagtgaagagaaatttagtttgttgtggttcaactcgctagtaccacgagttattcgctatagagtgtctccatttgttatctatctaaacatattgggttatcttcaagaagattgaatcatctttgaatagatttatctttgagtatagttatctacgagcagacttatctacttgtagatttatctttgagcacaattatctatgagcagatttatctacttgcagatttatctctgagcacagatatctacgagcatagttatctcgaagcagagtaatctacgagcaaatttatctactagtaaatttatctgtgaacatagtatttacaagtaaacttatctaagagtagatttatctactagcagattatctctgagcgtagttatctggtcaccacttaactttttgtcaaagtgaaaaaatatctattttgcatatcttccaagctttattggcctcttctgctcgatacttaaatgctatatagaaataattagcatgctaatatatataaattacatattttggttaggctctcctgtaaatttgatgaagagaatatttttaggagttgattggacaactcacaactcaagcttgtgtgatatatcaacaatcgtaactagtaattacgagcaaattgagttttggggatatgagcgaacaagagttcctcattttatctttttgtcccactttggctccgtgaaatatatatcttttggtaaccacttgaacaaccagtttgtgagccaacaaagttacttcttattgtttatgccaataggatgtctaaaatattgagaccattcatttctctctcatatatatatatatatataaggacttatatatacttcatagatatatatatatatctaattataatgttgtgtaaagtaggcagaaattttaaagttacttcttgtatacattgacattagtagtagagggttctactagactctcaattttaactaatttcagttttgggattgtgaagatgatgaatctgaatctctttctagtgaatctctcaatgaaagcaccaaactattgacgtgatttttcgtcaacttaatctaagatgattattaattcaagaaaagaagagacaaaataataaatgaacaccagatatttttatgtagttttgtagttaaaatctacatactccacgagtcaatattatttttgagttttgattgtattttcaatttggctgagtttctgtaaattagaagtgtcccccatttccctttgagtgaactcctatttataggaataggatgatgattactcaatcttatcttagtgaaaagttacaattgacaggtggttaatgcccacgttttacgtagaagtgaatatttggataagtataaataactattttatatttaaaatacaaagaagtagtctttgaagtggtatattgacttggtcaaaccatgttatttgtgagcaggtgcacgtactgtgcaatacgaggcaatgcattgctgattgtatattacgagatagtgcatcactgactgtgtattactaggtgatgcatcattgctgtgtaatatgaggtgatacaagatctttgtattacgagatgttgaatgttttaccaaaataacatcccaacaatgttcaattatacatcattacacaaacctattgatccttatttagaggaggtcacttcaaaggttgagttctgagttttttttgacctgttccacaatgtatttgttgtgagaatttattgtctatgccacatgacattccattcaattttttcattaaatagtccaaaaaatgggtataacaaagaacaaaataccatatgttcacttatcataaattaaaaataaaaaaatttagagatcattaaaatttttgattctgttcttataaaaattttagaagtgagatttttgttacatttggttgcagaattaagaatgatattgaaaactaatcaggttacaattttaataacaacatgagctctataagttcaaatacacattgactttgagttaattattattaaagagaagttaagagtaataagatgtctataaaacatataataacaaattccatgttttcggatccacatcattaaggatcacttaaagatttttaagagcttcttgaatttttgggaggtgagtcccatgtactcaccaacatcattctgtgataattaaaagcttcagttttcagtagcaaaaaaaaaagttgacacatatttgtggtttagttttgtagaaagtgtacctttgacacacatatttatactatcacaacttccttaaaatataagaattggtacaaagagaagtgaataaagctagaggaaggacaaatttacttgtactaaaattctctcaaaattatgtaaaataagaaagaatattgattctttaactaaataaattttactatattcttctcgtgcctttatatcctttatatacatttaattctcataatatttatttaagttcttttttgaagttctctaaatttaagttaattaaacgaagttctgtactcaacaataatatatatttagataaatcacggttttatcttatacacataaattctaaactctttttaatagtgagacataaattgtttgttgatgacaagacttaatatacgtataaaacttcagttcaaaattataatatatctattctatataaaatatttctatataacaaaattcttatttataaaaaattattaggagacttttttttttaaataaaaaaaataacaaattattagatgttgacccacaagagtcataacaaattattagatgttgacctataaaggtagttagttcaacctaaatataattaattcatctaaagtgttgcaatcaataataaatttgtttttatttttttataaaaaattattttcaaattttgatatttaaaattagttaaattttaaatattattttaaattaaatttgaatgttttgatagtttaataataattttttcttaattactattacaaaatataatagtaatttttatttatttatttattaattttaaaattataatattaaaaaatttaaaactaaaataaaattaatatacgtaacttagcacgtaatatctatctagtatatatatgtattgaatttgataataactataattagttgccacaaacaaaccaaaaaaaaaaaaagttctataattagttatgtattctatttttggtcttataggtcatgcgaagaataaatttaaccggttcaaacacgttcatcgttaaacgtatgtacatatagtcaaggactcaaggtaaacgttaccctcatatatattcatttataaattttaattgtaaataaagtggtgtggtgggggcttatttggtggggacatcaaataactgtacatacacttcattaataaatataagaaagttttgagaagatcacaatctcattttggtaccaaccagggactttttgctataattgacttctttgaaatgtaggcatttttataagtatgcatttaattataccattgtaatatggtacgtatatagctatagttcttattaaaataccaaaaccaaatgaaataaccattttgcaaactgcaatggtgggataatggtaaaagttcaagaaaaaagagagaaaataattaattaaacatatttgtattttgaaatgagttatttataggatatattttgttcaaaaataaataaatatttattgattatataagcttttagtaggcatttgtgtatttatttaattttcatttactgagatgtgcaagcatgtaagaggtttctataaaagcagagagactctgcttgttctggtagctgccgatgttccatgattggtatcaaatcattggttggtacgtaattaaaatcaaattaatatataataatacaactataaagtatactggaagaattaacgatcatcacataattttattttatagaaaagtaatggaagtcctggcctagctaacattaatatacattgtgaaattctgtattttaatattcttatttttattatttaattaaatacggagtaatagaattggtattgaaaatagttttttgaagctacagaaaacaactctgtaactccaaaagaaactagaaaaacaaacagtgtaaaaaaataaaaacacacaaggttttt

SEQ ID NO: 219496 - DNA, 4500 bp, Cannabis indica
aactaagcggtctttacattgcagaaaccttgaacttattaagattgatcaacatgattcctccacctgaccctttgttattcaatgctccatcgacatatagggtccaacttgcaccctgtggtatatttggatctactcgctcttcggttatgatagccacctgctcatgagggaattcaaggataaaattagcaagggcttagcgttaaatagttgatcgcagttcataccttatatcgaactgacttaatttaattgaccacttaagcaaacatgcagatgtgtcaggcttggccaatacttgatgaaggggatagttggttaataccttgatggtgtgagcttgaaaataaaagcaaaggccaagcgttccatctgcagatagcgtgcctcggcatctagtaagtgtttcctcacgtaagagagaatgttgcctaccttggtcttcatagattagcactaagctgatcgcgtattcggacaccgctaggtagattgagagtacttctccaggcagcaacttggagagtattaggggttgccctaggtacattttcagagcctaaaacgcctcttcgcatttgtcagtccattgaaatttttattacctttttagatttgaaagaattctttgcatttattagaggagcgtgaaacaaagcggtttaaagcagcaacattacctatgagactttgtacttccttgggcttagtaggagatcacatctctactaaggctttgattttggtaggattggcttcaatttcttgctggtttaccatgaaaccaagaatttttcctgatcttacaccaaagacgcacttcaatggattgagtcgcatcttatagtggcataggactttgaacattgaatctagacgggcgacatggtccgttgcatgttaacattttacgagcatatcatcaacatacacttcaattgtttttcttggcaaatatgtgaacatcacgttaactaaactttaatctgtcgcacctgcatttatcaacccaaatggcatcactttataataatataaacctcgatctgtgataaaggaggtgtgctcctggtctggtttgtacatcaggatctgattgtatcccgagtacatgtccatgaagttaaggagctccttagaacaagctttattcaaatctgtaaagtcgacgcatgtgtgccatgagccattcggctttggtactaagacagtattagctaaccagtttgggtaaaatgactcctttatgaagctgcatgctagtaggtattctactttttctttacgcgcttggtacctcgcgaagtccattttatggcacttctattgtactcctcgcatgtcggagtctatgtttaagctgtgacacatgacctcgggtgaaattctaaccatgtctgaatgcctcaaagtgaaaacatccaaattctgtttgagaaaggttactaacctttctcactgctatagagttagtttaaaacaaattgtttacactttagaattgtcaaatgaatcgattggtacctcaattgttattttgcaacttgtgcggtgtttgtatagttgaggactctagggtctagatcgggcttttccacatgtggtacttcgttaattctgaacaactcatgtcaaggtagaggtgcctcgagcaaataaatcacattcactatttcttcttctctgtaattttcaatgtagtattgtaacattccgtctagtcggccggaacacctcttactgatcctacaccagcaggtgtagggaatttcatattaagatgataaattaaggttactatcttcatctccttcataattgggacaacctatacggcgttatatgtggaatgttgatcaattacagcaaagtctgccatagactttgaggcagcaggtgttgtccccaatgttattggcaacttaatcattcccttcaattttatcatatctccattgaaaccatagatacttgaagttactagccttaaatctttctcatgtaaccccatctacttaaaggcttctaaattcaagaggttaattgagctaccattatcaacaagtactcaatgaacattattgccaccaatgttagtgaccattgccaatgcatcgatgtgagggtgatgtacccatctcgtatcactttccatgaaagtgatatcatcacattccttcttcaaaagtttctctaggctttcacttaaattgtttacatttgtcaatggtgacaagcgatcctccaatgatggtcaagatgttgcaaggggctttggaaccacttgcatcttctgtattgtttgccccatccgctcgaggattgacttttccatttttcttaaactggccaaacttttcttgtttgattaactcttcaatttcgtcttacaagaacaagcatttgagtgtggtatgaccaatatccttatgatacttgcaaaaaaattttggatcccttttgtcgcaatttcctcttattggaggaggttttttgaagacacaattatgttcctcagtcacataaatatggtcacgagggacagaaagctcggtatagctcacaaaatgtggatctcctttcctttttggggaagtatctttcctagttggcaatttggcaggctttgggctctgtcgccttattggactgcatcttttaagactactccctctaaaattctttgatatagacttcgggatcgtgatcctggcactgtgaacctttgcttgtcttttcttctttcaagttctgccaacgagtttttaatccttttgtgaggttcggccataagaaaaaactcaactagtgattctggttgctgcacctgcaattccttccaaaaatccatccttggcaagacacctgtgattagcatatgaacaatcgattgggagccttctccaccttagttacttaagtattaaaacacttaaaatagtcttgtaatgactcacctacgtcttgcttaatgttttctatgattgtgtatgatggtttgtacgtcatcgttgcttgaaagtgggttaaaaatagatccataaatgtctcccatattgagatggaagattctggtaattggctaaaccaatcatgcgcattatcctctaaagtcccagtgagtatccgacatttttccagttggtacctgatcagcttccataatcgtattgaatttatcaagataatcgattagattagtggtacctttatatttgagctattcaaagagcctgaagccttttaagagtctagcttgtcgcacttcttcagtgaagggtgatgtccaatgaagtttgtaaacgggctttctctattgctcgatcattcttaatgcttgtaagaggttttctttatcaatccccctggtagtatgggatttttagcaagggtagtttggtttcttgcaggtgtagtggctactgtcgctatgttcgtggggactaccacttcttcgagtgcagctagtgcgattggcaggtttaacgaattcgttgcattatttaagtttaggataccttgatcgaccaaatggggatcacgcggttcctcttcattattgcaatttgtcaaagttttttaccgtgctcagaatacttcattgaggcaatcatgcatatatcccctatgaacacggtaccttcctcctaaccttgtaaatactaggcttgtatgtcggtcggtttggacggtttatcatatatattttctaacccaatctaaagttcgggttgctaaaatttaagtgcaacccgcctaattttttaaaaaaaaactgcaaaccgactaacggtttgatcagtttggtcgggttaacccgcccaaacagcccaaacttttttttggtttcaaagtcaaaattgtctggtaaatttaacataaaataataatattatcaagacattttgggaaaatactatcaaatcttcttatataatgaatagattcagtatatgtgagtacacacacaatcctcatcagcatgaattctgttagcaacttcagatggatggacactgtcaaaaaatacatactgagtatcatttgaacaagttcctactgagtgaggattacacaaagctgaggttgtctctagagtcctagttccacatcagcctcttgctgcttcaacaaagcctataacaacaaattcaaaacagagacattaaataattgtatgcagtatgggaaaaatggaaagaagaaaggtttgattgtgagtaccatattgagaaggagatttaacaacatcaaaaagaggcttgtaaatgtcaaagataacaagtctaagatcagggtattgcttttaaaccatagaaattaaagataaaataagcttacagtaggaagggatgagcaaaagcagcattgactagaaagggtcttgtttagagaaatgttcttccgtgtaacccctgaaaacgggtgtgtagcaaatagaatctcagaccgcctgagatggtgggtgacggtgtgaatagagaactgagaaag

SEQ ID NO: 219497 - DNA, 3755 bp, Cannabis indica
cattaaatggggtcgagaatcttgggttggactagagcaagaagagtaaatactcaccaagaacattctctgtatttataagagtgaaacactcaccaaatacattatctgtattaaatacatccataaataagatagactcgtggactaaggctcattaacgccccaaccacgtaaaaaatctttctctaattttcttacaactctataatcatataatatttttattgattgccgaaaacctcgatcaatgtaatgccttacaaaaaaaaaagtactaataacaatataacaccttaaaagttaatactattttatgtcatatgttgcaaaattattaattaatcctaagctcggatggaaaagattttacttaattttgttataacaactctaaatcaaatttttcattaataaaacaaaaaatgtaactttcacaaaatacaattctaaaataatatttagacttaaaaaaatttattcccactaaaattccctctatatgtattttcataagatgtcattttgtctagcattactctaatttttaccttatcaaattaattttaaatgtaaatatatcactaaaggagatactcatttgattaacaacaataaattgtgttcaacataataataatttcgtgggtattttttgtcaggttactagattagcaaattgaattaacataataccaacttaacaaaaaaaaaaaaagaattaacataataccaaataataattaaaaataactttgtaacaaaaaataatctcttggtaaaataggttctaaagaactaaaacttttttcacaaaatacactttgtgaagccacaagggctagtcattagtgttacaccaaacgatccgctaattaaaaaactttctactaatttggttggtgttaacttccctagttacatttccaccaaaattgtaaaagccagctttggcgcgccattttcggttacttccaagtgattcagtccgtctgtctgtctcgtgtttagaatccgaagaacccgagttcactggctctctccttctcaaaagtttcgaagtattggtagataatggtgacagcgagcaggataccagttccagaaccgattgcccccatgaaatcagccaagacagtcaatgcaccaatgcacattccaccgaaagctgctgcagtaggtatgtagcggtttagctccttctgcaggtttgattcacggtgtccgggcatcaccatttgttgctcctgtagataataaaaccgaagatggtaagtaaaaacaaacaaaaaccgcactttctaagctctatcacgattgccttttaagtaataatcaccttgagttgcttggcaacatctctggcagaggatcccgacacttcaatccaagtttttgagaaaagtgcacatgctgacagcataaatacgaggtaaaacaaagcatggaacgggttggctgccatatccgccaagctgaacaattgaattaaaaagattcagtttcagtgtgtatttgaagccaatgttacattacaagatttgctacaaagaagggagaaaaatgtttagttaccttgaaggtgcggtgatataatatgctataccgcccacagggacaaactgacccgaatactctgattccttccattttcccaaaaggttcacaaggaaatttccactgtacctcctgtagagtaactgtgtatatagacaataaaataatgaaataaacatgtaagattggtataccgaaaaagacttgtctaacaaccgaaaaagattgccattggtatataacaaaatcacacctgagagatgaaatacaggttggaaacgagcgcagactggagaatgattggcatgttagaggtgtagaacagcttaatcgggtaagatccttgttgtccacgagcattctttgatctcacaggaaggacaacacggaatccttggaagtagataacaattaggaagatcaagacagtagcgaggagattcgtcacattgggaaggttttgccggtagaatgcttcgcgaagggcacgaactttgtccgttcgggttatcagaagatggaacaaagcgataacagcaccttcaaactccgctccacgaccactgttgatggtggtggggctgaaggccttccagatgatgttttcactgaaaaaaaaaaatcataacacaataagcaccatcaatcaatccaaggaaaaagataatcttataattatgaaactcaccagatattggttgcaatgaatagagaaattccagagcctaaaccatatcccttctgcaaaagttcatccaaacatatcacaatgattccagcaaagaagagctgaaggataataaggatagcattcccaactccaagttggtcaacgctaccatacatcccagagcaaacataagcaactgcctccccaatagctatcagaattcccagtaacttttgtgctccatttctgccaaaataaaataaaatcaaaacaatttacttaaaacctaacatcataacaaaattagcaaatgtaagcaaaaagataatggctttagcaacatacaaaagagctcgatcttcgcggacattgttgtcaacttcaatgatctttgaaccagccagaagttgcataacaagtcctgaagtcacaataggtgtgattccaagctccataaccgttccacggttgctagccaggattactctcatccaatagaatggatcagacccagttgtggagtgaatcccataaaggggtaactgactgcataccaagaaaacaaatagagcaacaactgtgtacaacaccttctctctaaagggaatctttctatcagcgctctgcacttcaggcagaaaagccagaaaaggcctcaccaaatgaagcactcgaaaaccacctcccatcttgtttcaaagcaacccacctgccaaaattttgataatacaaaaatcaatcccatgcaatccaagatctaacttccaaaaacacgattctagcaaattactaaccaaatctatcaactttttgtaccaaaatcaaaaacctaggttttattttaccgattaatcaaataattctcgtcgaaaaaaacaaaggggaaaacaagattgaacattaaactcaataatacattgaaatcaaacccaaaattaacaacatttacagtaattcccaacacaaattcgaacaatccagcgatcaatcgcagacattaggtttcaaatcatatatcaaattttcgccaaaaaatcaaatccaacatgcatgcatgcaaaagacaataatttgagaatgaataaattaaattgaagaggaatcggatcgaagaaagagacttacaatgttgaattgacgatcttggatctgggctccaaattggggaagaagaagagagagaaagggctacctgggtttgacaatacgactttttttcagtatatatacccaaaaaaagatatgagtgggtgaaacgtgtagggagagacacgaaaccaaaccaatcagattttgacacgtgatctaagcaaagtgacgtggcatacaaatgagaagaaagaaatacaagtagaattagtcgtactttctctttaacacttttgttgaattagctagattaatgtgtggggatatatatatagaggaaaagtattctaatatcactctaaataattttatcttttctatctttaattttctatttctcttttaatttttattaagtttataatattttttatctttt

SEQ ID NO: 219498 - DNA, 1767 bp, Cannabis indica
aaagcattaccgaacagacccttaatgtataatctttgtcgagtttatgtatagttataacagacatttcaccagttactaaataattaactttgttagaaaagcgtttaaaatatttagttgcacgcgtataaaaataaaataaaatagacacgcacttaaataaatatttaagttgttttggaatttttttgaaaattattaaacttgtcataactatataactataatatacattgtcaaaaaactattataatgtatctatacttatatagccattttattaatatcatgtaatgcagtttgaagatgatgatggaagagttcatatggagctgaagtattcttttgagatcaaaaagcggtcttagttgaattttgatttttctcgattttttcgaccttgttccgtaggagcgagttagatttttttttttcttttttaatttttatgaattatatacccttttgatcattaccaaatggtgaattggatttcattttatggacttatgtgtgatacaaatttagaagtgaatttatagagtttctctttttatgttttgtctacatctacaaatgtgataatacttgggttgtgtttggtagattagagaataaaatgggaaattacaaaaaaaaaatatatatatatatattaattatttattatacgtttcaaattagaagaaaatcatatttgtcttaattagggtcaaatttagtattaaacttttaattaaaaaaaatccaaaatatgctttaaaaagtatataacatcatggtcaaattaatgtataaatattaattttttttttccaaatatattgaatgtttaaaataaaattaaatagatttaggtgaaatatctctattatagttgtcaattacaaagataaatatcttatatttaggttaaacttatatttctcaatagtgttgtaaatccgaagaaaatgaagaaattaaggaaatagttaaggtgggttgcttgcttggaatggaatgagaaaattaaagttgagaaatttgattggaaaaattttggtagggtgtccttttgcaattttctttagtatttatcattttcaaaaaaaagcaaaattgttgtgttttatataataaaaaaataagtaaaattattcaattattttttattaacaactatattatttgagcatataaaataatataattgattagggacaacttttgtagttttattatgtggcaagtacttaacaatcatttattgactatggactattttattttttcttcaacctaaactctactttgtgtctggtttgtaggttagagtttgaatttcataaacacttgttctttaactgcgttatgtctagaaaaagtgttagctgaaatcactggttggttaggtcatttcgattcgtcaatggacttggaagagtagattggttggtgctttaggccgatgaaaggccttgtgggtatcattaccaaggttgtgattgttgctacagtgtattgcatctggtgcaactgcaacagttgtgtttttaaggcatgtaactcagttagttttattagtattcaagttaaaattgtcattaaggatagttatattttgtaatctttctaagcttaacaaaaaagaagtaatgtaactcaatcgataactaaattctaatttgtttagttgttgtctaggtgtgtattgtttagtagttgtttggataaaaagttttggtttgcttaaaaagatgatataatagtataattgattga

SEQ ID NO: 219499 - DNA, 4328 bp, Cannabis indica
tggtgtgagaagatagcaaatgtagtttctgtatctgatattttctcataacaatgtatgtattagcagaattttaaaggttatttgagaaacaagagtgaaaaaattactttggactgaattgtagtaatatgccaatggttgaaagtgattacttagaagttgagggtttttcgctactcgctaggtagtttctcagttatttttaatattcaacatctgtgtggaagttgaatgatatgtatatatcaatccttgtgacagggaattatgagagagtgatgtttttagttattttcatttaaacaattggtataatttgattattaatgaatggacacgcctaatattttgcagttttatatgcttgaattctgtatagcttcttaaaaaacagttctttaacttatgtatctacttctatgttaacagaaactgttttatttgatgtaaaatggaattatcattcatagattataataacagagaaaatgtacttttactttcttcattcttgtcttataacaatattgagcatttttttttcctttattgtttgtcttgcaaaacttgtggaggaaaaaaaggatgaacacatgagatttctattcttttctctagaggtgaaaggttaggtttggtgaagtgatattgtaaatttagctaagagtcaccttaactatcccattcaatgaaactatataaacaaattacaaacaaaagaactttgaatttgcatgggtttttaatataccatcaagttgtggttggatttgattagaactccatctgggcatcactcattattaatcaaggttttggctgaccattctgtcatagaacttcagaaaaaaaatgatggcaaactgaaaagtcattaacttgaagataacaacatttcaaaagagtaacatattttaagtctttataatggaaataaaatgccatttagttttggtattattgtttgttaattggtatgagaaaatgaaattctgttttagtttgtgataggttctcagttgggactagaaaggagttgggtgattgaattgtagtaaatttcttacgtgtaatgctagaacacgaggactgtattaaatattatctatttatattttaaatggagtcatatcacttttgattgtatggttcagattaattatgtcattgtgtgtaataagtgtgtgcaatttatgggtgtttcaatcattattcgtttaaatagtagcgagaatgagtaaataaaagaaattgtcagaaatatggtgagggaaattagctagtgatggtgagtagagattattattaattctctagatttctttgtgatcctattttttaattacgcctgagttgcttaatgggactgtagcaggtacttaagtgtgattcgtttcagtaacctcttatagttaaaggggtctctcatgactattccattccaatacttaacatctttcattacctgtattttcttggattgaaacatcaaggaaactttgggtcttatctgttgtaaagatttgtttgtagtttaatctctgctttgttattaaaaggcaataatgtatagtaaatatcatctttatggctgattttgataacaattcaaaatatagaacaaacaaaaccaaaacatgtttcatattctaacaatgatgattttattggaattggattgtgaaactgctcttttcattttattgcctaacaaatattatttgtgtaattagcagcgaaactcttctatgttttaatttttatacacttaattcgtttatcttttcttttagttgcaaaactctcttaagtttacttttctttgcaaatttgaagcgtcaattaaatatcaccgttaaataccaactagatgactattatgtacacttgtgcatacatgaaagtaaaatttcgaagtcagttagttggcatttaacggttatatctaattgacactttaaatttgtaaagaaaagtaaagataaggggatttcgctgctaataactcttattatttccattgttttgagacaagagaaaattgatgtagtttgtttttgattagcaggtgactaatttggtctgaagataaaatgggcaaagcaaagaacacttgggttttaaactacatacattgccctttggtttcttttttactttctttgtttctattttgatttattcagacttggttggtcatccacaccataccacagtgtttctttttgggcttttgtcttgtaatgtgcagactatgctgttctagattttcttgcaccaattactggcaaacatttggacatttcacatcaataaataaataaacaaaatattcagcaaaataaataaattcttgtcttatctctgttttttttttttctagttaagatttgtctctcgaactttgatatatacttaattatgtttcctaaacttttaaagttgttaaaaatcgcatcaaactattgagattattaggtttaaggatttttttttttaaattttgataaggaaaatttaatatggatgaaagttcagaggacatgatttagtgcatgctaaaatttaagaagatgatttggtgaatatagtttagtacatggacaatcacaaaattagtaaaactgaatgaaatttgacagaattttataaatctaaaaattttaatagtgtatgagaattttttaacggttagaataattcaaagagtataatttagtacatgtcaaagttcaaagaataaaaattctcattagcttttcttttcaaattattttcaccacaagacaagataaaatcactttattttattgggatgggttttagttagacttgatagtagttagtgtgtttatagagtttgagattactccaaaaataaaatataaaagtgagattcacttaatcataaattttttcactaaaaccataccaaatataagtttagttttacattccttacccatatgagtttaatctcatctcctctcaagtctaatatgagtttttctcatggcttgatgaacaaaggttgggaaggtgtttagtaatattaatgttatcattaatgcaaatttcaagagcaaaacaatatccccacaaatttgtttggccaaaaaatgtatagtttgattctagaccaaagaaaatgaatattagatatgacttttaatgattttgctacttattaataacatgattattattacttagaattacataaacaaagtatagagtagaaaacaactagtactaccttaatcttaattaatcatgttcattcattgtagttagaatcaatatatcacacacacatatatatatatatatataatttataactatggatagtggttgaatatgatcatgtagctatgacttcataactcctttactcttatgcctctatattgctctttcctgaaatatacatacaaattaagataatattagcacaacaactatgtcaaaagaagaataagaagataatattagcacaaagtatagagaagagaaaaacatgaataacatatatatatatatatatatactaagtatatgtatgtatatattcaagtgaagaaagaaagaaatattattaaatgatgataaaggggagctcccttcagtccaatgggtgagctaagaaagtggaaggagttgctcccacgccatgcacttggccaaaacccttaacatttaatttcaccattacataatatacatacataaatacatataattggaactaattagaatattattggaaacattaaggatagccaaaatgcatgaaatggcagctctacacacttctcagccctctttattggactaaagagagctccttctacccttttcccttttccatataatcttacatatatatatatatattatattatatatatttgtatgtatgtatgatcaaagttagaagaaagtagtaggaaggtaggaaggtaggtagaggatatatacatggtccttccttcctcaacacaagttcatttgccttcttatatatactaccattttttgtctcttagttaggtcattacataaatatattataatattaaaataccttctattgccaatgaattttgtcttatttttttctttcaaaaaataaatgaaaataaagcagaatacatcttattatgtactgtatttagaaaataaataaacccaaaatatatataatctaaaacacaataaaaataataataaaaaataggctaactaagatttttacccctgaactttaacatgtatgaaatcatgtcccctgagcttttaataaaaattctccctgaactatt

SEQ ID NO: 219500 - DNA, 1059 bp, Cannabis indica
aaaataaaaaaaataaaaaagtacgagcaagggcacatcaatctttttttcattaaattaaagaatgggtcacttctttctttctacatagaactcaatttcgagtcctcacatcacacagtcaccaagtggagttttgtcgttttattatatatgactcatagatgatatatatattcaattgaaataaacattataaatcataaaaaatgctaaaataattataattattagttattatattcttaaagttggtaattaaggataggtttggttgggagaattaaaatttaaatattatatatataaaaaaaaatacatcatgctagcgatatttataaaaaaaaaattataatgttttagtagatttattaattgttattttttttttttatatattatacctacataaaggtgtcgtcactgtatgattttttttttctttccaacacaaaatatatcatatatatcaaactttaggaaaaaggaaaatttgttatagggagaaatgagtaaaagaaagagactttagttataagtggaaatatatacatatatactcaatagcacacaagaaaaatatataataatttcataaccactagctatatatgtatgaaaactataatgatcttgagagagcatcacatttttgtacatagatcgaaatggaacctggtttcagatgtagttttgtaaaacaataaatatattttaacaattaaagagtacttaataaaataaaaccttccaatagattaattaatgacagagagtgaagaaaagaaaagacaatatatatatacatatactatagtgtagatgagcatgcatgtagatttaatttggattatttatataaatataaacaatagccgacaaaacacaaacatgtccactactattctcatcaaagtttaatcttaggatattccatgtctccaatgaaaaatggagcctagctcccatcattcttctcttatctaatattaattatatcttagttttcacctcattttacattacattaatgcccatctaattaactctctctctctc

SEQ ID NO: 219501 - DNA, 3636 bp, Cannabis indica
catgattctcaacaatgtccaaccgaaaaagttatatatatatatgtatgttatatataccttgttgtttagggtttttgataaggttgtagagaggttggtagatgtctataacaagcaagtttaagccagataaccttttcttcaaggcttgagaagttgaatttaatcttttattaaaagaatttgcttcgaaattaagcttttccacacattggtcacttactaaaccaaatattgtcatcgatccaggcaaacaccctagtggtggcaatgaagtcactccaatctttcgtgctcccatcgaatacaatttctatataatatatatgaaattaattagtatatatttcttaatcaaaaaatcttataatcatcaaatatatgtcaaataggtcatatagttacatgcatgcatgcatgcatgaatttagaatttatacatatcactaaaacatgttcatttcttttcaaatacacaatatataaatatgtttaataaatatattaatttttgcataagacactaaaaaaaaagctatatttaatgataatattttaattacaacaaaaatattattacctgtgactaaaatatagtatttagatgtaagttgttactaatttaatttttatcacaacaagtattgtgactatataacaaattgtgattttcgtgactaataaatggccacagattttttattcacaatataagaatgatgatttatatatatataatgacaacttttttatttttaatcacaagttttttgttgtgactaaaagtaagatttttcgtattgaaataacaatgcattttaaaaaagaatgcaccgatatcttcctatctatacatgagaattttttagtctaatattttaatagtcgtagttatttaacgtatttcgcaaaattttaaaaaaaatcaaaaaaatataacacgccaaaaatagtattcaaacagtcttttacatgtgtgactcctttatatacatgtgctattttttatattgtaaattattttaaattttttaaaattaaataatatatgttaaataactatagcgtccacaatcataattgaaaatatagattgattttttttattctgaacaatgccaaaacagcaggaaatgcattgattatagaagcatccaatagtttattaataataaaatttattaataaataaaacttgaaagtataacaaaattaatttgtaagtagtacgtacctcaacaaattgtgtaaatgatttgagaagagggacaaaatatttatcaatagatgaataagtattctgaagagtgggactaatatgataattttgaagaatgtcacttgttccagcacttattacataaagaccacctgaaaatattgatgaagcattttctttaccaaccattcctattattctcttttggacctctccataattttccaattgctttgtcaatgaaattgtgccctagaaaaataaaataaaagacatatccaataatcaccatgaatatacatattagaaatcatttaattataatttgatttctaatttaataagaagttaaatttgtacatataaattggctgtagaatcatcatatcccgaagaacccgaagcgaaatttgctccctttataagatttctatctgtggcctttgtgttttgataaggaagaggataagaatcaaaccctagagtgtcaactgcaattattagaaacataaaaattaattaattagagactaaatataattaactaaaagaacaagaaaaagaaactaaaacaaaacaaaaatcaaacactaacacaacccgaacaaacctagaaaaaaaaccacaattattattaattacctaagaaatcaatagccaattttccattacaaaatcgaccggtaggggtgtgatttttgaagtcctgtccataaggaggaaaattggctttaacaaccgttgctaaattattattgttaccaacatcgagtactgaatctccgaaaagaaatactgctggaactatttgtgattgaacaccattcattaaccataagctgagaaaatattaattaatatataacaatatgtctccataataaataataagtagtactaattactcattaaatttaattaaacaaattacatacaatgtaatgagcttccaagagagagagaaagattgccagaggaaagtcatttgtatagagaagagatgaaacaaaatattggaaaattaatttaataatttgttggttgattattatataattttgtgaaattgattaggtttatatttcaacaattaatgtaatctttttctaaaattctcatgtcttagcgcatcattagcacttatattgacctagaattaatatattgttgaagtgatggtgaaaacaagtttgaatttgaaaggttaattgttgaagacaattttctaaatatagatttttttcatgcattgatgcaattgtttttgtttttgttgtttttttttcttacttgtaattttttttttggaagttatattaattgcttacattgcaaaatataattaggggtattcgcgatccaacgtagtgcatgttgtaattttttttcaaactaaacttattaattttgcaccgcaagattttaaaactgcaaaaatcacactgcaaaaatgcagtatgttacggtgcgatttgaacagtttacactatcatcattatcaaatattataataaaaatttaaaattcaatctaataaagttttaattaacataaaaaaaatatcttattaaaagatatataaattattatattgaattgtctcttaaaaagatatgcaaaatgaatgcaaatcacaaccgtagcacaaaaaattttaaatgtgtgtagtacggtgcaaacgatttgtgcagtgtaagttatttaatgaagggttatttgcggcataaataccttatgttttcgatttcatacacttaaatacctcaacttttattttgacggattaaataccaaacgttggtttttattcatttccgtaactactattctgttaaatgctgattgtatttattaaaatgccacatgtcatatttttattgatccatttcatattaattttgaaaaatattaaaatatttattttaataaataataattaataaaaaatatattttaaaattataaaaattaaaaaaatatgtttaactagtttttaattatattggacacttaaatcaaaattaaaccaaagaatattttttctttcaattttcttataaacaaaaaaatcattgttttctaaactaacttacaagaagaaaagctatacaaaattattcatactaccaattcataattaaactatccacaaaatcaaatcacttaaactttctagctcagattaacctacaaaaataattagattcaaatcaatattacacagtaacaattaattagttaaatcagattctaaaacactaaaatcaactcaagaacactcatgaaaatatcagatctgagttctaaaatttaaaacacaaattaaacattatcaagtcacaaactaatctcagtctcagatatgtatgagttttcccatcaatagatccactcataattttttttttaaaaaa

SEQ ID NO: 219502 - DNA, 5008 bp, Cannabis indica
actagtactttgatttggaagctaaatggggtttgagattggaaactttagaattgagattaagctaaatggggtttgagaatggaaactttagaattgagataaagctaaatggggtttgagattggatttagctaaatttcattcttttcacttttgtttttcattttttctcaaatggggtagttgagaaaacctttgataagttaagagtacataaatttcatactactaatactaggatttggattaagctaaaaggggtttgggattggaaactttagaccttataaattggggtcttttctttggataaggaaaaaagtattttggagtgaaatgactaagaatgaatgagaaagagtgcattatagatttgatgatatgttgtaatgacttagctatatatatgagtgtagatttcattttggttgggtttaatctgattggccattgttgttcacttgtttaaaggattactacaaagtgttggaggttgattatgatgcaactgatgagacaatcagaatgagttacagaaggcttgctttggtatgccatttcatcttttctttgcacatgttttttagcacagttggttatgacattttcattcatttttcttgccaactattttcagaaatggcatcctgataagcacaagaatgacagtgctattacagcaaagtttcaagagattaatgaagcttacagtggtaaaaaaccaaggccaatgccttatcttttttcatgcctttgttttgcaccattctaaacaaaccctttggtagtcttagtttgaatgtcttttacattatggcatgcatataaacaaaaccctttgatttttgtggtcatttatggtaaaacagtgatgtaggaaagggaaatgaaaagaaactatggggttcattctggtttgcaacatcggtttatagaacaagaggtttacgtacataggctaagttgttttagtgttttaatgctatcggttcaattgtaatcctaggtggcctggctctttttaagaccaatgcttataaatatagggaggttcctcatttagattagcttggaattagaaaagagtatactctttgtggagagaccaattctctcgaaagattgggaatttggagatttaagcctctccaaagcttatgcactgctggatttcggtgataagaaccgaaaactacaaacttaagaagacaattaaacagtagcgaaccagtagccaaacagaaggaaaattgtatagaatgaatgagaaaaactagtcacaattgatgagagccattaagcccctttgatgcaaataaagttttactcaattcattgcatacccttctatttccctcactcacctatttatactattctatttaccactcaatacacttagtcaaatctctcttatttgctatactcaacctcaccatactaatactaagacttctgatgttttataatattttatgttgtatgctttaaagctttatctgtctttgtgcctgttttactatttttaattgttactacggttttcctccgccataagtgaggctccctattaaaaatgagaggaggttagtctacgacttttgacctccatctctttttccgaaaagaagaaagaaaaaaattgtggaacttctccttttttggttttgtctatgtgatacggccttgtagcgataatcgccaaacttttgcgtattggcgtactccttagaattgtagagaactgagaaagagtatagggagagagagagagaattaactagaggggaaataggaatttatatacattcttcattaattggttaagtgataaccaatagctctttttaacaagttaccaatcttcacacactaacaaacaaatatcgtctacactaataaactactaaaccgatgagtaatacacattatgtaatatagagctaatataactaagtgcttattattttctattctttaatattggtgtatcactatgctttacttgtttcagtttctttggcaaccaaataaagatacacattgatacagagttctgttatagcatgacatataacccatggatttttgattcaaccattggtaattaattagtggataaacagtggtgatatataggaaatgaaaagaaaatatggtcattttggattgctggattttggtgttaaatctatgcactatgctattcttctttgaaagagacagatgttacttgtctttgactgagctcctcccaaacattattcgggagccttgcttatggtggaggaaaaccgtagttacaagctaagctataacttccgagaagaaaagatatataaaacataagactccattctttggtcaagtcgtgaaaagttagctcctcaaaacctttcgatttaaataaccatgtagtcaccaagaattaatctttcaccatacatcttcagcccattcttctttgatcggtcacttggcaaccgaaaaaggagaagttcctcaagccaaatttatggatagaatgttttttgtaagaatcaaaagttcaccgaaatgataggttctataactctatgccattgtaaattggtagcttcaaaacaacaccaagttcaccaaagtccacaacgatgtctcaaacaagtgaccctcatatttgctttttcgttttgtgttactgttgttttactatgtatagagcttggtattgaaaatttgtagatctagaaattcatgtcggacattaaaccttttcacactatttctttttaagaaccaaaaagatttgtgccattcggactttttttaatgttgaactgtgatcaagacaacaaaagttcttctagcaaaatccaatatttgctatgttagaagaaaaaaatgatttgtggtccatttaacaaagacggtttgtaattgtatagcggtatttgaaaacgtacaaaccaaaaccgtgaaagcctaaaaatatacttaccctagctgaatgtgtgtcctgaaatcattcttttatctactttctttgtatctcattcattatatatatatgattggaattgagaattgaaatgcatatggtgctggtttaagcattaagaagtttgaattcaaatgttttttgaatgaagtatgtcttatgatttatttgttgtgtgtgcagtgttaagtgatccagctaagcgattggagtatgattatactggaatttatgagattgataagtatactcttagggtatgtactatgtactatgaataatccaagtaatcttgtcctattattattattattattaatctttattcattttcagattcagatgcaaatagtaagtgaatgaatgaatgattgattgttatattttgtaggaatatcttgcaagattcaaaggaatgatacttacatgcaatggccttggtattagtcaaacatcactatggtaatacatatacaaatacaccatatattgttgttgaaatttgagatcatagttattagctgataaagaagttgttgactttgaactgtcatataacaatggcaatacatatataagtacatataatattgtttacttttgaactgttatataacaataacaatacatgtatatacaatatatatatatgctatataaataaagtttctgactttgaactactaattacaaatttacaattgcaatacatgtaaagtaaaagtacatataattttgctatgatcatattttgcagataaagtttcagactttgaactattcataacaatagcaatacatgtatatacaatatatgttatatatatatatataaaatttctgacttttgaactgttaataacaattgtaatacatgtaaaaaagtacacataactgatgagattgttgtcttgtgatcatatttaccagattaagtttcagactttgaactgctaataacaattgtaaatacatatacacacatatgatacatgtatacatacaattttgttgtgatcatatttaccagataaagtttcagactttgaactatcaataacaatagcaatacatctatatatatatatatatatatatatgaagtttctgacttttgaactgtaacaacaatggcaggacacagcaattaaaggaagaagaaggtattgagaagaatgtggataatatatataaaccataaataaacctctctttcttattttcataccataaacataagaatcagaaatgacagtacaactcttttcataatcatattattcttatctaatcaaatcccaattcttcttcttcttcttcttctgttctaaccctaaaaacaaaataaaaaaaccattactgagattctaaaaaagaacgaatatgatccataaaggttcgatcttgaggcctatctttccgtttgacatacccacgagccacctcctctgtatacccaaccaacccttgtcgtccattcttgttccaaagcttaccggcgtagctagaatgagcgaaataagcctcaccggcggtgagaacaacaccatcatcatcttgatgatccaacggtgataattgaattgggagtctttggtaatgagaacgagtgatgccctcgagttcatctaatcgagataagccggaggatgaaactgcgtacaattctccgatgactttttgaccggagccgggaaggttgatgagaaaaggaactctgtatggaccgcaaacaagagggtaattgagatgggttttgtagtttccgatgaagagagcgtctcctgttgtgatttagatcttgtaagaggacatggttggagaatccttgcttcaatgttccgtaggtgaagatcaatttcaccattttctctttctctgaaaccattttcctctctgtcaccattttttgggcctctctgtaaaaaaaataaaaaatcgaagtcttttttctttcttgcttttgcctttctttaagtttatatatatatatatgtcccatttttttatttgtttattttattt

SEQ ID NO: 219503 - DNA, 2223 bp, Cannabis indica
aaaaatttataagtgatcctatatagctacaatgttcacgatcatatgaaaaaagatagtaataaaaagctctcctagatactgaaacgatggggagcctaccaaaatataattttaaaaagtagtacatatatattttttttaactttctgtccccactgaaaaaattttatgggtccattattggctatatcatcattcctataattttttttaaataattcaaatagctagcttacaataacaacaatatgattctcatatttatgttttgagcgaatgttcaataaaacattaaacttgctttcgatattataaattatttataattttttaaaattttacaacatgttatataactataaataagtatcattatgtagattttttaattaaaaaaaagtactctacatatattttaattttagggtagaagttaaaatagaagattgcccattctatattataaatatacaattacttaaattaatgacccacatcaatcatcaggttgataatcaatcataaagaaatgcaccaaaatactatacttaccttaatatgatgtgattaagtacaaaatattgacaattgtattttgatacatattttataagcatattattatattaaatgaactataggcagtttttattaaattctctcccacaactaattcggagaatatttgacaattaattaggacatatagtttggcaattgaatcaaattaattggttactaaaatttttaaaaaatattatatcaattaaattaactatagattttaaatcaaatcaattataatcaatattattataaaattaaaaaaaaagatcataatattcgtcactcataattactcaaataataattaaaaaaagtacaaaatgatattgctaatacatgttttactttaaaaaaaatatatgtcactgtaatttaggtgagagtaacttaataaaaatacaatttacttttgccaatttaatagatttttattaatagataatagtacaatagtagttatattgagcccgttaccatttttaattaaatttacttgcctttcttctagattgagatataacaaccatatgatactaaaaaaacacatttcttatcaatctaatggctccaaaattattgaagtgtgacattcctcaaatataacttgagatttcacataattggccttagaagaaatcagaaacaccatacttatgtcttttttttatgataaaatttttatgttacattaatactagttttttgtttactttttcattcttttcctttcatgagattgtttttttttttccataaaaaaaggaaagagatcattattattgataaattatactcctaaccatataaagtcttacaatacgtagtcaaattaaaagtcttacaatatattatgtttggactttagagtacttggcataatatatatttgaaaagccaaataaagctaatttaattaaggaacaaagtacatgggattgggcagcttaaaggtgcgattgcccaaacattctccttgaagatcactccattgatctcccacattgccccaaattctgtagccttctttcattatttgattccgaatactagacttgtatgccactgcactctgtcccttgtatgcaacactccttctcatttataaaacatacaaattcagaaaattaataaatatgcaatatcttgctataaaagttaaataaaaacttactattgctctactcatcaactatattcactttatgatatacactaccctgatatgtttatagatataaatattatgtatatattcaattgaaaacgtctagggtacgttttgggtggaagattgaatgataatgataatgaaaatagaaatgaaacaaaattaactttaatatgtatatagataatttataaaaaaggttatttttttttcatggtttttctacctattttaaatggaataatcattctattaaaatcataaaaaatcattttcttcaaatattttaatactttaaaatacaaacaagaaatataataaaatttgattaatattttcgattctataatattactccctgccaatattattactttaatttaaggggaactttcatttttatagcttttaaagtatatgtttgtaaaaatatgtatttttattttttttttctaaaaaaagttattttattagaaattttagaa

SEQ ID NO: 219504 - DNA, 4677 bp, Cannabis indica
aaaaaaaaaactcaaaaaaaattattaagaaacatgaacaaaatagtataattgtggagattggctcgagactagctatcaatacgctcaatgggaaggtgctctattgggctattgagaactgtctctttttgtattaagtcatctcctttattagttgtaatttttctaatgttagcaggacttgtaactatgttgcccataatgtggctaaatgagttttcacccaccaattgtacagcgaaatctaactgcttatttgattaatgtatgaataggcttatttttttaaaaaaaaaaactggttactctaaactatttttctcattttttttatttttcccacaataataagaaaacccataaaaatgaaaattctcctttattgaaatacatgaaatatcacacaaaaggttcagacaaattttagctattttacaatagagggttatatttcccaaaattctaaacaaattcaaactcacaacataaattccagattcaaatccttatttcacaaacacatctatactccttttgccacaaatgagcttttgaaaaccttgaaaagtttcacacaaaaataaaaatataagaaaaaagaaatatcagcaccaaaacaatctatctttgacagaaattttgccatcttcctcatttaagcttgtttccttgtaatccattgtccatttctcgaaagtacagtcaacaaagtcgtagtaacccccgtgaatcgagagaactccttccctaactttctcttctatccaagggtatgtcagcaagtttagcaacgatcgattaatcgattcctgcattaaagatagtttacaacatcagcattcttaactcgagaatgttcgaaactaaaacagaaaaaggaatacaaattgatcagcatttagtgttgtaatacattagtgttaagtgtaatcttgacaaaatagtggttaaaaaaaacaccatgatgtaagggaaggtaaaaaaaaaagagaaagagaagttatttcctcaacgggttcctagttcgggaattcaaaagcagtttaaccaccaaaatagtttaccatattatgaccacctacctgtattaaatggggaactactatggtactacccttatatctaacttatctaacgtggggaactaattaatggaccaaactttagaaaatatgaagtaaagaaaagtcgtgttcaaactggcagtagaatctcattacagatggattaagacataaaaaatgatgatagagaatacacagaaaattatcatgcacaatacaccaaaagggagcaattgattgaacagaattactttcgtatagtctagtaaaaagacattcatgtgaagagcattgttattagacactatatggtacccgacaccactacaagttggcatcttacaaatggttaccggttatctataactgttattaaattaaaaatatgagagacccgatacttagacaaactaatattagtatgacacctcgtggtggtgctacacatcttgataccctttagcatttcttgatgttaatcagcaaaaacagtgggttccaatccattcatggtaatttaccttaattctaaattataaagaaatgtacatgaaacttttgcaaaaccagataggttaggttaggaaaatataaaactaattgattacaagatccaacatgggcctaattaaaaaaattctaatagatgtgtggctttaattaccttctcacagtgtttgcattgctggtcaaagttcagatttgaagcagcagcctttgttttcagttttgcgttctttccatgaataacccagttatgaatgaagttgctgatgaagagtttaaaagaatcagacatagagtcataactagttttctacataacagccgaaattcatgaaatagaaaatgaagaaaattgaaccttgaatccccttcaccttccatgctcataagagcacgaatgccaccacagcagctgtgaccaataactagaatattttcaacctacaaaagaaatgacattttactttagccccaaaagaaagaaagaaagacttcttagagattttctaggcataccaatgttattgtgaaagtagtacccctaagataaaagctatgaaaagaggacatatacacaaaacagctcttatcagcttacatttcctgtatcactatagattggtaactagagatgtgtagaaatcaattcaaagtaagaatactacaatcacatcataacaataatatattaaataagaaaccttacttttagagtattcaccgaaaagtctaatgcagcatttgtttccgatggtcccttctacaaaatattgaaagcagaaaacaaaatgagaaaaaacagtggagaaaacaaagataggtaggaataagcacaagtagatctgaattacacataattctacgaaatatgtttcatacctcaaaggggggcaccaggtttgcaatattgcgtattgtaaatgattctccaggttggaatcccagtattgcagaggggcaaactctagagtcagcacaagcaatcaccatgaactgttcaacaaatcatcagtaaaccaagttactatttcaatactacagcaaaaagaatcaccaggacataagccttttgtacaaaatgaaagaatataataatagcgtaggcttgtagaaaatcaatcaaattaatcacaaccttcggttcttgattctttgcaagttgctcgtagtgttctaagttttccctattgaaacattgatcagaaagttagacaacagtagtgattttgtttaaataaaagacattcttaaaaagaaaaagagactatgcttacatgtatttgtgcttcttgaagcttagaaaacgacgtttcaaattgtcaaacaaatcagttccactttcggtttccactactgtctccagtttgttgtttctgtgttcttgagtcaacgccggtggttccctcgaagcactcatagttagacctggagtagtcctgcaaattataaactaaaaacaactttacaagtaaatctttaaagtagagtttcacagattgtttacatcaaaagaaaacattcttatctctcgaggtcaatccaaggattgcacgccctcacaatcctatattgcaaaacatttctgtacaaaccatgaaacaacataattcagaagctttccacacaaaccaaggaaacgacccaaggaattccatcaagtcaatctcactaataaaaactgtaatccataaatttgcagcaccacctccaccaccaccaccatgaacagctaactgctcagacttataatagttattcaaattgaaaaaaaaaaaaagtagaaatttactgtgccattaaaagttagattgattagcagtagcagagttgaattaggcaaatatataaatataaattttctctcatatttgcactgcacaaacgattgagcttctggtgggaaaaaagaaaaggtttcaaaattgcaaaaagtcctcacatgataacataccacattcaaattaaattctccaaccttcatgcattattacaacatacttttatttaactagcaaagaatatgagagcaacccacatcataatatttgaaaaaaaaaacacagaaaaagttaaaatctttcagcaacccacctggaattagccgttaatctcaactgggtatgctgcaattcccctgatttcagcttagaaccaaagatctacaccaaaaaagaaaaccacacgtaaacaaacagaaccaagaaaaagataagcaaacacagaaagaaaaaagcatagaaaagaaaagaaaagagcatactgacttgggttgagtcgatggtgcgaggagcaatgagagaagtaggtgggtcatgggagagagaaataggagaaagaaacgccattgaagatgaaaaaagaagtgggtataattttgagagaagaagaaaaaagttgggttcttggaacaaacataataatagggtgtgaaaaagtagaaatgtagggtgatttgatcgatgagcatttggcgatctttttctctccaagaaagacggagaaaacaatgacagtttaattaaacaactaataacttattattaatttttgcaaagtgtcaagttagatcaatgcccagctcatcaaagattgagatttgaagttgaaaaaaggccctacttttcttctggaactttccaaacacagacaaacacacatgtaaaagcaattgctcttgttgtttgttcttgctttaaacgccagctctctccatttctcattcactcactcactcacattatattttataataaccaataaaataaatagaataaaattagtcaaaaagaaatgtaattaattacttaaaaatcattttttttttcaccccaaaagaattactgtatgaattttccaggagaggagaggagcatatccgtttacctgaagagaaagtaaaatagcatatccacttctcccatgaaaaagtaactagtggaatatggagaaggtataccctacactacacctaaataaatgttgtgttaattaccaaaaaaaaaaaaaaaacgaaaaaaaacgtaaaaaacctaacctaccaactaaacttaactttttttttacttttttttaacgtacgttagtttactaaattctaaactct

SEQ ID NO: 219505 - DNA, 3683 bp, Cannabis indica
tttattttaatttctaactttttttaaaaatattttatattttaaagaaaattcaaataatagtaaaatatcaatttgtaaatttatgattttttatagaaaaattattaaaataatagtaaaatatcaatttgtaaattactctaataaaatattaaaaatgagagaattaaggagagaagagaaaaataattttacaaagattttaaagtgttcaccgcctcattcttttcctttatatatatattgattgataataaattttaataaagaaaaatgttttctaatattttcaccaaatataaaaaacgagtgtcaacacacctaacacgaaatataaaaataaatgacataaaatatgacataaacagaacaagaagatacgttttgccacccttacttttcaatcttcactacaatttctcacacttcaaatgtaaagcaaacttcaacaatttctcatcattcattatcattaaccaaactagtaatcaattacaattacaatcattcgtacaagtgtaaatcctcatcagattcaaacgcaccgataacaaattgactttaaacttggataaaaattgcaattttttctgtttacctaatttgttggccaaaccaaagccatgttaatcaatttcaaaccaaaagtatcaaacaaaaagacctatatgtaatagataaacattattttaaaaaaatatatatgttattacaataaacaatcaccgtaaccaaaacggcaaaataagctaaatttaaaatagtaaaataaaaaacaattttatacttatttagaatatgtgttgtcttaaaccaatgttgttatatatttatcttcatcaatcatcacctaaatccacctatatataagagttatcaattactttttattctcaattgaaaagtgcaaacaaagcccaacctctctacaattactattattattatttagaaaaaaaaaattgttgagaaaattctcaaaaaggtatgtaaagcttcacaagtgcaggcttagagaagatgatccatctttgataccagaaaacaagcacagacaaaattcaggagaactcgccgccattacctctaaaaccaagcaacactacgaaaatgattttagaaatgtttgtgaaggatcagaagtagtaaaagaagaaagagaagaagaagaatatagaataatgcaatcaaacaatcttatagaaactatagagaaagtgcttgtagctaggcaactccagcaatcaaattcaaaacgattggctttaggtagttgtactattactaatcatgttctaccaaaaaaataatgacattatctatcctataataatatatttgcaacaattatactatactaagtgatattttgttgttcatgttgtaataatgtttgtatgtctatactttcatcaatgttaaatattgctgctactttttctcaactttgttttttgtgaattacattcacatcaagcaatttgtgctgataactaatttcaatcaaacaaaatgaaatcatttttcttattggcatgtatatactctaagaatgtaagaaggataatgttaacattattataataattgctataattatgacaaaattagtgttgttttttgttgtttagtattagaataaagttgaaactatatgcttggaacaaaaaagaatgaaagaaaatcttgaatttagaatctttatgtattgttttgctgcaaaaaataaaatgtcgttttacagccatcaaataatttcagctgtcgtttcattcacaaacgacatcatctatgtgaatctcgacctcgtgagcgagccaaaaacgtgcaacggtaccgggagtagttgatgcgcttcgaatccgaagacttcgtaacgcgttgaggattgaaaaaaaacaaccttgaacaagttggcaatggagaaatcttcttcacaaatgtatatgttcttaacttaaccttttcctgttctacgatttttaatcttatttctatgtttttttttttacttttctcacttcaatttttttttggggggggtttaaacttctggtgtaggatctttgaaatttgattcagtaatagcattgcattacaggaagcttccgcgttaactgtgagtaaaggtttcattttggaaagagtaagagggaaaacccttgtcgttcttgctgttttactcgcatcttttttctgtttcgtatagattacttcactaaaaccacgatcggatcatgagggttggttcccgtttactgtgacaataaacaaactgcctagaatttagtttgagtaatcttttttgcttgacctctgttgtgttagatatcaggaatcccttgtggaaaatccaccaaaccaagtaattttagtaacccttttgatttggtgatttattgctcttgatttttgtcacaagttgtagttttgggaagggatcaagatgggtttaggtatctcctgcttgataggtttgaaggctgctgttctgttctcatcttttgtgtaccttaggaactttggtttcaaactgttatcaataccatttctgtatgcctcgttggtatctgttttaatctccattgcatctctaccggctgtgaatcttcccatacttttagcaaagagcacagatgggagcttccccttgtgggcaatggttatcttcagcccatatttgtattttgtccggggtttctcggcactgcggagattgttcagtggggaagctccttattctgaaatttgtgatggtttgtatgttggtggatggccttcttcaccagacaaattgccacctggtaaccctgccattattgactgcacttgtgaacttccaagaatgtcagaattctctgggcatacttacttgtgtgtcccaacgtgggatacacgatcccctcagccagctgacattgaaactgctgtgaaatgggcttgtcgaaagagagaactgaaaaggccagtgttcgttcactgtgcatatggtaagttcatcagctgctaaatccttgttgatatatatttttttttcatgttgtattattgtaaaagaaaaaactgttgaccatcgcttagccaataactcgtgttgttaagagagtgatgatacttcatcattttgatcttgtagaatcaagtatatgtcttttaattgtatgtgcattgtttatatgtagtagactgtctcaaccccatattatagcagttgcaacttgtttactttgcatgaagtgtaagatataatctgtactcattttgaatcacttagaagatggagaggagatatttaacttgtagaagctctgtgcacttaccctttttcttatcgatggttcaatattctcacatactaatctccttaagatggtggcaccaatcttgaagttattttgaaatttctatagggcttttgtcttacttctgtaattagaaatgacaatgataaacgactgagggtgatacgttttctgtagcagattacatttctattcctctgctgtctgctcagttctgtggcaaaattgttcccaggctttcaagtacttgagttttctaattgagcttttgcttcttttgtttaggacatggaagaagtgttgctgttatgtgtgccttattggtggcccttggtgtggctgaagattggaaaagtgctgaaaaattaatcaaagaaa

SEQ ID NO: 219506 - DNA, 2271 bp, Cannabis indica
tgtactccaattgtaaaagtgggttaactgctgtatataagatgaaacatcaaactatcaataaagctatttttaatttattttctttacaaactaaagttctttaatgaaatgaaatagagactgtaaaatataatttttgtgttaaaaaaaaaaaccattccaaccaaatactaaaacctatcctatatatttggtgatcatgtctaatatatcccagtaaatttagtggaagcagtagaaaccagcaaaatgagcttttgacgtcgtttaatattaataatatatataattatttgatgtattttattagagtatatattttgtgtgtgtgttatattgttagaaaagaaaattaatatagtgctaaaaatattatacaattttggtgttatagttgaagaggtgtgtttgggttggagaatatatatgctgttaaatggtaaatggcacattattttgttgagtctgacttgtataaatggtaaattctaaagttgcagcatttgaaacaagaagcaactgccatgatgaagaagatagagcttcttgaaatctccaaacggttagctaattaagctcaatgacttgattttcttgtactcatttaataataaaggcatatatataaatatacatgtataatattatataaaactttgaattgggaaactaatgcctcaggaaatttttgggagaaggtctgggttcatgctcccttgaagaactacaacaagtagaacaacagttggagaagagtgtaacaaaaattcgagcaagaaaggttaatatatacatcacaaagccatatacaaaaatttatttatgtatatcttgttattactgctgattattgttaattgcctcaactctaattcagagattgatatatatatatagtcaacactatcatattttgaatagtgtataaaagcagactatgataacatcatctttgacagtaaattagtcactcacttttaaatgaaaaactcatttttgtatttatcttatatatttcagaatcaagttttcaaagaccagattgagatacttaaggaaaaggtaattaaaatgagacagcctctacatatatatatgtttattcttttcactctatctcgagataatgatttagtaatttgcttgtggaataataaagaattaatggagaaaatatgaaattaatatgagttgttgtatattttattagtgcttgcctttttcttttatttatttattttttcaccgaaagaagaatctaaacattatgttttcttgtgtccattttatattctaataaaattcaggaaaaagccctaacatctgaaaatgcaaggctttctgagaaggtaggtaactggttgtttataattataattatttgcattattatgctccagttgaatagaatttgtggtcattataaattccaattaaaaggacctttctatatacatgagtctttccattactaattaccattgccatttaataatatgtacatatttacttatacagtttaatttggcacatctaatcatttttgtttgtttgatttttttgcagtatggtattaaaccgatggttcaagcatcaaataataataataataataacaataataataataataataataataaccataagcagatagaggacttgaacaacacagaaagtaatcccagttcagatgtggagactgaactattcattgggctaccagaaacaagattaaagcgtctacttccaaagaaatgatcataagcttaaaattaagataagcttgctgagaatactgctttaagtttttttccacatatatataacctgtaagattattattataattattctacctccatataattatgtctctatatatatttatatatattcttgcactgcaagtatataataataaactatagcattttgaaatggcaatacgtgtactaattgtaagatccatgatattgcgatcatcatcagaaactactaactgactacatatataattaacgcaatgcattctgttgatgaaattctatggttccattcatttcagcatccaaaatactatttctgcgttattgttatatatgtatgtggaggtcaggttagctagcttgggctaaggggttctactaattttccacaaaaatagtggcaccagtactggtttggtaacaatatggtactgtcttttaccaattctcatttcagtggaaatgccaggttagaaagatttacttcaaaaaaaaaaaa

SEQ ID NO: 219507 - DNA, 3205 bp, Cannabis indica
atttcatattattaacagtgtcagatattgaatctacttaaaaaaaaattaggccatatataaatggtactagacaccattgtactgatgctcaataataatacttatttttaattctataattattattcattaatattaaacgaactacgaataagacaactaattatttgggctcgcgttgcttgttctttttcaattcatcagtttagtaaagtaaggtcggccttaggtataagcgagttaaacgtgtgcttaggaatcacattggagcacaaaataaaaaattaaagagtttattaaagttttattcaaataaaattaaatatattgtaaacaataaatattcaatggtatgagtttaattcccataacacctttaagcccataatattttattagcatatttgcaaaaatattaagaatacaattaccttaaatttaaacaagaatgcataactttccaaaattcttttttctaaaatagaatctagtttattattaaaataaataataatagaaagtagtttcccattttctcattaaaataaaatatgttttttattattattttagaaagtatttgattggttcccaccaagccttcccctactctcgtcgcaccatataacacacccctcctcctcctttgggatcggatctgcatagtccgtacactcggagcccctccgatcgctacgcctcggaagaagaagaagaagatgacttagcagagtctattgatccacacacccacagacattcatattcatacattcaacacttttcatttcttatttttcgtcttgggaagaacgatcgatcatgatgatgacgatgatgatgaagttatgttcgtgcagacctagctttttctcgggttcggttcgttggaattctgtagtttgattcaatcaattttgatttgtcggagaatttttgcaaattggaaaatggcggtttctccagtcaagttccttttcggcttcttgttgttttgtattctgctgtggttgctcttcatgtgagtatattcttcgtattttatatgaaatgctaattatattgtataagcatggatatcatcattatcatcatcatctggtgataattttctgttttaaattttataaatattcaattttgggtctttctcttcaaattacagtgtttgaaactgatgcaacataactaccattggttgtcttatggatattgtgttagaaataatgacaatgttgattgatgaactgtgaattgctagtttgtgtgtgtgtatatatgtatatatatgcacttttttttttgggtctttttgtattctgctgtggttgctgtgggcatttgatatagattacatacaactattatggatatcatcatcattatcatctactttttagtgataatttgctgtttaaatctaatgatattcaattttgtgtacctttaatcatctcttcaaattatagtgtttgaaattgaaactgatgcaatataactagctttggtttccttatggattaattaatggttatatattgtgttagtaataatgacattgttgattgatgaactgtggattgctagtttgttttatatgtatatatatatattgtatatgtattgtacatatctatactttcttttgggtaaactctagttttgtggatagttgttgtgagtttcatcatcttcatctacttttagtgataatttgctgtctggatttaataggtattcaattttgggtcactctcttcaaattatagtgtttgaaactgatgcagcataactatctttggttgccttatggagattgtgtttgtaatgatggcattgttgattgatgaattgtggattgctagtttgtattatatgtgtgtacacatgtattgtatatgtatatctttagacattcttttgggtaaactctagtttttgaggatagttgttgtgggtttcttttaacactgatttgtaagattttgtttggggttcttaaattgctgatttctttgtcctgccctggacatgagttcttggttcataatcttggctagttatgattagcgaaatgtaatttccttttacgccattttaagaaagagaagtaggttggaaaatgttggaatggtggatatgtgaaagtaatatgacgttactttacagtctttgaaagaaacattcttggttatggtatcaatgtttgtttgtttatttcattttgctaattaatatccgaaccgaagtaatttgtttgttcatttcatcactttttctagttcttacattctcatgacttgaattgtttaattctcactaaatatgctttcatagatttgcttcaaaacttctcgcttggtttttaagtcgcaaagtgggagcatttgtcaaatttcgtgttggtggatggaaatgtctgagggatgttgttgtcacattcaaaaaggtgttttttgatactttagcctttgaattgtaaggcttattattattattatttgtccaattaattgttttaggtgagatttatgttaatcttctaatgtacagggccctattgaatctttatcgattggagaaattaaaataagcttacgtcagtcattggtcaaacttgggtttggttttttctccagagatccaaagctgcaattgttaatatgcgaattagaaatagtaatgcggccttcaactaaaagcacatctgaagctaaaactaaaaagccacgtgcttcaggcagggggaaatggatggttgttgccaatgttgcaaggtttttatccatttctgtgacagatttggttttgaaggtataaattttttgagatgagtgatagtttctcttgtttcaggagggcaattaaattaacggcttaagtgtttttaagtgttattctttgctgctaatgtgttttgatatctcaatgacttgttttttacggttggttttgttttttgcattaatgttttcattgtgaatgtttacaagaatttcggtgtggtgttttaatccatggagtcccttgcgaaacagctgtgcaaacttcaaatctctcttctggctctaccaccccctcttctctctttttcttctctcttaaacacaaatacccaccatagctaagcacagatttttcttatctgcttagtatagtacgaccaaaacttttagttccatgtactcttcagcagaaacac

SEQ ID NO: 219508 - DNA, 5190 bp, Cannabis indica
agtgaaggccaaggtggccaggaattcccatggtggagatgttgtcaggttgtcactgcctcccactctacgtgggcctacactagctcagcaacgtatgatacgggctgcaggctagggtactcaaacgcccggtaaagcataagggttggttgctgggtagaggtctactaaggtagcaaaaaggtgcataaagagagatctctccctcatggatgaggatctgaaagagcttgctgactgcaggtaaaagaggctctactctatcggtcttcgggatcatcgttttgtaagttgtgctttaagctctgttcaccgttttggcgctaggctggtggaccatgaggcttgttccaagtggttggctgcccttaggtgctgctatgaggggtttgccaaccatagcattcctagggggactagcttgctagtgttatggctttgacactgatgttgttttgttttgttttcaagccttaatgaagttgagctcagtatgtgatggctctcgaggatgctcaaatgttcttcgggaacaggtgaagaacttggaggcttcccttatggtgaaggaaaatgccatatctaagctggaggctttcctgacagagagatagagaatgctttctggcttagagactacgcttggcgcttaaaacacaaagaagactgatcaagctgccttcacctcttggctaaagtctaaccttgatgagcacaaggagaaactgagggagactcttgatggccaccaggccataaaggaggagtacgctgacctctcctccgatcccacttatgagttcaagttgcgtaactgccgagcaagtctgccatacatcggcagtgagacttttgtggaaaaaacgttggctcgttgaaatgcatttttcgagagatggatggaggcaggccaaatcgctgcctatcgagaggggtcatcgttagagactcatgataggggcttgttgagctaactgtagaggaggtggccaacctagactctggtgatcccaacctcgtgtctttagatttagctcttcttgcccctacaaacatttggacaattttttcattagtaggattcaacattatgtttgcgtaacatagaaaatattttcgtgttccgtatagcccgtggctttttatggtgggtggccttttacaatttagaacactactttatttttagcccacgaccttcatgttcatatctttggcctataggccctctatttttgagcactactattatttggccctattgaattttttttatcatggattgtgtgaccgaccaggatatatttaatcctatttattttcttatggccttcacaagcaagggtccagatttactttgtcaagccgaagtatgcctacacaacttataggcaaatttagtagcttattctaagtgttaaaatttctctgcataagttctttgtgctagttagatgccttgtacagtatgggtgcccctcaagtgagcatgcaaacaagtctcttggttactttctattcaccaagtttcattgacattgcttgggttctttcttagggtgctatccatagttggcacgtggaactaaaagaataactttaagaagttaatgtacgagtaagtggtttagacacaataaatagaatataaacattgttatatattcattaattggtatttattgttttgcaacatacataaattgaatctaaaagattacattataatgatttagcttctagatgtcaagtggctacccctgcttacttggtaaagcagaggctaccattgaagaacggtggtagaccacgataaaaaggccctgggtactagggcttttctactctaatgttgagtaggtactttggaatagtgttatgtaagctagttaatgatagtatttgcgaaggtgctgtccattcctgatcttggtaggagaacgaactccatgttctcgttgtgccttcttagcttgtaggctcccttactagttatctctgtaacttggtgcataccctcgctgctgagtctttagtgtttatgtacagcctttggagctccaagttttccaatgaagaatttcctacttttgacttgtttgctgaaatgccttgctgccttttgctagtaggcttgcaactttaggttggcttgttctcttttttcttctacttcgtcaagggaatctactagcagggtattgtttatttgttggtcataggttgttttcctgtgacacaatggcactagcttgaaaggcaacatcgccttgtagcaataagctagagcaaatggagtttggagaggccgtcttctcgatagtcctatgagaccataggacatctattagcaactcaggctagtttccttttacttcctcaaggaatttcttcaaagtttacttaaggattttgttgacagcttctacctgcccattttcttgaggatgggccacaacaaagaagctcctgatgacacaatgtctattgcataaattagtgaacatgtcactctcaaactgcttgccgttgtcgaacacaatcttttggggaagtccgaattggcgtatgatgttcttgacaacaaagtcaaggaccttcttagaggtgattgttgccaagggttcagcttctttccatttggtgaagtagtctacttcaatgacagcaaagtgtaccccttcttttccctttaggtgtttaccaattatgcctatcccccacactgcaaagggccaaggatactgcatcatcgcaagctcattgggtggagtccttgggattataaaaaatctctggcacttgttaaattttctgacatagtcctttgagtcttcgatcattgttggccaaaagtacccttgtcagagtatcttcttggataggctttgccgcaacatggttgtcacagaatccttcatgaacttctatcattagtagttcaggttcggctttggtgacacaccttaagagaggtatggaatagtcttatatgtacattgtcctatctaggataaggtacctagcagcatttcttctcggtttgtttccttcatttttgtcttttgccaatgcttcaattttgaggtaagctgcgataggtgtcatccatgttagagcgtcatccaacatgttgacttcttttgggataataatgctgggttcttctaggaattgtatgggcaccaagtttgctttgtcagcaatggtgctacttgccaaatagggaagtgcatctgttgtagcattatgctctctagggatctgtctaattgtgtagcctttgagctgacttagaaagtctttgattttgctcaagtaagctatcattttatcacctctagttgtttattcacctaggaccattcacaaccagctaagaatcgttgaatatgtctaggtggttagctggtactttatgtgccagcttgaggccaactattaaggcttcatattcagcctcattgtttgaggctttgaagctaaatttgattgctccgtgcagttggtacccctaggtgctgtaaggtcaatgcctgcactggacaattggtccgtgcagcttccatcaacatggagtttccatgttagttctttgggattttgttgctactcttgcaatttctttttctttaggtcttacttttctcctgagtcttgagggatctcaagagttgagttggtgcactcagccacaaagtctgcaagggcttgaccttctatagctattcttggttgctatgtgatctcaaactggccaagcttaatggcccatttgagtagtcggcctaatgcttcaagtttttacatcatttagcccatctcccgaagtggttgatggtgtacacctttatgaggatttcctggaagtcgggccttagctttctagaagccaagagcaagttgtaggttagcttctccatgactgagtactcactttcggcatcgattagccatttacagatgtagtatacaaggtgctacacactgacttcttctcttgtgaagacatcactcatagcgtattctgtgactacaaggtacacgcctatctcttcattgtctaggggtttagacaacacagctggtttggccaattgtttctttaactcctagaatgcatttttgaattcctctgtctattcaaatttttggttgcctttgagaatgttgaagaagggtacacatttgtttgtagacttggacacaaatctaccaatgcaacaatgcgccctgttaggctctgtacttccttaaaagttgtgggggacttcatgtgtaaacaggcttgaatcttgtctgggttttcttttactcccctatcgttaactatgaagctaaggaattttcctgagcttacaccgaaagagcatttgagggggctgagcttcatgttgtagcagtgaaggattttgaagcactcgtataagtcctacatgtgcccccacccattttggacttgacaagcatgtcatccacatacacctccatgttgaggccgatgagatctataaacatcatgttcactagcctttgatatgtggcccatgcattgtttagcctgaagggcatgactttgtagtagtaaaggcctaggtatgtcatgaagctagtgtgctcttgatctagtggatgcatctttatatgattgtaacctgaatacacatccatgaaagttaggatttcatgcccagctgtggcatctacaagctggtcaattctgggaagtggtaagcactcttttggacatgctttgttcagattggtgaagtcgatgcatactctccacttcttgttgggttttggcaccagtactgggtttgatacccactgggatagaatgtctctattatgaagtcattggatgttagccttttgatctcatctttgagcgcttaggtgcgctccttgtccaacaactacctcttttactgaacagttagatacttggatcaatgttaagtgcatgggtcataaaggaggggtcgattctgaccatatctctacgtgaccatgcaaaaaggtccagatttcatggtggatggcacgggcatcactcgcactaggttccagaagattctgacatatcacttccctcccctcactcttgctcttggggatagaggtcaaaacttgcccagcttcctagggaagaccagaatattatccagttgacctccgaggata

SEQ ID NO: 219509 - DNA, 2107 bp, Cannabis indica
aacaaactccaactatttaacttaattaattagtagaaaaagtaaaaaattagtaaaaactaaataacattaaatttaaaaaaaagtttgaccatcaatttctcaatagactttggattagaggaatgggatcttgacagatcaaacattaatatatgtatatatagggtgtactaaaaaaaacaatatatataggtgtggaccatcatcctctatgaagaagaatatttcataatcttattgaatattctccttttgtaggtgaggtaggtatctctttgttttttttttcttttctatccttttgtaggtgtatatagtctcattttacaccatgttattattaattggctcttttttgtattccccatcaaactttcatttgacaatctttgtcaagtaatgaatttcatgtctcttttaaacttgccactatgaaataattcaatagaaaagtaaaagcatgtgtacatgtatagtgtatgtaggagagaaaaaattaaagaagaatgaagaagaaaagggtccaaaaacaaacaaaggaattaggataagcacaagaatactagtggttgctattgaaaactcaaaacatatacatatccttaatttattggaaagccttttacttccttcagacataagctatacacataagaactaattaattatagttaatagagacgtcattcttatataaaaaaatccatcaatcatgtatatatataatatagatagatgaatatatatatttatatatatatatatatatacataaatgatggaattggaacttaatgtaaaagaacaatatgttgaatttcttagaagacgtacgtggagagcattaatttcaagactcaaaatataacaaaaaaataaacaataacaatattattattattaatattatatattaacaatgtcacatgcaaaccacacaattttgttttgagaatttaatcttcaagtttgaacaatgaggtcgagaatgagtgcatgtgtgttctttgtgtgtagatatgatcatatataatatggacgtgtgtgtgtgtcatgttataacttagaatttatattgttgtgtatatgtgtctatgataaacccttttaatatacattcttatccaaatagatgaatctaaagaataacgatgatgtggattggggaaagaaaagagcaaaagctctccatttttgaatttatatgttactttatagagaattactaaaatatattattagtggttaatataatttttagtgtcatattactattggtgtaattaagtagcgagttttaaataatttaagaaaataatttttaaaaaatatcactaactaattatagagtgtcacttctaaaagatactcgacactactactaaataataataataataataataatgctcttctttatattaagacaattgttgtctaattagttaggacacatatgcttttttttttctccctttaatgtttttcatccttccttttcattttcaatataataagttaagatttggtaaagaaaatacaactagggatctaggattcttatattcatcatattatatatttattataaaaggaattgattaaaatgctactattataaaattacatatatatttcccatgagggggtcctagtgttttatccatatacaaccaattaataaaaagattaattgtttttatttttattattagtcaatttttggatgccttgtctttttgatgtggttttattatgagtgtccaaggtggatttgatggtggggtatataaaagggtaagactaatttagaggtatccctttgtgacaaaggtgtttccttttgttggtgacgccataactagttagacccaccaattaagaatagacgaactttcttctaatcactacttttctctctctctactcaaacaacaaaactattttattttttttgtaaagaaatattatatatacatatgtatatttattgtcactcccatatggaagaactaagatggtatttggttggaagtaatcatatggaatagaatggaatggaaaagaaacaatttttatttaattcttttgtttggttgcattt

SEQ ID NO: 219510 - DNA, 1625 bp, Cannabis indica
attccattccattcctattctcattcccattctcattcctattcctatattttcattcctcccaaccaaacgcctaattgacgtaacaatgtttctttgcaacatattcattttgccatttgctatttttcttgtgcaacttttcaaaagtgtctacaacacttttattggcctattcaacatatattgcaattaattattatattttacataatatttagtaaaagaagtattattacaatatacctcctcatgaacgtgtgcaacgatggacttagatccctatcttccttgaatcgacattttgtccctcctttggacatttttttcgagaactttcattcaaaagtattacacaaattaaatagaattttaatataaattcttgaataaatgtggattaataattaaaaatatataaaacataccaaatgtgcttattccttctagtgcaatcaaaatattccaatcttctttattacatctctcgtgaagtgttttgttcacgtttcccctccccccattataacgatattatcttctcaagacacctttatattgtgcctatgatcacgaactcccttcataatattcaacataagttgctccatgatcttgggattagctccagggtagataaaattttcctacaagacatatatacatgttaaaatttatatggaataaataccaatatttgaaacaaataacctggaaattgatcccattgatgtggatatcaaagcttgacacgtggcaattaagaaaaaaatatcttagagtttagtagtcccgagtcatagcagttgacctgggagggctccctaaacctgcgccaagacttcaagaactccagattgggtgtttaaattctgccaagtcgttttcaactcactttttcagtatataatactatgaagacatgaagcatccaagtctaaggcgtgggaggcgataatacatgaaacaacaccatagaaataaacccagacgcctaggtttcccccagtgcccacatagacaatccaactagggcttcagtttttgggactgtcttagtgcaaatgggtcaaaattcatactgggataagaactagaaatgtcacaaaaatatttgagacatcaaaatcagattcaaagaacttttgtttttaagcacctgaagcactagggcccgagaacctagcgtccaggttaacatattcttaacttgggaagcttttaagcatcaaactaaaaattcgtccaggccttttctttgtcctcatcgaaaataaggaaagaagtgattttgaggaagaaacagaccaacctagagccaaaatgagggaccagcacccaagttgacacctggtgctcgtctagcgcccaagttgacattttgtaaacttgggccaatttcgaggagtttttccaaaaagtattttgggaatattctccattttgtgaaatattaagattcaagtatttctgggaattaaatagaactttctaaagacctaatggacctatcgcccaggttgacacctagcactaggcctagtgctcaggttgacatattgtcaacctgggctatttccaagcagttttccaaaaaaagtattctggaattttttttttttttt

SEQ ID NO: 219511 - DNA, 4917 bp, Cannabis indica
aacgtgttcttctgagacccattcgtttgaggggacgtagagtttgttaggagtattgtatggtttgttattagtggataaatcattcttaattgtaattactttacactcttgatatctcattctataaagaagagctttttgtgattaagctaattatcttttgtcgttagaaattgtagtcacagtcaggacgagtgaggtgccatattcatagctgaaaattaagtggtcgttgttcggctcaaaccctttcttatgtaaggccattatctaattaaaaagcattgctccaaggaaggcatccaaataaatctgtactaattaattatgtcagcagcagagttatagcttttattattattattatttaaatttttttatcttacaaaactgtagcttttatataaactctataatgtattacactctgaatgttcatagttaaaaaagaaaaaataatgtacgaagtagtttgttcaaaaaaagaaatagaggtaatgagtttatgaactatgaagtactgtggtccgacgaccactctacaaacttgcatgaaacacttgttgaagcttggtcagatgtctgtagtccagacactgaagtagttgaatatggatcagataagaaaagtctatttgaagaaaatggaggtttcgatggtggtggaaggtggaccgatttgcttccaagcatgagaattactgaggacatattgggcctttctttggggtcttcttggacacataataatgcaatatggatccatctaagtgcttcacttattggacacgcatcaacaatgtttggatctataatcttctctcctttgccctcattccattgttgccaagcctgctcaatttcatagttgataagttcactacaagaagagtatagttctttctgaaaggatcataaaatggaatagaaacttacataggatgaaagactctgggaacgttctcgatcaaagatgccactgctcttttttccagttaggagttctagcattaaaactccaaagctgtagacatcagattttattgaaaacaatccctccattgcatattctggtgccatatatccgctgttgaagaaagtaaaatgcagtttaaatgctacatgttacagtaaaattaagtatgctgcagccataatttatatcccaaagccaaaatttgttaattgcttttactaatcattaaatcaaagcttgagaatcgatgaaatgactaactatgttccaacgattctttcagtgctagcttcaatttgattgcatccaaaaatcctagcagtgccaaagtctgatatctttggattcatttcatcatctaacaggacattgcttgccttcaaatccctatgaatgattttgagccgagaatcctcatgaagatataataggcctctcgcaattccattaacaatgtttgcacgtgtagtccagtccagtacttctcttgattttcttggatctgctttcatttgaaaatcaatcaaagaaaagaaaagaaaaaacatatttagatagtgatcgtttgtgtgttatatttgataagctaataaaaacagagaaagaaaatgaccaaaaaggaaggcatcaagactagtattggccaaatactcatagataagaagtttctcatctccctccaagcagcatcccaagagcctcacaagatttttgtgctgaagttttattattaacctcacttcagttttgaattcctcaagaccttgtcttgatctcatggaaagtctttttactgcaatttcctttccatccatcaactttccctgtcattttattacaatcagttatatggttggatgattttttcttatgaattttctttgtttcatgcaaggcccggcttttttttcccaagcaatattaaataagtagtcatataaagcactaaaaagaacgtgaaaaaagtgtgctaaccttataaactggaccaaaaccaccttctccaagtttgtttgcatcagaaaagttgtttgtagcagccataatactacttaaattgaagtaatgcatttcaccactatgatcgtcatcagttccatgaaaccctctcccactaaaaccgtctgaatttggcaaaagaattcttgttgaattatccttgtctggcaagaaatcatattaggggcttaacagttttgatttttatttttattgaaaaaaaaaaggcataggcgaactggagtttacctctatttttgtttttaatatataagcaatagcataaacccaaaacagctgcaaatgctgcaatggaggatacagagataattattttgtttgttgttccatttcctccttttcctgtgtctgcacaatcattgaacaaatttaagaataaaaaaaaaagaaacagatgtctgaaataaattactgaaacactgcctactctttcctttctagacatattgtttttaaatttggtgtctttttaagagagaacagagattctggctcagatactttcgaaatattcaactcatattatgtgattcaaatacttcgtaaagcacaattttttctactctttattttcaaattaggatcaacttaatgaatagaccaaagcaatacagaatttaattattaaaaaacttgcaaattggaattatttaaacaatttttgtttgcatctagtaaatgattctgttttgctcacctttgtcaccaggtttcggctctggcgctgaaggtggagcttgtgggggtagctcataaaatggatagagctcatatcttagcttgcaacttggtgccaaaatgcgccagccatttttaccaaggcaagaagaattcctaattttctccattaactgccccaagcaatgactgcattgtgcggcatcgatgtctctagtacactgtaccaaaccgtatcttttttcagactcattattatttggagcaaaattattggccttgaacatggtatccgaattcgaagcctcggttattattggatacatcaaagagaaagcatcaacatcggtttgggaagtgtggcccttagtgttgcatagtcttaaattgggaagtatctgctcctttccaaagaagtttgtgctagaatatcgtaccatgcagtgttcgaaccatacgattgctgttttattggttaagcaatggcttttcaattctcgagttgcgttgatgacgcagttttgacaaacgttaatagacacatcacctcgacagagaaaaaggccatgtaacccgtcggatgattcgttgtagaagctgttgacaaccgctttagaagataaagtatccaaaagggtagtgaggtttgatgagaaaccagggtctgatgtcttatttattggatctgaacaagaagggggataaagtggctgggaattagccaagttaatgatgacaaaaattgagataatgaaggccaaaacactgccactgggattcttgtacggatacatagctatcaaatcataacttaattcggttaggacaaagtttcatgtccattgaacataatatactatcatttgaaaaaatgtagcttgcttctgttgttacgaaggaaatgtgtttatccgatttgacttattataatattagaaagtgataaaataggtgacgggagcaactttctttggtcaaagaaggtggctataatggcctaggtgaatcactaaatagatatccagtgggaaaaacggattatacaacaaacaaatggtgaatctgtacttataaaaaaagatgcatctagaaagagaagtgtaaattaaagagaatatcattgctatagtttttaattgatgttcatttcgatgtcagcaaatggctacagagtctatatatggtggtaacatagcgtgcccatggtcaattatgtcctactatgtggtgaattacactaatgtattgcttctaaattctaataataaaagctaggaaaggacttgagtcatcaccaaggtccttttccatgctttttaaatatttatcttggtttatcctcaaattttgacctacgtttcatgaagttgtccaaagccaaaaggccatgagtttgactcattctgcaaagcacttctatacctggtcaagttttgaaatgttaaattttgtaacagcgccaacaatataaatatatatatatatatatatatatattgacaacgccaacaaattttctggtgtttcaactaataaaatcaactgatcaatgttttcacgggaacaattccaagggagaagggtttgtgtttgaaactgttcacttgtccagatcggatcaaatggtttaaggttttcaatgatttcgtaatttgacaatttagtgaaagatgcccaggacacttttgggaacgacatgtggcacccacccaacaatattaagctagaaagtaaagggaatggtctgagtgtgactttttagatgagtaaacatttcaaataaaaaatttagttaaattaaacgtttgaatgatactttacctcctttcaaaaagaaattagcatgaatattccaagttggagaaaatgatacaaacttatttttcttctttttcaatgaagctcataggctagaattaggtattttttaggttgtattttaaaagtttattttagtcaattatatttattttgtgcaaaattaattacttttattttttttcttaattatttcagttggttaaatacattatatgggttgaaatgagaaaaatcatattaaataagatgaatttaaatttcagttggttaaatacatatatgggttaaatgagtaaaatcatattaaataagatgaatttagtggatttaatattgattttggaggtgtaagataaaataggtgaaaaatgttaaattttggatattcaacatattctgtttgttatcgaaaatcaagt

SEQ ID NO: 219512 - DNA, 4962 bp, Cannabis indica
atccattggcctaagtgtctggccctaaccagagattccatctcatcttttaagtagtcacactcattggtagtgtgccctacatctccgtggtactcgcatcttatgtactgatttgtgtttgcctcctggaggcattctcgggggtttcctgtaatggaccatgttgcaggtcgctttgtagacattttcttgagtatccaataagctagtgtactcgatgtactttggttcaaacttgtttatgggtttctttgaagtttcacttcgactttggttcctcccgctcctcttgctccggaaatggctcaccttctgttctagaacttccaccggtgggttcgattgtccgggagcgatgctgcatctggtttacgcagaaggtccatagactgtgggagtatattaagtttccgggaccgggacttgtggaacaaaatttggtgaggatgctgagggagttgaagccggagggactccaaaagcttgctgataagcctcttctaaattgatgataccttgtgctctggacataaactcggacaaagtctcagtctttttttctttgcatttcgccccatagcaaggagctaatcgtaagtctcgattgtaaggctacgagtttcatgtcgtcgctcacctttgtctttaccgacgcctccatcattcgctgaatgaagttcttcaggctttcacatggtgatcgtcccaacttccatgtcataatcccaggcagatatgaattgcttttggaaagcagattgtaagtctttccaactatgaccagatctgggagccaacttttttcaccaatccttcgcgaatttggttagtcagtgagaagcacaaatatttaacatcatcgcatactctggccacctgtatcattttgttatacttcgacaggtgggtccttggatctgtacggccgtcgtacaactcaatttggggcatcttgaaattctcagggagtgaggcttccgcgatccgcctgatgcatggtttcggatcttcgtcttctgaatctgaaagggccccactctgtttctggacgagttttgttaaggcaacaatctgctcctccaacctttttgtgtcactatttggaaggtgacgtccgcgagccttgtcgttcaaatggttcctgaggtcatgtccacgtggcctcagcttttctcctttggctttttcgtacttagcatcaagacgccttcggaggtccacggtggaccaactatcatcagaatactatcttctggtcccaccgtcctggttaacggaatcaatggggtggtttttccttcccttggacctgggtactttcgcaccagtctctttttgcgcaacaggacctttcagaggagaagggtgtccaatcccggaggtatcagtggtcttctgtgcttgcataggtctgctggctagattcacacttttcctaagaggtacaggagctattgggttttgagggtcacctaccttcgccttcgcctttgccttgttcttcgcaggagctgaggtttcatcgttggcagggttttccccgttgtatttatcgacaagttccactgagggttcctcttcagaatcctcttctagatctttgagctttgcttggaggcgggccatcatcctctccatcttttgagaaaacctttcttgacgggctaatttctcctgggtctcatgcaactctttggacactcggaccatttctgggtcttgttcataataatacccatcattatagtacccgtccttgacatgtccgtcatcatcctcctcgtcgtcttaaccgttatggttttcttcaccttgtttacgatgcttatctaagttaccctctcggttgtcagcttttgacgtatccccttccctcacattgctcggctgggtgtttctggagagagggttcacatcttccatgacgacgtcgaggctgccttgaggagtcttctttgtgactgtttttcatgtagccaccatggttttagcaataccgtggcttaggtctttccttagctctcaatgaaagcaccaaaatgtttaccgagatttttaaaaactaattaaataagagcttatgaaataattaatgcagtaataaagaagacaaattttttttacgtggttcaggtgtcgatgagccctagtccacaagtcagtgtattggccttaagaggttggtatggtattttacagtagtggttacaagaaaactctaactctggcctcttggtttctcttgaagaagaagaaagcttagagaaaatttggtaaagcttcggctattcattttcctcccccctcttgtatgaagatccaggggtatttataggctaaattgtgggtggtatggtattttacaggagtggttacaagaaaaccctaactttgccttcttgatttctcttgaagaagaagaaagcttagagaaaatttggcagagtttcggctatttattttcctcccccccttgtatgaagatccaggggtagttataggctaaattgcgggtatgaacatgcccataatgcgcctagagtttttgcaaaaaaatccactattagggtaaaatacatgtaaagaactgactgttaggcccccaagaaggttcttgctcgtgtggagaagaggtagttggataatggggaccatcgttggtactggacacgtgtcgcccaaaggtttcaccttgaaaaggagatgcctaagcaaaccgtcaagcaaaaaggcatattcagaggggtgtgcacactaccatggtttgacacaggggacaagatttgatcgtgtgtcagaaaaggtataaccgtcgctggagcgatccgggtctctcttcatggtagatgtccgacttcctctgtgcgattagtgtttgtgttaggctcttcgagtgccttccaggtgtcacttgggcatatgatgagcttggccttctctgggttctggagagacggtaaggcctccgggctgccgggtctcggatggcagtacacagcaaggcaattctccgtgtagcccttgggcttaatattttcctgaacatgtgtagcttctccgtgacctttcctatttaagggaacttaattagtgacgtttaaaggtcgtgcttctcattttatgccacgtgtccctcgtccgtaaacgcggataacacatataatgtgttcattagagacttacagggaaatatagaataactaataattttcattgcatagttgaaccatgattagccgaaaaaagtgtcttgctcaaacattttgtgaatgtagcaatgttctctctcatttttccctgcgattataacaggattctctatacttgatgtctgagtactacaataaaagcacgattgcatatttgcaggacagaattagtgaaataacatcaatggtggaacctcgtcctgaaagtggatctcatagccaaggtggcagcgccgctacgacagtgaatgacacagtttccaatagacccatggtagtattggcatgtcatatctacttatataccatgttaattgtgattttacttgctcaaactatagtgtattaattattaatcattcttattgtctctttgagaatcaacatggttctttctataataatcagtctgttgaagggcagcacccgagactaaatgagagttcacaaatatatatgactgatcttccagatatgaggtacatagttctatccaataacatcatcacacagttcacaattggcacttccatgttcacattctatattgagctcaatgatagtaaatctcaatctcttttcttcatatcactcaagcattttttgtgctaccaggaggtttttgctacattctgatttaacttttttttttctctactaaggggattatatgtctcattatgattatcataattacactagcaacaaatctctgtgagggtcttaaaatattaattttcattaacttggctgaaatgttacattcacagccacagggaagtgcctggccattatccttatgaatcagtcgatgaaggtgttaatgtcggagaagaaaaagtgtctaatagccctgcgtttccttctcccacagcaaatgatgagaatgtttcttctgtttctaaaggtgatttgtattttgtttgtaggtcatcagtgtgatctctagtgtagtctaaatctaatctttttacttatttcattttaaaggccctggcatagaacatttccagattattggtgatgccataccaggtgaaaaacttcttgggtgcggatatccagtacgagggacttctctttgcatgtttcaggttaaattctttgtgaattatgcaaatgaattatccatgctgtagacagtataatatagatacatctgttttttaaatgcactggattattatataatttctgttgcctacatgcttcatgcttgtacttcagtgggttcgccatcttcaggacgggactaggcagtacattgaaggttagccaaaaatgattaataatttgattctgccattgtagatgaggatccaagcctttcaatgaataataatttgttgttgtgattttgcattactaattttcatttcttatcatttctcattcaggagctacaaatccagaatatattgtcacagctgatgatgttgataaaataattgctgttgagtgcattcctatggatgatcagggtggccaggttttttttgtttttttgtatctaattataaatgtagtataatttcaatatgcaagaaaaacttctatgtgggaatttcgctcttctactaaatatgtggataattgtcagggagatatcgtcaggcggtatgctaatgatcagaacaaaataaaatgcggtaagatttgtggaaattgtgaagatcattgtttttcttatttatttatttttttttttgaaaaaagagaagggggcctcttgtcttagacaggaccctcc

SEQ ID NO: 219513 - DNA, 3120 bp, Cannabis indica
ttgtgcacaattgcacatgtatacttatggaatgagtctttatacttttatagttggcctattagggtctttatgcatcaaaatttgttatgcaaactaatttttctttctcttgatttgaaaagatatatgaaggaaatgaatggttcttatggactgaataattttagcgagtatcttgtgctttaataaataaatctcactatcgtattctttatgcatagattatgcggagggatgaagaaatggcaccttttgttgcggcagtgaagcggaattacatatttggcggaatatgcagtgttgcagccaatgcatccataaaggtttcctttcctattttttcttcagatttcggttagatttgggtttgtaatagaaatatatttatataaatatataaaattgacttgattttctcatagcacttccattatgtcatcttcacttctaattcaagagatgttaccttctaatcaggctttggctgacatgaagctcatcaatctttttggagttcagcagatatgccgaaattcaattgcattggaacaggtagatttttccaaccaatgagtaatgatattacatagggacatgacagttttttcaacgaatctcatttatttaaactaagattcacttttgttaaaaataatatcacgttactgtgtaatgtttatatattttgggtgtacatatcaattgctggtagatgaattatattacattttactttcttaaaaaaaaagatgaaaataataaaatgattcccattgtctacttcctatcctggcattatctatatatataaccttcaaagcaaggtttgggaaccctaacttcacttagtatcttttgagttttgttacatgggcacaattggagatctacagtttaatatttattaattaattgaatctaggaatgatttccttatttataatatcgcaaggcttgtgcgttagctccaacctgtttcaagtcactaccaaactagccttgctggtgttgagaatcgttatattacttcaatgtgatgtaaaatcctgttcaaataattgataagaggggggctgatatatgattctgttctgttttttttttttttttttatttatttaaacaatgttatcattcatttccattgctggcgttgcaggcactagctgctataccctcaattgacagtgaagctgtacaacagagattagatcacgttcgaacttacttcgaacttctaaacatgccatatgaggcaagtcattaaaactgataatttgtctgcaaatagtgtagtattatgctttcttcctaaagatgccaatcttccgttctctttttgcaggccttgcttgcctttatcacggagcatgagcacttgttcacagctgccgagttagtcaattacaactgttcttacatgcatctgttgattgttgttgagttgtttgttcagtgaaataaccccaaactctcttttgacaggtacattaatcttctaaaggtccaagtcccaggaagggagattcctgctgatgctcaggaccgtgtaatggatattttatcccgttagctttctgggttttcggatttcaatctacttttggtttcttggaacaaatgggtgtgtcattctaagggaagtcccatgttcccgtcattggtggggaaggttttgtcttaattctgttctgttgaggtcataatgtagatcgtaattatttttttattataattattatttgttaatgtgcagcatcaattttgttcattcctttttttttcgggacaatcttatgggaaacttgggtttgtagttttggcgtgaataggaaaagcaagatgtaatttaaaatctgtcattagcttttgtaaatcatttcattggttctcacattaatctccttttgcctttattattatttattttgcttattggtttcttttctgtacatattaatgcgtcagaaaaaaattacctacaaaaaggaaagacgccattgtactacattaaacctctaaaaaaaggtccaagtttgagttaagattgtgtcatacttaaaggttttgctctttgtttaattgtttattagtttaagggaatatcattttctaaataaaataaataagtgtgctgtgttttttgttaggtagctaggttctggaaaacctataattggttctcaaacaaaagctctaccaaaggaaaacataaatgttcacaccaaaagagacataatacttacctattaagattctcataaagaaaaatttaacttgtgaaaggtaaatgtttaggagtgtttggcgttcgggaaagcttttatctttaccaaaattcctatcctggttttaccttttttgtaatctgcattctacaatttatacattaaagagttcaccttctcgaaatatcaggtgcatcacagctagctacttctgagcactaaaaatgcaaacagagaaatatttcacagcttttggagtatgaactcaagtttaatttagttatgttggttggttctattttacagcttaaattatcaccaggtgaggtggactcatttaccttgaacaaaaatattgttttgtttctaatattattacagatgactagaaagcttgtaagaccgtaagtatgtctgtacaccctattactttttcgtttgcatctcagcttgaaatgctgtgttcattcttaacatcttcttggctaggttcctgatgtcttctttgctagactccattgatattcgaactagctcgttcacccctccactggatatgaactccagtcattacatgtctagtccaatatctattttcacaaggaaaaacaagtatcttacaaactgtcaaatggaaaatgcatatagtaatctcacttcctatcccacctttttcactatggtagaaccgagttaaaagaaagaaaaataaagaggttgtttggcttcacaacttaaaaactgttttcagttttaaaaaatagaaaacagtttttaaaaattaataggagtcgtttggcaaaaacaatttattttgtctaacaatattatattttacatttttactcacatattcggatcttagacccgaacccggagctacggtatt

SEQ ID NO: 219514 - DNA, 2229 bp, Cannabis indica
aaaccttccaaaacacatgtaccaacctcaaacaataacattcaagcagtaacagctacaaaatcacatcaaaactaaaatcaccattgttgagtcaagtttgatttatttgaactcaaaccttctcaacccaagaattaggcaccaaaactaccagattcaagcctaaaataactttttcaaactgctacaaacaatcaattactatccctaactcgaacaacaccaaaattccataattcatgctcaaagctaaagaaaactaacaacacctaaaaaaaattaagctctaggattaatacctttgaatttctctgcttgaatccagttagcactcctcaaattctcttaaaattctttggttgttgctgaaatgagctgggctcatagggttaagagaaaagaagcttaaaattaggtttgttcttcttctttcttgtcttttctttaaactaattattctcacaaattaatcaaagggataaggctgaataaaatttaagtgcctgctgccaagctgcaagctagccacctcaagccctattgcaaaatacccaaaatgcccctacttccaatttgagcaacttataagcttaggggtaaaatggtctaaaccataaccccgcctaaatccgacatttcaaatatctcaaatatttttcctactaagaaataggttctaaacttacccatgtgactcaaacggtcatccatcgcattttttgtcgttgccgagcaaaaatcataaaaattgcataactcatatttaaaataaataatactgttagagtttaataaaatctctagaattgagaaattataactctaatgcccatttctaaaaataggacccacactttaagaaaatcataaataattataaaaatgtcaataattaatgttaattgcctttactaatccataatctaacatgcagtcattacaagtggtttctatatggacaattaggaaataataggagaagatgtgtgtactgctatactttccttcttacactcagtttctagaagaggtaaatgcaactatgattactcttattcctaaacaaaaatattgtctgggcttagttagggatttcaggcctattttttactgtaatgttttatacaagatagaaacaaagatgatttgtaattgtcttaattaaattcatttgaccagatcttattgatcaaaatttgggtgggtttgttcatgaaagttctatagctcacaatataataatttctaagattcggtccatcattatggatggaaaaaatgttcctacaagttgtatgaggaagatgaatctcaaaaaagcctatgcctaaattgattggaatttttcgagaaaaaaaaatgcttgtggctttaaaattcccaacaaagttcattaatctagtgatggtgtgtacctaagttctcattgatgataaacaattctttacatggtctttttttgcatcaaggagaggacttagacaagggcactatttatctccccttctctttgtcatttatatggagtacttatctagaattttggctaaagtggataatctagacgattttaaataccatcataggtacaaagagatgagattgatgcatttgtgttttgcaatgatgtgattctcttttgtcatggaaattttaaatcaattattttacactttcagggtttaataggttttcagtttcttcggggcgtcaagcaaaggaatgtgttatcctaagttttttccacctgatgtggctcttctacatggaaaaaagtagaaaatacgttgaagataggtcagcactaacctgccaggattagtgccgagtagcttctcaacccttgagattccatgttgcatggcacacacaagcaaaatgagatgtatgaacctgttagcaaggtcctggccagatgtatacctggccggccaggagtgacaacttgtaagaaccaggaagccttcaacaggtctggctggctaagggggcagaaatacgctagcacatagggtttcacctagtgcctaagttgataacctcaactaaggtttcaattttaaggaaagtcttagtgcaaatgggtcaaaatttacattggaacatcaactagacatacaacggacatgtttgaggtatcataataagaatcggagaaagtctatttttgaacacctaaggcctcagggccttgagcacctagcgcccaggttgacaatctgtcaa

SEQ ID NO: 219515 - DNA, 2201 bp, Cannabis indica
ctaagtctacgacccccaaactcagaactttatgaaccaaacaattattaatacatagatagaattgttgacaatccattaggtaaaaggtgtttgcatttacttgcagacattatcaatttcgatcttcaaggaaaaccaaaactcaactattttcaagctaaatatttctaatcaaaatgtgaaataatcaactaaattctatgcaccagaaataaagacttgtcctaagaaatgaagacaaataatttggctcggcataaaactcttccgaattaggtgtttcagagagatgaaagagaaggtaggtgagatagctcattatccagcctaagctaatgttagtttgtcaaaagattaaacaccattatatcatattgcttggagatatacattcatgattttgaaacagatgtactagagtttacgaagcatcaccttcttgtggactaaaaataaaatagggtattagatggtaagcagcttgaacaagttttggcagatcccttgcctgcaattgaagttcacatcaaaatgataaaaaatgaagtaacaccagtcatttacaaactttgaaaatcattgtattgtgatgcttaacaatagaaagctcacttacaacatttgtgtggacaattccaggcgatacacaaagtacactaacacccgcttcagcaggcagacgtttaaagagaacgctactaaacataacctgcaaaagataaatcttataaatgtgcgatagcagatttatcactcccaatacttgtaaagctttgatgtacataatgctctagtagtgacaaagacaataaaatctcctacttttatttacttcccctatatttcccatatagtggagatccctgtcaggttataacttgatttggtgtatttccatcgaaagaaaattcgtacacaaaaaaaaaagagtttctatgagttccaatacaagtaacacatgggcgaaggattgtacaacctaaaatagagtatcaatatttttcgtttcacacaaaacaaactgagccaatacactgaactgttatgaagtacaagataaaacagtgtacctgagccagtttgctgctggtgtatcccaataagcttgaaaaattccttttcccagaattaacattcatgtcttccgtgtcaacaaagccaacataatgcatctacataaagaaagccagaaattcttcttaaatatgaaacgacattagatgaaactaagaggatgttaggatctcacattggtcaaatatgggattggttagtagtatataactactcgggtacactcctctcttagtctagcttttgagagcgagctctacccaagtggttgtatcaagtggtatcctatcaaattggtattagagccatgcaccctcaagtgggaccaacatcgcggaaggggcgacctgtgaattagacctagaggaggcaaccgtagagtgggccaccgtggacttcgactccaaaggggggtatattgttacgatctcacattggctaagtatgggattggttagtaatatataactacttgggcacccttcttctttaggctagctttttgggagtgagttctacccaaatagttgtatcaagtgatatcccattagaggattcacatgaagtagactaatgtgacttaattttaatctaaatgtataattaatcgaacaatgaacttaaaacctcacttgataactaacaggtgaaactgtataaaaaagaagcgggaagtattaaatttctgagcatttaatattctgtatacaaagattgaggagaatatggatagaaccacatcaatgcatatctatagcccatacgatagcagagtaacttaccacagaattcacattaacaattcgactaggagagcctctgacaagagatggcaaaagcaatactgaaagtaaggctggagcaagatgattcacttgcatgtgttcttcataaccatcttttgaaaatttctgtggctctaaatacaagaaagtaaaagcatatcaactaaccggaagaactaacatctaactattttccataaatgagtaataacccagttaaaaaccattgatttatattaaaaaaaatgcactaattctaattagtaatcaaacttagaaacacaacagtgttgaaaagagtaacattgcaatactaacaggtccatattctattgtaaa

SEQ ID NO: 219516 - DNA, 5720 bp, Cannabis indica
cagaccataagcaccagagtgtgcataggagttgctctaattctgcctttgtgagagtagtggctaagaatttcaaatagtctcccttatacacggaaacagccttctccaatcaaaagattggttcatcaaacgccaaacactctttgcgaattggcagccaaaaaagacatgtccaattgattcccatgcttgtcgacaaaccgagcatgtggcatcagttataactttccttttgacgagagatgtggcaactggcaaggcatcatggatagcacgccaagcgaagattttaattttttcaggcagctgtaatgaccaaaaagatttccaccacatcgattcagtagatgagcttgaagagtgagactgttcagccaaagaagaagccaaatggtaacccgactgtaccgtgtagatgccgttgttggtgtggtgccaaactaacaatcatcactagggaaatagctaagtggaatggtaagaatacgctcaacatcagctggaatgaagtattgatttaagagagctatatcccattgccgatcttctgtaatgaggttagccacaacagcattgtcaggacccttgtaaagaaagggcagaaaataattattcccagggatccatgaatccgatccacatagtatgttccttccctcacctattttccatctcaagccttttaataataactccctaccataaagtatcccctgccaagataaagagggtgagtgaccatgtgatgcctcttgaaaagagttaagtggaaaatatctgctctttagcaagcggcaaagcaatgaatttgggtgtgcaatgagtcgccatgcttgcttggcgagaagggcttgattaaagtgatcgaaggatctaaaccccatgccaccttcggctttggtcttgcaaatcaacttccaatttcgccaatggatccgtgaaccattttctgttcgaccccaccaaaaatttgacatcaaagattccaacttattacatgttgttgtaggaagacggaagcagctcatagcataggttggaatggattgaacaacagccttaagaagaatttccttgccccccgcagagaaaattttttcattccaagtgttcatcagccgccacaccttctctgtaatatcactaaacatatgttgtttatcacggcctgagtaggcaggcaatccaagataggtttcatggcaagcagtgattggcattgagagagttctatgaaaaaagatttgagcagccagcgtcgtgtttggtgagaaagacatattggacttgtcagcattgatggtttggccagaagcacgatgatatatgtcaagcacacgcttgatggagaggcatgaactttcatcagcatagcaaaagagcaagctgtcatcgacaaataataaatgcgaaattggctcagcacgccttgtgagtttatatccatggagattacctgacaattcttcgtgttgcagcagccgggagaaaccttcagattaaattaggaaaagatatggggatagcgggcagccttgtcttagaccacgagatggtgtgagggaacctgtggcttcgccatttaagagaaagctgaaatggttcgtagtcaagcatttcatgatgagagcaacccattgtgaacagaaacccattttttccatcattcgctgaataaaacaccactcaactctatcgaaagcttttgacatatcaagtttcatagccgcaacccctttacgaccagttgttcgcagtttaataccatggattaattcaaaggccacaagtatattgtccgtaatgagacgattaggcagaaaggcgctttgagtctctgaaataaccagaggcagaactgacttaagacgttgcactaacactttcgtgatgagcttggagatgacattacatagagcaatcggtcgataatccctaacaaaaagggcctttttcttctttggaataagcgtgatcagcgttgagttcaggggagttgggtcagctccattattcaagacactaaggacagcagagcaaaccgaatcacccacaatatcccaatgagtttggtagaacatagccgacataccatcaatgcctgggctcttatcagaacccatagagaacaaagcatcctttacctcagatggagtaaaaggcttaaaaaggtcaccgtttatgtcttgtgtaatggttgttggaactgagctaatagtagcagcaagggcgtcttcatcaactgctgaactctgaaaaatttcttcaaaatagtcttgaatagcctcagccatatcatgcttatttgtaacccgaagacccgcctcagtttgaagaaatttaattttgttgtttgctttcctcgcagaagctttggaatgaaaaaacttagtgtttcgatctccaagttggagccaatcaatgcgtgatctctgctgccaatacatttcttcttgttccaataaatcatcaagaatggattcataagatttaagcgaggcaactgtggcagaggagtgaacaccaagattattgagagctgttaccgtagactgtgcttcagcaatacgctttttcatatggccatatttgcggatgtgccattgttggagagatttagcacaacattcaagcttgtgagtgatatcagtaatggagtcatggtgagaaacaacagaccagcagttggaaataatttctttactgtcaggatcagccaaccataatttttcgaatcgaaatctggaatgcttttgtggggcagtggcagcagcttgcaaagaagtaacaacagtagcaatggcacgatgatcagaggagaagaaatccaggtgtgaaactgatggtatctcaaagattgagttccataaatgatttgcaaaagcccaatccaatcgttctttagttgtagtggcaacattcctgttttttacccaagtgaaacgatctccatcataaggcaaatcatggagatggcaatggtctaaagtgttgcggaaagcttcgatttgtgattcattgcgtaaaggaccaccggatttgtcactttgtgataagatttcattgaaatctccaatgagaagccacggcatagaaggggcaatgtcattcaatctacgaagaagggtccatgatgctgatctattggctgcttcaggtgctccgtaaaaggcagtaaagtggaaagttgaaatatcagcagtagagagaaaacaatcaaagtaattagtaccaaaaacattaagagaaatattaacattatcattccaaagaagcatgagtccaccactcaaaacaacacgtggggattcaagaccattgttaaacttcaaggaatgtcggaatcgagaaattgcattactaccaagacgagtttccatgaggaaaagaacatggggagactgctgacgaacaagcagcttcaaatgtctgaacgctttggggttccccagccccctagcattccaacttaagattttcatggtgatgggcggggttgcaacgcaacctccgctgaatcgtcggaagaatcatctgaatccaacatgtaggaggaaacattctgattgaagcaaactccttgtgacgaggaaggagcagctgaagtgccaagttggttgcgacatcgctttaatacttgcctcattgaaagctgatcagtttgccgttttggcattttgttggggttatagttttccttgtttgtagccatagcagaaaggggaggtgttgtagccgatgtgtaaatggcatggtgaataggagcaaagttattaacgtgatgaggtggctgtatagggctggaaagtggagggtatgtagcaattgggatatggttgagagagggagcaccgatgtcaggggtgtagatgttggataaaagtataatattggatgacattggttgctttaacttggaattgatagcaggaggggcaggggacattgctgcagtattaccgagaggtgcattattacaaggatcaacaaaggagggtggtgttggaggcaaggaagagacctggacagtgtgatcaggggtggaatgcagattaatatttggttggcaaaatgcagggatggtggatggggttgttaaaggcaagccattggagactaaatgactagaattattggaaattctagttgaagattctccagtagtaagaggattgggagcaggggatggtagtttatttaattgtggtaaagtggaggagagggaattacgagcaagtcgggtcaggaaaggccatgcattacctttggcaaaatcttgtctatatctgtcatattcagaagttggaagtttggctcctttcatccatggaccatactcaaagtcatcattatttccactatccattctttccatgaaagcaacacacttttcataagggtggccaagccgcccacactcaaaacagaactcaggcagtcgctcgtaacgaaaatcaacccagaattcatctttaatcctcggtaggctgatcatttgtccacgagggagaggtttgtcaaccgagagtttcacacgaattcttagaaatggtccccaaccttcagcaagcgaatcttcatgaacatcaataaattcaccaattatgttgccaagtgccttagcaagcgatttggacttgctaaggaaaggcaaacggtagacttgaacccaaaaaggcgtagaggctaaatcagtggtgcagacattttgcagagcatctggtgagcgtaaaacaatgagatggttttgaaaatgccacggttccttgttgagaactcggaatttgtcacccgcacaaccaaatgtaatcttgaacatatcatcctggaactcagtaataatggctggaaatcggcccttccactgacttgacatttgaccaataaaagaggatttgtaaacagaagaaacagcaacaaccttggcaaagagaacatgaacttcagcagaggaagcagcaggtgtgtccacatcagtaaggaccagagttgatctttcttcatcagtaagagaaagattaaagtgcagagaacgacttaggggatccatattatgcaaagaacgcagaaaagaaaaaaaaaactggagcggagaaggaagaaaagagcagaggatagcaagaaaaaacccagaaatacacggttattcgaaggaaactgctttggattgaagggagcaatgagatggggaagttgaaatgaaaagaaattagttaaaaacacttaactgccacagacccaaaaagggcactatgatattgggtggtaagcattagaatgttataatatatgatatcatctctattttgaaaaaaaaaaaaaaaaaaaagtggcatgtgttaggtacatattgttcacgtaggataaagttttgttgttttgagagggttcacgataggttagtgtcgagaatggttaggtaattatgtaatatatgtgttatgtaatattactactttgatacattcaattcactaccaatacaattcgaattgaatgtaaacaggacttgacgaagatatatcagctaacaaattgtatgacataaatttttactgtcaacaaaatatttagatataattttaaaataattgagatacttgtgtcatctgggcggtgtgacctaaatagttgggaaaaaaacagaaaaatataaaaagaaaaaaaattaaacaaaaatatatgggcaggcccattaaacatttatacagtccaca

SEQ ID NO: 219517 - DNA, 3691 bp, Cannabis indica
attaattagccaatattttaaataaacaatttagatatattaggtggaaaatagacaaaatggtaaataaatattgtctctcattgcctagtggacgataactctggcttaagctttgtgtcgtttttctaattaattttaatttttctgaattttcttcttctcagtctaccttcgttaactttctctctctagaaaaccatttctctctcgctctagatcatagacacttctctctcttctttttctgttacgcacttcaaattctcttctgccatttccctggcttcgaagaaattggagctgatcttggttgagataccaaagccttgttgtctcagatcgcgagcctgaggatctagaattcgagagaggaagaagaaggagggggcaatcgaagcgtttggtctcgggactggatctgaccggagatggctttgtccggtatgcgaggcctctcggtcttcatcagcgacattcgtaattgccagaacaaagagcaggagaggttaagggtagataaggagcttggcaatgttcgtactcgcttcaagaacgaaaaggtttgcaatacgaactagttagggttttagctttttttgatgttgaacatattgattttttgctctttttgtgaatggaggttttgatctgtagcttcaattgggtattctgtgacttttgggaattaaatttgaattttctatgattttgtagttgaaagtgaatgtctgattgggtacttaaatagtaatatgtagttggatgaatttaagtgcaaagttttagggattctgattgtgagcttaggaaattcaagagctaatttcatttttattttaatgttgaggttttcggtagcaggtatagagaataagaactcaattctacatggatcctattgactgaaataccaattgtttagttgtttgttcagttgcaaacccagtttagacaacaatataagtttttgtttctacaattcttgtgtatctttatagacatgtgtatcgagggacattttatttcactaacttcgaagtaaatattatttaagttgtacttagatattgggaaatttgacattagttattaaacttattattgttgatgcaaaactgactgaccccttcttagaaaagcatatgagaataggagtttcttactagcttctgtgataaaagttaatagtttgaaggatacaaggcactgttattggctcaagcttatgactataattttatcacgctgttcctgaaaaacgcggtatctgtgttcttcgtttttcttgctagattcatccagcttgttagagttttatcaaggttgaatttgaacaggtttcaaatcgatgtttccatggataatgttatctgattattgatggaaatgtccttttatccatgataaatgctcataaaaggccaccaatttcagttttccaaagtggtttatgtaattgctttttgaatcttgcagaatttagttacacaccaagtattttagtaccaattacatagaattattatagtcaaactgcagatttttttggaaattagcacaactgtatgtgggcttgttaagtttagataatcaatcatgagtctatgatgctcttcttctttttttcttagcaatttctgctgcactgagacctcattaatcatcctatatatgctggatattatgttttttggtttttaatctatttggtcttatgaattataacttaaagtggagaagacttgtgctggaactgattgtttatgtaaaactatgtatttatatacgttttggattttgaaatttagattgcattcccacaacaattaaatgaatcatttgtttgctcatataatcttttgcttgatagcgattcaaagcgatttcttattttcatctggtgtgtttgccttaaattcagtttagagtgaattatcatcctttatattatttccacatatgagatacactgtgcttgccaatgaacaaatgaccatatcttgttaaatctattgtctattaaagcagaatttgtcaccttatgaaaagaagaaatatgtttggaaaatgctttacatttacatgttgggttatgatgtggattttggtcacatggaagctgtttctctaatatctgcaccaaagtatccagaaaaacaggtaagatatatcttttttcatgtcatcttatttattgatttgctccaatttctttagttcattttattttttgcataggatcttacattaggtttgtgacctgttggctctgttaaaatagctccaagtaaggtctggagaatagcttaagacattcctaatgattcaaaacaatgcacagagataggttgttaaattggtggtagtgtttagacttgtgatgtcaacatttctaattatattatgatttattgatgcctggaaagaagtgctagaattgtgcttgtgtttcatgtccataacagtgatagataccactcatttgtttgtaggagtacatagatagaattgtttttcccattcaagttaattaaaatttattttaattatgcatgttaaatattatctttattttatgtccaaatatctctgggttattgacttcctactgtgctatgctaactgcaggttggttacattgtgacatcgtgtttactaaatgagaaccatgactttctgaggttagccataaatacagtgcgcaatgatattattggccgcaacgaaactttccaatgtctagcgctgacgatggtatgacagtaggaaattttttcttaatcggaagtgacttttgttttgattctcaaacctttcatataaataaccaaattgttaacattttcccactgtttactagtaccattcttcatgttgtgacatttgttgtagggttaacctaaattttgaacatgtggtgccatatctgtaggttggaaatattggtggaagagaattcgctgagtcgttagcacctgatgtgcagaagttacttgtaagagataaaattatctatagctttagactagctttagcctttagtacaaagtaacgagtattgactatggctcttgatttagctatctagcagtgccagaccacttgtaagaaagaaagctgctttgtgtctgctgcgtctgtacaggaaaaatcctgatgtagtcaatgtagatgggtggtatgttttttattttcctttctcactaggaaaatttccaaagtatttttcttgtggtttatcctttctaaactttagcttcttttttattttattttagggcggatcgtatggcacagcttttggatgagcgtgatcttggtgttttgacatcctctacaagccttctcgttgcccttgttgcaaataaccatgaagcatactggagttgtcttccaaaatgtgttaaaatactggagcgacttgcaagaaatcaggatgttccacaagagtacacatactacggtatcccatctccctggcttcaggtttgtaatttttttatcctctcttggttcattgcttattgcttacatttgataaatctgacggttgttgcccattttttgctcttggtgcctggagtacttatggtgggtagttttggtgacaaaaatagatgggcattgtttatgtttgtacttgttataaatattcttttaggctatgtttggaagttagattttggtg

SEQ ID NO: 219518 - DNA, 2822 bp, Cannabis indica
tttttttttttctttaatttatggtaatatagtgtgtggaacacgcgactaggacgccggagaaaaggccgattacgctccaggtaaatattattttgaatcttgtgttttgaaaagttaccaattggaccttctgttttgttaaacgacaaaatagaatcttatattttctaaaatagtaaaaataagacattgaactcaatttttaacagttttattttttaacataactaaccttaatataatttctaacacaaacagatatataaaatgtaatcagattcgtcataacatctccacattaaatattattaagttttattttgacaaaaatttaatttaggatcttatttgtacaattttaaaaaatacaagattcattttgtcatttagtaaaacaaaaggttcattttgtaatttttacaaaacacaaggtttaaaatagtatttaccattctcttttttcaagccagtcactcttctctatgtaaagatatggaaagtaggaattttttgttcattatataggacatttctatctttccattttaatataatttttatagtcacgtattattgtagtatattcctgacatttactttgccaatttttttttatagttcttttattaaataagaacatcattatgttcttcattagtcattgatgatctaccaaattgtatgtgtaacatatatatgtatatgtatatatatatatgcttttatcagttatttaataattggattaaggaaacaataaagcttttgaattttttcttaataaaatggaaattttattaatcaaatagttttagccattataatggagcattgctcagatgatgaacaagagggcacgaacacaattgtacatttttgttcgttgaacgtttaacaaaacaaaatttaataaaacttgaagatgttaacagtcatgcactaaaagactaaaaaaaatgacatatgaactgtactatgaattgcttgaacaaaaactaaacattcagtttcaatggtaacatgctgtcaattcttatatttaatttaactcaacgcttccttaatctaaaaaaccatcaacgaactcaattgacaaaaaatgcttcaaactacctcctatcactatcctgcaccatcaacatctattttaatcgtattaaaatctaatttattgaggagattttattgaggcattccaatcatctaaaccaggtgttgtcaatcctgaatttactgaggcagcgggcattaaagaggccctaagttggataaaatctcatgggtggtcaaatgtgatggtggaaactgaccgtgtcaatatggtgcatgttatcaagagcaaagttcgtatgtattctccatacggcattgtaattcacaaatcaaaactcattttatcatatttgtgtaatgtttcagttcattttataaagcaagctgtaaataaagtggcccacttcttaactaaggacttttattctaaaaatgattgcatgattagtaagtagtctgttcttgttaatttattgtccttacttttgaaggacctttaattaatggaagcttctttttcccttaaaaaaaaaaaatccaatttagtccattgatcattgagcattttaccgtgattaaaaaccactctaactgatagaatagcctttgctatagaagaagattttgccttccagccacctcattatggaccttccaaaccactaagttaccactaccataaccaactcctcctcacacacaccaatagcctgcaacacaccaccagtaaaccaaccttgaaaatccaaggcagtcacggtacccacactaacaattgacctactccaacaagcacaggcaaaagagcaggtaacaaagatgtgaagaatagtttagtttctgccttcctatgacacacaggatacaagctatcaacatgcacatattttgttgacaactacaccttggtagatactagataaacaatctgtaagagttctccaaataaaatgatcaagtttaggtggaatacgtaatttctgattgtttactttcttaataaaaataaataaataaagaatactttttcatggcgataagagaacttctctttttcatgagctcatattaaggattttcttttttttttttgaataaactcagaagattcattaattaatattatcgttcagaataatggatcgcacttcagaggaacagtcttccaactgaagcacacgacctgaagagaaacaagagtctcttgccaagcaatgagccaacttatttgcagatcgtttaacaaaacacaaaacaaatataaggaaaggatgaaagtaaattgcgcacatcatgaacaagaagaccaaattggaaagacatagaaattttactttggatagcttggacgcagaccaaactatctgtctccaacagaacgtgttcccaaggatggtgaacaatccaactcaaagcttcttttatttctataattttctgcaatttcaagttggacacgaccaatcttacccttagtaaaggcttctagcagattaccatggtggtcacgagctacacaacacacaccaaactgaccctcttgctaaaataaagccccatcaacattaaccttgatcttatttaacataggtgcagtctaacgctcagaatgtcatcccccatcgctcattggagacaaagaaagaccctttctttcttgagagcatttatactgatcaagcagattctttgctgaagcaacaatatttgaagcagaccaactcttcttctgccaaacaaaatcattccgcgcacgccaaatagcc

SEQ ID NO: 219519 - DNA, 1896 bp, Cannabis indica
aatattttgttgtattctttttaaacttgtaaatctaatctataaaatataaggctttccaaaacttcttacctttccaaatggagaactaattggtgaagagcagtaattctgtcacctaatttttccttcctcacctaaaaataatatcacccagaagatatgaaataagaggtgtgaaaatatctgagattaattaattaaattcatgcatatctagagatagagatctagaaagagagagctatagctaaaaagaattattccaattgaaaaatggacaaacatagaaagacaacacaatttccacaacatatgtatctatatgtatgtatgtatgtacatatacatatatatataatgtttaaatttgcaggcgcgtgtgcgcgtgagaaagagagaaaggaaagtaggagattaaagaaagaaaaagagaatcaattggggttggagaaaaagatgatctatctatgaggctttttaatgggttttctgttcaatattaattaccttaaaagtagtttgggttgaagaaggttgaaccctagctttcttgagtggcgctcctccagtagcagtgctgttacactttcaagatgaagaaaaaagataaatttataattaatttatgggagagaatagattcttaattttgttctagatatcttttttagctagaaaagggtaaaaatataaaaagatggagattgaagctagctatacatatatagtactatttttatattaatgatcattactttcaaatgtatatatatccagagacatattaaggtgctagcaaaaaccagctttataattcaatcccactactatagtgaaaaagctaatgtgtatgtgtgagtgtgtatatattatatataaaaacttagcttttttcacttaaaatatatattgcctttaatctaattagttgacttcaacccgatcatatatttatatttttacaagaacttaaaagcttttttcttactcagaaactacattagtgcccttcaaaaagtaatcaagttttagaaaccctagataatatatatatataatagaagacataataattgaaaatacacattttcttttataatataatgatatatattaattaattaattacctcagaggatcgatcctgaagaaatggtgtatgggtagtagtagtagtagtattagcaggatcatgatgaggtttgatgttagagaaatccaacatgttactactgaaacttgttacacaggatgatgatttgggagaggaattactgttgttgttgttattattattatttgccattactaatgggtgttgagaagataacaaccaaggagtagtagtagtactacaactaccaagcttattgacctgttcatgaagaagatgatgatgatactcttgagtttcatgtccgtacatataagctgctgctgctgctgctgtgttgctctcttgtttcacttctatattattagaaccctgctgatgattactgttattagtactcagctgcatctgatgatgattatgatcttcccaattctccaacttctttacttgaaaatggttcatcatattaatagccttttcctcttcaccaaccaatcctcccctattaaataacaaatataaaaactaattaagttattaattaataaaagagatgaagaaagagagaaagagagatatttacaggaggagttggctccaagactcgggaagctggtcttgttggttattatgatcttgccaagaaggcatattattattattaggaagctgatgatcaagatgttgatgatgatgatgatgagaagaattagaagaagaattattagatgaggaagaattattagaagtagtggtagtagtggtagtagttgtag

SEQ ID NO: 219520 - DNA, 9897 bp, Cannabis indica
accgttcttcttcactttttttttatataattattattgttagtttctagtattcaaataattagatttttaaaaaaataaaggtatattatttatatttcaagctaaaaaatactgtagtttaaattaattttaagaattataatacatgataaatatatttgagtaaacatagaataattaaataaaataataatatggtatagattttaaacttcaacttcaatatccaaatacaataaaaattattaactataaagtctaaattttaagttaaacactaaaatgtctaaactttaaatacaaaatagtttaactaataaatataatttatgtaatatattatatacacttttattaaaaagtatataaatcgatttaatttggtttattcgggttaattggacagtttagagtaatttataaaccacccaatatattcattgggcggtttggattttcattgtattatttcaggttgtattttttatcggtttattcggtctagtttggacggtttgtaaattttgttgaacactcctaccgaaaatagctatttttccaatgtttgtggaatttttagcatagaaataacgagatttttatttatttattatttgttattcattattaaggatgatatacatgatttgttagtgggacaccccgacatgtgggggatcactaacaaaccctaaagcctatataatgagagtaagaggctgaggtaaaggggagatcgtttttgactcattgaatgactgcctagaacaccacattcctttcttcacatttttcctaagtcctccatactttgttgatacaaaatctccttgatccaaacaccattgatctacacaatcaccaagaacaaggaccattttcttttcttactcgtattggttatttgttcccaagaaccttctaccaccaactttgatcagatttgagaattttgagcgagtctcccatgagtcttgtcataagtctcgattgagattttacctagaaattctttgttgtattattgtctacacactcttgagaacataactctggtgtgttagatttaattaataaaatcaaaagtagatgtagccccattaccatcgcgacatgggggtgaactaatataaatccctggtgtccattttattattgcagttttatttagttacattaattcatcgcaatcctctttatttttatgatcttcttagatcagttgacgaaaaatcgcgtcaacgtctacatttaataattccttggatttttttagtaacaagagtaattgtatgactaaagccattgtatacacaattgttctaatttaactagatgttatagatagttgctgcaagtgttgcagcaataatatcttctgtcattctcatagtcttggcagttatctcactcagccagttgtcaaatgggagggccgaagctttgtagctgagccacttgaacacaacattcacgacttgagtcaagaaggagcatttaaaaaagagatgattgtgactttctgggtagagaccacaaacagtttagctaaaatcagtcactaaaatgcaaaatttgggcagtagatccccggttaacagatgcctattgactacttgacaaaatatgaatcgatgcttaggcaagcttaatttgcaccaaacaactttagtatttagaaccagatcacacttcagcatactattagacaaaagagtggctttgtacttacctaaactacctacaaccttcagcttattctcattaaaagtctatctaagattgcatagcttccttcagtactagctagtgtcttgcgtaaggttgtatgtccacaaatcatccctttttagatagatcattttaacccatttcacccacaagacatcatgcttttctataattgcccacaaatatttagtaaatattgctttataagccaaggcctccaaacttcttagaacaatagactttttccaaggcagctgaatgaattttacttatgttccagcccgctttgaccccataaaaggaatctgcaatacttttgtatttccttgactacgctttaaggaaggatgaagatttaaatccagtaattccttaatcttaacaatacaaaatgaatcaactgcatgctcactgcataggacaaatgtctagaggccttagaatgaattcgttatttgattttgtccacaataaatgcacaatcttccattctccatttagtgggtctcaaaggcactcctagatacttaagaggaaaatatccctctttaagcccaaattattgagctattttctttctgtcctctgtctggacaccaccaaagattatctaagacttagacctatttactgagagccgagtttgaagacaaaattttttctaatgtaactttgatgtgtcggactactatgaatgagcctttattgaaaaagatcaagtcatccacaaagctgagattgattaacttcaggcttttgcacatatgatggaacctgaaggttgcagcttcaacttctttaattagtcttctagtaaggaactccataacaagaacaaataagagaggggacatcggatccccttccctcaaacctttcttccctttaaaactgccatgtaatatattgaccttgaaaagtggccagctgatagtaggttcgtactaatctgatgtttgccacgtgttacacaattagaactcgaaagtaaagaacacaatgatttttatagagtttcggccccttaattagtgggtaatgacctactccatttttagttgtattgatatcgaaagaacactattcaaatcacgataggtggaatctgatatagctctcttaaggttacaaagtatgaataagtaggcaaatctcttattgacagagagatgaatccttggaggtgtgtgtgtgtgagaaggagagaggtagagagccatttgggtgtgtataagagagagagaagactagggtttcaaacttagagctttatggcctaaatgagaattagagtgacttagccttgtagggttgagttaaggctcttaatataggagagcataaaccctaattaggagataaaataatagatatttacattttaaattaataaataaaaatgatcaaattgccccttgaaagtagatattttcgtagcatcttagtgggctgtcaacgctcaacttgtagcttggcttgcaatacacgaataaaggctacacttccatatcctgtcagggagaagctggttggccatacatctacaaaatgaggtctggctggccatgctatgtgtgcaggttgaggtctggctgaccatgcatgtcatgttcctattagccctaccaagaggagaccagcctttggatgtggatgctagcctttggcaagtggatactagctttgtacacattttccttgcaaaggtcaggctttcttagtcgaacgaaagctccctcattctgaaagtcaccttttgaccggccatcttgtgcccagatcctggccggccatacaaactcaccctggctgatcaatagactttttttggccagccacgcatgttggtataactctttgatggctcgtttcactccttttgcttgctgcttaacgattttgccataccttgtaaggagaccttgtcttgctattggcaaggctatgttccacatgtactctgtcttggcttacgcagacatgcaacgttaggtggacaaaatttgggataacatttgccccccaagtccctatttgaatatttggtcggatagggactttctagctccaatcttatttgtagtagtctctgtcaagcagccttgtctagccaagtgtttgcatttttgcatggcatgcttttcaatctttgatcttgtctctatgtacgcctcatcttctcctcttggatatctcttctttgcacatgtcattaataagtttcaagctttttaaacttttagaaactgttttattctcatgtttgattgtaatctgtttggtattttgatccacatgacagttttagaatgtataatgtgtgatttcgtgatggaaaagattcaatttcggcctttgttgtgattcttaactctttgagtcataaagaacatgaggcacacattcgagtttaaaaaaaacacacatttggattcagaactacccttcgccggtcttagaggtcgtgcttgagacctggtcagtcctaagacttaatcatgggagttttccagctctagggtttcaccctataaagctagccagttcatgcctaggtttgatgaccccacccggctcttggctgagtcatgagaccctagcctaccctctctaggcttaggaaacctgcctgacataggctttagttccaagcgggtggccagctttctgtcttcttttgacttaggcaagaatctttttatggccttgtaggcatatacaaccttagtctcatacatggtttccttagatactctgtatgaaacttaatggtgagtttattatagtcaaatgctcaacttaagactcaacatttgtctaagttattacacttgagactgtactttgctaatacccagccttgtacaatgacattatcttgtaagtactcttgggtacggttaccgagaattttgtctatggcttggaacttgcaaggaactctaccttttggcttggaacttgccaggaactctgccttagccttagcctagtacgtggttcctataggaactctaaccggtacgtctctggctataaggttcttgcagggccttggtcttacatatgcatgggaactaattttttattcatatttggcctcaaggctttcatgttcttattttttttcctataggaactctattttcgatcacttctattatttagccttaaacccttttatcatggacatatgattgtccttgctatcttcttatggccttcacatgcaagtatatggatttacttttctttatgtcaagctgaagtatgcctgcacttgacttagagccaggtttagtagcttattctaagcattaaaatttctctatataagttctacgtgctagttcaatgcattgtacagtgtagctgcccccaagtgagcgtgcacacttacggtctcttggtcacttgcaattcaccatgtttcatagacctttcctaggaattttcttggggtgctactgggtgtaagcatgtggaactagaaaataataactttaagaagttatctttgttaggaagttgtttaaacatagtttgtcttacgtgtaacaaaagcttacaacttagtgtctgcttttgaaatcacgttgtcgttacccttgcgcgggttactgcgtaacagccatcactgaagagtgatgggatgccatcgctgaagaacgatgggtactaggtcttttatgggtctctgcacgtagaggaactaattgacaagttgtctagtgagagtacttaccgagatgttctctattccagtattttggcagaagagccacctccgagttctcattgtacttgccaaacttgtatgcacctttattgttatctcgtaacttggtgcgaaccttttcattttggtccaaacatgcatgctacaggatctttgttgtcaagaaatattctttcctcgatttgtttgttgaagggcctggtaactctttgtgagaagccatgctgctttcagttggcttggtctcttttttttttctctttcgtcaagggatcctgctagtaagatgtaatttacttcttggtcagtgtaaaccagaagtaggagagcagactattggtggatcgagctagtcagggtaaggaccaagtggcaagccatgttgaaggggcattgcctggctggttgaatgaagctatggctggccaacctgtagaggtagtgtccaaccacattgttaattctatggtaggccagcctttcagaggctaggtcgatgctgctattcgatcccatctacgactcagttggctttacctctggcatgattgccatagagcctttgtgcactcctgtcaatagatattcaacttctttcttggtaacacttcatagaggtggtgttgggataccacatctatgggttatgctatgcaggattagacatcctgtagccatccccctaaaccctgctttctggaaaggtttttgtttggaggtatgttgctgtaggtgtatccatgttggttgtcttacaagtctatttcttttgataagggaggattagttctttggagaactaagcatgtaccaagtttgccttggatatcaaggcctagctagctagtcgagcaagtacatcagatgttgtgtcgtctttggggacttgccttttagtactgcctttgagctaacttaacaagtcttgaaagtagctcaagtaggtcattatctccttgtgttgagttgtatattcacctaggacataacatacgactacttgagagtcgtggtgtatgtctaggtgttcagcccacacttcgtgtgctagcctgaggccagcattcagagcttcatgttcgggctcattgttagaagctttaaaactgacctttttttttccttatgcagttgttgcccctaggtgcactaaggtcaagggctgcatcgaaaaagtggccaatgcacctactgggttgagctgttttagctcttgctctcacttcttctctggctcctgcttttctcccaaacttgagagatttagggagatatacttctatgactagccatgaaactggtgagagcttggcctttgctagtcatgcttggttgataaacaaccttttatttaccaggtcttgatggttctcttgagtggttggcctgatgctttaggtttttgtaaaacttgctacaacagttgatcagtgtacacttttatagagtgtgcttggaaatatggccttagctttctggaagccaagagcaagctgtaggtcagcttttccatgagtgggtaactttcaacatcgattagtctcttgctgaagttatatacagggtgttgtgcactgccttcttcttttgtgacatcactcacgacatgttctgtgactactaggtacacgcctagctcttcattgtctaggggtttagatagcacaagtggttaagccaattgttcttcagctcctggaatgcagtttcacattcctttgtccactcaaattttcgttcctctgagaatgttgaagaagggtacacatttatctgtagacttggacacaaatctacttcgtgcaatagtgcatcctattaagctttgtacttcctctaatatgtggcccctgtattcttcagcccgaaaggcacaactttttatcaatacaagtatgtgatgaagcttgtatgatccttagctagtagatgcatctcctctttcttggctttggacaaggtcaaggtgtaatagtgacaggtagattgttgatctcctcttaaacatcttaccccatgccttgttaagaatttcaggcagagtggtagatggatgtttccaccttcaggtcgtataaggctgatcaacctatcatggcactaaaacctgaaggaatgtcaattacgacgaactgaaccatcaaagttcttgtggttagattttctccaacagtgaggggtaatctgatatacccgattggtgtgataccttggcgaaagaagccatgcatcacttgacttcagggtgcaaaatcaacgagttggagccccatcttttcatatgttaatttgaaaaaaatgttgaaggaggctccattgtccaccatgcatattgccacaatcatattcccaatttgtgcagtaatgacgagggggtcattgtgctggaaattgacttgggcggtattgtgggttctctaagctttggatgttttgagccttgtcattcgactgcaaggatgtcacttttgggctcgtgacggggtgtctgagcatagcattccctagctttgctagtcttgcctataatttggggtccaccaatgatgacccttaagtgtcctactactggagtttgggcaaggttgctggtacctgcctgcgtgcctagcaagtcatgtggttgatggatggcttgtgattgcctgttgctgacttgccctatctgggtgtctttgggcatgcattgctttaggagttttggtaggagagtgaagcatgtgcacttttcctccttctcccttacacttcatggcataaggcaatcgttgaagttccttattttgccattatcttggccagagtcctcgttgatgcgtttgcctccaccattctcattgttggagaatcggcagagatcgtctatgctggtcagcacgtcagatagtacttggggcaatataatgccctgtgtctatccagcatggacttgccctcatgtctgggcttgccggatagctttttccaactttataaagccacgagctcgcttaaggaacttcttcatgttgctcgttgagatcctcctaatatctttccagaagtcactcaatggtaagatgcctcctagtatggccgtatatcaaccttcttctgtcaggcctttgaacttggtggcctcagccatgaaccattgaatgtagtcctttaaaggctcatcttgcgttttctttattttgacaagatcctctagtcgtcaaggtaattttctttaagaagagaattaaatatagaactcttgggagaattctttccaagaattaaatcttcccgaggttagcttgaaataccattgttgggctattttagctaaatttgtcggaaagatttggcatcgcacatctccaaatacttgttggagatctgtttgcatctctaagtattttagctgtacttggggatcttctttccccgtgtatatcttccacgtcgacatcttgaacttgggcaagagcaaggcatttatgtatgctgagaatggtgatccccttgatctctctagctcaagttctgaaggttttggactagctaggcccttgatcatgtctgtcactttgaccaactatacttgcatagagggatctattgcaacaggggcctggttgattggccctccttgattgagctgcagccttggattggcttaagcctagccggccataccctaggagacgctatgttcaaggattgccagacttgagtttagtaactaatcttggctggccagccctgtgttgggctgggcctggccgcccactcctccttgactggctggcagagcctgagcgttgacatggggtagctcacaccaattgttggagtttggtggatctatctagctaaaagtgattgtattcacttctcaagttgttattgtcttgggtgtttccacctgttcccaggcctcaccggttaaagattggcctttgagtgactcgctcttgaatgtcccaggatgggaatttaccttattggcgggccaaatgtgtatttttagggtgttggcctgcaatgagttggacaattgggggcgtgtagtgcaagagattcatggtgggtcgcctaggcaaatggctgctgggatctggctgttctcgccattagagcttcgtggcaaggcctgccctcttccaggtaggggaaagtttgtcctggttcccgaagaaccttgttggtcagtttgatgatagaccctccctaatctatcgaccattcttccttcgagtggatctgtaatgagatcctagccttttctagtgttctctgattgaaccgcattatcaagtcactagcctctctattgcggcgatcaatctctgtctggtgagatcgaaggttgtactcttggtcatcaatctatctcaggaatgcgcgtggttcttcagttaggctggctttgtcgatggcctctctaagtttggcta

SEQ ID NO: 219521 - DNA, 8213 bp, Cannabis indica
cctctgccatggctaagaaaatatctgagctttgtttggtttggagagtcaaaggattaaaatacgaaaatatatacatatatatttaaatatttttaattatgtttaaagtttaaatatttattgaatttttcttagaaaaaaggtcccattttgaaattttgccctaggcccccaatgcgctccctgatggtttcacttgtgctgtgttctacataacttggattaaacagtcaatattgagtttgatttagcttcttttgtcaatgttttctctgcttatggaatgttgaagtatgattccttcatatgtttaaatagttgacaaggatggaaggccaagacaatgttaagcatcttgaggactgctctgtctccaagttagttatttcttcttcttcttcttcgtattattttttttagtaattctttgtcgtttttattcattcacatattgatgttagaatatcaaaaatgcggattctctttcaatgcgtttttggatctctttagttttttcatgagcaggagtcttgcccattttgggatatcaccagttttgaagtattattattctatatgacaactcagtaaacctgatcagctaatgaatgccattttgcattcttttttcttttaggtgcaaataacagtttttcttaaggtcaaagtgtaaagttctcatcatttttcaaatgaacattttaactgattttaacactattcaaagttgtctacactgctttgtgcatactactcatttatttttatcaattttgtttatcctccattcatggtctcaatgtttggattagatactactgtttttcgtctccactgcttttatgctctctacttatatttagcattattcatgtaacaatttaatgataatgatgctggttatattgagtttgagagcactcttttcaaaataaacacgcttacagatacagagtcacaattgaactcatcatagtacttcagattgtaagatgctagtgaagatttaaagctcttgtcacaatcattagtcgttccactaaaaagtagcggattatctaatgttatctggggattattatatcatttgtcagatattttttatttatttatttatattttgctttaaatgacaatgttgattgagtttgccatgtctcgttttcatcaccatatctgatttaaacttcatctacaaagaattagagtatcaatatagacagaatgtttacggcttgtagagtttgttagtatgcttaagtgtaatttaacaaccatgatatagttttaaaaattatttactttctgaaaaggacttgcatttcaagctaatgcgtcatcttcccctttcctttagtccttttcattattccctaacttcactgaattaatatggatcatatgcagtgcactggggacttgggtattctctgtagcaggagcattgttagctattcctgtgggaataaaaaggaaatctttagctcctcttgtgttctttggtacaactggtacaatgctcgatatcattatgggaataactgcttgcgaaagagagcacgcagaacgccaaatgcagctattagaagcccaaaactcaccaaatgatggtagtcttatctctgagagcggaggcgagtcttagtttcatttttagctatgtttttgtaatgtgtgagctgttccatacttccatttggttagtcagaaatacccagttttttattttatacctttctttttttcattcactgggatattaggtgtaattgcacaacataaaataagccttactttttgagtaaggtgcatatgttggtttctttttcttttcagaactgtttggtgatttgtttttgagctttctgaggaaagtagattacaaaattgtgtattgatttctgctgaacctggttttggtatgaacaaaaaatggagagcaaagagctgcataatttttaattgggacaagacatttgatggattgtaacttttcactttggttcggtttgatgatatggttgattttggaatatgttatcccaacagaaaccatttctaaaaggtcatcgacaagcttatcaacttatggaataagtggtctctatactaacacgttccatttccaaactttttttgtgattatcaattatttatacttttgacatatcaacaaaactaaaaatgaccatttgagagtacattaagaagtgaaaagattgctatgaaaatctacaatcgcctcattggaaaggaatcaacaatggacaaaattcaccgataatggtggaaccgtctgtttcaacacaaaccatgcttgagggagttgagtgcaaaatcagatcagagaatggcttataacaataactgtacatttctttttcactatatacaacctttcaagtttcaaaggtgtgcttgcaaataatgagaatgagtaatatttcactcttagaatagcaataggcttcttctataacattataaactcttcattggaagctaaagagccaaaaaaaaaaaaaagttgtgcctggctgcttctttccagggagggaagtttggcaaaccctactgttccaggacttgagctggccaaaagtgcttccacctagcaatctcttcctctttgtaaagctttctaattcctccataaaatccatccacttcattcccttcttcacgatgatccttcctatttatcaaagttcgtctccatcttgattcagaactgtactgattgaacttcagtactactgtatctggaaacaacacacacacatacaaacttacacttgtgagatatacagtgttaaatgtatattcctatcttcagttttcaatataatcaattatttctatcttctaactctcttttgtgtaataagctttattgggaaacttcattctcttttgggtaatttattagctacaatctgtagtaattctcatggtgacatagattatatagtacattcacaacatacccttatgcagcatctatgtgatatgatcaaagaaatgaaatgaagaaaaaaattaaagtgcaaaatagaatgacattctcaccactgtaatgacagcggcacagagtctcatttccatcacagggctccaggtgatcaacatggccataccaccaacctgcagcacaatttcagaaatagtaagccttggtgccaataaattaagtgacagttcaaaaccgaaaccaaccgtaagggaattctttgtttcttctccactggatctcaatatagtcaccaggttttaagtcaggcaaacaatcggaaacatgaagcacgaacggaggagtgttaaccggtggtgctcttagcctatcccaccctatattttcctctaatgttctccgtccatgagacgaatacctgccatatggaacaatttttttctgaattcaacaaagggccttgcttaacaggggaattttctaaactagttacttgttaaaccacacaacacaagcctggatcagtgaaaattgagagagagtaattggtgaagaatgtcattcttcccatcccataccttgcatgaaagttgtcagtttcggaattgtagcagagcagagcatcataacatgagagcatgaagcctatatgaccattctgcatccaaaaacattaaaatgtttataatattatgtaatgtctaatgtagtacacaaactcaaatgctttagacaaatacctctcggttgtagacctgagctgggaaccagaagttgccactctcaagagaaagataccaagccatgatcgagtcaactggtaaagtagtcctcactttgcaactcttttctagtttaggtgtgatccatgagaagggccttgaactaagaagagactcaaatagtccctttttcttgtcttgaccagagaggctgggtccattcctggaggccacttgacattgccattcttggtaagctgtatcaccaattactttaccccatttctgcttcaaatgtatctcccataaatggtcactagtacacctctccctcaaagaagagcaaactccagccatgctgcataaacccgccggtgaaagccgttcaaagatgcactccaaggtcaattcaggcaaatccagaagggaaatcctctcattttcctctacattctctacccttgttgaacacagggccatctttttcaaaacaagggtcatggggctttgcacaaaactcaaagggatcctacttttctggaaccgggacacaagaaatttggaaaatttctcacaaaaccagattgacaacagttttagcacaccctcacataactggagtgtcctttgagtaaaagactccgaaagaaatatcaaagggacacaagatataaagaagcaaagcataggattgaatgagattccaaattttgagtttgacatcaatagtgaaaaacaactaaagaagaagaagaagaagaagatatcttcagatgaacacaagtgaatgtatccctttctattataaggatgcaaacacaactgtttaagccattacttctttggttctgaattatgattgagtgagaggtccaccaatggaaggtgtcacactgtgctagttaggcaaaaacggacagcttagcacttagcagaggggacctttctaacaaaactcatttaataaaacaagatatatttgtgaacagctcaaccgacaaattatggctgatggtagttaatacgcaacagactgaaactttggagtgatggtaaaaaaaaaatacacaacaaggcttcttcaatcaatgctgaaaagggtatctggatacagtgaattcccacaactaagagaaccaaactatgaggacagtggatggcggctgtcagttcaagattgaaaagatgtgagaaacaaaaaaaaaaaaaataaaataaagaataaaatcttaggaacaatttttcacatagatttagagaaggtgagaacccaaaaagaaaaacacaagaaagatgagttattttctgaatgagactccacttgtcaaaaatctacacgtttgagaataataaaacccaaatggaaaaaaggaggaaagaaaaaagggatgctgtgaatggaccagagttacataaatgtgagacttttattagttaaaatacaaaaataaaaataaaccagtaagaaaaactaaatctttaaatttaatgacatttaccaaaacttggagctgaagttttgaaagttgatgaagatggatgacaatgaggacgaaccataaagtagaaccttcccagtttatccaaaacttacaaaaatctttcctctctctaaaatgaacagaaaaaagagatgggttttaaagaaaaagaaaaagaaaagaaaagcaatgaaagatgatgtagtacactagtactagtaatagcaaataaaactctttattttgggatatggggtgtgggggtgtttgtttgtttggttcatgcacaagttgaatatgtaatatttatgatcagaagaaagagttataaaagctgtactgatcctcttgcctaacttccaccgaactcaacaacaaattcccattcacaaccataaaaattgctagacaaaatcatgctccatttaaagacttggattgtgaccgtttacatgggaatggggttataatattaatattaataaataaataaattattatccggggtgttgtttgacgtgaataaatttgtgaatcttatttgttcattacaaaaagacaaagctccacttattttgccaaatacaatgatgcttacaatgtcttttcatattgttttcctctacatcatcatcatgttatgcaactacacatactatttttttttcttcaattataatcacacttcataaaaaatgattcattctagcactctttaaaaccaaacttttcgtttttaccgaataatttgtcatgcatctaaaatataaaatatctgaataatcctttgttatattttaaaggggcgaataagtttaaaaaaaaagtaataaaaaaaaattaatcaaactctagtgaatatttcacttacaaatcacttatcaacataatgttgattttcaattgttatatatgcactttctttcaactttcccttttactaaaataacaaataaactacaattttatttattgtcttgttgtttggtttttgataagataaaattagggaagaaatatatgcttaatttttgggtttttaggtctttatttatatatgattttatttcaagggtcttattttgattgcatcactattgaacacccaccattaccaacatcaattcttttattattaatataattatatatgttgaatgtttttattaaccattgcggctgagagaagatgacaaaggtaaatgatcaaccaagtctttgtagtttttaaattaattattatcattgtgtaaatcatataataataatatatagtaattaatttctctaaggatgatattcttttttggtatttaaataataaattaaaaaatacgaaaaatatattatgtcatcaaacattttttaaatatctcaaaatgtttcaaggagatgtaacctttctttttatatagaaatgcattgttaattaatacaccgtcttagaagaaacgaaaccaaatcttaaaatttggaagaagaaaaaaatatatgcaataattttttgagagatattttcaatacgacctatttagtagtactaataatgtatgatgaaaattgttgccccaagttttggttaactaaattaatacgacttaattctctagtctcctcctcacctttgatgtaacacactaaccttacacctttgtttaccaaagtgtgagtcttgctcttgtaaagtattacaataattaataatattaagacgatgggtttatgatttttgacccagaactataaattatgcacaattaattgtgttccttgattgttttagctggttaaaaataattataaaactattctcaatattgtaaagtagttattttaagttttgttaaaagtgtcaaacaaaatattgacactcaaataaaattttaacatgagtgttttaactgccacacctcaacattatataatttaaaataataattaagaatatgtataaaaattattaaactaaaaattaacttattattataaaaaaaattaagtaaaactttaaaattatatatataatttttaaaattacacacattgcattaattgatgtgacaatagactaaacaaccatattaatattttatagttgaaagaccacaaaacattgtgaatagtttgaagactatttttaacagataaaaagatcaagaataagaatgcataaatcaagacaaaaatcttaaatctaaatacttttgttcattttcagaattaaaatattgttaccaagattaacagagaagtttaaatcctttcatgatttttattttgtgttgtttagttaaaattccccgtttacttgatgtgattatgttttttcaattgtaataaatgatgagattagacaccaaaagtgagttatataaaataaggctaaaaggctaaattatatttgccaatcaaaagaatttaaaaaggtagaatttaggtggagtttattattttgatagaatagagtttaggtagagttgtatgccagtatcttactacataaatttgaccaggcttagaaaaaaaaaaaaaaacctttttccttggataggggttgaaggaagcatcaactttttgattatgaaactacttataaaactccatagtttttggtctttttaattagttctacacaggttatctacttaattctatgtgtagacctatgaatgaagctaaaatagattggtgacttggtgtaagcctcggtgacttcttcatggtttgcgtacgtactttatttataggtgatctaaataaattatatcatgtaactataaaaatttcaaaaatagtagccactttgatcttattgataaaaaaataggtacttataattattaagagaaatgctaaagggcaccagcggtgtctagtactccctatgtgtcaataatgctattggtccaactaagtatcaggtctcatataatttatatatatataaaggagaaatataaagcggtgacatggcagtctaaaaatactttaaagttatcttttttttttcttctttaattctctcaattttttaat

SEQ ID NO: 219522 - DNA, 1496 bp, Cannabis indica
cctttttaaaaaaaaaactaaaagaaaaattaaaaaaaaggctttaccagtaacaatgggctcgccaataccaaaagtccaattttcaaaaaaagaaaaagaaaaatggcacaataatgacgtgctcaaaccaaaatttcgacccaaaattaatgttttttaattaaaaaaaatacacaaactgattggcacgactttaataatgtcagcccaatacctatattctaatgggtcgactttttttcagccctaaagtggtcgtgcctatatcttataattgttgtagtgcattttataaatttgaaaattgctatttggagtattagtcttttacaaattaaactagaattttgggttgaattttagttgttcggatcgctaaagaaaatgagtgttgaaaacttgaacccaaagtgaaaattttattaaactgtctccactcaagacatccacagagcaaggatctccatgaggattgcatgattcagataggtccaggattgatgtagcagcaccctccgtcaatcaccctcgcatccaaattcgataaagaaagaccttttgtgcattctgttatggtgacagggaacctgaaaatattgttccaaccccctatcattatttccataaacactttctgttgaaggaattaatcatgtgaagttttgcaacaagaaatatatttgtggatggggcttcagggtcagaggcttcagcaggttgggtaatggagtgtttgaattgtgctttcagtatctataagattaagagccacagacaaagatgtagctaaatcatccataataggtgattggtgtgtgcacaagagggtaagtgttttgctatcaactattttttgttgggtattggggtgtttgttttcaggtgaggagaacaaaaaaggaaattttccttttatagaataaaaacgtgtggtagcattaaatgggagaaaggttagctgcacatcccatcgatataacacatgcagaagaacacaaaaaatctaattcataattaatgatattttaaagttaatacaatatgtataatcattagcaggattaggagggggagtgtccacattaactaaccacaaatggttgtgtattcgcacaagagtaaattcattgctgaagttgaaattaggaaacacactcatgatgaagttactggcatatagatcagatttgacacggcatatgtaccagaagaatcaccattaatgctttgaagtattctgtagttgggtttcaaggtgcgacagaggaaggattcgacggtgtggttgatgctgttgggttttgtgctctaaataaaatctatttcaatataatcagatttactaattaataaagatcagaaatcattttatgtttcatggttcacatgatttatttcatttttatatttaatgtataaattctattaagtccagaacatatgtatttgttcgtgattatagtgttgtcagcacagtggaatataatcatgat

SEQ ID NO: 219523 - DNA, 5069 bp, Cannabis indica
tacgggaaaaaaatatgacgctctagcaaagctctgcgcagtcatattagcagatacgtttaaaaaaaaaaaaacattgtttaaaagtccatggtgatgttacttcgtatatctatttatttttaagtaatatctaatagagtaatgatgtattgtacttttaatttgagtattgttattggatatcaatttaaaagttcattagttactgatattctctaaaaaaaaattattgaattgatatttaattatcctttaatttgcatacttaaaataattataatatataatttgaggtgtgatcataatagtagaaatataatatttatttagaaaataaaaaacatgggtggtgagtgagttttgtaccatattattaatgtgttcgaaaatgtcatttgaaatcttccaaattgtatgatttggtggccaagtcaaatcactaaccggccattaaaatttgtcgactaattggtcaaccttttctaatattttttctttaacttttttatttcaaaaaagtcatcttttatatattattttaattattaattaagtaagaaaaatataattaggggttggggaattaactttagtcactatcttttgccaaagtacatttggaagaagttaagagagatataattgatgggatgtgttcttttttacctaatccatccaaatgaaaatttagatatagatttaagcaacaaaaaaataaataaatatcaatgtccatagaaatatcacaaatattttcgacatttttttgatgaaaatttacaaatattatgaatataagtccaaaattataaaacttaatgataaaatttagaaaatactaataaatttgaataattataacaattcatataatttaataataaataaaagtgctatttagatgttataattaaaaaaaatcatatatcaatgtcctatttttactattttagaaaatacataatctattttatcatttaacaaaacagaagatctaattggtaacttttataaaatactggatctaaaatagtatttaccctatgtaaaatgtaatatttgatgtatcaattatgtcaataattgatatatgtgcattgtggctttggctaggggccacacggagtcaattttgtgggtggctacaaacatgcttaacttctctgatccccttattggagaagttgcagcctgtcttttagccatggagactaccgtttcgtttcaacacccttttgtgatggttgagagtgactctgagacagttatcaagactctaaaggaaacttatcccagttggggaattgataactacgtgcactattgtaaacatctctctacttttaatttttttttttattccaagagtttataattttacggcccataatgtagctaagtgggcgtctgctaacaatattactggtatggttgatctctcttctataccagactttgtctcttgtaatgaccacgaggtctaacttttagtgcttctatctataaaacgctgattttcaaagaaaaattatgtcaataaaatgtaacttgttcatagtctatcaaaaagttcattttgggacatcttacattgttcaatttattggtgttttgtaaaatagttccttaaggaatttataaaataattcaactaaataatttatttctaattcaaacatattagttcatttctatatgaaattcattaacattaagtataatttgttacaaataaaaataatctttattttgttgtatattttattttatgagtaggggaatgagattagtgtagtaaaattctttcataagtttttttttcatccttaatataatagttatattatttcataaatagatttaaaaaaatggaaacattcactaacaaccgaccaaaactttaataatacaagtttggcaagagagacattacatgtgcctttatgttattatatgaaaaatataaaaaactaataaaaaaaactttgtagaaattaaatagtttattttcctcatgaacactcaatttatcatgaacatgaatatcttattttcttcgtaatgggttacatatttttacaactatagtggttaagtttaaaatatgtaataaatataaattaaataaaattttgactaataaagggtgtttttatgatttttaaggtgaatatgattttttttttatcatggtttacatgttggggatttttttttttttttaatcaaagcttttattgaaaaacaaacacaaaactagtgacacaaaaggaggccacatccctcaaacaaccagagaaaacaacctttgcctctctagcccgttctagagagtccgcaaatacattctctatccgaggtacacaggagatcaccacatcctcaaaagacttacaaagagtcaaacaaagagagaaaacagggaaaatattccatccaaacggaatagaaccagatttgaaagcgagagcagcagtcttggagtctgtctcgatacgaactttagactcatttttgtccaaaataacttgcaacgccaaagcagttcccctaagttcaccttccaatactccttcaacatcattgtgtcccactgccacccacgagtcttcaaagacctactcatgcctgtggaagaccgcaaagcctgctgactgaccaaccacataacagcaccaatagtcctccttcgatcgaccatcaaccacctgaagaggcctaccatcctcgtccaagtcatcactccagtttccatcactcaagaactctgctgatctcgaataacattgtggatgttaggcctcgtcaggtgaattctggtttacatattgtggatgttgcaaagtatttggttggtttcttttaccttaaaaaagctgaagctttagcaattttttatgttttagtgttttacagtggtgcttgcaactgtgtctttttgtttcttttgtggagagtgatactgaatttgttctcaattctgtctattttctttttttgaatttttttttttttcaaatctattagatctttgttatttatcttttcgtgtgtttatttttaacatatgatgcgaaatggtaatactgtagcacatgagttagcatatgcactacgaatagaatactaggtttcttggttggacaaattttatttttgtataatgactaatatattgttagactcgcaataataaaattgattatgatataaaaaaaaatatattattttataaaataattaaaagaataaaaatatgaagcaaaaaaaaaacagttaaaatagccaattatttctttaaaaaacaaatataatcattaagaaaagaaaatttattttatttttttcaatattttttaaaggatttttcatataaaatacatatattttgaaaaaacttatatcttttctaataaaaacactccgttttcctataaaatatataaacactcatattttcccttttaaagtactctcatgatctctactctatagtttacctcaaatttttacatttaaccttacatcacctctttatttttctccatatccatataaaatattatacttttaaataaaatattatacttttaaatatattttattcaatttcattttttttcttatctaactatcaatatatcctcatatattttaatatttaccatatctaccccacataagctataattatattttatttaaaaaaaatctaaatttataaaatataattttttatttggaaaagaataaattaatttaaagattaaaatatgaaagtaaattataaaaagtaatttgtgacatgaatacttaagactgccggttacaaataaatatctaaatttaatttttgacgataataatacataaattattgatatacgatttttttactacaagcatacaatattgttgtaacaatattttaattctaaaaaggttatcaaacccacaaaggttaattgttaaattttaccaattaatatgaatgtgtttggtaacacttttttaattaattttctatttttaaaattagaaaagtgattttttttttccgaaaacatattctataaaaatgttttcactttttaattttttaattgagaatcaaaattttgaaaacaagaaaaaaatactttcacaactttttaaacatatttttttttcttaatcaatattttggactccgatcccaacttggagtccggccacgaccccaatcccggactcggaccacaatcttgaccccaaactcatataggggtgcacacaggtcaggttttcgggtggtcgagttcgagtttttgggcttcgagtcttggaagtgcataaatgaatctagttttcgggtgcatcgggtatcgggtcgggtgtagtcgggttgggcggggtcgggttcggggtcctattgggctgagcccgaatgtttaatttatgggctgaaatgaattataaaaacaaaaagagtgagacaaaatattattccgttttggtttgtcaaagtagactggaaactcaatggagccaaatagattccttcaccatccatccctcaatcttggcctatcaaaatagaagttaaaacattcagaatcaaattcctcatcttcgaaaaatcaaaatctcattttttgaaaactgtaaaaatacaatagaagcctacctgtccaagtctctgctacccagaaatcccctttccctattttcatctttaagttttctgacgagtttggacttggattacgatgttagggacaccgggctgagcccattgcttggatgcgatctcgccggagaagagaagcagtcgttgtccgtccgtcgtcgccctttgagaaaaagaagcttgagggtgactcttggtgtaatgactactgtgtttattcgtaaggcaaactaaagaattcgaataggcatttttttaataataaagtctgaaaactgaaagtaaatattattaagtttttaataaagtaaaataatttttttttaatctttaaatattgctcgggttacgggttacaacccgaataaaaaaaccaattcactatacccgaacccga

SEQ ID NO: 219524 - DNA, 2159 bp, Cannabis indica
ttctaatactttaaaatgtaaccaaataaaaaatagaatgaaaattattttctttccattttattacctccaaccaaacgccaccgatacaagaatttacttggttggacgtgattctaattctacctagtattttcaccattgtacttgctattttccatgagtgaaaaaatatgtactaaccaaacagtttgagtggagtttgacgggttacccgctgcctcatcgggatttgtcccgccccgtctcattttatggggtggggcaaatagggtggattattgtgtggagagtgtgcatggcatataaatacaaattacaacaataacaagcagctacaagtcatgaacgtctcatccttacaaactaaacagctttaagtttttccacattatacctggacaaatcttctgagaatagtacaccattaggagaaagaaggcgtcgaagggcgaggaaaaatcgagcctaaaagttttaaaaagcaaaagagagaacttgttgagcttcaaatgaatttagattaaaaaaaaaaacaatcatcttagttgtgtggttcttacccattgaaatgctgctagtgtgtaccagcagcttaccaaaccaaaccctttattgctaataagctggtagaagaaatgaggatagttttaaaatggtaattatggcaatatgaagattataagagggaaataaaaaagaagatatataattattcaccattagtagaattgctcccagagtgaagcagccactcattgtcatactaatgaattttaggtctcggccagcctgttggaaggaacaatcagatgtcaaagatattctaaagtagaagtttgtgcatgttcttattgaagggactgatgagaatgaatgaatctgaaatgagggtccttcatctaatttggttgcctctaacaaatgatgaaacctttcaagtcaaatgaacgagttgtggcgtttggttgggaggaatgaaaatataggaataggaatgggaatgaaaattgaaataggaatggaatggaataaaatttaaaatgcataaaaaaattgataaaaaaattattaaattttttcaaatcttgcattgcaatggtctttctttctattttaaaatggaatagtcattccaccaaaataatagaaagatcattccatcggaatggtattccaatagttttaaatgtaaccaaacaaaggaatgaaatgaaaattatttcctttccattccatttcattacctccaaccaaacaccaccttaaggaatacataacaccatggaaaagagtccaaaatgagatgagcttttcatattttaagaaagtatatataatgtgtgtataatatatattgctgtaattatgagatgagacaaaaaatagaagcgcaccaacaatgttccctcaaggctgtgaattgaaggtgtagcaactatggccaaaatgtatggtataagaactttgtgcatctgcaaggaatgataaaaaataccaggagaaatcaaatcaaaaatccaaaagcattatcgtcctaaaaaaaagaacaattataatattgcaattgaaatgaacaagatgaattgatgaaacggcaaatccagtctaattaattcaacaagattcttgatcataaaaataaacaaattaaggtaatgattatgggaaaggaatgttcagaaagaaagatctaacctcttgtatgaccagctgatcaggtgtaaaaatattcggaaataaccacggaatagctgttccaatagaccctaaaactattccaagaacagcacctacgagaacgagcgacttgagcagcattctggcctgtaagatattttaaaaactttcagactgcattgaaaacataactacttgatacagatacatacatatatatatatgtgtgtgtgtttgtatctacatacatagtaaagcaccaaaccttttccaaattacgtttcactccatatatcaactcaggcataaatgattgtgcagtttgtgataaaggttcaccccaaacagtgcacatgcagaacgtttgaatcataacctaaagaaaaatagtcaagttattaatgcaaattaaatttactttcctaaggaataattctaaagagaaataaatataattagttttccaagtgtcaaagaaa

SEQ ID NO: 219525 - DNA, 3146 bp, Cannabis indica
tagtttgtcaaaaaaaaaaaaaacaatagaaaaaatttcagctacgtatgcaattttaaaacatgataagttggtttgtcaccatactttctatgacaacagttacttgtttacatttattatgatcgtgcattactcaaagaatcatttagcagtctctttttgcaatcagaataatgtgcccgttctcttttggttttgaaacaatgtttgctagtttccttaatagttgtggctgtttttgagttttattttgcatacaccaatttagaggttttctgtttatggacttctagctctcctttagccaagttactacttgattgtttttgttctgttgattctattaatagcaaactaactatatttcgtaggcagctagtttgagaaaccatgtacttgtttatctatcaatggtcatgtatccgtcattagccttgagaaaccatggatcagcttgtatattaaacaaaatattgaccaagccaaaatttcttgcagttgcttcgtattgaagaagagcttggagatcatgcaatttatgctggtgaagattggaggcaatgatcccaattggtatcatcaggttccatcgccacaagtctttagaagtacatgatattgacaaaatcataaatcttcacagttttgcatttctgctgctgggtgttttcattttggttgattaaagcatttgcggagtgtaatcaaatattggaatttgtaaaacgtgttctttaaaatatgaaataatattgaactttttgttctaatagttccagactaatttgtcttaaagacattgaaaaggtgtttttgtttcattattacatgtaattataatgcaatggaatctccaaaccaagccaggacgcacgcttattatcatacctttgagcctaaaaagtttgtaacaagagaacattagctcaatatatatatatatataaatatatatataatgcgaaattaggatgctttttttagcatctctacgcatcttactctttagagtttgtgaaatccgctttataaattgtaaagcaaatatgatacatctatcgtttaaaagttaaaaaacatttcctgttttccggaagcccgattgtgtttgagactaaattttcctacaagcgaaaatatgcacgcctaggcccaacaaggtttgttggttttaaatcctttttagtcatcagggtgtcaatttatagaggcacataaacaaacaacaaacattaaagtaacattgtttgcttaacacaacaaaagaaaaaaccgatatatttgagaaatcatctaaactacatatttagctagttaaaaaagtgaataaccaccctggacgaattgtgcaagaaaaacttctaattaactttaaacagtgcaaccagggttaatatagcaaaacttgccctaaactcaggggttcgtctcttcttcgtcctcttctatcttaggagccaagtagaacctaacataacccatctctgcaatcttgtactcaaccacaacaggcaattcagaggacaagctgattgttaccgtgttagacaatggagttgccttagtaaaggaattcatatacctcagagcaaacgttaaagaaactggttcattcatctctataactgttgcttcctctggctgcaatttcatcaaatcacataaattaacatgagttgctggaagcataatttaagaccatcatatttaaaataaaatgccacaaaaccattcaactgcatcatctataccttatcaactgttgaattttgcctgcaaactatgttagcagtcccaatatctcctcttgttgagaacttgacaccctccttggtcacagagataacaactgcaagggcaaaaaaaaaaacaattaagtttaagaagaaccaacaaatgaaataaccagcaaaacttgtgtaaggaatgcattttattgtttcaaaaaaatttagaccataccagtatcaccaatgctgctgagatctttacaaattctagcaaactcagatgaaggcatccttacaatagcatggtattcagcttctggaattccaagatgttcactatcaatgtccattaacttcatctcaaagtcagcaattttgtcttgagctggaatccagtatccacacaataagaaacaagacaataaacaaataagcaaaataaaaacagcatgcataactctgcagcaatttcctctacagcagattaactatcaaaaattataaaattgaaaaacatttttttcaaccaagaagctaaatacaacaaagtaaatgaacatgatccttgtgttttcagcagaacagaatacatatttctccaataacaagtgttttcagtgatttaataattaactacaaaaaagaattttaaactaacgaaaacaaaaactgtaagccgactaaaaaaacatcatcaagaacaaaacaggatgtagaagtagaggaagagttaacatactgggactttcgaacataaaggtgacagtgtcacttccatcgtcggccttaatagtgatgatgtcatcatttccggcacacttaagcatcttggacatgttattgaggttcatacccatggaaagattcctatcgcatcggtagtgctcgaaaccctccgatctaagcagcagcgctaccaaggccacatggctcgaatccatggcctggagagagaacccagtcgccgaacaatcgaagttggcatcagtgacgaggtccttgagagcctccatcaccttcttcagtagcgaaccctgaaccaaccgcaactccaacatcttcagatctcactgatttctccgatttcagagtatttctcaagtttgaggagtttcgaaatgaaaaaaattggggggaaagtatgatcggttcggttaaggtctggatcggtttttatagtgatttttaagtgcggtttcgaaaaagggtcttggaaaatattggcgggatttggcgcgatttaattcccgccatgcgtttgggaatgggatatgatttcctactgctcatctatcctgcaccttcactgttcatgccatgggttgcacgtgcgaccagtgacgaagccagaaatttagttaagtgagggcttgaataaatattaagtcaaaactaataaaaataatgataaat

SEQ ID NO: 219526 - DNA, 3277 bp, Cannabis indica
tgatcttgatcttgatcatcatctcttctttaaaaaaatatttctgcctctgcgtttttatccatgtttgtaaaaagtagtgatgacttgcttctcattgagaatactttgctagattttgtcggactgctctcttctgatcctttgtatgcattccattggtattggatgctaaatacctgacaaaaaaaaaaagaacccaattatttattattattattagatccagatatagcttagcttaatcaatattatatatacttatatagtagtacctgaggtttgagagtaagcaatggtttgccagttccatccatgagaacaaggcctcctttaacgtaagagtttttcctggaatagttatcaactcggaaaaccaatctgccatggttgttgaacacagtaaagccatcagtcccttggaaactcatacttgacttcttccatacggtgagcactgagcgccgttggtgatgatgatcattataattatcaacatgattattatgacgatcttgatttgataacaagttctggaaatattttttattctcatcagctgggtgtattcttgacatggttttatccagaagaaataatataaagagaggcaaattaaggaaagagcaaagaggtgacaaatgagcctttttcgtacgtgatttgaaggagatttagtctcttgggataatgatcgtataccgtacctgctctcactagtactactctatataggctttataaatctgactatggtaatggagagaagagagtaaacctgaggttatgatgagtgagtggtttgtctctaggactagggatatatgtacatataaaatacccaaatgtttatctaaaaattattagttaatatcaccttagtggcgaacataacttctttacgtaggcccctgcagcttttttacccattcatatctattcatagttttttatacgcacaacgtacgagtgcatgaaactcaataagtataataatactgtcataatgatgttctgtattaaaaagactagggacactatattttcaaatagaaaaattaaattataataaaacagctaattcggcctgtagattatttatatatttatttttacaattattattattgatgaaaggtgggttcttctcttttgataagcaagtctattctatagcttttgcttggattgtttaccaagtttggagagacgaacttagcttcttagatgcaacaggtcccttcaatttcagcttcggtaagttggttgaaaaaagaaattaaaacactaaattagaaagggtattggcacgactaaattagtgccaagcccaccttttgattggcacgacgtgttgtgcccttttgatcgggccaataggttcgtgccaaaatgtgacaaccggcaccacaaatggtatcgtgccaacggccagaacaaatggcacggcaggtgtagtgcccacttgaaatgctgaaagttgtcagccatagcagttagcaccacaagggttgagtccattgttctttatatttttattaaaaaaaataattttgtactttaaaattaatttatatttatatttgaaatgtacataaaaaaactaataaaaattacaataatcaaaataataaaagcattcaaataattaaatacaactactaaattaagtgctcaaataaaaatactgatattgtcacattaaaataactaaaataagtgttcaaatataaaatacttatattatcaaattcattgttcaaataatacttatattgccacaaatgaccacactataaccctaattgtgtggactcctcttcgtcgtcctcatcatcatcatcgccattctctccagactgttgttgtggaatatgcaacatttatggatagtaaggttgttgcgacacttttgtcatttgcgtttagtacggttgctgtatgtgtaacggagcactgccatcttccgacgagcaacatccatgctaggcctcctataatggctctgaacggtgaaggtgatgagataagaaaagtacagcccccttctacatctacaaaactctgaaaactcattacgagccattgcacactggagcaaggacgctggaatagtaacctaaggaagtagtccgagaactgaaaaataaggaagagcaacaccacaccacggctaaagcacatgcctgaaaaagatttttgcaaaaagccaaccccaaaagcgagagatagaaggctgtcaatacccaccaagatcactccctcatggcccaaaaggtcagttccatctgcaaccctcggcaaaggacgatagacatctcaccagagactctcaaccaccgagaacggcaaccactcgcctaaaaaataaaggataatagaactggccctaaggagcgtgacctgacgctaattacactcatcatccaaccatgaaccccatttgctgggacctttgactttgcacgagaacgaaaaagaggcaaggttctcgagcgccaccagcccagatcaagccggcaacgcccataggggcatcaaaaaccctaagagaaacgaagagaggaagaagcaaaaccctagcagagagaatcttattttatgattcttctttatatatgtgttatagatggataaattatagataagctatcaaacttaaatttaaagcttgcagtgagaagcccactataatcatgaggttagaaatgaacccaaaattaaggaacaagataagatcccttaatttttagtggagtgtgggagtcaaagtgtctcgtttgctttacaaaaccatgaatgaacaagtatagagaaaagaaaaacaaatgatgtgaatccagctttttaattgtagtatataatatataagtatagcaaaaaaaaaaaaaagaaaaaaagtgatgtcaatcctgctttttaattaagtttcttccctatattaataataataataataataataataataataataataataataaaaataaaaaagtgcatgtttagcatcataactaaaaaactgttttttgtttttaaaaataaaaattgttttttgaaaataatttggcttgtttggccttgttttttgaaaatagttttcagaaaacaaagttacaaaaaacaagaattttttgaaaaacactaaccaaacatgacttgtttttaaaaacttcaaaaactatttttaatttgttctcatttctaaaaacaattttttaaaaataaaaaatagaaaacaataccaaacatactctaagttccttccatttca

SEQ ID NO: 219527 - DNA, 5011 bp, Cannabis indica
tgcataattatgaaacactaacatttttagacaaacttttttggaaagagtaactgttatagattagagaaaaaacgtcaaaaaggcaaaagtgaagagattcattttatctaaaaaaactttttctctgttctaagggcatgctaaaataatctatgagatgcaatattaatgttgcgacttacataagaaagagatgatttcgaaaaattagacaataaaactttaatatcagagaaaaaatatctaaaatgtgtttctattccccaccatatctacaaaagaaaagatatagattagtatcaaatcaagtaaatatagtaaaaaattaagaaagataattataataaaacttatctttttaaaatatttgtatcttagaatgaccaagtgagtaaaaaaatttacatatataagataaaattaattaacacacttcctaatagtaatatcaaattaaaatgagaaattttatttaaatgttaaaaattagtttaaatattattttatgaagaaaacttatctttcatatttatggagcaaatcaagtgtcacttctatctctcacgtcattcttaagataaatccaaaataaactactatgtaccaaacaagttacactcagtacataaacatactaccatacaagtcataaaactacacacaaacaaatcactaaattcaagttacaaaaaaatcttcaacatgcatcataataaaactaaaattaaataatcaattaaaaacttctttaatacaccaataagaagaaattcaaagaaaattcctaagaatttatgaatatggtaaattaattcaatgtgattttttcttcttgaaattatgaatatggtaaattatcatgttcataaaaaagtactatacatcccacacgaaacatggaagataatctagccttgtttggaattcattttagtgagcaaaagaaaagaaaatcaagtgttttaattcatagaaaataagatcatgtggtttaagttattttgattttagagtgctaggaactctcacaaataatatacataaaatgaaaataaaataaagttacaagaaatatgttaatataaagtgtctttggaataattgcatataagttttatgaacatgggatgtataatattttttagcttgtatcactttattatttttcttcaataaagttgttcattcaaggcccaaaacgaagttgaacgaatggtcttaaaaaaagagagagcaaacataaaaaaatatgaaaaaaaaattgtaacacaaatacaatctaactaacctccctataacaacattttcctaaaattgtataattaataagatatattataggctatttaagattttatcactctgaactttgacatataactattgtgatcctagaactttacaggtcgttaaaagttctttctaactattaagattgttggatttaaaaacttttgtccaattttattaattatactaacacgtgtctgacgtcgaggaaagttcatggaacataatttaatacatgtgaaaattcgaaaggtacgatttggtacttggacaataggcaatcaccacgttaaacacatgttactaaaattgaatggaattagacgaaactccttaaatctaacaatatcggtagttcaaaagaaatttttaactgtctaaaaaatttaaggatatgatttaatacatctaaggtgtatgagataaaaatcctaattgatctaactaatgtcatagttaacaatcaatatgtttaattaaaagatacatgtaaattttgcattattgatttgggttttcaaggagaaatataactagcctcttgattaccatagtgaaagtgaaacatatacttctattttggaaggaaaaatgagcccacttataagacaaaagtacattatgtcgagtagcaccacactaggtttctttttttgtttttgccttatgtcaagtagcacactaggctttatttatttatttattattattattttaataatatttaaaattcttattattatttatgcaattcacataattaaatttgtccatccactttggtaggggtccaaaaaaatcctaccttaagatatgatgtagttttcattttttgggtttacttttaagctcttttaagttgtctcctactattatagagtaatttatagtattaccaaaataattttaaaataatattacattaacaatgttttatattactccaagatggaacaataccggtttaggatgtaataatatttgccctcaaaatatcctactaacaaaattataaaaagtgacataataatctttaacaagtattgttactgggcatcagtggtgcttaataatatgacaaacaaataaggtactaagcaccacccttttagcatctcttttttaactaatcatataatctaacctgcaaatctgtcaagttataatattttggtgcacatatcatcatatacataaaaaaaaaaaaaaaaaaaaacctcatagataaaaactaaaaaaataaactcttctagaaatctttatataaaagtaacaaaaattacacaataatctaacaaattttcaaaacttatcgttataatattttgttgcacatatcatcactcatatatatatataaatcgttataatatttaaccaaaaaaaactaagaaaaaaatttagttagatgaaatagcaaccaccaaatctagacctatagctcaaaaccacccacatatataaatcccatcattattagagttcacccacatatatacatattatatatatatatatatatacacccaaaataacagcaactcatccccatttattagcaacaaccatattgattttttcaaacccatgctcttctcgtgcctctttctctacaactccatgaactagtcaatctcttttttaatcatcattattataactttcttgtacatatatatatatatatatatatatatacagtgatatatactttagcttagctctagctatacacacacaacagaattttttaagaaaaacttacagagaggtcctttcatggctgcctgtggaagtttacaacacatctttgaaaacccattacccgaaaatccaacacttcttgaatccctttctccatggaaccaaatcaaacctgtaaataaaccaaatattgatcaatcttctttcactgaaatctttggtgagcttcatttcaaagaaagcacctctcttttttctatcatcatcatcatcttcttctatgatagatttcgattcgaaatctaagaaaacatcagcatttgaaaactctttctcgagttcatcatcaaagtacacaaacacacacaaaaagagtgagagtttctctttgaaaagctttgaaagtttgcaactttgtactgagggactcggttttgagagctctggtgaggttgatgatttgatgttgaagaacaatactaattctataaaggaagatgatgatgatgaagatggtgatcataacaaggatgttcgagaaaactcggtggagaaagaatcaagtgttgttggaaagagtagtagtactaatttctctaacttttgcagtgaaattgttcgaagatcaaggaggggaacagcgatgaacaccaccaccgcgggaggaggaggagtagtaggaggaggaggaggaagattcccaccaccgatatctagtttgagcaagagtaatggaaagccttgggtgtgtttcaagtcttatagacaagatgggaggtttgtattgaaagaggttagagttcaaagccaggaatttctccatgcttgtagggaagatggccggttgaagctccactttgttcaaccaaatgtcgaagatgaagatggcgaaaatgaggaggaagatgatgaagatgatcatgatgatgatgatgatgatgaacaagagcagaatggtgaggatgatgatgttgctgttaatgaagattgtgataatgtaaggtctgaattaggccataccataaatgaattaaggaaaaaagaagataattgagtacaaaagaatgattataagtgaagtatagattttcatgtaaggtttgttttcttcttctctgtgattaattcctaaaaaaaatcctgaaaatacaaggaaataaatgtgaaaatcccttcttcttttctgtttaattagttattttcttattatgaaacctagagattattatggtttaatttttttaaaattttatttttaaagactaatactttataaaaggctaaaaatgaaaaaagggaaatccgtgtaatttaataaagttgtgttcttgaattagtacacaacacactaataataataatatatataaatgtggaagagaaatgaaatcttcaataatttttttggtttagaaaaatgaaaggtttaagctaagataaagataatgtttttaagatggtgacacaagttcatacaatataatctaatttaataaataaatagaaaaaatattaatagtaataagacaatattgaaaaagtgtgacacgtgaaccaacaattgcctctgctattaataaataatgattccaccacatgtaatgttctggaatcacaactttttatggcactaaaaatcactactcagaaaaagacagttcaaaatctgatttaggaaactataagtggcatatattagagcaatgtaaagaaaactactattagagggttctgagataaataataattcataaagggaaagttcatgtcaatcaaagttatgaagttataacagaatcttatgtataagtttttcctattttttttttttgaaaaagagaaagaggccaaagtctaagcttgacccctcccccgacatatatagaaagcctcacttgtggcggaggaataccatgattacaagtgttctatcacaaacatataaaacatttaaaacaaattatgtactgttataccacattacacaacagtctccagtcgctactcaaatcta

SEQ ID NO: 219528 - DNA, 3670 bp, Cannabis indica
gagctttcggctttctttgtcgttttagcaatattcatatatggtgtacctccaacacctccaacattcacgagtgaataatatagtaccaaataaattcgaagtcctatacaaagaataagatgaggttttgtcccattttcaacctcacttttaaaaaccaagaaagtgtctctgtttctcaaataggctttagtgagtttcaacattaattttttcttttagaaagtagtcattctccctaattagtaaatagtacaatgatatatatcccttcttccatttaatgtattgattagtacaataatgggccattggtagataaccaacttacaataatgtaaattttattgaggttatattatatacaagaaactccatgtgaaccattattgtagaaatgaagacactatactatttatttcatcatttcgaaaaggatgaacgcatgcccttcactcactttttttcacctactcttcattatcaattacatttttttaaaaaagaaataaaaaattctatagatagagttcgtttttgtttggagtagttgctactcattttttcttttcctctctttatttcacttttggtaagttatagcaactataaatatacagtatatagagagggctaaaagtagtgttagctagatatagtttattaaatatcatttgatgttgtaaattaaatacaaatttatgtacttgatttaaattcttatgttcaaaagcaaaacataaattcaccgaaatgagttaattaacacatgcatgcatattatttatttaattacagaagagcattaaggagtataggatattcactcgatgtccagctacaagccagtagggctcgacaggttagcttcaatatttatgcctaattatattttagctttgttaaatacactcctgtttgataaaaacattcttcattaattttataattgcttatgaaaatcatcaacatgggcatttagcattattacatatactagatataattgaaaaattgactgaacccataaccattataagcctttaaactataatgaagtacttatttaaatttacccatatcatgctttgtcaccacacttgcacaaagtaaggaataaaaacaaaaaaaaaaaattacactgctcccataagtcattaaattttgttaattatgagacctttaaaaatacccaaaattgttttgaacgtaataaattaccatttcggctaattaagtatataatcatcaacaggttgttatattagacaatggccttgttcgactcacattttcgaaaccagggggtgatgtaattggaatacaatacaatggaatagacaacttgcttgaaacagagaatgaagaaaagaacagagggtacataatacaattttcttttgactaattaattcaaaatctttttaaatgttatagaagctaatttaactaaacatgcatttatttataaatttaggtactgggacattgtctgggactcgaagccaggagacaagactatcaatattgacacgtaaaaaatttctccactcttgtaacttgtatattattagcattaactattatgtatgtacaaaccttttcaattttgattctgattaatctaattcatttgcagattacaaggagcaaaatttgaggttataaaggcagataaggatggagcagaaatttcattccgcagaacatggaatgtttccacaagtggcaaaacagttccattaaatatagacaaaaggtctaaatagctattccaatttcgttatactaacaatttttttatctatttatttaatatttcgaatataatttttgttattgagacttttttataatacataatttactgaaaaaattataggtacataatgttgcgtaactatccagggttttacacatatacggtacttgaacgtttagaaggatggcctgcatctgaaattggccaagttcggatcgtttacaagcttcgagacgacaagtaagtatattatagtaacattttttttttcattttcaattgtgtaatatagtaatttaaataaaaatcaatgtctccattgtttaattttttttttttctaaataataaataattaattgtgtaggtttcgctacatggctatttcggacaataggaaaagagtaatgccaacaatgaaggatcggcttaatggccaacctcttgcttatccagaagctgttctcctcacaaaaccagctgaccctcagctccgaggagaggtatttataattattattaggctaattgttatttttgcctctaaaattttatataccaaattatggttctgaaattttaaggttgttaaaatattctttgaattattgatattattaaatttaaggacttttgtctaatttcattcaattttactatttcagtgattgtttatttactaaatcatgctccccaaattttaatatttactaaatcatgccccttgaactttgacatgtactaaatcatatccccaaattttcatccatgttaaacttttttactaaaattggacaaaaagtccttaaatctaacaatcttaataatttatggggtatttttaacgaccataaaaattcaagaaatataatttgatacgtgttaaaatttaggggataaaaattataattagtcttattattatgaaattttgatttggtttcttattcatgattattataatttattacctgtatacataaagaataatgagaaatttgttttcaaaccaaccatcgttttgctatatttcaaataaaattacaaactctctatatatctagttcttaaataagtgttcataataattttattcattaatttagaggataaacatttacaatccatgcattcatgtgaagcacactacaattcaaaacatttatatggttgtaatttctccattactttatctatttaccctttcttttcaacattttcctagtcaatttattccagaaacaaactcccaaaaaaacaaaaaactctctcaatgaactggtaccctcccatagatatgatttttagtcatatatgttgtcataagtcaaaacaatgttggtctttgttgaattattcgccccaagttttactctttctcaattttttattccattcattcatgttttcataccaaaaatatatttttttttcttctattcaacaggtggacgacaagtaccaatattcgtctgaaagcaaggacaacagggtccatggttggattagtactgatgagtctcctgttgggttctggattatcacgcccagtatcgagttcagagctgctgggcctgtcaaacaagagctcacttgtcatgctggcccaattgccctctctgtaagcccatatcattttctttcttgttttatctcaaactaaaatatccatggcaatagttcatttcattaaaaaaaataaaaaaaacttcacacattacattacatagggcatactacttttagtgaatgaatactaccctagatgaaatttagttaatattttgcaactttatttttttgtaaaataagttaaatatggtatgcgtaactaaaaagttgtaaaaaatcaattagacattataagtgacactaaagtgtgtacatatataaatttatatatata

SEQ ID NO: 219529 - DNA, 3991 bp, Cannabis indica
ttcttcccaaaaatggataatgtaattatttataacttgtccaataaaattaatgtggtatcgtaaatcatgaaatcaatagtacaatattattcatataaaaatatatatagtacgagtataacatcgtaataaattgacatgtgtgtacgtgtgaaacgaacatatataaatctaaaaattaagtatgcatattaattttcttgcatacgtaatatataacacgccggcgaaattaacggctcatgctgctaccgacgtcggccggctgttccataatatccacttgtgactcgcaagcacaaccgaccattttatatattaacctatatatatgtatgggggtatttgtgtcttttcacttcatcacattaattaagaaaaaaaccatatgactatatcaggagagacggatattaaggaagatattagattgtaataatgggtgggtgtagtcagtactagtacttttgctgcgttataacgtgggtcagaaaccaagagtcaaaaagattattattattattattatttgaattatatatattattagggtaattaagagttcaaaaattcgttaatattgttaagtattaattaactcctacattctgttttcggctgagacaaaaaactaattagaatttaggagacgagtctacacttctagccacacatgcatatatctttttctttgtcatgctattatgttatgtaaagaaaaattgaacttgtagagagaaaaaaggcgctagcctgggtgtcaccactacgcaatctgattttgagagagtttctgcaagcattaagaaaaagaaaaaaaaagtctaaaagagaattgattatgaactttctggggttatttttagtgcattattgaaaaagtttattttgtattctataatagatgatctggtcacacgcgtttttgaggtgaattgtccaattaaaagagtcccttgaaattttgtaacttaacttttgaggaaaccaaaagcatgtttgccaataggaaaacactacttagaactactttttaagatatacgactgtggaaattacctacactttacactttttaactaaatagtggaaagaatttaatttcgtatttatattttgcatggctaccaacattacacacataataattatatatatgtatattataattttacgttcacatatatgtagttcattattaaaatatataggtagggaaaatatataaatttcacaattaattaattcagttcaattattttaatgtgttagcaatttattacaaggcatggaccggccaggggtgattcgaattaaaacacaaattaaattatgtataattaagatatattaattattagtaaaatttaattaattacatggtcactcacgctttcatactaactaatttataatgtaaccaaatattattaggatttataacaacctcaggggaatcattaagagtaggaaaataaattattgtccactaaatataattaatctcctaacatatggctttcaaaagataccttccatagcaaattaattaaaaacaataaaacacaaagacttctcccaataattttcaccatatctatatatgatcagaaaataatatatacatgatagacgatttaatatatatagtctctctttaatgataaactaaaaaaatcaaggtctcctagaattatcatctctaattgttttgtacatatatatgaccatgtggccaaagattgcaggaaacgtggcataatctgagttagtgaggaaagagatactatattaattaattactatgaatgtataatgaaataatgtaattaagtttcgctttttgggacaagataataccatttataaacttgtttatctattaattgcgaatgaaaaatcatgtagtcttaattctgaaccgcatctcactcctagctaccattatataaattttatgatattgtagatggtcacatcttaatgtcttatagattcgaaagtccgatatttaatttaaaattaatggtaataatatatgttaattggtaatgtgaatctaatttattgtttatatatatttgttttattttctacatatttataaatatatattttattagtttggtcaaaccatgaaagtagtatatattctttccactaagcttgcgtgcaccagtttctcttgactaattaagtagttacatgtgactgtataacagagaaattttttttccttcgttatttggtctcacaatctccgttcataacttcatatattagatttttacttatattaatattattgtccagtcaattctaaccattaatcagtataatacttagctaggattattgtgcagtactataatacatattgttttatttatccttggtgcactaccataatcttcccttaattctattcgatatttttttttacattaatttaattcaattaaataatttaagtgtcatcatcattgattacactttttggttaatttcagagagtggtgtgcctataatataaccacacaatagtgtctgtttaattatttcttataataattattaaatttgaaagatataaaatcacagatttaattaattataataataacaatatcttaatagtattagatatatagtggccggtgcccttaacaatttctcttaattttactaaaaatatataacaattgatcagcagaaaattaaatcccagagcttttgagaatcccctatctcatcaaggttatatattttaatttaaataattaattaattaactaatattcttatttgtaagaagaaaaaaaaatccaatgaactagagtgctagatattcgcattaattagccatgtgaaaggggaattaacatataatgagattttattttttgttttccttttttgaagaatataatcataaaaaattaattgccaacccattgactacatctattaataatctattgtatctgttaaaccgaattaaaataccggttagagacataatgttattctatatagaaaaatcaatatgtaatgattttctctatacctgattaatttaacattgagtataaacatattttgtaacgattttttcttagttctcaatccatatataaaaatgggtaataatatatatcggtttattgctttgcaacttaattaaacgacccatgatccttgcatgtgagaagtttggtagttctcaataattataaattatagaagaataataatatacaaattagagttagaattaacaaatatataaagaagtggaattttggtcgattcccatgttattgttgaccattttacatttgttgaagagagagtaccaatatttctaactaaaagggtgatttaatatgatacatattctacatatataaatattatatatatatatagtgcagatatctaagtgatgatatatattatttggagccaatgatcgagatctctgcatatttaattaataatattgtccttaatttaattcttatatcattaatatattccaaatatatatgtttccatttatattaaaattttcaagtagtatgtcaacacgattttgtcattaatattatcatctattataaacggtggggagatcagggggctgccgatggaacatatatatatatacatatcattattaagtttcgagaatccaaaaatctaattgtttattaaaattatatatcatttatacattatttaattgatatgatccatctaataatacagattaaaatttacatataaaatatcggaaattttgttttctcaatactactaagttttttataattcctcaagtggtcgctttccaacttgggaatatttaataattcatgaatttacaggaaaaagatatatctaaataataagaaatttgtgacttttattttgttttaaggaatagctatagctaattaattagcttagtacttttaataagctt

SEQ ID NO: 219530 - DNA, 3422 bp, Cannabis indica
ttttttagaggttatcctcatttataactcacacaaattaggacttaagtttttttaatataaaaattagaggttattatttaatcaggtggggatgctcgcataaagcaaccccccgccataagcaaggaagtaccccgcatgaacatgctctcatgagaaggagaacagctacgttcagtggcattcggggctctgtgtagtcgtcccacaccaagttgagcttgtgagctctaaggcaatcgctaacttggaacatgctttgaaaagaagaagcgatacggctcgtctgaaaataaatccccatagatttggtccttgattacagagcaggtttactggtattagtggagggttgattagtagcatattcttgtatattctcgagatttttacgcaacaacatagttttgggttccacaactctctttttgttcctgaataaattaacaaaaataaaaaggagattgggacgtgaggaagaaatcatggcaaggaggttatttattttttcttcaaaaaaaaaaaacatgcctattaaactaagagaaggcagtataaaaaaaaaaaaaaaaagggaaaagtgtctttattgtgtttggtggatcccatgtgtagtcctaaagtcaaggaaaaatagactaagtcgcccatacaaccttattcccgaccacacgcaatatcaacttacgtggaacaatggcgcgcctaagaagatgaccatcggcactagaaatgacgtggcaatagtccatcatgagggacatgccactagaaaggaactttaataaggagacccaatcaatcaaaggtctcggccacataaactccgtcatagggacaagccaaatattcaatcaagacaacgacaattcaagatacaagtaatcaaacaatgaatttagaaaaaatttcatatgttcaagcacccaaagtgacaaaaaatacatgtttttctcacttgggaatttcatcaaacaaacacatggtaggacctattttccatagtcaaaacttgtaccaaaagttcgcaattcttgcccaaatttgctaattctacacccatttagccaaatttcatcatcaatatcacaaccaattcaaaataaattcaaaatccatccaaacactattcccacataacatatccaaacacattcaagaaaatacaaatataaacctaatttctatatccaaaacaatttcatccatgtaatttataccaaaatcaattacaaattgccaagaaagcctaaagaattagaaattacctttaatgttgcttgagttcctaaaaggcttgaaaattttaaaaaaagttatctccgttcaccaatgatggccatggctacaatagggaaaaatatggctttggtgaatttcaatcttaatgaaagggatgagaggagaggttgcattggaatgaaaaagaatgaaaataattttttttacctagaatgatgcttggaagtcctcggccgattggttcttgaagtagtgaggagttggaagtttgagctcttgaatggtttgtgtttgaattgagtgaggtgatttgaaaaagtgggaaaggttgcatttataaagaaaacaatgccttgtggtcgtgccccacttatggacaagggtttccaaaaattcccttggcctatttgtcatatgtaatttaattttaagaacaatgacattgcaattcttgtgacacttgtcatgtgtgtggataaaatttgtaatttaaacattgaattatgtgaaagaatagaaatttgtcgtctttagacaaattaaatttcttttcacgtaataaagtttaaattccacaaatttcgagagaagctaccaagaagacacaaccgactcgcaacgacgacagtctcaactgggtactccatgagacaacaaaataagcaaaaggtgacatgcttattattttcaagacaaaaagagtataataacaaaagtctttcccaaaactttttgacagacactttttggggcgaatgttatacccggtttttgaaaaataaaaaaagtcaaccttgcgactttgaccaagacttataaatgtcaaatgagttaagagttccttcctgagggccccatgacacttctagaggacacaaaaatatcaatcaactatttggtgccaggactcacacacccaagtgtgcccaaactagagttcataggcccgcgcgagtgttttcaccctagaatcctcaatccgccaaggaaaccaacaaggacatgactcatttgggcatgaatatgacttgggttcttgcataaattcaatatggcatcaaaccctcaagaaacaaggtatatgtgcccactgccttatggaatttgcagttctctttaattttgaagagcactgccacaaggaaatggcgatgctctttaattttgaagagcactgccataaatgaatggcagtggtagatccttacaaatcatgaagggaaactatttccctcaacaccaaggagttaaaaacaattgagagaaactatttcccacctaggactaaccctagccgaccactgccatatgaaaatggcaatgctcttcaattttgaagagcactaccataagggaatgggagtggtcgaccatgaagaggggatgtgagatttttttccaacaataaattttcaccaataatatgtcaaaatcaagtgagagatgccaccaagtggtatagcaaccactttgctgaccactaccataaggaaatgctagtgttattcaattttgaagagcacttccacaaaggaatggcagtggtcggccactacgcaaggaaaggagtttcattagctaagttgtatttccaatatctatgtatcaaataaaagtgagaaaaatcacccaaggctttatgaagcccttatcggaccattgctacttttcggctctaactgttggcaatggcctcccattagggtttttgacgtcgaaatgaggttttcgggtcccgacccccaaaatattactcaccataaaagaaaattcaaaacggagggatttgagaacatgcatggcggagcactgccatttggccatgttagtgcttgcaactagttgcagacaacataaactgcctttaataaaatgcacaaaactcactcaatttttatccaaatgacctggttcaactttcattagaaatataatttcaagatagatctacttgtgtctcataattatagccaaattatgaagttatcggatccaaaattggctcacagagcagacagttacattttacttgggacttgagtaatgtggttaagtgaggggtgatggaggacactactacaacccatgtggcaatgaatgctagcattgacacttgaaaacacatgttatcagtaatcatcagtaatatcatgaatttcatgttgggttttatgccc

SEQ ID NO: 219531 - DNA, 4399 bp, Cannabis indica
ccagcgcccaggttgaccttgtactgggcctagcgctcaggttgacaatcaacctagtgtgcttgtttcgatcctcaaatgcaaaatttgattcgaccattgaatctgaaacggttaaaatggggtaggagacctcgtcctcaagttcaagaaccttagaagttcaaaacgacaacccgagagctcaaaaatgagtacccagcacccaggttgaaaaatggcctggtgtgctggattctacttatccgattctaattctgttttgaccatccgtctagcttttcacaataactaagatccatgaagtctgtgaagtcaaattcacaacttcgcatttctcattttcaacatgggaagctcacttaaaaatgaagagttttgagtctctcatttctgcaaaatagcaacatctccgagaactggtgaccagcttcgctaagccatggaaacaaactaagtgatgtcaaaatatcacttaggcatcttaaagtacatcccttggacgttttttgacttacccaacatccaggttgacgtcatatgtcaacctaggcactgggatgtcaacctgggtgctagatgtcaatctgggagttgggtcatgaactgccttttagttaaaggaccatatctcacttaatattagtctgattggcgcgattcaacttgggtttcaaaattatttcaatgctctatcaagacatgtctcacacttcaatcgcaactctgaagctatcaccccgaatttcaccccaaggaagttacgaaaataagctctgacttccccagagcgggtcccaccatcacgacacggactccgaaaattgaggatcaactctagaattcaattttcaccgtcaggtaatcatctacagtcaaaaatagccaacttgtatttttttttcttatttttgtgggtctccttcacttataaaagaagagctcatctagctcattttacacattcaaacaaactacccacaaggtcagagcttctctctctagaaattggagctttgatacaacctttttatgaaatgacatcttgtaagaaataaaaactcgaagtagacgtagctccactgtcgcgatacgggaagtgaactactataaattttttgtgtctctcttatatttacttaacaactatttcattctcgcaaatttagcaagttggcgtggcttagaagtcttagtccagatttatgagccaacacatacaaataaattaaaaagaagtgcattttttttttttgcttgagaaaaccttggaaaatttagcaaataaaatagtggtgatcacatggggattcacctcccaaaaattaagaaaaccatcacaaaagtttgatagaccccatttggcaagagtatgggtaactacattcaaatctctaggagcccaatacacattacattctgtttcatctaaactacacaataacttagtgaaagagaaaatgatggaccagttggggacattttaattttcaactgaaaggatcaacccgcaatcacaaagaacaatactcagggtacattggaactccctaatgaccttctaaccaagcaccattgactacaattcaccagacaacgcctctcaagcattgatcttatgatcataaattgcagtaatttggtcattagggtctttaagaaccactcccatccagtaacaggtctaagctaaagcgaactaggcccgcgcctaagacctacctagctcagggcccaaaaatattttcttaatatatatatatattagtagtttttaaagatattacatatattttaactaaaaggtctaataatttttattttcctaaggttaactcaattttagagtcgactttgctcccaccggagtcattgagttccttattatcacaacaacagtgctttgaaatagtcaaaagaggagaaatccacctctgtagaaccaatcccccactactatcacctaccttaagattatgagttttccaatgcccatggaactcagttttaatagctttaaagatcacttctagggtagcatttttatgataagttgaattctttaaaaatagtgtatttatagtgatataaatcttgcaaaagttgctataggttaaatttgcataaacacgttttttactaaataaggtatattttaatttgtatcacttatttacatcaataaaatgctctattgattgatgatttattctctccacgcataggccaatataattgatgactttgtacatctcagcacaatgcacgtctcgatttcacagttgtctcctcatcactcaatcaattagtgtgacatcttccaaagatattagaagttgttatggctgttatttggtcactccaactgtttcttggagttagttacattttgttatcctcttgccaagttgtataattgtagcacatgtcacattgtacatttgcctatataaatgcttctttttcagatcagctcaataataagaaatatttttttctcattctttctctgtttctctgtatctcaatcctaattctctcatatgatatcagaagataacctgcccaattcaatggcaaggccttccaccagatctcaggatggtattcttcctccccctcctgaaaataccacatcagagatcccaactgatgttacttccgctccaacagcagctcccatggcggcacctcgacgcatagccaccagaaccagatctcacaattctactaatgctcacgacgatcactctccaagaatcgaagatcactagatccctcaaaggcgatctcaccctcttctcgatcgccatgccaatgaagacgcctctagccctttcttcctcagctctggtgaccatctaggtcttgttctggtatccaccgtactcactggaataaattaccagtcgtggaaaaggggaatcaccatggctctggcagcgaagaacaaaatcgcattcattgatggctctctcccaaagcctgaatctggtaactcccttcttccttcttggcttcgttgtaacaatatggttatgtcgtggcttgtgaattccgtctctgctgaaatcgctcaaagtatcatgtactttgacctagctactgatatgtggcatgatttagctgaaagatttaatgagggtaatgctcctcgcatctttcaacttcaaacgcaactcactcggttgcaacaaggtgatcattccgtcacctcgtatttcaccaagttgaaatccttatgggatgagctgaaagaatttcagccaaatattacttgcacttgtggtgctatgaaggtttttcttaatttttacaatcaaaatcaagtccttcaatttcttactgggcttaacgaatcatatgcttcagtccgcgcccaaattctactcaatgaacctttaccaaatctctctcgagtctttgctatgattgttcaagaagaacgtcaacgaactcttagttcatctgaacatcctcccctggcctcctctgtccgtcccccatccaataacccaccaagaaacaaaagccccgaccctcttgttcacattgtggaaaacccggccatttagtcgacaaatgtttcttcatacatgggttcccaccaggttatggagacaaaaaacgcagtgataaaggcaaggctcaagtcaatcaagcctctacaagtaacccacctgatcacaacacggctccagtcaaggtcgcacctgctactgatctgagtttgcaatgtcagcaactcatttcattgctcagccagcagcttaatccggccactcctcgggctgaccctgccatgaacaatgcatcatctaaccaagctggtaaatctctttccaatccatcttttaattgggttcttgatagtggtgctactcaccatatgtgttctaatgtctcttgctttacatatttcaaagactccccttttcccaaatatgtcatttttcctaatggacaccaaattgctatatccaacatagggacagtaagaatcaatcaatatctcactcttgaaaatgttcttttcataccagattttcacctaaatctattatctgtcactgccctggttgatcaaacaaactactatctgttcattaacaccaagaattgtgttacaggatctttctcggagtgtggtgattgggacagctaaacgccacgacaagctttatctcatacatcaagacactcccatagcagctactagtttagcttttaataaaacaaatgtaaaccaatggcataatcgccttggtcatccttctttgtacatttcaaacatgttcaataaaaaaattggttcttccattgttcacaatactcattgtcatgtttgtcatattgcaaaacaaaagaaacttccttttgtatccaataacaattttgc

SEQ ID NO: 219532 - DNA, 5599 bp, Cannabis indica
atttacatcatataataatacagaatataaaaaactaacaaataaaattctttaatatactagtactactagctaaactagctactactactagcccttaaacttttcagttatacaactttcaactttaaattctatccattagtccctctcccagttttttttttttggtatttatttattatttttgttagtttgcctagtaattaagagtaaaaaaacttaagcacaaatccagtggtggatgattcatctctgtctgaaatgtgtagggaaagatgttgctgtttctttgcattgatgatcatgatcatatgatctcagcttattattgttctctgatgattctgagtcgtctgattccccaaatggatttattggaaaaagctgcagtgtttcaatcactctttccggctggtcatccgaaacacgatcatcatcatcatcataatcatcacgatgacgatggtggtgatgatggtgatgatatatttctgcataacctgcatttatatatacacagaatttaataaaaaagaaaagaaaaaaaaatacaatttaaaaggaaaaaagaaaaagaaagcatacgttttggagatgatgaaatcatttcctctcgaagaatgaggaaatcgttgtggtgatgatgatgatgatggtcaatagaaaccttacgacgcttctgtctttctctagctttatggttctgaaaccagtaaaagacgttcttactctcaatcttgccataaaagctgagctgagtagagatcttctgaatctgatcagtggtcggggttctgagtccagacctaaacagatcggtcaaaactttgacttgttcattagtagggttccaacgaccacatttagtaccagtaccagtactattagtattagtagtaatagaagtagtactactacgaacacttgatgcttttatgcaaaagcctgacagaccctcttccattttttttttgttctagctctaaatcctagctatttctgtgcctctctctctctctctgaagtttcctaattctgatcacctttcacaactcaaaacgatgtagacccgtgtgcatatttatatttataatactaccttaaaaagcactcaagaagaaattaatttattataaacttatatatttatatatagatataaatgttggaattatctatttatttgttaatttatagggaatgtgaagattgattatatgtggatttgttcatttcatctttattttgccttgtttttttgtgctgatctgagacaaagatatatttctatatacataaatatatatatatatatacatatatttttatggagagagaaagagagagatataacatgcgccaaagctgccaccgttcaacgttttggtctgcgagcagacaaagatgcatgtaagtttcaccaatgatagaataataaattaattatatataattgtcttgaaactcattgcttaataaactatatattacattatttgattaattaaaattattttccttgagttcatcttcaaggtatgtatatatatgaatatatagggagtgttgtgtttcgctgctttttagtaaagtgtgaaaattgttgccaatattaatcttagttgagtccaacacccaccacgacatgtgataaagccaaaataatatatatgtattcttctttttaatatacatatataagtaggccttgtctgctaaaaaaacttctatatagcataattaaactatgtgaagtgggttttcggcaaaaaagaaagtagagactgaagtgaagaaagtagtgaaataagtcaaagttacacatcgtctgatctgaggtggacggttatgatcataacagactgacagagatactcatttgggttgaccaaagctacactatatagctcagtcaaaatattaatgtgtagtaataaggttaaatcttaaaaccttcttttgagggtgtggggacataaacaaagagacaaaaatccactaagttggtattgggtagagacaactcatgacctgccaaaaggggagcacacattggattttcttatgtcatgtggctcctgtcctacccaactacatcccctaagtttgcctcaaataatcttaaatcctattttggttcatatataactatatattatacatggggaacctataaagacacttcttatttgattgtagggtggccttttctgtggagtgatctaaagtggtggtataaagattttggagtttagagcttgtccctctacaacgttatatttatgcatgcatgccttatagaaattgagtatctctatgaaattgttgaatttgaagctgaaatttgccaagattgtggcattattatttcaaattgtcttgtcttaattagctagtttatttgttaatttaattggattcaaattgatataatgatgaagttaatatagtgacattagtctctggaccactactgattctgaatatatttggtccaccttttcggcatagaataagtttaaattaacattaatatatatcgaaacgttaataacttttactttttctatttttatttttctcatatatataaataagtacaaagtatcaaaaaagtagaagaagcaagtacaagaacttcaaaagtttataacagaagcaaaaaaactacaaataaagtacacactatacatatatatccgatcgtaattgaataaaatgtgtgtattgcttgctttctgtaatggaaaacaattatttcaaacaacggaacatgtgtcaaagaagaagaaagcgatacatgtgattttctcatgtatatatctcaatacttatcacatataacggagttttttcaagcaaaagaatatttttgtatacctagttttctgatgaagaatttgatatatagaaactaaattatagtgtgagatgaaggaaatgaagtagtagtactagccaagttgtgtctagctaggtagctctattattttccacaattaccaagaatgttaaactcacgagcaaaaacatatttgtccttttctgtttggcacaaatggttttgagctgtgaaatgtgatctgaactcctaggagtttgatctaaactaattttttattactataaactacttttttttaccatctttaatgtataatataatatattatttgttagtttattaattacttgttattcagatctacgttgttattatctacactacgtaccaaatcccatatcacagtgttataccattccagatcgtcacctgtgttatcttgatcaataccattaatttaaattcagaaatagaccaataataaatagctaaacttgttttaggctagagtatatgttgcaaaaatgtaacttttattattttttaaagcaaagagttatatactatgttttaggttcttaaatattttttaaatatatatgttttgtttggacccttaatttcaaacaattgcgtacaaataagattttatctttttagctaaagaggaagagaacaaagagaacaaaaagttcaaattgttaaaaaaaaaaaatcaaaacaaatggttcgatctgtttgtaagaactgagtgtccaaataatacttaaaagaactcgtgagaaaatataagtttacgatagaaaggatgaaagtgaagaggtgagtttgataaaagtgcccatgtggttgtttggcctagtcacttttttttttctagtcttgataagtggacttgtcactttgttgattgtccacctacatatctcacaccccaccacaccaccaattctttgatatctttaatccaggataagacagtattgaaatccgacacaaacaagagatgaaaatgttattcagtgagattcgagaagtgttcaaacgctagatttatggcacgcgtgaaatccaggccgcaccatcttctcttcttctgttttttttttttttttgcttataatatatttagtgtttactttccttgtcttcagccacgtttgtcagtgctttatgcaaataaaaggatcagtggaaggttcacttccactaataccattgagacaaaaatggggtgcaaattgcccactaaaaccgtttcttccggagtagacaagacatttctatacatatatatatatatatacaccttttcttcccttaattaatcaataatcatatatgctacggcagttgatgagtgctacaattatgtccatttttgcaatgtggggcctctctcaaatgacatccaactcttgccctagtttcatatagttcattaataaatgttcactttttccatgagttagtttttgattgtttgttcttatattgtacttctagcaataaaaaatgattagcataacgaaaaagaatatttagaaaattagacatatatatttgaaaagttgcagcttatataatatataaaataataaaaaaaaacaaaaaaagctccaaaaaacacaaaaaaaaagataagtacacatagttcttctatttagtgtctttactatttaagaaatctacaatgcatatggccagcaacaaaatctgcacattgagacagatattttgttagaaattgaagaagttaagaccagtttaaaatttggaaataaaagtctcaaaaaattttggtaacagcatcataattgtgacactaaattcttccatgcggtaactattattgtcaaaaatagtagagcagtgcatacctattattttcacattctcctacattctagaattatctagaattctgtaatttccaatctttagggagccaatcatattgtaagagaatattttctgttacagacatttttattccctttttactatatatatgtaccataatatacgctattatataaattaattaaggaaatcaatacaatcttcagtctttccatatatgcctctatttcctgttttctctgctttttatcttggtatcagagcaaaaatggcatcccaagtagattcttcagtcagcggtgcacgacctacagctgtcgatgtttagcctccaactctggctccactcgcaccagctctggccatcccaacacctctacttcaacctctagcgcccattatgattcgcctagacagagacaactatgcttactggcgttcttaggtcatccttgtcgttcgtgtgcatgaccttgatggtttcctctttggaacacagttgtgtcctcctcagttcatagatggtccaaccgaaaatagcccagatgctccatactgtctggattcgtactgatcaggatattttaagttaattgttaaactcaatctcagaggccatgttaggccatgttcttcgatgtcgtgtgtttgtagaactgtggctgcttcttgagaacctcttcaccacactgtctcgagctcgcatcttgcagcttcaatttcaactccattctctgaagaaaggatcaatgtcgatccatgactatgctctaaaaatgaaatccattgctgacggactcaccattgttggacaacccttcaatgatgacgatctcatcctctatatactcggcggactaggtccagagtatgactcggttgttgtta

SEQ ID NO: 219533 - DNA, 3048 bp, Cannabis indica
tataaaaatattacataaaatataattcaatataatactatacaatacagtgtaatacagcgtaccaaataaaccctaaaagtaatgatatatgcattaaaatatcatacacaataataacttaagtttagacaaatataaaatgtgattaatttaaaaataatcacaattataatcttttagcattgttattaagtattttaagatactcaatactgtactaatacgacatgttgtatgtaattatttaaattttttatattatttattaaattaaaatatgtaaaaataatattaaattacactaataatataaccaaaattcttagcatttctcataatttgtgggtgcccagaatatcatagctactcatataatttatacatatctttttacatattcaaatgagcatttccaggtattatatacagtaggcattttcctagtcaatcatatgtgattatattgttattttgtcaacagagcaggtgaatctgtctgctcccactgggcacctttttaaaagctttgactataaatttacaaaattaacacatcaagaaatggaactagtaaaacattataaactaataataataataacaaaattattgatcattggtaatataaactttggtacttatcatatccacacgttaccaacttaaaaattcaaacattcataacacttagtagtacataaatcttctattattgctctattaatttgtcgaaaagactttttctcactcaaatgatagtaacaatagacttggttttatttaccaagcacttcatttctgttatttatttgatactttaatttcaagttaattttttcttgttattaattaaaaaaaaaaattggtaattaagacatcgttttggactagtaaaccttaagcatggaaatttctaccaactccaacctgccttacaatttgtaacgttatgccatattagtgtaaaagttatacttagctatctaacaactcctattctctgttctattctgtttttatttttattttaatatatctccatagacttcttctacaaactcattcctataaataccctttgagcttttctttcaatatcatcaaaccaagtcttcacatcttcttcttcttcttctctcaatcaagtgtttgtgtccttagaaaaaaaaacattacattatggctaagttttctttgagtcttttgttagctctttctctccttgctttttctccactttgcttgtgtcacaagtatcaaggcggttatttgttccctcaattttacgaccactcgtgccctagagctcaggagattgttaagtcggttgtagccaaggccgtagctagagaggctcgcatggcggcttccttgcttaggcttcactttcacgattgtttcgttaaggtaattataaatggtcgtgtttggctgaacttctgcttgtgattttagcttttctttttgagaaaactactaactatgtattgtgtaatgtgattaatcaaacattttcatgtatttttttttcagggctgtgatgcatcattgttgctagacagcagtggaagcatagtgacagagaaaagatcaaacccgaataggaattcggctagaggattcgaagtactcgatgagattaagtctgcacttgagaaagagtgtcccaacactgtatcttgtgctgatattttggctttggctgctagagattctactgttattgtaagtagtttactttaatttgtttggcataacaaatatttgactagctttagtgtgtgacataattttggtatgaattttaattctttttttttttcttttctttacagagtggtggacccaattgggaagtacctcttggaagaagagatgctagaggagcaagtttgagtggctcaaacaatgatattccagcaccaaacaacactttccaaaccattctcaccaagtttaaacgtcaaggccttgacttggttgatcttgttgcactttctggtacatatatacactttctttcttcactactttttataacacttttctcaaggcctttacagtcttttcaacatttttactacattatactatgttgctgcaacatgaaataacgttaatttctgttaacactgttaacaggaagtcataccattggagatgctcgttgcacgagtttcaggcaaagactttacaaccaaacgggaatggtaaaccagacttcacccttcacccaacctatgctgcacagcttagaaaccgatgcccgagatccggctcagaccaaaacttgttcttcttggactttgttagcccaacaagatttgacaacacttacttcaagaacttgttggcctcaaagggtcttttgagctctgatcaagtccttgtgacaagtagtgaagcatctaaaaaattggtcattcaatatgctgagaacaatgaactcttctttgaacactttgctaagtcaatgattaagatgggaaatatttctccattgactggttcaaggggtgaaatcagaaagaactgcagaaggattaacaattactagatcaacacaattagaatcacatgaaattgaattattatgtttttttcttttattttaagttgtctttgtgttatcttttattttgattgcttctttctttttcttttgtgtgtatttctttgaagtttcagagtgtttatttggtaacaatttgaataagtgaataaatgaaattgaatttttaaaagtgaataaatttatagttttttttattattattatttacactaatctttttctctcttactttgacttttttttttcttagataaaatgttattatattaaattaaaataataatacaatagtcattagagtagatgtaattcctctatccaaatatattctttatccaccgatagagcatactatactaaaatatgagcaaaagtattagcaaatcgaaacacatgagagatctgaactccaggaaaattagacatgagaatataaatatcatgaagaatactatgaaaatcagaaacac

SEQ ID NO: 219534 - DNA, 6421 bp, Cannabis indica
gaggattaataataggaaatttacttggtaaattctagaactgcttattgtaagcttgattatataggcccatggtccgcgaactagttgagaaaatattggcttgtagactcagttaattggtttgattaactaattataattctaaattagactatgtcttatttatgaattttcactaagggcttaattgagaagaaagaaggttttagggtttatttgcaaattaagagactttgtaaggtctaattaataaataagttaaatggtaattttatttgataattaattataattattaaataaatgaattaatttaaaggtttaaaattaaaatatttcatttgtgaaagaaaacataagttgttaaattaaatggtaaaattgaaactagtagggcttgctacatggccgaccactcaagggatttttagccattattttattttttctaattttaattccatataatttaaaccctgaacctagaaggaatcctataaatagataatgataggctcatattttcataagctcctcagactattgtgtcatacaactgaaaataaagagcctctcatatttttgaactctctctctcttctctctctaaattttgagctccatacaatgaagagtaccttgcccactcatatcaagttcgtctgaatcatagtgtggatgattgtgaataattccatcaccgtaagaagatccagtcccagatcttggcaatactctgtgataaaaaggaacaagagttagagatgtgaacgaaaggagccataatattccagtgccacgaatttaaggttttctagaactttatatgtgtttatttcattattttaggaaattcatgtttaggatgttagattatagaatataatcaaacatacattttagtaaatcgcggtgaataacttccaatagatagagcttgaaaaacttcatccaaagaatgttagaggcgatagctaagagaaaggtgattgatgacttgaaacatgtgaccctgcaatctggacttacggttgcctccttgttgtggggagagatgcaaagaagaagggttgagacactgtctgagttcatggcaagggcccaaggttttatcaacttagaagtgacggagtccctccgacagcaacctttactacttctgcttccaaaattacctcacatgttcttgtgcccgggacgaagtacactctgacagtctatagaccatctgcatctatgtaagcacccacgcaaacccattttttgggtatggagcggcacaaatcggatggagtgtcgctcctagattgtcaaaagcagatgttttggaacagaacatgagtaattcctagaacaagagaggggaaaaggttaaaactgaagtgagactttgaagaaagtaagaaaagagtatgaaccaaagtacacagagtacccagtctggtggatactcgggagaacgtgtacaaggcaacctgtaatatagtccactacagcccctaaggatgcctcaagggggaaagttcaaaagagattcaagtaaaaggtgtgagtatcacagagaagtaggacactccaccaatgaatgtggctacttaaaagatgatgtaacatcctactcagaggaatgccacgtgatgtgattacaaactactaatcctactaatcgagatccataaaccaagtgatttaaaacaaatattaaattggtaaataaataacttgcaataaacatcaacattttactataaatcaaaataatttaaagttacatattcgggatcctgttaaatttatttttaaaaatattacaagttatttcgtacaggccgacctaagtggcaaaaaatggaatttctaaacaattcctattggacgcaacccttgtggtctagcttggccggaacatgtacaattcatcttcaaaaccctcaaactcatggttaaactgacaccactttactattttctgcacattagagcacccgtgagccaaggcccaacaagatagacataataatacaacatgaataattataataattacacttcatatagtaagtcactgcgtatatatcgtgccatcgcactttatattatattattccatatataataatgtcactacagctaatgtttatatagtatagagccacgtgttacgttcacacgtctatatagcatagactcatgtgttacactcacacgtccattaatgtgtatatagcatagacccacgtgttacgcccacacgtctattaatgtctatatagcatacacccacgtgttaccttcacatgtcttttaatgtctatatagcacagacccacgtgttacgctcacacatctatattttacatttaaggccttactagggtttgtctcgattataattatcgagtctaacctggttatgccttacccgcataactctactcatatatacataacccatacattatgctctgatagtggttcatcctgatgatatttatcagggctaacccagttatgtcttatacacatagctcttgatatataaatatgcatacaatatatttagtatatactcatccatatgaatttttaaagtaataaccctaacttggttagctctaatcattcactcacataatacactataacatgctcaagataatacatatttagggtggtaaccctaattcaccatatataattacttagggtattaaccctaatatatgacaatgtgattaactagatgaaagcatgaattagggtcattaccctaagttaatatgtgttggaaattagggtcattaccttaagtatttatatattattacatattcatgccaattcatacttagggtgataaccctagctttcagtttccctataacaattatacaatgtataattgtgccaccgtgctatactctatgtgcataattcactgtcttacctgatttccaaattatgaggagaaatcccaatccacaggtgatcctgaccaagttctggtattcctcaagtatttctcttagcttgctccaataattaggaccaacaaaaattccaatcactagatttctcacccaaaatcccaaaatcaccaaagaaaagccaaagaggttaaagagagagggaggggtcaatggggcttccttccaggctagaaagaaaatatttttcatttctattaccgccaaaagaattgacttaattcattttggtaaaaagtggtcaaatgacctttctgcccctagggctataatcccacatataacacaatgaagggcaactcagtaatttgtatccacctatatatttacatattccatatatatgttataacataatcagaccatgaaatagttttggacctcgaacctagttcgagccaaaatacccgattgtgattatactgtgccaacctgtcagatttcacctgcaataagacaatatagatatactatttaataatatagtccattagcacaataaatatcaaaattacaattttacccttcttgggtcaaaattacaaaaatcccctaactcataaatgggatcttaaatacaataattctcaaataatttcatatacttaattatataatgatataattactaaattataactaatcctcttaattaggattgctaatccatttactaatctcgggatattacagatgagatcaaaatactagcaagagccggacacttgggacaatgggttcggattcccattatctatcccagacagggagtcgctcatggacagttgattgttccgagacagtagggtaccataaatcttctattaggattaggtcatcctcaagctcctggatcataacttccagcactccttgctccactagcactggctgtagtagccacattggctttgggaccgggaaacccatatcctccaactctagctctgccacctatggaaagacatgtagccacaatctttgcaagaccacacatagcaataagtaccaggaactcctaaaagagatacttgaaggagttagatggggaacgggaaatgtgtgcaatgttgtaattttatgccctaaataaaacccattttaatataattagatttactaattaataaaagaccagagaatattttatattgcatggttcacatgattaattttatgattacatgtttaatatataaattctattaaatttcgaacatataattattcgttattataattttttccgcacagtagaatataatcatgattagatgcttcaaactatttagtctcacgttttatcactgcactggatttatactgacatgataatcaacgataaagtttacttacacttgtataagtagaatgtccttttccagggaattagcaaagtatactagtatcagatgtattagctacatatcagactagaccgatattgacagtggaaaagatatcataaacttaccgttatatcttttctaagtcaatcttacttacttgatcttagatcaatagatcataatcttgagatggttaggttctggcttaaatgtattacatatgttctttgacttgttcattaaagctgaccaaatggatcgagccaatacttacatctcagaaacatggtattgtaattgagtgggagcgctaatcacagatttggaatctatagcttctataactatttagaagtgaaatgatgatttccttagagcttggcttaacagacataactagaagagctcttattttagtaattatattagtttactgaaatatcatttataagaagctaagtgttttaaagataaaatacattgaagggtaaaacagtatattttccctactcaatgtaaatcatctacagaggatttttaattatttagattgaaacaatggatgattttagcatatctattcttggtgaatagagcgttctatgtaattaggactttaattctgaatctatagtggagtcaagaagaattgataagatagagaatttacttgataaattctaaaactacttattgggagcctggttacataggcccatggtccccacattaactgggataatattgttttgtagtctcaattaattgatttatttaatcaattcggattctaaaaaaagagtaagtcttatttgtgaattttaccaaggaatggcataactgagaagaaaagagaattcaaggtttatttattaattaagagaccagggaaggtctaattgttgggattttatgccctaaataaaatccatttcaatataatcaaatttactaattaataaaatattagaaataattttatgttgcatagttcacataatttatttcatgattatatgtttaatgtataaattctattaaatccagaacatttagttattcatgattatagtgctgtcaacacagtggaatataatcatgattatatgtttcaaagtttaagtcccatgatttttcaatactctggatgtactctgacatgataatcagcaataaagtttacttacaccttgcataagtgttatgtccttttcagggttgtggcaaagtttgctaggatcagatgtatggagtatacattggactagaccgagattgacgttagataagatatcataaacttatcattatatctttctaagtcaatatcacttagttgttcttaggtcaatcgatcttaatttttgagatggttaggttctggcttaaatgtactatttatgttctttaacttgttcgttaaagatgacaaattggatctttccaatacttatatgttaggaacatgatagtacaattgactgggagtgttaatcatagatatggcatctatagcttctataacttttagaaatgaaacaaagatttctttcgagtttggcttaatgtagtaaatgattgaggcctcatttcagtaatgatattagtttaatgaaatatcatttacaactagctaagtgttataaggataaaatacattgaagggtagaacagtaaatttgtccttactcgatgtagatcatcaatagaggatcattaattatttggattataacaatggataataaatagtgtatctatatcttggaatatttacagcgttctataattaagagtgtaattctgcatctatagtggcaggcccggccctggccataggcgggctaggcctgtgcctagggcccacccagcccaggggcccaatttattttttcctcttttaaaattatacaatttttttactgattttgaaaaataccacattttttctaacataagggcccaaaaattttttttcctgtggcccactttgtttcagggccggccctgtatagtggagtcaagaggaattaataagttagagaatttacttggtaaattctagaactgcttattggaagc

SEQ ID NO: 219535 - DNA, 2929 bp, Cannabis indica
gaaaaattactagagacatcatcgtagctaaataagggtttttgagttcctaagctagatgacccctaaacacagacctaacccgcttatatctaaagttatttgtaatttctaattgaaaaaaataaaaaaaaagtttggaccctgttaaattgatttttatcatacacaaattttgtaaagataaaatttaattttaacaaaacaagacaataatttggacattactttctcgtagacaatgcaaagagcttcataactctaactctcattttagttttaattcataactctgtttagagatttacagaaaaaatgtatgtcacaaacacctgaattgcttcaaattaatatacctactaaataaatacgtataagatattgatacttttctttaactttcaaatttccaaagcttcaacatgtataaaaagtgagagcaaatcctaaggagttggattgatttttacatgggaatcagagtgttttcatgccctttgagcttcttcatacattttcttcagactcttttgccttaacaagtggttctttctccttggtgattttggaagggatcagtactggtctctgatcaggatagagcaggaaatgttgacacatgaatagaatatcaaagaatacagatatctgcaaaaggagatcatccatttccgatcgaaaaaatttcgtgtcagctaaaatggttagagcacagaacaaatatgaaaaactgaagggactcataataatggagaactaaaaagaagcaaaaataacttgtatgctctgtgctttcttatgcttatatgaaacttattcaagtatttcaaatttagaaataaatattattttggactctgtgtttaagaaaaattatctataggagtttctgctttattaaataacaattcagactctttatttttcaaaatggatcataaactggagatgttatgaccagattagctatattctctacacttatttgtgctagaaattggttgcgacatgcaggttggttaagctcagtgtattattatgtaccattttgaaaaatacagagtttgaattttcatctaataaaatagaggatctaatcgataatttttttgcaaaatatagagtccaaaataacatttatcctgtatcaaaagtaaaagcaggaaacaaatattctactacataataactaacagaagtatgaggagtaattatagagactactaattcaagaaatggatagagttagttccataccaaagatagtagtgtcttccctatatttccataaaagttcacccaagaatctgaaaaggacaataataatttaaaatgcattattatcacttaactgaaagtatatatacatattaagagaggagtattattttgataaaaggaaagatgacaaactttggtctatggattgtatagccatctgagcatagtttgcaacacctcctgaaaaatctagtaaaatattgccaatactaaatccatctgtgctcttcctgttgaagttcatgaatgcctacaatacatttcatagagtaattttgtcatacatggaagcaaaattggtgttctccataaaagattcatcgaatttcagaaaagcattcgagaaaatgtctttgagttgagaagattaagcaagtggttttacagtcacaagtatagactaaacagaaaattaatgctttttccctttatcatgactgatacaagattgagctgatatacaaaagtaaataagctgtttctcaaaatgattgggagaactataaccggaaaaatgagtcctgtttcatgaagtttgtcccaagtaatattttcatttcatgttttctatatgaaaagataaatgcaattatgcaaggatgtctataattaatggcataaagcctatgaatgggactataaaaaattcagaagcaccaaatctcttatgacaagaataaaacaatcaaaaagagtcatattaggaatatatctaacctgaggaatatatttgatgactgtcataaagacttgaattgagctgaaaatagaatgaatcagttccaagtcagaaagcaaatcgtggttaaggcgattaagacaatagaactgaagcaaacaaatgcttttataatctagctttctgaaaatgttagatactcaaaattcagaacaaaagaaaaggaaagatgactaaagaatgaatcttacttaaaaatgttaatcaaccaaagccaggaatggtttggcaaagcaatgaaaaaacaaactccagcagctaaccaaacaatagagacaatcccaagactaatcttagagacagtctgacctccacgctgcataaagccaaaggcataatcaccaacaacaataaaaaaggtgaaattcaaaattagcaatacaatacaactataacaacaataattagactcctcaatctaatcttacttacttcatagattgcaatttgtactaaggtaattgctgtcaacaaaacagcatgtgatgaaaaagcaacatcatttgcagcaactggtatcatctgctaacatataaccacacattatttactcatatacaatacaaacacataccaaaaaaaacaacccttttcatacaagaacaactatatcttaacacaatcttctcacaagctcaaaaaaggtaataaatgaagaattttgttgaatacacaaacctccttgaagccatacttctgaaaatactgattttgaacagctgagctaaagtaaagggtggcgttgtaaatgagataggaggagtgctttgtcaagtttagtacaacaaaatcaaagttcaaccccacaacgctatgaaagaagaaaaaaacataaaacccataaattaaatcaaaataattcatgaaaattgtgattagtgggaataatgagttcgttaattatagttt

SEQ ID NO: 219536 - DNA, 3353 bp, Cannabis indica
ggtacccacttttgagaaacagctcgcaacaaggtccaaaaacatatacatactgattgttgacatcttgatctggatgctctttgatccaatatctttttactggtcatttttcatagctgatattggcatttggctttttttttttttttggttagggctatcctgatttgtttttatttagttatcctcattttgggtttctgttttgctagtcccataataattttcttggtacatttgctggtttctttttctcattgtctctaaacaaattctgctgcagagtgttttaccagggattcttcaaggagataaatcagattcacttttgtatggttctgttgacaatggcaagaaaatatgctggaatgaagattttcattcaaaggtaattacaaattttggcttgtttttgcatgatgataattacatatttgggccttgaaaaggaagtgttctctattcttaatttttatatgggtcaactgaatcacatatgagtggtttgtgggacaaatttcatcattattaatgcttatttgtttccattatcaggtggtagaggctgccaaacgacttcatttgaaggagcatgctgttcttgatggatctgaagccatgtttaaattagctgcacccgtggaatgcaagggtatcattggtagtgatgacaggtggaattggctactaatcaacttaaagatctttatctaattttttatttagaaacccatgggtatccggcaccaccgcccggtcccaggagacaacaaagtcttaatgtggtggctgggagttgaaccttagagctctgcctaagtcggaccctactcaaggaacccatgccactacaccaaagccctgggggccctttgtatctatccaatataacttttcaccgaccagtagctcttatgtttctcgcctcttgtggattactcaagtagctaattgatattgacatttatgcagttggaatgtattaaataaactcaacttactgtcttttttctgaattaggcattatcttcttgacttgatgagagtaacacctcgtgatgctaactacacgggacgtgggtccagattttgtattttgagaccagaactcattacggctttttgtcaggtatggtattttatttgtctatttgatcattagcacagttgctgcttaatctaagagtctcaatactaagagatccaaggtttgaactttggtctcttctcgattcccaaacctcctcttgattatttgtctatccttttgagttggctaaatgttttcacttttgattaaatcttttgcacaatggaaaagacccaaggtgtagagaaatcaaaaagtaagtcggatgatgaagtaactggtcaggtagcaagtaatgatccaagtgtggctggggacattcaggtgagcttcgatctaaatcagctacagcttttcgtggtttattagtgtgtgctcttgtatccttattcactgtcctattcactcatagggagttgaaccctggaccacacactatcctaaccaccaaggctttcctcatttttgtacctagatagtaaacagtatcttttacattggccatttgttgggctgtcttgggttgaaagaaatgaaagaattgttatgacctaacatcttcagatgatgaaatttgggaaagagtaaaattttgggtggccttttttttttgaaaaaaaatgttaacaagttaaagaattttgcttttcagagtaattagggatttgtgagttgactaaaatggttttctattttgacactaagatatgtttatttttcattattttgggaatttctttgtagcttatataatctcttgatattgtcaaaaatttgattgtttcttttaaaaaggacattgttgctggaagatatgattttgacagatatgtgtactgttttaacacattttactctcaaattagctttctatttgtgatttttgtggaaattttttgtctgatagggtgcaacaaaagaagagaagactcaggctgttccagcacttcatgattgtacctctggatcacaagaagaaattctctttaaccctaacgtgtttactgaatttaagctggctggaactgaagaggttttttctggaccatgtaacaatatttttttgtcctaacgagtatgagatttaatggttttctttctctgctatattgccaggagatagcagcagatgaagaaaatgtgagaaaagttagtttgtaccttacagatgttgtacttccaaaatttatacaagatctatgcacccttgaagtttcacctatggatggtcagacattgactgaagctcttcatgcacatggaataaatgttcgctatattgggaaagtatgcatttattgatttgatagatatactattgtgcatatcttctgaatgaaatatcttactaccattattcaactgggttctttggagtggcttatggtatggcttgattcatttcacaggtggctgatggaaccaggcatttacctcacttgtggtatctttgctctaatgaaattgtggttaggtctgccaaacatatcctcaaggtgatgctcagtatcttatttgttttttggttttgtgtatacataaatcttgtgcacaccttgtaatttcagaatgtttcaatctaattcaaattatttgtatgatgccccacatgttgttagctacaaaaaatatttgattttttctgtttgcttgacgtttgacgtttgacgtttgacgtttgacgtttgacttttaattttcttttatcaggatgttttaagagaaactgaggatcatgatcttgggccagcagtaactcatttcttcaattgtctatttggaagttgtcaagcaattgggacgaaaagcactgctagtaatacgcagtctaggacaccaaaaaaggtacgttcaaaatagattagtagttttggcaagagtaatgatatgtgcatccaaaatatgcaccaaaacattactgatttttaaaacagtgggccatctaaaataaatgtgattgggtttgagaataaagtaccacttcattgtgtgtaatgtctttgtgcatattttgggtgcacatgccattactctcgtggcaattggagatttgttttcttgtgttttaactttatgctgtagttgaattgagaagtccaaattgaccttaaatgatgaatttttctgaagtttgtcattcggaaatgatttttcatttttatgttttagagatttcagatttagttcttgactccttcaagagcttatttaatgatacactcaaacaaaaaaatgtatactttttgttctactgggaaac

SEQ ID NO: 219537 - DNA, 2085 bp, Cannabis indica
aaaagcagaacaagtttactaaccatttgtaaaatccacaagaaagagagagtagagctggaatgcagatcaaaggaagcaaagcagcaagaaaatcaacatttgttggaacatcatcatatctagagttcacaacctccaaataagatacacccgaaaatgccaaaagtacagctacaacaaaaccagaagttaataacattatgtattaagggaaatgaatcgatatgacgtcaaattatatatttacctgtgaatattccaatacacacagcagaagacaaggaaaatctgtatgttgcaaaccacgaaacaattggcagtacaccggtaaccaccaaagcaattgcagaagccataccccagccaatgtaaatagatgatgcatacggagaactaaagcctttctgctcaccgctcaataacttatatgacaaatcatctaaaggctttgcagagacaattccaccgagggctaacacagatccggtgaacaacaacatacagacgaaaagaacgaaaccctgacagataacattacaagaaaagttgattggctttgcatatgttacacatgcttaaagttgattggatgtggggaatatgaaatgctcacctcttttgttcctagtgactgaggatttccttcaggattggcacttcgtaatcggggaaaccaaaaatggtagccattacggacccatagaggaaaagcaacagaaaggcatgccaccatgagaggaacggtcagagataatccaagaagaactgatgatttgctgtcaaacaatcacaaagatgcttgttcaataccaagtaagtaatctaccaaactatatttaaacaaaatacaacaattacaaaatatctgaagcgtcatcccaagcaatttggtatttagaaacttgaaggagcaaattttgaatttcgaataaaaatgagcaatcacaaatgaacattctattttgttgtttaaataaaataatagtctgcataatttaccaatttaattgagctcgagaaattaagccccaaaaacaaaatacaggtgatcttgatatcgagtacaatttaatgataagcgataggtagatacctcaaaaacgaaagcagcaatccaacaccggtgctaaccagccaagcaagaaagccatactgcagaaacatagaattttcgaaaaacataaacaaacagcacagttaactatttgataatgaaagtcaatatttttctagacagaataaacaatgagaagactcaattgccccaggtgttgtacagaattctccaaatgacaataaagtcaataaagtcaatatttgtgttggcttatgtttgttgcaattgaatgcccaaaatggattttcattttcaaatcgtaagcctagatgagaaacataccttgcgggatttcgagttcatagccatttcttctgcttgaagtgaccgcagaaaagccattatcgaacaaacaacaagaggcagcagcagcacagcaatcccaaattcaaactacacacaacaaaacaaaaatccactaaagccattgccaccacataaccagccattaacgaaaaatagacattacttacctgttggtgggcacttattatttcgatgatctttggccgcgaaattcccacaaatactgtttctaggacaaacacgaaactaaacagtacccatgctcgctctggagttcctgctacatggtgcagaacaagcctggataactgaagccatttttcaagcccgtgaagcctcagctcttctgacagagaaatctgattcggtaatgcattctcaacactattggagtcaacgattgtgatgtcagtgttgtcacgatgatctctatcagcgtccaaactacttctttgaagtaaagcaagaatagttggatccaagctcttctcctttaacatcataacaaagttaggatccaaacctttatcctctaataagttagccagttcatgatgaccttgtctagctctttgcttcaacatcgatgtgatcctagggtcattcaacctttcttgcaatgccatagctaaatttaaatccaaagtctgttggtttgc

SEQ ID NO: 219538 - DNA, 1770 bp, Cannabis indica
tttgtttttttcttttttctttgaaacatgatgataattaataatgtagtagaatatatatattgttggaaggcttttgtaagaacattattattattatttatataatacaagaattgtttttcatcaaattagctttttttttttttaatattaaggaattgtagaaatttagtgtatagtaagttattaatatggtcaaaatgagtttcttattaaaaacatatatagtctatgcttaatggaggggcattaccataattttttaatgtgcacaacaaaggggacatatttaaattatttcctcacattaattagcataaaaatatataaatttcccactaacttttagtatttattaaatgttggagggaagtttttaactttagtctcatgtgttatttttaattatctacaatttaaagtcaatttgcatccaaataatatgtaaaattctacttagtttaatacactattttgttgttaattacttgtaaattaattaactctaacaatttgagttaatttaacttcttctctcacaataaataataataataataataataataataataataataataataataataataatttgagctatacatggttcttatttgcattttttctcctttttatataaattttaagttcaatgttgaaaatgaggatgttgctaaaatcttctacatttgtaagagtttgtgattatccatcgctaattattagtttggttattcaattcttttttgtgattattaaatatcatcttttattaattcgagcattgttattaagtatagtggtgctcaacataaatgtgacttttcgaatggttaaaaatattccataatatttatcacattaaaaaatatgagactcaatagttaaatgcactaacaaccttatatatataatagtgctatggaccactggtagaggtggcaattcatgttcacatgtggaagtaattaactatgctaaaattttctcacttgtgataaagtacaagacgataagattgatgttgtctttcgcaactcaaatggagttcaaagttgaacaacatgatgttaaaactatctttctaaatgaattcttagatgaagagatctacattaagcaacctcctaagtttcaagtggtaggaaaatgagttgaactagttttcaagctcaacaggtccttatatggtttgaaactgtccccaagataatggaatggagagtttgatacttatataaaacaaatcgggttcaaacaatctgcatatgatcaatgtttatactataagaatctggagcaatttaattacaattgtatttttattactctatgtggacgatatgctcatcatgagcaaagataaatctgtgatcaaaagcatcaaagccaagctcgagagagaattttaagatggagcttgaaccagttcaaaagatacttggtattgaagtttcaaggaacaaaaagaagatacaatgatcttaattaaagcagtctgggtacattaagaaagttattcaaaaattaaacatggaagattatgcaaagagtacatttgtatctgtaacgccccaatattttgccttattttacaaaatactaattttgatgcattaattaaaaagattcaaagctgtttggaaatacacagtgggttttacaataaatatgcaaaaaggtgaatgatcattcatattaaaaacaaaataagtagttgagtgcaaaaaaaataaaatttgtaacaccccactgagctga

SEQ ID NO: 219539 - DNA, 3530 bp, Cannabis indica
actgggtgcctaatagcaatgctcaaaaagaaggtggtggagtaaggtggaggtcatatgactggttcgagttactagagtattcgatatcaagtgcccggacggttccctctctcttattcactccatttagtgtcgttacttcttctctttaatcgcatgtctaacttgctcaccagagttattccatgaataactctttaatcacatgtcgttacattccttccaactaattaattagtgtacttgatattcataaaccaacaataaaatatactaatagtcttgtcttttgacatgattttctagttttttctctctcgtttttcgtctttcttgctggtctattttggtctttgttttcagagtcttggttgttgttctggagagattatggaagagggtataggcgtgaaaattttgcttgcagagtaggaggcaactattttatcttacgatgctactgctacggttgatactgattatgatgacagatggtgtatcattggaaggtttttgactgagaggcaaattgattttgaggtcatgcaacacttgatggagtcattgtggcagccggagaagggaatgtttgttaaagagttggatacgaatcgatatctcttctaattctatcatgagattgacattcaaagtatgatgagccatagcccttggacttttaacaggtttttgttaatcttttaagaggttgcaacagggagaggatccaagattggttaccttgaatggagttgatatgtgggtacaattacattatcttaggtcgaggtttaaaatggctacggttgtcaaggatgtagcaaactacattgggaaatttgctgaatcagatgaaaggaattttatgggctaatggagggattatcttcgtgttcgtgtcactttgaatgttacgaagccattaagagacgtatgaagctccgtaacactgacggaattgagttttaggttaacttcgagtatgaacatcttctcactttctgattatttgtggcattatggggcattctgaaagtttttgcccacggtgtttcgaggttggcgagcgtccgttaattaagccgtatggagaatggatgagagtaaggcctttacgtaaaaatcatataattggagcaaaatggcttaagcaattcaggactgccatggatgataagtcagcagcaaccacaacctctcgatcgaggatgccgacgaatgaaggaggactggagtcgattgttgatgcagcaaccacaacttctcgatcgttcagaggctcgatggcgacttctcatagtcgactagagttggggccgagaatggtggagtcggggttgaggacggtagagtcaggtctgaggatggtggagtcggggatggtgatggtggagtcgggtccgaggagggtggagtcggggacgatgttggtggagtcggggacgctggaggtggagttgggtccgacgatgatggagtcaagcgatgaggatggaggcacgcttcggtcagcgtggtgcagtgataaagacacgtgatcagattgttgatgaaatccctacaattgtggagggctttagctactaaaaatcagagaatgttaaataatatcaataaggaaatatctgatgaggacacttgtctgctggtccttgattcaaaaaggaaaaggaaagatttagaagaacttgatggggtccacgtgagggatgacgtggcagcgagtaaggaggtccatgggtcaaaaaatttgagcttggtgggtactagtatccaggcccacaatcatcatgatattttatcttggaatcgccatgggcttgggaatccataaactttacaattccttaaggatcttgtgatccaaaagaagcacagtattgtgtttctctataagactctttccgcccgttctcagatggagagagtgcgtgtgacgttgggatttgatggcatgatagtggttgatgtcaagggtaggagtggaggtattgctttgttatggaaagttgaggatgaagtgtttttgcttgggttttctgatgcatatatagatgtgagagttacttcggaaggtgtgcaggaatggcattttactggttcgtatggggaatcgaataggagtaggcatgtttctacttggaatctgtacgtactcttgctagtaattctaatttaccatggtgcgcgatgggtgatcttaacaatatcttatctcatgatgataaacggggcggtaataggtaccctgactttttgatccaaggttttcagcaatccttgattgatagtgggcatcaagatatggaattatgtaggtaaccgtttacttgggagcgtgggcgaggaactagtcattggattgaagtgcttttggatagagggcttcctaatctcgcttggttgaatatgttcactacggcaaagttacataatcttcaaatctcaacttcagaccatgctccgattcttatggttatgaccccagctgcgggttgccgttatgttaagcgatttcgatttgaaaacgtgtggctaagggagcctctttgctatcagattgtaaaggatagctggaagatttgtgagccaaatgatgttatgaatagctggccgattggggtaaggagattactggcaattttaaagaaagattaaagaagtgtaaaatgaagtgcaaaagtggaattagatcgggatgaagtctctgtggccaattacattgtaaaatatttttttttctctcacgtattcaatctcgctccaagaaacaagcaaagaagaacttggccgaatgtgcaacgggaagttttctagcgtcaaagatcgaagcaattatggttgcaagaaggagataataatagcaagtattttcatacttctgcaactacaagacgaaggaataattttgttgccaaactcaaagatcattctggtgcatgggttgactaggatattggtttggatgttcttatggtttcttagttctacgagcttttttcctcttcctaaaccgactggagagaagtcacaagcagcgtgcaaactcgtgtatcatcccagcaaaatgctgacctgctgctatcggtttcagatgaagaagatcggaaaactttgttccaaatgcatccgaataaatctccagggcctgatggaatgaccccgggttttttccagaagtgttggccgattattaaggataatatcatcaatatggttaagcaatttttccataatggttctcttcctacagaattaaacaaaactatttggtcttaattcctaagaagaatcagcctatggatatgggggacttaagacccattgcattctgcaatgtgttgtacaagattgtgtccaaagtgttgctaatagactcaagagtgttatgccgtctatcatatctgatactcaaaagtgtgtttttgcaaggctgattaatctcagataacatcatgattgcttatgagattatgcatcacttaaagaaggaaacgaaagaggagggatggttatatggcactcaa

SEQ ID NO: 219540 - DNA, 5933 bp, Cannabis indica
tctctctctctctctccttcctatgtatcctatgtcattttgatgtgtctcaaacatgattgattcattgaactaatatatgttcttaaagaactaattaaactatttcttttggagtttgacctctttgttttttttgaatgtggcagaaaatgtattagatcagggaacaggaaacacaattcagctctatcttcaagctgtagatcaaaggaacaaaaaaagtgtaggcttgtaagaaataatgtcttgtttgagttggttagatgtcacaagcagttttcatctccagctactgcttattatgctgaaaccaatagtgagagttgtgatccagaggctgaggctgaaactcagtgtggtggtgaaatcgaatttaatcgggttgactgtcttgtatgggtattacatgaatcagctagaagcttctcccttgcagttgaatccctcaaattgactggaactggccctgagcttgccatggcctgggttggtaaggatgtacacgaatggcataagcggatttcttatctggtaaattgttatttcaatatactattcactttgattttgatgccatcttacaatggattggattgtaatcatgtggaactgaaatcaaatcaaatcatgaatccttaattaccatattgtggcttcccaggttgctatttatgctctgttgaagacagcaattgaagtagaagttcttctctcccaggaacgccgttgtaacctttcccctgtaaaagaaatgtaagtaagaatgtcataactgcactatggttttagactttttttaaatctcaagaacttaattttgcatatttgaattagactaacatatttatctccatatggggagtagtatacactagatagatttgatctttgttctttcatctgattcagcttgacaccaaagattgatttgattggcgagtacatcgaaaatcaattgaatgccaggcattctgaactcggagaatggtttagggacgttgaactgccgcatgtaacagcatttttcatccctttgttaaaaaagtggtccatggagtatgctggaaggtttgcttttatcatttttcagttcttagttactatttgttacttagattatcccccacttcactatcaaatcattaacatgtgaaagcaaatattagtgtattaatggattgccaagtgtttgttgatagtgcatttgagatttcatgtcattttaccattacgagtaaagcctaaacacagaagtgttcagtggtgtcgcagggatggttgtggctatcagctgctgtactgcagtggggaaattgggtcctaggcgtgtctcttgtccttcgtctacgttttctgttgaggatgtaatggttgagctcatggatcttgcacacagctttgtatccgtggaaaaattgcatcaattagctactgaggcagggtttgagttagatttcttgtcccattttggtaaaaaggtctttccaagtaagaaaagtgaagagctagaattttggattggattggctcagaagaaactctcagttgcattccacgaagtaactgttatttcaacagggacattccctgacaaggtcaattatcatgaaatcattcttccactattctaatctcaaagaccagtgtttttattgttaaacttttctgcttataaatttgttataaaaggttctatatttgatatatgaatcattgatgttgttgggtttatctaatgcattggtaggttcaagcagatactttggctactttaggactttttgcatatcttggagggaggactagattattcttatcaagaatgggtataaaggatcttgatgagccagttagggacttgcttaggtatataccattcataattgctgcattctgaatgtatcaactattcaaaaaacctctagattttaatggttttcttgcagctacttggagtgcggtagcatatttatatatccagaattttctaacatatccatgtaccagtcattcatggaggtgcatctctattctcctccttttaattcaatgaaatctacacatcctaatcttagaaatatttacaggtagtgactgatgaaattgggtggcttgatttttatgctccatttccttcagtaagcagtcaagagagacgaagatccaagcaacatgtcctccaagcagaaaaagagattgttctgtccacagtttttgctgcgtgctatgatgtttactcaggatttgctcacttcactcgttcaactcaacagctcttggactctgatttgttatcattcttgttgcagaggtaattttgttggtaccttcttattgcagaaaactatatggtaaatgtttagttttactaaatttaccaatcagctttaaagttaggttgtcatcaaattttcagtcagaccctgttagccttttgtttggaagactactgggctgtttatggtaaatcaaggtaatttgtctatttccattcataagttgctcagattttaaatggattgcacaagagtgaaatatttattttgttttgatattctgaaccagtgaatttctaagaactatagaaagtagtgtttatgatcctgcactcccatcaatgaaagccataggtacaaccaagacttctctaaccatggattctcgacaaatccatagtaacttagttgcgaacgggcgtccaaatgaagagactttgcatggtgttagactaacaaaggtatagctttttgaagagatcttttataatttactggtacatcttttttggctctaactattgtctgtggcagggtacttgctcaccaggatccgaaacatcaaattctacagaggagaatactgtgaaaccaagtcctattcataagagtttaataaaaaagtacagcaccaagttggcatctgctagctctgtaaggccattaagtccccaatcacagtcattatggatatttttccgtaatctgcagatgctaatcttcaaaactgaactgctttgaaggatatatggatgggcactcgcttgctgtttgtagacattaagagtgttttggagctgttgttcaaacaattgagcggatacaagattacaaggagagagaacaataaattgaaaagaacgcttaatgacatggcctcacttgtcccaattacaattctaatgctacttccagtaagctctcataacattgccttgattttgctagtgccatgccatttactgatatgaatcaaatgcacgcaaattgctttcttctttttctgtgacaaggtatcagctgtaggtcacgctgccatgctagcagcaatcaaaaagtacatgccatccttggtaattttttttatcacctttcccattgtttgtatgatttcaaacaaatttttctttttctttacttttgcattaaatttttattaaaaaggaaaattctgcctatagatcccgtcaccttattcttcagagagactggatgttgtgaaacaactaaagagaactaagaagatggaagtaaggataagaagcaaccctgatgatccttcctccaagatatcataagagaacaactggttcaggctgattttgaacctttaacaaagcttccattttgacaagctgattatgctttctattactttgtgcattatgccccttttgaaaggggttttacatatgtgcgtggttttactagcacacgggacattttctcaaaacaagaacaaataatatcaactttctaggttggtctaaaggttgaaggcccgttctcaaaaccatttccggttgatgtttggaaattaaagaggtcaggcgggtggaagatgtacaagttattttggctaatgcctctatatgttgctaaattcaatctgttaaagaactgatttataatttcaaaaccctttgtaaaaataaaacaaataaataaatgaagagtggcatttgacgatttatcttgtattgtttaagcagagacattcaaaacaaacaaagacagcaatatctaagccatattatcactatacaaatccataaattattaaagtataaaagcttgacaataaaagcctgctgttttctttccccaccccgctaaccaaaactgtgttcggagaaacgttccacgagtacttctcgtggattggagaaatcaaagtacaaaaactcttcaaagaaaacgaaagacaaaatcaatccaggagtcttggcaaaaaaaaaaagaaaaaaacgaaatagccatgaaattggtgcctgcattacagatttggaaatcggaaaaaagtaactacacaacattcttttccttgttcgatcttgaaaatggacaatattcttaaccattcccaccatctttcatctaagctcctggacgtttaaccatccttatcaattttcggacacaatttacatggaaacaagtggggtaatatctgtgcaaatgttccatttattgtaaaagaatatttgaactcatccatctcaagaaaaaacaactcttataactcatccttcaaaatacccatatccatatttctggctttcatttgaagagttacacaaatctctttggatcgcgagcagctgcaatatggtcctggaagacaagtcatgaaaaattggtaaggtttcccataatagagccaatagatatatatacacattatagcggtaatcaatgacaagttatacataaaatcacttcccattccaaagcttacaattaaaatcatgcagtagacataactataaaaacaagaataagaatcaacttacagagataaaatcgaatgcctttgtgtcttctttctttgaactgttcactattggattagcagctggacctggaaaatttggttggaatatgtcaggtagtgcacctactgtcgttccagcaacctgaacaacgccagagttttgagcatttagatgcccaagctgttggagggctagctgttgtgcaaagagatttcccatagcagcataattcatctgttgagaaggaagcgcttgattatacataaaccctggtggcatattgtacggcatagcaccctgagggaacataaaattagcattcatccctaaagattgaggaccaagaacaccagtcatatcattagtgacctgctgactgagatgactttttgtatctgagaataaagcttgagaaagtaacccagaagagctttccttttgctctgcctttgagccattttcattaaaggacaaaccactcattaaatcatcaacgtctttcttctggttttgctgctccattgtaattccagaatcagatccaaaaatatcaaataattcagtggcagttttatttgctgaatgatttgcagtaacatcctccttactgtcaacagacagcccagaaaagagatcatctgcaggttctttactctcacttgagtgaaatgaaacatctgcgaaggggtcatcatcatttatcagttcactagtgctgacggcattgctgaaactatccccgaataaatcatcaattagtgggggtgttgttgttgacatattcgtgataattgggtcattttgcttctcttctgaattgtgtggttccttggtaatcatcttggtcaccagtgtctatcaagtcaggcatttggacagcagtaacggcttcagccttcaaatgcttttcagacacacttatagtactgcctgtctgttcgccacccaggaagctcaaaacctgtcacccaagacactaaactttatgcaaccataaaacctaacaaatattctagctcagaaagctaaaaggataaaataataataatgccccaacacctaggagcattaaaacataaaataaagagcaccgactcagagtaaaagaaaagacttatatcttataaaggccacaataaacctttttttaaaaaaaaaa

SEQ ID NO: 219541 - DNA, 3511 bp, Cannabis indica
tcccaaaataaaatgcattagtcaatgctgatctgatatacacaaaattgtaaggatacacaaaagttatagatgattatgaagaactaatttcaatcacataatttaaaattttgtgatctcacctaacaatattattggcacaatttagttacatataatttttgtgtacaacattgactagtttagtatatcattaatctttttaacattagcaatccaaagctaaaacctcggccatttttggcgatacttacgattgtaagccatctagcagaagagctactagaagatatgcctgaactaaatggtattctttatgtacacaagtcataaacatttctaccaaagtagttgtaatgaatcaaattatatatattattctaatcagatgttacaaatttaatccatctgcacattgttctacaactgcagctttcctatgaatagtgccaaaaattctgcaaatttcaaaatcttgctgaatatgatgagggcacttgcaaagtagatcattagcctcagagtgtttaccttctcgatgtaatgatctgaaaacatgagcaaaagctgaaggggatggataatccttgagagtcaatgccttgagaaattgaacagcatcctcaacagtaccaaacttggctatgtagtcagaaaatggatccggatagggttggtaatctcgcttcattagccgaagcaggcacagtgcttcttcaaatctcctcacttgtaacagcttttcgataagtttcctgtatgtaacttgcaagggtcttaaacccaatttatccatcatctttatcaaaaaaagtatatgcagcttctatcttcctctgactaaggaaaccatctattaatacattcaacaaatctgcatcaacattaagatgcttttccatcatctttgaaagccaaactaacgccttctcgatttcaccagcaacacaatgaccttgaattaaaatggtccaagtcttattatctggagtacatccactttcttccatctcaacaagcatcttagaagcttcttcaagtctcttagccttacaaagaccaaagaccacctggctgtatgtgatgttgtctggcgcgaatcctgagttgctcatcacattaacaatcctctctgcttcatcaaaccttcccgcacttgccaaagacctatgaatccaatcataaatagtcttagaaacggtagcttcagtattctcaagtttttttagaactcgatacgccaaattgagatctggattataacttactgagatagtgcgtaaaagcctgcagcaatcattagctgagggctcatatgggccatccattacatactcaaaaagtttcacagcgtccaccatcattttgtgcttcaggaattgctttgaaatctttctgtaagaatcaatgtccatttcatgccccatacctttcatttcctctatcaccttccaaaactctttatgcttgtcaggccgagcaagagtccaagcaaatgcactgtatgtaacactattgtgtttatagcctggaaattgagcaacccaacggaaaaacctacccacttttaatgggtactttctaagttccttcagtaccattactacaatactatctgagtagacaatattgagctcctctaattgtctctcaaccctgtagctccatttcgatcccctaatgatatttacaaacttcttcacaacaccatccatggcgttctcttgagcagttgaattgtaaaattgggtcaggaaagcaacatcacttgccaagtttttctttctcagttgcaaaagtatttccgaataagtttcctcatcaatgtacaacccagcaatcttcattctcataagcacaatccaaaaacgtttcattaattccttgcgagcaagaattctaagaaccaacttatatatcaaaaaattcggtttaaacccaatattttcacaaacccaaaagaaaaaatccgaagctttttgtgggtctttgtccaaactcctcaaaacgtaaatgactgtcccgtgagtccactcttggttaaaattctctaactcgttctccaactcagtgcaccaatctttacccaaaacgagctccaccacagagtgcggcttggaacaagagaaaatctttggataggtattgatgagaagagaactataatgttgatttgaagtagagtggaagtaacgagagaactgagttacctgggaacaaattggtcgattaatggagctgaaccgagtcgagagaaacaaatgggcaagtccaaaagagttgaatacagcccttgctcggttcattcatactcgattaatggctgattcttttcagccttcatttccccataccagtatcccaagtttccccaattcgtttcctaaaaaatccctagaaaagttataggttggtactggtactataagaatcatccttactaagaatactataaaatacctgaagtgatttcgttgttccttcccctactcatgcaaccgttcgccatagctgtactgttaatagattcttgagattttttcattgaaatttcgttgtgccttaatagtattcagacactttgacttggcggaaagatgatgaaggaaagccattcagatactgattcatctgaggtttttgagggtttaacaggatctcgatttatgaaaattgggctggatctagaacataataagcccattaagattgagtccaactgcccaaattattcctggctctgctaatgggccaaccttagggacttaacaggtttgcaaatgggaaatttgatgggatttttacaccacatatgaaatttcaaacttttttactggcagtttttttaaaaaatacagtgtaagttttatactgtgtactgtgttaagtttttactgttattctacggttattttttagttgttctactataattttaattattttgttttgttgttttacggttgttttataaaaagactttatttttataaaaaaattctgtgtgacaataaaattataaacttttgctaaaatttattaattttgtaaaaactccaaattttatttatttatttttttaaaaagagcaatagggaaattttcaattatatgattttgaatggggatttcatttggataattgtcggttaaactatttgaacggtttggtacaataaatctcttttagtaaatctttaagggttaaattgttcatactttcatttcgttttgttattttcttttccatttactttagtctagtaagtgtcaaggtgaattgtccatgtaatattttttgaaaaattaattttatttctctctttcacattctctctttctccctccttttaccatgaataccatctcaaccaaaaccaccaccataacaccacaccactacatcaccagaaacaaccactgcaaccacaccattgccactaccaccaccaccacaaaacaaccataccaccgctgttgccgccaccaccaccaccaccacatttct

SEQ ID NO: 219542 - DNA, 2142 bp, Cannabis indica
tctattcaagagccttccaaactgtaaacggaggagtgatgttgggcaaaagatccaagaattgtctcagaccatagacgagcgaagtcagctgaggaggagtcgatccttacgtcgccagatcatgaattcaggattaacagctccattaatcaagtattccaccggagccacgctagtgaagagaatatcatcgaggccatgtccaatgacagtggggatgacttgagatttccatgtaagatagttcgtgcgatccaacttgacagtgagagatgaattgagggaattttgaaatggattccatggttgaggctgcgggacatggagtaggggcggcggtcagagcagcagtgggatgatcaagaatgccaagatccatgatagacgaagactccaaaggcaatttgataccatataagagtttatcaatacaaaacttaagagagcaaagaatgaagaagaaaacagagcatcaaaatcttgcaaaagctatagagctttgagcagaaggcctttatttatagacacaagatacaagaaaagagttgttacaacaaccctgtaactaactcaacgactaataagggcaaaaatggaaaaatataaaaaaaggaaataacagaaatattattctgtatcaaaatagaacaaaacatcataaaaataaatactaaatataaccaagtgttataaattaaaaaaaaaaaaacaaataactactaaaactacatatttttttaatatttttattataaaataaatattaaaatgtttttaatatataaatgtaattgaattgaattgatttttaattggattttgatatttactaataactgattcaattcaattaaaatctaacttttacatgcaatccaatacaataaaatttaatttttaccatcaaatttaatctaattataattaaataacaaaatttttataattaaattgaataaaatcagttctatttaattgtattagattaaatgttgccatacttaacccaaaaaaaaaataagctagctcctaaaagggagagcataatccagtacaagccttttagtttggggcattaaactcattttctagccaaaatcttatacaatatggtgaattgactgggagcgcattaaaagagagataagaaaagtcagagtttgtttatgtggaaaatgggggaaagaggccatagtgagagctaatacaaaacgacaagaggtagggtgaagatgatgggacccatgaaagtaacccaaacaggtcagaagcatttttgatgtcgttttcgttgggtggaaaagaggccattcatgctttttctctctccatcaccatcatattcataatactatgcaattgcaaccccttttgctttggtattggtatggttagattctcattaaaataatttgcagaggaaaaaaaattaaaattggacggcgtctatctttttggcctttcttatgtaatgttatataaacttacttttattttttattcatttgacaacgatccaacttaaatttcatcgatttgtctaaattattcccctaaagaaaacataaaaaagattattataaattggtggttttttttttatttctcttcttcttctttttctcccaaatcacattgcgggtcttattttgattagtggcttttttagaaatgacatgctagtggagtattttcttacatcagaagatagtgtgataattggtttgaccaacaagcaaaaaacaaatttgcttcatttttcaatttttgtgagtcacaagagcaatttaatgtgcccaattgtttttattttcacttttcattatacacagcactgtctttttttttctttctgttctttcgtgtgtgaaaaatatgtaactttcattgaattgttctaacaaattcactatctacttctaatgttttcaagagcgaactcagaagagaagagctcaaaagagagaaaagaaccaaaaccttttttttttgctatcttatgagcctgtctaggtacataagaaaaaacaatatgagggaataaaaaaatgaattgataatttcccttattacatcatataaaagagagagatcctcactaaaagaaagacttaactctgttgacaattcaataatgga

SEQ ID NO: 219543 - DNA, 2516 bp, Cannabis indica
tatgtaaaatccaataattctcatattaaatttggtatgatacctgaaagtggtggttaaatgaatgaagaaaaacagagagttctactctagcaagttcataaccaggacaaagccttggccctacctccaaatggggtaaacacattcaaggaacttgttgatgttcctgagttgttctgtcaaaatttaataaccaatgagcaaaatatatagttgtccaaaaataaaaagaagaaacaaatttcagaaattactctaattaatatgaaataattacctgccatctccatggattaaaagatcgagcatccttgaagtttttttgatccaaatgtacagctcgaaacgatgcaaaaactttccatccttttgggattgtgtaacctgtttttatcccatatcataagaatattattattttgttgcataagcctatgtttgtgtgaaaacataatataatacaatatttaaaaataattagccactgattcttttttttttttttaaaaaaaaatttctttacctttgatattgacatctgtcatggctcgcctaaatactccactaattatgtttgccagacgcagagtctcattaacaacctacatcatgtgcataaatatatatgattaataataataaagtgcattttaggaaaatgatgttaagacatttgatgagaaagtattgagtctctcaaggtaaaggacttacacactgagtaaatggcattgacttgtaatcactccactccagagcctttgaagacttattctttttagcttgaatttggtcatgctcttcctgtcattttaccattaacaataataaaaattagttttcttttctcacctcacctcacccaatactactatcaaagttccaaaaccaaaaagaaagggtcatgagaaaaccaacttggatgggcctttttaggtccatatccaaagcagtaatttgggcccatcaagtggaccatatccatgtggttttcttatgagccctgtaccaccagtggtcctactcccactcctaaccaaaccccaactctcttcttctcctctcacaggtggtaatggaaaacctcaaattgtcatatgacaccatcggccgaatctcaaccgttgaatatctaaaaaagaattatgaataaatggacaaaaataccccttcccaatagaagaaagcacgtgactcagaagggtagtttagtcaaaaggggtcagaataatctgacacatccaagcatagagagagggctacagaaagaacagctttaaggaaggcgtgcagtttcgaaagaaggaaaatataggcatcatactgtccccgtcggtacaaataaaaaactcattttactctttttctttgacttttttgaccaccaccactaccactaccaccaccaccacctcgatcttctttccactttccaacacaaactcaaaaaataaaagaaaaacacaataaacagtgtttgtacacttaacacttcccaacacaataaacattcgtagcctgtaaggctgtgtcacagaattctaggtactatttattaaatgttttttttctagggcatacctatgccatgcctatctaacaatttaaaataattttaggaaaaaaatgtcaccaatttttcacaatatatagcatattttacaatcattgtttcatgtgggtaatcatcatttctatatttcacataaaaatcaacattagaatatatataaaagtttattttgacatctatctcatgagtgtggtaagaaattatacagttaaaaaagactactagtgaccttttatttttattgtctagaaaaagatgaacaaaaaagcaattcaatgttctacttgtaaaccttgcgtgtgaccataatcacatcatagaaagaaaataaaacaaaagaacaaaaacaaaacagaagcaattaaaacgtaaaaggaaagaaaataaaataaaaataaagtgcagcatgtgcacgaacatggatcaacatgtaattataagaacaaatttcttcaatcacatgatatatatatatattgtgagactgtaagatatggatttagatagataacgaaaatgaggtgggctctaaaaatttggtccactactcttataattatttgctattagctagttgttgatcatcattaagaaaactaatgaaagaagaaaaaggaaaagaaaatcaatgaattgattaattaaggcattaattaattaccttaagttgagctaaagcgagaggtgtttcagtgaggaatttaacagcaagagtcataatagttgatgtagtttcatagccagccacaagcaaagcaagcaagaaatcaacaatctcttcgtcagagaagccatcgtctcctcccaatagagctcctaacatgtctttctttattacttttctatcatcttcatcacttctactcatcatcatcatcatctctttcctcctttccctcactatcaagctcaatgcctctgccaccttactcctagccta

SEQ ID NO: 219544 - DNA, 4473 bp, Cannabis indica
cataccttccttcatattcagataaccagaggaagtatgctgcaccaaagtacatggacacaaatggcttggttagatcatcaatggaatccaccttataagccctgaagcccaactccctatgcacaagaacaacattcaaaaaagaaacatttggctaatattaccaaaagggtaaacaaatgataattttaatttattcattactcaataatctacattattttacatacatgtaaagccagaaggctgtggaatagtctagtcccattattccagcatttggaccgataccatatacaaaacgcatgctaagaagctccgcaagggcacaaagaactgactgtgaataaaatcaaacttagaaattgcatctacctattcatttatgaaaattatactttaaattctctatcaaatacactatcactaacacagataccatatgggattcatacaaacttaaaacaagtgtgtctcatcaacataaataaaaaataaagtgtcttacaggtttcaatccctttgtactgaagtgtttcgaaagtataatttctgcaactgcctgcaagtaagtcaacatcattaatgtgtagcatccataatatgtggaaaaatttcattctttaacatttatgatggatgcagattaataatgcagaatttatttttaggaaaatatcatcaagtgtaaaacttagaccataaaagattatttttttttgtggaaataggacaaaatatgctccctatatgaatatatgaaagtgtgttgtcactcaaaaaagttgaaatgtgattttgaattacacatacatttgaagaagacaattcgcaaacatcaaattttgccattgtatcatgtcaatttttggtactgaaaacacttttttgttgtatggtatctcaaaagatacttgtttattgtgctgtgttcattaagcaaactaaaaacttgtttgttatatgctatctcaaaagattaaaacacatgaaaaggaaaagcaaaataactttatgacattgttgaatagctcttaaatttgaggacttgttttgttgacatatagagaaatacctttacttctattcgagaaagatatggtcttttcttttcatcttgggagaagcggacctttccctttttctctcccgatttgctccactctttaaaaacttcaggattattccacatctcttccatgtcttcaggagaagccatggaatcccagtatgtgtaatcacctaataaagtcgacctggtttagtgatatacaagtgaatgaaaaataactcccaactaccatatgaaactactaatgatggtactaaaaaaagtgtgctattaaaccttttgttagaaacaatgtcatgacatatatttatagcagcaaaccaagaaataataatcaaccatatgctgatcaattaaaatattgactcttgaatagcctatactaagatgtggaatgttgacatttaaagtacttttgtggcgaactcaattatatccctggctgcaattcttctcggaattaatttttttaaagttgtcttgagcatgaccaaaacggagggaaaagtagtcttgtgattcttaagcatcccattgagtctctgaagcttcaatgaagaagctacaaaggtaaagatggtggatgaaaatgtgttcatgacaatacatgatagattgcagccaaaatctgaattttgggagcccccagagagggccagctatagtatgaaagaatttttgaagcaagcagataagtatatcttgattgagttggcagaagaactatgtccgaacaaatcaaaggttggtaggagccactgtgtcaaactgagaaccctggctcaaaacaactgttctggaaagaaaaggaatactaatgaccagagccaagatggtcataagcaagcaaagcaggataaggcggagccaaaatacatcccttgttttcgatgctacacaaacgtgctagagtccagggaagatgtgttcatggtgacaaaggctcatcttcaaagacttgggaagagaccattgcaccattgctttgatctttgtgggatcagcacctacccctgtgccataataatgtgccccaagtactccaacatagtttgcttgaataaacatttctttgaattgacaaacagtgaatgaatctaaagaatttccattacttgctgcaagtgactaaaattttcttgcattgatgagctatagaataaggatatcatgaaaaaactaaaaataaaaagatattgcttgaacacatcattcatcaaggcttgaaaggtgtcaatactagtatgatctcactgaaatagggatcattccttctactagttcaatgcaatgatctcaagctttgtggtcgaggtaactgttaagatcccacactaaccaagtatgggattggttagtagtatatagctacttaagaactttcacctcttaggctagtttttgggagtcagttctacccaagtggttgtgcgtgtgacatggtggatcccaacaatgaattcatggattattttgtacccttagcctcctctagccccaccagcatcaatgccaaatagtctagaagttttcgtcatcaggatccttgaccgcacttgaaatgtgtaggagaagcacctttaataatcaattcttgcactatgcgtgcagaaccactagtcatcacagctaccgagtctaaagtttgacatcaatgtgccagctttagaacaataaatcactggaatttttacaagtttagttgtcgttgctccgccagacgttgtgacattggttctgtccaagtaggacttggtaggatgaacttaatagaagagaacttagccctcgtataaacaaggaccaaattaatgggtctagtccaattctcacccaacatgttctgatccaattgcatgaccctattcttgacttcaaccattagggttgcctccatcttcatcaatccttgaggattcataatttgcatcttagctcgattagtaggcttaaggccttccatgtatttatttgccaacacctcttgcgataaccacatgtacatactctccaacacctcttgagataaccaaccatgtaatggcaacaccattgactcaaataatttttagtacacttccactgtagagccttaacaaatgtttaaaaacttaacacaaagagagccttcatagagagaacataagctcacaataaatactaccttgaactttcccaagtgtggaaacaaagcaaatcctctatgtataaaaaccaaactaaggccttcccctgcatattgaccaccataacttccattttcaacatgtgactaagttggaaatacctctttacctgcaacaaccacctactgaatccaaaccaccaaaagtgagaaatcccaaccgttgagaaacacaaattttagattggatctcttgctcgcttgtgttgaactccattcatagtgattttctctttggatgtattgaattaagtttaattcaccaactactccaaatgtgaaaccataaaatctaatgtttattgcattgcctcctatgtttaataaatttgcatagatagacttgtcaccccaacattggtatgttagttttactcttgaaatttcttgataggtataacccctctctctcaactctgtcaaccttgtcaactccttttgtcattcctctagcttgcaccacaaccaatctttccacaagtgcttcgactctaccttgactcattctctccaaaatcggattgctctaataccacttgatacgtaaataaacctccaaagattcgagagtctaaccatcccaacaattcacaaaaatcccatgaccttccctctctcacactactctatttattattaactaactaaaccactctctcttctattcacacaatccccattctattcttctttctacataagggcatttcaccaatagcccatctgatatgtcttacaatagtggtctcattgaaaattccttgtaaggttttatcttacatgttatgtaaatcatggattttacaagccagcttggtaattgacaaatgttcaagaattatgaggcaagttttcttatgttttttatgtgtggtgagtaataaaacggtaactactagattctaagaagtaaaatgtggcatgatgacactaaatttgtaataaaaatataactaataaacaaaataaaaatacttattcctaatattagtatcacaattatgtctgacctctaataaatggcacattttatcttttaattgttagtactaaaatactaattattatttttagatgttaacacaatggggttgatgtctcacttaagttagggatctaaattttgatatttggcgatctgagtttggaaactccttttaagagatgttcgtatcactaaactatgcctatcgccacagaatatggacattaa

SEQ ID NO: 219545 - DNA, 2279 bp, Cannabis indica
atttacttttgttctttattcctgtagactaaagaaaaaaaaaaatccaatttttacttataataggaatcaaataactacttcatctcactttcaaaaataaaaaaagaacatttatgtatgattgaagcaaattaacctagagagataacaaagaagagtattagactattacactaatgaataatcacatcatgtggtgttaagtataaggacgattcaggtcccaacagagttaccgaacatttgtctcttagctcttctccctaaaaaaaaaatgatatgctttctttgaaaagccatagtttagttttccacgctccaaaatctaacacaccataaatggtatcagacaatctatcaactgaaagacaactgtttatgttttcctaagagcacagccctgtgactgcatcccatccatcacccaatcacacttttttcatcaaaataagaagaaaaaaaaaagtttatttgatcatttatatattcaatgaacaaagtctgtgatccattaatattattataataataatatgctataaggtaccaaagcagagagagagagaggctatatattcgcactgagtagggtaccttttgaaaaatggtctgtgactttctgtgaggtttgaactttgaacaatcccgaggatctttattattacatgtaccaatcgatcaatatatgcacgtaccgttaatgcacaatttattaatttcaaactagtatatttatttattatgatgaaaggccaggtacatgtgtgtgtaaaatatatatatagggtgcaaaatggtgaaatattataacattaccccacgttttatggtattgtccgtattataaatttgtgccttgaaacaaaagcaaaaccatgtgggtgccttcttaggaagccaacaaattgaatgggctaactagctaatagataacatatatattggttatatatattaattcctcttgcaaaacaaaaccatatctcaattattgtaactacacttctgccccaaaatatcaatacatggactcatgagctcatatatataaagaaattagaaaaccccccaccacacacaagccaaaaatttaaagaccatatcccctatggtatatatatatatatatatctctttataattaaatgaagtatatcatgaattgtgctgaagagtattaataccaatgcattatatgaggacaaatgggacagtgtaggaaattttatcttgggctaccgtacaccactaactagggctttctccttttttgttttcttccaacaatttgactcagtcttgctattttagtgttcttagggtttcttccaaagtatatacatgtaccattttaagagcaattattgcgatattttttgttttgttttgttttttttacacgtgatcaaataatatttacactctttacaaagtatttctcagataattaagaaaaaaaagtatttctcagataaataattataccatgcattcatcatgatgcattaatgcttaacctactccgagtcaataatatgcaaatatatatgtatatatactatttgaccattaatacactttaaaacagatagagtaattataaaccttttaataggttgtgtaaattaataatattgcgtaaagattttaatttttttttatttcccttatttgtttttgttcaattataataatcattaattaaatcttatattgacaataatgtatacccaatatgtatgtaaacatatttgtcaaaaaagaaaaatgtatgtaaacatatatatgtcataaaaatcgtaaagttcataagacacatacgatgtaataaaatggaattatttcataagtatataaaaatggtttttttttgttagcagtttcttattttttattatttatatttttacagattcttttttcacataaatattactataaaaataactacttatagtgataatcacaacataaatttttgtgacttttaatcacaacaaaaagttacttgtgaccaaaacataatatttaaatacaaattgtcactaatttacttttagttacaacaagtattgtgactaaaagtacatttagtttcaacaaattgtgatatttgtgactaataatgttagtcgcaaatattttagtaacaaaccttttagtcacaacgtaggaatattaatttgcggttttttcattttttacattttctaaaaacagtttttttttttttttttttttttgtttctagttttttcgtactttatttttaagtg

SEQ ID NO: 219546 - DNA, 2647 bp, Cannabis indica
taaataatatataaaatattatagaatcttcttttttgatatatgagttgtgtctgctcgtcaagagcctacagaggctttggttgatgttttcgaagacactaacctctgtaatccacaataagagacttattaccatcaagcctaaagatagaattgactactgaggtaatttggtctttaacgactaatgtttaagttatcttgctttatgtggttaaaccaaatttggtgaagtatgtgcattgtttattgtgctaaccgtaggattcacatgtgcatcattgcatatatctatgtatgaaatttgctctatttaacgtttataaagatcaagtgcacttaattattaataaatgaatattttcaaatgctactatcagctaaaatatctattgtctgttgactcatgtttttggtgatataccattcacagtaacttttcatgccttaactgttagctcatgtcttagcattctctgatttctctttcaaaatccattgaaaaaataaaattggaggttctttgaatagctaagttgaaaatggtgcagatttggaataaatctaagattgaaaaacaattaactaaaaagagttaggtattctaattttttaaaactaacagttcctcttattatgtatgtttgttgaagctcagggaacacctattgcatatccatatatgccatatgatacaataaaactttgatgctattcatggtgatatgctatatcatgtcatgacataccttgttagttcacattcaacgccatgacaagttgagctacctaccatcatagttcgctgtgaaaaatgattctgagcaaatatttgtcaagcccacaagagcactataagttctcatctttggtattacatacttaagacaatttgttaaacttgggggaaaatacaatctgatttgaattctatgcaagatagatgtaaaaggtattacttatttttaagcctaaggtaagaaagagattatgctaccatgacaaattattaaacaggagagcaaggacagttgccagtcttaattataagcttgatggacgacaccaaggataaaaaaaaggcctgctattatttttctgcatagcacaaaccagtgtaaagagtggttgagatccttacttgaggtggccggtgggtaccttgttgatgaacttatttttatatgaattatagaaagaaaaaaagccatttgttagaagcttagaggtgagagagagcttagggattcgcagctgatgacagttttttcacttattactcttctgtaattaatttttataatattggggttatttttttgtaaactggtatggtaaaatacaatggctaattaaatcccttccccttaaccaacttgttgacttgggagttgtgtctatcactaaccttctaagacattccttgtgtttgtatacgaggcatatgattttaattgagtgcctagttaaattgaaaaaaataagatacttatattacttatttagtgtttttggtaaaaagtaatagagaatgattcacacatgaattacatgctaactaagtctttggtaaaccaatctataacagatcaatactattatctctattcccttcctttgttagttgttggacccataatctttttcactatgatcaagaatttgggataatttgaagaacacatctttttttaatcatttaaccgaatttacctttattttaaatttaattgaaacatacatatttttataagtattgtactcaaaataccctcacaaattgagtcacaatttccacacgattaacctcctgaaagcacgcaactcaacagccatcattcgccaccattgtcgcaacattctagtgactcctccgccagtgtcctcctcctcctctgtcaccaccatcaacgttataccggcaacttgctgggttttccgtctagtcacagtaaaaatggaggtgttgttagtgagttatcaattggatttttttgttgttttgttttcttgagtttttcctcctcattatcttctgttgtaccattttattaaaaatatatttatataatttattgggctctgtgtaatgtgattaagtgagcttaaaaattgtgaaatgtggataaaaacttgtgtgctcatgcaatgtttgttttaattcctcaatggcatgtgttattattaatgcttacagtttcggagatagtgatttgaatgattaggctttatttgtaatgagtggaagacacgtggtgttttaggcgcatggtgtttcagagttccattttaattcttgtcatactaatcaaatggttgagcttttaattgccttctttcaacattgccaaaaggaaactgagcgctaggacacaatctcttttggtggcctaaaatgaatctatgaaaggtttaaattactatacacatactgatatacatacaaactatacatatatatgacattagttgaagtatattaattaatatatcttataatttaggtacgcttggaaaatatatcaacagatgcttctaacatttgttggggtttatgggttttggaaatatgcttcaaagcttgagaggcgagagacaaggcgatacttagaattgttttcccaatattttataaacttattat

SEQ ID NO: 219547 - DNA, 2810 bp, Cannabis indica
aaaaataaaaattaaatttaaaagataatttttttgagttcctaagctaggtatgccctaagcacaaatctaatcagcttatgcctatagtcgggcctggtgccccatagcaatgcttaatgaaaaatgttaaaagtcaccttattagcatcacttagaacatgtcatatatttttatatgcatgaatgaattaattaattctatcaacaagtctagctatgagactatattgatgagaatacgatgctttgctttcttgtctttttttcttcacgatcaattaattaatatctatttataatatatataatactacgtataaaatataatagtgactctctttttcaagcacttagttttcacactttgtaatttatcactcttgtgaaaaatatataatattcacgtggggaaattatggttggatgagcagagaaagaaaaaaaaaaaacaaattaaattgagcgtttatcaatattagtttaattagctatgaaattattgaaaggttaagtttttaagacaaagtttgattttttttactttattataataattattattattattggaatagggtgacttagttaaggactttgattattctttctccttattttgatgggacacacaaagaatcaaactatagctaattcaattattttgatatataactaaatttgatttgcttttttgaaaatgctatatatacagcccattgaacaagaaatagagtacgttatgaatataactttgtatgtatatataaatataattatatatatttagttttatgaatagtttaagctcatgcatatattatatttaattaccaataagtaaaaataaaaaagtaaaagagagtaccgtactaagattcgaggattgaattgaagagtagtatatattaaagaaaaagaaaaataatgaaagaaagaacaaaatcaagtagaagcatataataatatatatatatatatatatttaaattgtaaattgggttgaggaagtcaaagaaagatttgttgaggaaccgtccaaagaagaaaaaggcattccaccacctctctttctttcatccttttctttctatctcctcccattcctattacctttacctttctaatacattaattctttaattaatattatatatttaatttacattttaatatatacatattctaattatatattctcacatattaatattccttgacaatattgccctctcatgtcatcaatccccctaataataattgtgatcatcttcctatattttttatataacaattaattaataaccctaatcttgtctcttttcttaaatttcataacttttactactacaaaatagagaattttcctatgttaaatcaattttttttcgaaaaaccaacaaaaaaaaaattatgtaactttttaaaactgacggctatagtttaaaattgttgtcaatttttaacactcacaatttattcccatctagttacagatgtagaaaacaaaaatggtgtgtttattagttgattatacatgttggtagctccataatacagtcgactatactatatttaactatttataatggtcacgaaattcctttttaagtaataagtagtggatatatccaaagaaaatatttttttcttgagggagaaaagaaaaaataaataaataaaaataataattgtatataagaacagacaagccagttcccaataacatgtcgttcagaaaacaaggagacatgcaggcataaaattttgtgtgataattatgtatgtaataaaatgatcttttttgctttttaattttgttttatcaaatatacacacatgtatatgtatgtactaaatatggtatgtttatgtacgtaaaataacaaagggtattctagtcatgtgatcagtttgacaaataatcccaaaagtcatcaaacaagagctagggttttttcttatcatataattattataaaatacattatgtacatgtagttttgatttcattctatatatatcttccaaatattatttttatatattttcttgtaattcaaatagaagagggttattatagtaaattcaatacccctttttcatataataacttccattgtaagcttagttatatttggttctctttctaagtagctaggtagacaaatgtgtatcgaatttcaaaacctcctttccaatattcacttttcttgaaacccttcttctctctctctcttttatcaactttctctctttcttttctctttctctctctctctcagtactctcttctcttattatctttaagccttggttccggttcatggatattgaacccttgtgggctcttggggggtggtttcttcttcaaatttgcatggcaacacctaaaacatcaccatcatcatcaccatcatcaccgacatcgtcgtcttcaatcttcgaaatccaacaaaatctcttcttttctaaccctaatcttcattttccttcttctcctcactagtactagtactagttcttccactactacatcgaattttcggtattcttcatcaacatctatgacttcaacttccttaaggagaagacttctcttggattcttcatcatcatcttcttctacagcaaaattgaatccaaagaaaaccgaagaatctgcacgaaaatcatcatcgtcggctacttcgagtagaagagagtttggagttgaagctcatgaagttcctagtggtccaaatcccatatccaactaggtatatataaataaatatagcaaattatcaaaattatgatgatgatgatga

SEQ ID NO: 219548 - DNA, 6722 bp, Cannabis indica
agggtttccccttgagcactagttcctacatggccaattggccgatgggggacctctctgaccaacttgaaaagacccctacgggggtagttctgcgaccagagtgataaaattctatgatttgttgagacaggctagctcttcgttgttcttgctcagctcattagctttcactatcctgccatttctccatcaaccaatgttgaaactgtttgaattgcttgttgagagaatctcgtagctattgttgtacatcagccatagtttgtctgagctgttcaacttgaggatcgacctccttagggtcttccaaggttttggtgcctcctcctagcacctgaggcataggagtagtcctagttccagcctaagtaacttgcgtgcccccagttgtttggcaggatgtcaagtcttctctatcgacacttgaggagcgcattgcaaccatcttgtaaatgaattccttgagttgtggctcttaataaaagcaccaaaatgttgacttagaaatatggatagagatttctaagtcacacctgcttgctagattggtgagaatgagatatatgttaagtataaatagagagacacaacaatttatagtagttcactccctgtatcgggacagtaatggtggtacatctacttcgagtttttattctcccgagatataattacaaaaagatggttaagtgtagtagctttgatttctagagagagaaactagagagagatactctgaccttatggctacttttttgaatgtgaaaaataagctagaggacctctcattttataggggaaggaggtccttgaaaataaaaaataaaataatgaaagaatatgttaggtttatttttatgtactttttgaatctaatttagggtgtgttttatgcttggtttttgtttttgtgtattttttaggaaaaatatttggagatcttcaattttggtaattttggtgttttgcaagacttgttgagcaaaattaagaaaatataatgaagaaagaaaatgttttttttagctttgattgatttcttatttccaaaatatgtcaaaatggcattttttgctcttaaattcttggtcaaaggttgataatggtcaatttccaaaattaaggtggaaaatcaaagaaaaaggaaacatgacctgtaaggttgcagattggtaagcaaggttgcggtcttacccttgttcgctggaaatgaaatggaaacaggaaaaaaagaagtcagcgaagaattgattttgggaaatcatttgtaaggccacaacctttctagccttggtattgtttgggaaacttcatattctaactataaaaagagggttgataccaaagcctttataccattcaaaaatttagaaaaaatctgagcataggaggaaggttaggagcagaaggcgccattgaaagactccaaaacgtgttctgtcttttatatctccattttttaattgaatttttattaatttagaatgacttgtattagataatttcttttaaggattattatgtgaaccacttgaatttattttatggattgatgtaattgttcaatttcttcttcttcttttaattcaatttcatacaatatgtttttattttacaattatttaccagcaatcaataattgctatctatgaatccgaatcaaaattatggaaggtgagattttaatatgctttgattgttttagatgcaaatcaatttaggacgaaaatatgcagattatttgtatgatttcttaggttgttttgcttaatgttttctttgtgattaactttaccataagaatatagggagtattcacatagattgggtttataattcttaaccagattatgaattacttaattcaacttgtccattggatgagaagaagagagattggataattgtattaggacgtataataaaggataattggggatcataataatccttgtctttttgtagttatttttctatttttaattattttcttgatttattactctttctccataatttttattcatcatatagaactgaagaattaattgattgataattataatcaatcatcgtgagaacaatactctatttatcattatactacttgattcaattgcgtatacttgcatattaattataccgaaaaaaatacaagttggttatttttgaccatagatgattatctaatggtaaaaattaacttctgaggttgatcatcaatttttggagtccagatcatgatggtgggacctgctctaggtaagttgtagcttaaattcgtaactcccgtaagagtgaaatttggagctaataacttcagaattgcaattggtatgagacattacttgagataattaaaatagcttcaaaattcttattgaattacatcaattggatcaatattgagtgagtaaaggccattttactgaaggttgttctggatacagctcccaagttgacatctcagcgcccaggttaacatccagtgccaaggttgatatgtgatgtgaacctggacactgggtgagtgggaaaacatatcgaggatgtattttttgaggcctaagtgatattttgacatcacttagtccatctatgtgttttggtgaagttgatcgctagttctcggagacttgaaactacccaatttttaagtaaattacattatcagaaaagtgaaaatatacaattgtgaatttgactgttctgacttcatagctcttagttattgtgaaaaactagaagaggtcatgatggaatcaaaatcgaataagaagaacccagcgcaccatgccatttatgaacctaggcattgggtgcttattttggagattccaggatgtcgttttgatacctacaaggtgctagaacttgaggacgaggtctcttaccccatttttgaccattacagagacaatgcccggagcagaattggcatttgagtgattaaaaccggcccagcaccagggcaacctgggcactgggtttagtttccaagccttcgggtttgtgattttctccttgagttttcttgtatctttgttatttctaatgacaaaaaatatgcctagaacactttttgagaactgattagaaagcgatccaggttgacatattgtcaacctggacgttgggtctagcttcaggccatctaaaagttctgttcggtccctgaaaaatagttgaatcttaatgtttgctaaaacagagtatgctcaaaagagttctaaaaaaaatcctcaaaaacggcctaggttgacaaaatgtcaatctgagcgctaggccctagttctggcacccaggatgtgttatttcttcctcgagagtacatatttccccatttttaatgaagaaaaagaagatgcacgagtaaaattttgatctaatacttgaaagtagcctagattaacaaattttcaacctaggcgcttggtacccgggcaccaagtgttccaaatgcttaaaaatgaactttctttgaatctgattctgatgtcttaaatatgtcagtggtatgtctagttcatgtcccaatacaaagtttgatccatttgtactaagacggtctcgaaaactaaaaccctagctaagatgtcaacttgtgtgttgggtgaaaccctaggtgcctagaattcccaaggtgcaggttcatgtaatttcagctctctaggcctacatttagttgcttcatgtcttcatggtacagaatactgaaaaatagtgagctggaaacaattttttgaagtctgaaattcctttttggagttctcgaagtcaacctgggggctgggctagggacccctcctaggtcgactgctatgactcgggactactcaactccgagatgtcatctttcttgccacgtgataaacattgatatccatgttaccaaaataaagtttctaggttaacatcctccatctctgaaccagttcattttttgactactatactttttcagcagtggatccattttacgatttccttgggtatcagttggggcagtcgtggtggttggtagtcattggttttgtaggaattatttattgattctctcaatggttcattcctaaacgagataccctacaaaatgagaaatggtttccatgtagtgttggaaattgttttttgtatttgagggaaacccacaatagtatttaggggaatatgtaggttcttcctcatttctatctaaatttggagcctgtccatcaattgttaattttctttcatatatgtaagcatatctgtaattttcttttaaattcagagtaaatatgccagctacttgataacatgataatatatacatatagttaatacttaatatgatgtatgacaaacatatatataattaatgctttgaaattagttttcattatgatagttggtgtgtctaataggacatgttgtatgggaacaaagagaagtgcactgtattggcaactcatacttaaatgatagtaggtttagttcaaagagcatttttatttagaggtgctcagcactatagcgtctaataatttattaaattaaatttttaaaaaattgtgaaaaaatataataatataatacattttaaggtgcttgaggtagctctctgcatttttctaaataaaatagttacgtacgtcatcaaaaacttgaagggagacaatataaaatgtaatcccattcataggatatagaaaattatgaagccaggataatggtagaggtggctactaattacaaaacaccactacatattcgcacgacggtcatcatgagtgatgtgcatgagattatataaatcgaggttcaaaacacataagaaatgaaagtaataatttaatcacaatcaataataacaaatgtacatgtaaaatattaaatgaaaaatttacaaccttgtatcggtgtaggagcgaaacccatcaaaggagctaatcttctttcggtcataatcatcatcatcatcgtcgccatcatcatcatcattatcattattctgggatacattttcatttatgggtctcaagttgtcctcactcataatttcaccagcaatagaatcatccacatcaatagagaatgaggcatgatcaagggtactaaaagaaagtgatgtatccattgagaaaatatcttgagaattattattagcttctagtgactttgggggactatgcatatgccatttggtattccttgttcctagatttttttttgcccttcctttccatttctttaatcctttcacaacaaactctgtgaatacagctgtcctcattgacgatcccatctgacattcatgcattcattcaaattaatataagtaagttattatataaatatatatgttcatgttatgattataagttacacaaaataattatatttcacatacgtacgtacctgtgtgacaagagcatatagaggtaatgtcacatagccacatagtatttgaattgataatcccattgccagctttatcacaatgttttcagtttctttatggaagcatgacctcaacccaaatttgtactgtaattaataaatttaaaaagcatttagtatgtgtcttatatatacacagagataggtgtacatgtttatggtttagctacttgttttttattggtcaatttttattaggtaaatagcggcataagtacccaaagttttgagtttgtaagcggcataaacccaatgatttatttaatatttattggatcatatccaacattgctccatgaaaaagtaaaagagacatgatatttaattaattaaatatactcaattggtattattttcacatgacaacaatactggatccagcttcgttggactttactcttattttaaaaaaaaagtttgaaaaacacgcgtgcatatcataccgcgtataacattattatttagaaaaagaaagtagtataacattaacatcttattttctttcaacctaataaccctaaatggcaccttcaaattcaaaaaatactactatggcatccttttcttccctttctttctctctttgcacgacctaatggcaacgccaccctaagccatagacagtgaaaccctaaaatctctctctctctctccaaagcgagttgaattattggagatggtgagagatttgcatttgaaaaagtttgaagtatgaaaaatcttaaccaagatgtttgtataatttttttgtaatggtaaagctaagcacttgtttgttcatatgaattttcttgctatagtttcaatctagtaatataaattattgcatttataataattttggtgggtcctattatcacgtcaagcaatgcttgacatgaaatttatttccttctcacggcatttcatatcatgtccagtagaaaagtgacatgaaatagtttttatgtctagctttgatggccatagaaggagtttttgtaatagtgaatgttgaaatcccatacccacaaagactccaaaagacttcttttaacaaataattctccaagtttctcaaggtatttaaaaaatcttcaaattaattttccatttgctgataaggctttgaaatagatatcgagttgtgtgaaatgcataaaagatattttcgaagaagcagaagttggaagattataaaactgtgacatctgttgaggagtgcaatgcaatctaacaaaagaaattatcccccaaactcaaagctctaggcagtttctgttgagttttgtgcccta

SEQ ID NO: 219549 - DNA, 3302 bp, Cannabis indica
ttccatggccagaagggccatggccacccccagtatgcatgaccacgtttctcagaaagaggagagagaagagagcataggggagtcaaagagtcttttcttctttttttattgtcccctttttttactcttatttctttagccactctctctgatatgctttacatgatcaagtaaaaaaaatagttttcaaaacaaaaatttatataaaaatattttaaatctcaaaagaggtttattaaaattgcatttggtgtattttattttatttatttattttgaaaaagagacaggtcaatctctgattgacctccccaaaattcattagggaccctcacagagtcataatcgaaaatattttcaccaattggttgaaaagtataaatttaaactgatttatctatacaaggcattgtattacttacataataggggtactcttttggttccagaacaaacaagaagatattaaaattgtaacgctcgtgaaatttggtttctgtcttggtaatttctttcccggaaacagtataaccatagataattgtttgaaatgagcctggtgatatgaattgctttaggtgtttcgttgtgtttctgcaacttgtggccgattttaccatccacgctgtgttgcaaaattgctcaatccattcaatggagtttctgctgaagaccaagagaaaaagattatcaatggggaatctttcacatgtcctattcataagtgctgtgtttgcaaagaaggagagaataacaaagatccagatctgcaatttgctgtgtgccggcgttgtcctaagtcttaccataagaaatgcttgccaaggtgtgctgtatttgtagttagttatgtatgcttctgttttccctttttaactcacaattgtattatcatggtcctctatccatattgtagattgttgatgattgacttgcttgtattaggaaaatatcttctgaagacattgaagaggaaggcatagtaacaagggcctggacagatttactgcccaatcgtattcttatatattgcttgtaagtgttttttccattgggattcttttcttctttatgatattcttggaagtgacttgcaaactgatttcttctattttctgcacagaaagcatgagatcgatgaggatcttggtactccagtgaggaaccatgtcaagtttcctggtgttgaagaacaaaagagcactttcagaaaaaagagcactagtattggagaaaagaggcaaaagcagacagcagagttgctaacagatcggaagaaaactaagactagagttcctcccttggaaaaatcccatgaaggaagaacaactcatgctgaatccaaacagagtaagaagtcattttctgctgtaaaagtaggtggtaagaatactggaaaattacccgttggatcaagtatctataagaaagtaaaagtaaatgatgcatcaagagaggaaatgaattctcccatggctgaggaaaacaactcactgggtgataagctatacacgttatataataagaggtctggatcagtgaagtcaaggaagcgggatacatctgatgtcgacaaggcagcgatagttaatcctgctacaaaaagatcgagcagtgacttacctcccttagatgctgatagagaaaagaggtttctatatgtcccctaaagtcttacaatttctggttctaatattgtttgtgttgtcatcttgcactttttagttttttacatggaattttgtctattgcaaataatcattttagtatttgatgtaaatttactaatccagcaatgacttgatctaggttattagaattgatgaaggatgcagaatcaaaaataaatattgaaggtatcaaacaaaaatttaaagctccctctactcatgtagcctataaaaatttggcttcggaaaaagcagctattacgctgggaaaggtggaggtctcagtcgaggtacttgtgctgtcaaaattaaagttcaattggttgctgaaattttgttgattgttctgtcatttttctctatcttattacaagttttgttcgttcattatcatgcaggcaattcgagcagctttacggaaacttgaggaagggtccagtatcgaagatgcaaaagctgtttgttcatcggaggttcttgagcggatgtttaaatggaaggtctgttttcctgcaagtgtttcattcatttaatcatcttatttttttgtctttgtagtttttattatagtttttgatcttgtggctattattttgaatgctaaaatttctgcttcctgcttcctgcctgcttcttaaatatgctgcgtctaagatttgtcacattcttttagtggaaaatcatgcattcataattatgtaattacattattagtgttattttttggtacttcaggataggctgggagcatctctttcaccatttttacatggtatgcgctacacttcttttggtcggcattttactaaagtggagaaacttgaagaggtaatgtagtttcatttttctccatgccaaaattgagttcctagccaatttctattttttccacgtgactatcttgccatcttatcaatatggcttgctgtttacatggctgtacataattatgtgtgtcctacatttacttaaccactgaattgagaaaattggctgttattttctttagggttaaattgcggcataaatacctaatgtttcggattttatacacttaaatacctaatgtttatttttggtggcaaaaatacctaatgttacaattctcttctcctttttctaaaaaaaaaaaaaaagaaatctgtacctccacaaatcacttctctaaactctttcacattcaaaaaccaaatatctaaaccattttctcactttattacataagctaaaccagtatctgcactatcttctaccccttcaagttcaaacaatctgtttttttttttttaccaaaattgcttacgaggcagccacagtccctctcatctaaagctctttttttagctctgtaccctgacataaattggatagtggaactcctcacatctattcaagatgcaccactaagcatatctccatagctaacacatttgtaggaatacgtggcaagaagttccccactatttttgcataaaccacaccattctggggaaagtgtaacataaggcttccttcgttgaagagcatgaacacttaggtggcgtttggttggaggtaatgaaatggaatggaaagaaaaggaaagaaaacaatcttcattccattcttttgtttggttgcatgttaaag

SEQ ID NO: 219550 - DNA, 3947 bp, Cannabis indica
tcctgagcgaggtctaaacttcgagaagactctcacggacattcagccttcattggaaatctgaatacacatgtcctttaaaaaggagtctggtctcgagtttccaggtgagagaaatctcactataacacctccaactccatcttcagcaaaatggtaagactcaaaagtcttgggagcagccacagtgtttgtcttaccaatcaaggtaatatcaggtgtatcagaaacgccttcatcactgggttgattactttcgatgtttgactgcatggttgaggatgagtcattgtcattgttgtccactagcgcactcaaatggggagggagaacaggaactttaggtactaccaaattggcagtatccttaagagggcaaacctctccgacaccgggtaaagtgaccatcagaaacctgcataccctttcctcctccgtggccggaagttcttccacaacttgttcaactagtctcctcttaccaggaagttggcgtcgattctctctggcctcccaagcatcagcgatctccattgactttttttattttccattgttgcttgaatttatcatctaccgtgagtctcttttgaattatccaatcttggaaccacacaggcagggccgtggaaacggacatttagcaggttcttcatgtctcatccaattcccaaacataggaaacaaaacaccatttggatctttgatgactgtagggggtttgaagcagaatttttgttcatgcgatataactccgcatttaaggcagagttttggcagtttctcatatttatagtggatccacaaatcttttatggccacccttttcatgtagaatctagagaatatcggtttgtcgatatcgatagttgcccgaaaacgaactgtgcccataccgaaagacccgttctcaaaataaatataccttggcagcttgtagtttggggagactttactagctagctcttcaaggttagttttattccagtaaaacggtggaataccacttagccttacctagaacggagatttgtcaaagatgacctccgaaggggcaagccaagatggccaaggcataactactagtaatgcaccacagatgatccacgggcgtctttgcagaacgttccaagcatcctccttagtcgcaaagagaaatggagtatgccttcagcgtcttctttccaactccagcctttgaaggaggcccaggctttcttcaatgtattagcgatggcatttctcccaagttttcctttgcatacaagttttcccagcaatactttgccttggggttcctggttgtcaacttctcctggatccaatctgtaagtgagatcagtcgtggtcacctgaacagcctcctcaaagagatgacttagactactattagccatactactgcactacacaaagagacagagaaaaaaacacaaagagaccgagaatacaccaaagcttgaatgttaaaagtccaagattgcagaatgcaatattggtaatacccgataccggaaattctcctaaagagaaaaactcatctccttagagtataataatattggatacaaagaatcattttaatgaaaactcatctccttaggtttctcagtgttggtttggcggctctgtgttaaaagtaattcataaaatgatatgattattaagcattaatgacccatttattccgaaatccttcccaaaatagaaaaacaaactttctaaaaacaatttaatatttcctttcctaaaaaaattaacaaattcctttcttatactaattcctaattaagcattattaatatacatattgattatattcaacctatattgaattgaaaaaatacttaaaaccaaattcggtattatgacaaattgttccttatttattgtgtagaaaaacagttgtaaactttccaaaaaaaccgtatcctttttattaccataaacacctttaggataatactttcctattcaatttagggaacaaaatatattgcataataatttgactttccaaatataaatgatccaatattcctcttcagaccattagtattccaccaccttttattacatgatcctagtgattcttattcttcaatttactaaattaattataatattagaatctgaatactaaattccaaacactttccttttatgctaaaaattcctaaaaatataaaccaatacatagctaatagacattatcgttcaaagttaccctcttttaaccttatttcagtttaacatattcttaaaacataccttaaccaaacaactatatattccgactaataaaatttgtaaagagcattaacttattaactttaaaatattattgtaccgaaattttcttatacatccagtacctgaaaacgtgaaaatttaaacaaactaccctaaataattaggagcccaaccatataataggtgctaaagccttgtaaggcgcccaagccataaataatggcacaaatagagcaaaatcaatataaacaaaactataacaacattacaatataaactattatattgaattacccaaaaacaaatgtataacaaacaacaagatgagaaccactcaccaccttttcatccttcaacccaataccacactagccgaaactcatcacactagctcaaaactaaattaaaatttacttaagattcatcacactatgcaaaacatttaagcagcaattttaataacagggacctttgactaactcaaaaagaaaccagcataaatttccaaataaacaatctgaaaaaataccaaataaacattctttaatgattcaaaactaattgactggtattatctaaagtcacatatcttacatatatacaatctatgacacaaaataaaataagaaaactagagaaaaattgatactatattatagatatccaccgcttatgggcaaatggggtctcacggtccataaatctttcaaggtttaaagttttggattcaaaaaatatttctaaaaatcatttctcatatgaaaatctaaaaaaggaagatttaatttatgaacaaaactcaccacataatcaggttttccgttaaaaccaaaaggatctgacatatcattcttctttacccattactggattgtcaccaccttcttcattttccagaactagatttcttggtcctcatattatgaacagcttaaaatataaaaaatgcataaattaaccacataaacaaattaataagggaaaagaaaacaataaacgacagggaacaaaaaatcaaattaaaattaaccaaacactatccctctgatatcagaacttcaaataacagagcaaaatgcgatcttagatacatcctcagcagatgctttgccagcgtcaatggctacgataccggcgctactaacggcaagcaaatgccatcatggatctggttttctccatcctggatctggtcttctccatcatggatctggtcttctccgtcctagatatggtcttcttcctcctggatcttctcttttttgaactcacaactccatgtttgcagtgctattagactcacaaaattcgaaagcagacgcagacagaaagggagggacatctaggcctgagaaagcggggcgcacgatatcggagccggaaaagaaatcatgcatggcgtcggagccatccctttcttaatcctgcccagtttgccaaaatttttctttgagttactgtattcagggttactgttaggttatttttagtattaaatttaggttaattttagcacatttttctgtttagtttaaattatgtttggaacatttttacgcttttatctttaattttacagatttaaatagatgaagagttagaaatattagcagaaaaatgataaaaaatcacatgaaaataatcctggtggaaataatcagaatcaaattcgaaaaaaagaataaaaacgtagt

SEQ ID NO: 219551 - DNA, 2811 bp, Cannabis indica
ccaccttcaacctaaacgaaccccaaaattaacttttgagcttacaaacccaacccttcagcctccctcgatctaagaccaaaccacccttctttgaagtttctctttcttgccttgcattgacctcgctggatcttctccctctcccgcaactcttcattaataccactacagttggaggggttcgatggttcgtccgtaagttcattgtggtctggtgggttcatcgtaaaagaagaagaaggaacgagagaaggggagatctgatggttccagtcgcagagcacttaacagagctttttgaacggaaggggtaaataggtaacatgagtgaggtttagaaggtttaccactaaaaaaatcaatttatgtggttaagtgtcactaataatagagtttatgtagttttgccgccaatatcccttactaaaaatggccacttatatacttgtgtacactgtggtatgtacattgtcacttaacagagtctattaaacagaagaggtaaatagctaaaagaagtgaagtttggaagattttactactaaaaaaatcgatttatgtagttaagtgtcactaattataaagtttagatagctttaccgctaatattcttaattataataacatttagatttatttgcatgtatttttagacttattatttgtgtacacaaatattaattgtgtagctagactatagtatagtattataccttataaaaagggccaccaaccatggtgacaaggtccctagttgtctgagcaaggatgtcagcacaagagacaatgccagggcaagatttctcaagagtagtcttggcactagcaacaacatcaaatgcatcacttacgagggaatggttaatgtcagcatcacgttcagtgtccttggcttgatttggagatattagtatagaggcatcacaaccctcgaccatgcaatcatggaagaagagacggagagtggctggtgcattaaggggatgtaataattgtcttgattcaatgttgtcatgaatgattttctcaaattccggacatgttttgcgataataggcaagagagagttctgttgattcgacgatgacaaatgaacttatgaagagaacaatgagaatgagaagagcttgaaaatccatgaacaagaaaggaggaatttgagtttgggttaagagacttgccaaactctcagtagaaataaaattaatatgattatatagaaaagaaatgcgtttaaaaagaaaagtgtgaaacatgtaatacgttagaaaatgtgaggtgatcaaaagtatttaaggttgtgaattttgttagtgggagagattttaggattgttattttaacctttatagctaaactaaggtacattttatatggaatgttttataaacgttctttaaagtttagagggtaaggtttgtcttaatcatcaattaataaggagggtcgtataataaaaaacagatccaaataaatttaaaaattaagctttccatatttcattagataattattcacaatccttttataaagataaataacaaattattggtatatattagtttcaagaacaagatttcttgaaaataaaaattaccgtgccttaggatcttcaaaaaagaaaactaaaagaaatagagacaatgatgagaacccacatagcttgacaataggaacaagaggaataagtcacaccaataaaagtactcattgttaatcacattttatctaatatatatttaactataatatatgttataaaaataaaatatgcaagaagttatgtgatcatagatatatgtatacatatatattcagctagtattatacacaattttgaatacgctagtattatatacaacagttttcacaattttgaatctactttcaaaaatatatatactattatctaataaataaatatttttttcttggctaaaagtttgttgtattattactaaattacaaatctgctaataaaatagcataaagactagccgggacaaatctcccactaaatcaacgacctaacaaagaacaagcagcacgagccaaacaattggtcgccttgtttgcaaatcatttaagaaagataagagacatcgtttaaacaaaaaagtagacgtttacaataagaaataattagcctaaatggagaaaatatttggagagtatgacagattacatgaacaactacttgacaatcagtttcaagaacaacgtgagaaagattatgatgtttgatctagctaagaacctttttgactcccacagcttctgccatagtcagttgtacacaaccaggcaacaactttgaatcgacttcaatgacatttcctctactgtcaggcgctacccaaccaatctcaaagctaccaatcccactaacaacagaagcatccacattgatcttaatcataattttaacaggtaaaatccaatactcgctactaagaacaaaggaagaagtagtctcgcctacattagggtcatctttttgagtatccttccattgattaagataagcaatagtagatgaaacaacttcattagcaacagaactcttaccttggcaaattaacccattacaagcacgccacaaggcccaacaaatcatcgccacttgttggtaccaaaatggtacgttttatatttatcaacttgcaagcgcacgaattattattgtagtgtagagattgtaaagaatgaagtcgagtccatgggaattgtatgagatcgaagaaaattcttatttaatctaaattattaaaccctaacctagtttcgaaaatgatgagatttttagta

SEQ ID NO: 219552 - DNA, 2917 bp, Cannabis indica
tttttatagtgcctctaaaaacaagtgcaccaatcattctattttaataattgatacactatcatatataaaaaaagttaaggtgagagaaataaacatatatatgtatagaaatgaaaatagaatgtaattaataaatttaaaatgtataaaaaaaattgttagaatggtcattttactaaaataatagaaaatttattccattaaaatgatattgtaatattttaaaatacaaccaaaacaagatataatgaaataaatactatttctatttccattctatctgatttcattatctccaaccaaaaaactacctataaatgtcacaaagacaaagtgtgttgattgatacacccaacggagtatatgaacaactaaccatataataatatgtgtatatatatatataaacataatgtgttcatcccaaaggttcttatacaaaatttgggtttgatgcagtgtacaagtacatgtggatataaatagtgtgtacatgtgtgtgttcttatcccaaagtcctattatatatataaatatatagattgtatttatagagaacaaatatattaggaaatctttgtaaattttgtccaaacaggaggcaagaaaacgggtaaaccggaaaaagtggtttcgaagttcataaacaacacttaattaatattaattaacctatatatatacttaattatccccttaaatataagagattaattattaatgatatatataagtacaagacaaaaacctagctacctctcttgatctatatatatatctagactaatatatatatggtttgatattatcagacattggaattccaacattgtcaattagataaattaaaacacatatgcaattcattattcaaagcatatgcaagatatttataatgatcatgacaataattaataaattaaaatctcatctccatacatacttaaatagaaaagagaatttttatgtacaattaggtataatttttatgtattgtaattttttttttaataagactacataataatatatatatgaattgaaaatattattaacataaataaaattaaggagaaatttcaatatatacataatatatataataattgattattattattattattttgtgtttgggaaaaattgcataccgggattattaatgaaagcattagtagaaccaaacatattcaacggtaattgatgataacttgaacttattgtactacttgatccaacggtcccaattaatccacgaccacctccatcatcaacatcatcatgagatttattaacactaacaaaataatctataggcaactgctgctgctgatgatgatcaaacccttctccggcggtggtggtccggtcaccggcgccggcaacaattttattactattattattaattatttgttgaaagccttgatcatagagaatacctttgaacacgtggcctcctatggtcacagccgtctgatatgcatactgatcatgattttggtcaatcccattgacgttgactcgtgaactcactcgtacaacttgaaatgtcgccgttgttttcacctccgccgggaaattttgtgctaattcttcttcttttccaaaccctagaaaaattaaaaataaaataaataaataaaaatagctaaacctaattttaattaaataatatttttttttaaaaaaaattgtgtatgtactagaagctatttatataggtaatttctttttccatacaaagaaagtagtgaaattgtcagaatttatatatatataaacagtatatatttatatatatatatatagtactcgaagagtattagatcgagagagaaatgggaaattaactatatatttatataaaaaaaattataatgctttcactgtattgtttggattttcttcttttgatcttcttgtgaatctaaacatatatagttatatataggtaggtgtatatatatagctatatagctaggttgagttgtgaacagtagaaaattacttccccttcaaataggggattgtgttgtattttttttagattatataatacatgatttcattcttcatatagagattttctgtacataatttctcatatatctcttttttgtgaatatatagtatatatatatagtactaattaggttgagtaaacagtagtagaagaagaagatgaatatgcaattgttgaaatcgtaccactttcccttcaaattgggggattaattgtgtgtgttgtatatataatatttagattatataatacatgattttcatttctatatgatttttcttagatatgtatatccctttcttatgatgaatctaaacatatatagtattaggttaagtaaacagtagtagtagtagaagaggaaaagaagaagaattatatgcaattgggtatgtatatatatataattcatatattttatgtttttatatatatatataattacctggtgtagaggaagatggtattggtgttgttgtaattgggtttagaatattattgttattattattaatagtagaagaagaagtgatgagatgtgatgatctgagtcttttggtagtgttgaaatagtaatactcatgatcttgaatattttcttgatattgattaagattatgatgatgatgatgatgtcttcttctgtataaaggaacccaagtgctcttaatgtgagtttggcattgaaagcctttgctcttacaacaagttctacatctcatataaacacactctttcttagcttggtttccacaatcttgacatcttgaacataaattcacttctctcatcatcatcatcctcatttcatttcatattaatataaataaattagtgtaacagattactactcatctttttattctctcttgatcacttttttctatc

SEQ ID NO: 219553 - DNA, 2231 bp, Cannabis indica
  modified_base (2130)..(2130): a, c, t, g, unknown or other
accattgatattgacttagaaagatataactataagtttatgatatcttatctaaaatcaatatcggtcacttccaatgtatactccatacatccgatactggtaaatgctaatctgcaaaggacataatacttatccaatgtgtatgtataccttgtcgctgattatcatgccagtcttaatccaatgaactgacaaattaatcatgggaattaaacttttgaacatataatcatgattatattcgactgtgctgacgacactataatcatgatttgggggacttaagggcgtcagcttctaagggggagtgaatctccttgtccgttttttgaagagagataaaataaagggtgatatgagaatgtgctttaccaaatagtcttatctagttttgagtgagccattctcatcaaacatgcagcaaagaactacatagcctacaaaataactatgaataatattatcagttccctattagggaacatgagaagccaaaaaaggaaaatgtattttataattgatgttgttacataaaacctacctggttaagacttaaatagtcaagactgaagatggaaagtccctatccgtacaaacatccacacagagacttggagggaaaatgtagttattctaattttagcccacatgatgtggcaggacaatataggcaaggttgatgccatgtggactatatcttgtcagctagaaggacaagtcaccatgcacacgtaccacttggcgaggagtccaaatagttaagcaggacaaataggtaacgaattggccaattaaagcggtctggccgaaccacccctggctagtcatgttgccaacataggccgacaagcctctctcctggcaggaagtttttgtgcctctgtagctttcagcctggacaacacttccagttacgaattgggcttcaacaacccataaatataggagattagctttagttatttacctattctttgggactaattaacatgttattttcttattaattgaatgtgtaacatataggccatatctcttcattttaaaggatatcaacctacaatctcttgtatgctctctcctatataatgacgcactaaacaaaacttaaaataattaagtcttaagctctgaagttgtatgatctaagttctagactcttaagttctgaaaccctagctctccctctcttttacatgccaagagactaagtctccctcatctcatctacttgagattttcctcttattttcactattgtagtcttaagagaaccactcttaaatccacaatagttgtgatctaagtggtgttatctctaatatcaatataaaagagagtaggttattacccgctaactaaaggggttgaacctctataaaaaaaatgtgtcctttttgtttgcttattctaattgtgtacacgtggtgatttcaatcataaatacgactccgctatcagttggccaaatttgaggtcaacaataacaaaatcaacatttaaccaaatttgtaggaataaatgtaacaaaaatataatgtatagtatttaatttgttgaaaaaaaatttatgggatataattggataaaataaaaaacataaaatatttatactgctaatatctatatgtatacaacaagattgattaagaggaacttaaagtatatataaatatatttacattaaatatattacaattaatttcaactgcatatattatatttatttaacaaagtttcactgtttgtggtcgatatacattagtaatgactaacactaacgaataaataaatcaaattaggtttactaataattttttagacacaatataattgtgttttaattaaatatgtgactaaaatatagtatttagatacaagttgttattaattgtatttttgttaaaacatgcattgtgacgaaaaatacatctagtcacagcaaattgtgatttttgtgacaaatatatctttagccacaaatattataataataatataagaataataatttataattagtcacaaataatttagtttttagtcacaaattttattgtgactaaaagtaaaaaatattatgatgaaatttatgataaattaaacaattcgtacaaaaaaaaaacnttaaaagataaagtaattaagagaaatttagaccacatacaatctttttttaaatatacatttatactttgagaaggtaaattttatatttataccttccc

SEQ ID NO: 219554 - DNA, 5971 bp, Cannabis indica
ttttttttttagttataatcaaaatacaaaatgtctttgttttggtcactaacgtcaatgaagggatgttaggagctacctcaacattaggggtgcgttttgttgggttaatgaaatagaaaagaatcaaatttcattcatttcctatgtgtgattgcattttaaagtaatggaatataattccaatggaatgacttctccactgttttagtggaatgactattcccttttaaaatgggtagaaaggtcattccaatgcaaatatatttatatatgtatatctactttttatatgcatattaaatctaattccattcctattcatatattttcattcattccaaccaaaagtaccctatgagtaccaagatttgattccaaattcaaggcttatcatgacttattacaatttgcgactgtgtcttgagtatcctttatcaataaaaccggtttgatgttttgtttattagaaacaatttgcaactatttatattagagcttcatttaagagaagctgacatgctatcatcagaattctcgcttttatattccaatcaattcaagatcaattaatttgaagcattagacttcaatgttgataccataatgatgtaagtttctcttatgcttttgtttgaaaaaggtattttattctctcttaatgaattgtagggggataagacagactattctgtaaaaatacaagagttgcagaagcagcttgcaatggacaaggaagaggctaaaaaactgcaggtagcaatcgaattaataatttgggcttacttttaatacaatatataatttttttaagcggagaaaaaatatctgatacaattttttttatacatatataatttaagggggaaagaatattttcattttataacaatagctaaaaatattgtcttcatttgcacatattttatttttacatatttgtcaaagaagacactggtgaatgtaatttgtaggatataattttctcttcagattaaactcgtgcttagcctagctagctagttatagttatgattttcccaaggttaacttaatactacaggttgacctctattcttatttctatcttctagcactaagcttaaggctgcgaaattatatataagcaaatctatatcaggttgacagggacaattttcttagcctagcattggatggatattcacgctctttggttgtctgtgacaaatatgatgtaaaagtggtatgtacttttttcacggatactctggtattattgccattttcatttatattatacactgctgtaagtatatgatttagtggaaaggactactcataacattgtcattgttgtaattgttattcctcaagaaactaactagtgtgcttacagatatttcgactggtttccctgtggttcactctatctgatagacaagatatcatagataacatgctcagcactagtaatgaggtacacaacagatgaaaggatagtctttttgttatatttaagatatttgagctattaaaatactaaaagtctagtgtaaatatcctgtacaactaactaactacaagttatgatctccatttgcttatcagatctttgaaaatatcacaaatgatagtttgttgctttttcaaaattatgacaggttcagtcgtacaagtttatacctctagtataccaaattgcttcaagaatgggtagctcaaaagatagctctgggcctcagactttccaggttagggtttttcttttcttccttttttattcttgaacagttctttagtcctaatgctttttaaactttggactttgcagtttgccttggtttctcttttgaagaaaatggccattgatcatccataccatacaatctttcaggtattgatttttatgtttcttggttgaagttgctagaagtttatttgcattgattgatttccttatctatttctcttgcgggatggggtggggttacctctagcttctagcacttgccaatggtaatcgtattaaggacaagcaacgcagtagaaactcatttgtggtggacatggataaaaagctcgctgcagagaaacttttagaagagctgtcagcatatcatagatctattatcagacaagtaacttcaattttatttcattaagtacttttatatttgatatatagtttcttatctatatgaaaaagggttgtttacattctcacagttatatacatgtattcatcaatgaatgtagatgaagcaaatggtggagatctatatcaaactagctgaactcgaaacaagaagagaggttggtgaaatagaaaaagtggtttttttagactatttaaacacagtagtctaattatgtttatcataatggaaaatcttgttgaagaaaaatgttaaagttttttacagacacaattacgtcttgatattaatatatgtttctgcctgtaaacaggatacaaataaaaggattaccctacctagagatttgcgtaatctcaaaccattggaacttgtaaggaagaacttttacctggaaaaattccttttatctgattactgaatattacacagaacttctgcaaatgcatttaagctatgctgattagttacagattaatttgaatcctgatttgcttttaggtgcctgtagtgacagccacctttccagttgaccgcagttgtcaatatagtgaaggctcttttccattctttagaggattggttgattcagttttgtatgtcttggacttttgaaactacttcacattctttctatatgtactatactcactagttagtttcggttgatttactgcacagggtaatgaatggtataaatgctccaaaggtggttgagtgtatgggttctgatgggcgtatgtataagcaactggcgaaatctggaaacgacgacctaagacaagatgctgtaaaaattactcttggttttttctctctatttgtctaaaagttcctccacataaattttctccaacatataaaattgggaagccttaaatactgatgcagaataatctttgacaatttactgaactcatctagtcccttttgatatcactggtttactagtggtttcttagtatcagttattatgaaaggacttgctagtcattgctattggatcctgtaatataatcccctaaacttttcttatgggaattccaaatattttttggaatggaagttatgcatattgcatgtgtgtgtgtgtgtgtttattatgtatataggaacaaattatgaaacctttctagtgctattggatttatattgataaaaatcctcccaatgtttacaggtaatggaacagttttttggtttagtcaacacttttttacaaaaccatcgggacacatggaaaagaagattaggggtgcggacatacaaggtattttcatttcaattatatgcacttttcactttgttgagatatggtattttaaaatagaagatctgggtgcttttgtgtaacaccaagcataagcctcaacggggccctttcgcccatgactatcttggcttcatacatgacaagaattctttgaggaacacataaagaatcatagtgtactatgacaatggcctcattctcttttttcaaaaaaaaataaagaatcatagtgtacaatacagatgagtaatgggcacatacacgagagccaaaaagtccggccaaaaggaaaaatggttcaatgaagacttgaagcatggttatagcattttgtctttacatgttaattctgaattattaatttaatgatataggttgttccttttactccaagtgccggtgttcttgaatgggttaatggtactcttcctcttggcgaataccttatagggaggtacgattttcaatcttatagcttttatttaacaatgctctagtggaataactgtttcatccggtcatttttcagtatgaggactggaggtgcccacggtcgatatggagtaggtgattggtcatttctcaaatgtcgggaacacatggcaaatgtaaagcttcttgtaatctttataacaatagctgtctgtactgtgtatgtcctgttttctaccataaatatgtgtatcagtgtgtgtgtatatatataacccagtaattattcacaagtccttagtttcaacattttatgtttggtctatccatatttcacttcatttctttatcagatttgttggctgttgtcttcacgcataataagatatgtcatttgtttttgctctgcttccatattaccagtttggttatgagcgtattagtttggagaaacagctattaataaaatgtattttactaatgcagcctctcataggagatgactgtagttaaacattgttttctattgtcgacacatgtatatttagcaaaattattaaaaatactggtgaaaatatagtgggaaaaaatgtgcaaccacacacataacaatgaaaacgatggtcacgtatctgtagataaagaagtttggatgtttaatatattctccctataatactctttcaaaatgttcgttttaacacgcagaaagaaaggactaaaaaattagtgctgctttgatgttttgacaggcaaaagacaagcgcaaggcttttcaggaagtttgtgagaaattcaggtttatcctattctttatggtaaaagtttatagtattcaaaataggatttctaacatgcattataatgtggactgtgcaggcctgtcatgcattactttttcttggagagatttttacaaccagctgactggtttgagaaaagacttgcatacacgcgaagtgtggctgcaagttcaatggtcagtgctgtcatgttatactattttttttcacttgtagaactggcacctttcctaagaaattgggatgtaagcatgtattgctgttttttcagaacatgctctactgtgaaagctagtgcaacctgattatattcaatccgtacctttatgctgccttatcctaaactaataaaatatatttatatgttgcagtaactgtttagaaacattaatatgcaacgtgcacggatagggtatatctgttattccactatttgtttaaccaactaatatgtagttataaacctgttgtaattagtaaatattgtgtataaagtaacaggcaatgaatagtgatgtgattgtggacgagtttttctctcttacttttttctctgacttgagaattgtgcccatgcatacgagggggttccatggctcttttggccatggtaagcaccgaaaccccactggttttgggaaggaaaatggctattaccccactggtattggccttagaaaacactctggatccggtagcgactaggggtctcaaaaatattggagtttccgtacttcttataaggtgtttatgatcaccttatcgaatgatggaggcttcattagaatatgcgaaagaactcgcctctcagggtatgaaattgtcgttacattggaagcagcttcgtggttgacagatattttagaagagctgatagacagggaggagatgcagaaagttaactacaagagatcatttcgtaacaggtccaacagttgctttttggaaatatttcataacaacagggggggtgttcatgaaggtatcagtccttaagaataacaagatatcaatggtgatcatcccggaggaggaacacgctaatggatggaaggattttgcacgatgcctcaaaggaacattaaaaagagactgccagctgaatatcgacaaagtgaaattgtccaaggaacctttggaggagcagaagcggggaagaggaactaagcaatcttgggcaagtattgtgaaacagaataccggttccgcaagcaatgtttaaaaaagcgtttttgaggcgcgcctaggcgtttgaacagtgcctcaaggcgtgcgccttgctgagaagaagtgaggcgtacgcctcatgtggtgaggcgttgagt

SEQ ID NO: 219555 - DNA, 5027 bp, Cannabis indica
ttgacaactagtgctgacaacctacttaagaactacaaacgtaattagaaaaaaaaaaaaaaaagttaaaatatagtatatatggtaaattttttttttttttctgtgatactttttatatgattttttacaagtattagctaggatttgagttgggtgtaagataacctaactgaactcataaataaattgaataagacataaatactaagataatgctccaatgtggtatactattttagatgtttctttaccgcccggcaaaacaataaaagaaaatgttaaaaagtggttgtagttgataaaatatataaataatttattaatatcaagttactatcattttgaaattttaacaacaaaataaaaaaacagaggagtccaccttcatcatatgtaagccatgtggtaaaagagtccccactagatcgtttcagcagattctctaagttaatggaaagtgaaacaatgaaaaagacaatttaaatgcttttaatataatttaaatcatttagggctcctttagaacgtcctgttaagtcatattgtattgtattatattaaattagattatatatcatatttttatataatactatgttaaatttttatttttactaaaatattatatatttaagtgtccataaaagttaataccacatataattttacataaaaatattacataaaatacaatttaacataatactatactaactatgtcgttttgaccagtgaaattggacaaaacttatcaccctttttttcctaatctttatacatatttgaaagtggagaattttagactaccaaagttttgttaagaaagaatatatatattaaaaatagaaaaacttaacattcacagtggttggtgtcttcaatcaaaaatctgggaccctttaatattattcatgggataaggtaccccaaacagagaaaagaaaatgaataaatgtaaagaggccatttttagactagatgtaagtttcatacattttgtaaaaccggctacagaagactgaaatcggtactgtttgaacccaaaaatattaataaggcccagcctatcctttaccataaaaaggctgagactcttatatatacatcttttcaagaacaaaggttaaaattcagtcttccttgctatccacatgtcccaccggtttggatacggattctgccggaccaggcacagctccttccccagcctgcttggaaatgtaacgtcaataacaataaaccgtaccgaatcattgaatgaaaaataaattactaaattatatcagatcacaataagtgaaaaggtctaaaataaattactaaactacatcagaaaaggtatagttcgtgcagaagtgaatagcagcaagcaacagacaacaataatgcaatatgaccaaatggagataaggggtatcatgtgatagacagacctcccattgcaattacttaatacttattctaaacatgggaggaaatagcaagggctaactaggatgcttagttagttgagagtgtaataacttgtatatgaagctgtgaaacagttagaagaaagaatgttcaggttgtatgagcttctgctcagtgcgagatggtctggtctcccaaaaaccactgttccctgttattccttgatttcaaaaatatctcttgagcacatcatcatttttgctaatctttggatataattgcttaacatacaaagaggagaaaatgaccaccaaaagtaatatcctgtatgcagaggtaattactttaggtaaggtttcctcagataaagaatcaacaaatttctaggcctctattacaactttcaaacctatattcctttatctatgccaaaatcctattgttaccctcaaggttgaacaaatggattaagattaccacctcgcatgaagcaaataagcaatatatttagctacataccaaattctattaattgcttcaaggtcccgaacagaaacattcaactatttagctttaatctatttttgtgacaactatccctgtatatcaaatttagcagtacattttctggatgcttagccacagtgtatttgtcaattttctaggtcacatgtctcttaagcctccaggagcacatgtaaaattcaactacatcgatttaaaatcacattgttttttatactttatagtacacctgtctaccatgctttaatcactactgtcgacagtgctaaaatcagccttaaatcacaatctagtatcagaaatttttccaaacagtttgaatagtaatcagaccaaatgtagtattcaactacagccagttagaagttaaaaccctcaacctctcgtgttacacatttttaaagaactttattgagtagacaaggcacagtgcccaaaactcaaaactctcaaacaaatcaaaatttatcatcaggagcaatcagtccacaacattcaagtttccaactagctaaggttagcgtttaactacaatcatgtacaatctctacttcttattttaaggtaactaaccatgaagaaactcaacattgaaggaataaaaaacccacccggtggaatgccaagctacaagtcccacgacataagagcgagattctctgaagaacaaaggttgtgagtggccaagaaggcccacatagagatttgtgacctccgcacgaaatgtgaaggttgcttaaagtcgaccgataggcaaaagagtctcgactagttttgatatgagtaagcaactgataggaatattataaagctcagaaccaagccctagccatcattcgtatatagttgatgcttcggcaaagtttgtctattgacaactgaatggttgacctagttcaatttgatccattctgaaagcatcttccaaactccaaagagtattcccaccttttcgctttccaagcttcaggataaactttgctagctatcttattgatttaatgactggctgagttgctagctatcttattgatgaccaagtatgctccccaggagggagattcctaatttgtgaagaccctgaaccaactataaaacaattgaaagtcgttttgattctaaggattcaacaacttgaaagagaaaaagaagagcaggccgcgagaaatcaagaaaaaccctcctaagcaaacctttacctaggaaattgagtgttttgcaatatgaggatttagcatcacaggtgagagaggaatcacaatttagtaatatagatattttgtggatagtctattgagtctcaagcaaatcaaatatgtagagagcctaatcttttatagcattagagattgtatttgaccatctttacttctacaacttagttaagtaagacagacttggttaggtttctacctcatggacctgccaccacatccctttccaaggattcattttcgctggtttattgccagagaggcttttcattgccaagctctcttaaagggaaaaattgtcatcgctccttgctactattccacggaactaaggagaaacctggatactcttaacttgtactttgacacttctgtaagtgttctcttcttgtatggatgacgattacatgcctataggcctttagagtgcctgtgggcttgtagatttctaagtcatcacagtgaagtttcttaaatcaccttgttaaggagtcaagctgacacaagtgcaagcagcagagatctatcttatagagtcactgaatcagaccgatctatcttatagtttcattgagctgctctactgacgtttgggcgagcatgaaattcttcttttgtcttcccagcctgccttcagactaactaagcgcatctctaaagcaaggcgctctattacggaaggttttaccttgattaataatttatcaagctaataactaattatattgcccacaaaattgggcccaaataatccatactgtacttctatgacatgataagcaaacagatgagacacagctttccactacatccacagtgtcacaacaattcttcacattcatacctcaactctcttcatatcattcacttaaaatctacacaattatggtgttttttatatcttcaagacaaaaaaaaaaagtcccaaaattttcaaatgtacaaaacagaaagctaaaacccaaactttctcagtacaccgaaactaacttttcacaatttttggcttcaatttagcaaataaccgtatgaagaaaaccattaaaataaataaatgaagaacaacataaaaaaaagaggggggggcagtcactcacttgaatttcctttttagctgctggtttgaaaggacaagcggcaggagccctctccggccttctgtactcccacccaagaagcctataaacctttccctacaaagtacacaaccaaaattcaaccccaccaccaaaaaaaatccagtctttgtaaacgattagagatacataccaaaatcaaattatgaatttccccatgatcagtttaaccccaattattaattttatttttctttctaagcagaaaagaaaattgacccagatgaattgaaaagaatagatggatttggagcaacataccataatgtaatagaagagaagaggcagtacgttgacgatgggaacaaggaaaatgggtatgagacatgccaagcaaacctagaaaaaaattgcaatcataattaaaaggcgaaaatttgatcatatattgagaagaagaaagcataactagggttaaggattaccatttttacaaaatgaagaatatgaccgagaaggacgaccgatccgcaatggaggttttggtatttgcgttgagacgagaaagagaagtcttcttgcgttggtggttggtaccaaaaaagaaatttataaatacaaaataaataaataaatacaaaatataaaaatataaaatggcctatgcaggtctcgaacctgcgaccttcgcgttattagcacgacgctctaaccaactgagctaataggcctgttgttgagtgttacaagtatttcaaaatacttaacagtaatataaggcttatattgcaaccat

SEQ ID NO: 219556 - DNA, 4764 bp, Cannabis indica
gctaatgaaatttttcattgatgtaccattttgacaaagcaactttgccaaaataaccacattaaaattcaactttgcgaccataatgactataatgactgtttaaatggtcgtcatagttgtaatttttgatctctttacgaccaaaatgattatttgtctaatataaaaattttgttaattgtacttttttttttttgaattagggatttgtcattcaatgagttaagtggagatataccattttcaatctcaaagttaaagcaactggtgtttctgtaagttttaataacactttttttttcatcattttttctttgttatttattgaaaaagtttggactttgttttagtaaataatgacttgtgaacttttctttccaaatggggtttttgtttttcagtatattgaaaaacaacaagttaattggaccaattccttcaacattatctcagattcccaacttgaagattttgtaagtttcttaatccattcatgtttgattctttcatttctttaataatgttcttaattatttgtctaatcttaacaactatggttctcaagagacttggcacaaaataatcttagtggggaaataccaaggcttctatattggaatgaagttcttcaatatctgtgagtgaaatcagttgttaaagtttcgtccttggcgatttgatttgatttgattgtcggttattcttaactacattgttgtttttcgattgtgtagtggtttacgagggaacaacttggtcggtactctttccccggatatttgccagttaactggattgtggtatttgtaagtatatccaattctcgaatcctttacccccgaaaatactttatttttgctcatagctagaagtatctaacatgttcatttcgagtgatttttactatttggatttgattatagaagctaacattcgatttttcccttattgcagtgatgtgaggaacaacagcttaaccggtagtattcccccgaatatagggaactgcactgccttccaagtcttgtaagtatttcacccgattcgagagatcaaacatgtgaaaaataattgtttattgagcaatttcttatcctttgatggcttgtagggacttgtcttataaccagctcacaggggagattcctttcaatattggatttcttcaagtagctacattgtatgttcttgtagtatttgtttcatcatttgttcttgacaatgttgttatctctacccgatttgaaatgggcatttttgtctgtagatcattgcaaggtaatagattatcggggcatataccttctgtgatcggtctgatgcaggcacttgctgtattgtaagctcttacactctttgacttgagtaatcgctatttttttcttcaattatctcatgcttgtcgcgtcttttttttttttgcaattcatcagagatttgagttccaacatgttaagtggaccgatccctcctattcttggaaatttgacatacacagaaaaaatgtaagtcatacttttcgaaatttttttaaggttgtccctttatgttacttggttttaagttgtttatcttaaaacatcacaggtatttgcatagcaacaagcttactggatcgattcctcctgagctcgggaacatgacaaagcttcattacttgtatgcagactcatttcgatgaaattgttatgacatgtttgaagacaatgtgcttacttctgaattcggtttttcttgttctttcttttcttttttcagggaattgaatgataaccatctttcggggcgtattccacccgagcttgggaagcttaccaatttatttgacctgtaaagttctcttactatgataatcttgtttcattactatcttcttatgttaaatctgatttacttatactatatcgtttttagaaatgttgctaacaacaatctcgaggggccaatcccggagaatcttagttcatgtacaaatctcaacagcctgtgagcatctatctaaactcagtttctgttatgcttttgaaagtttcagtttttattacaacatggtttgaaattttatgtttttcccccaaaatctcagcaatgtgcatgggaacaagcttaatggaacgatttcaacagctttccaaaggctggagagtatgacttatctgtaaggactcttttgtcgtgttgttaaccgttatgttaagctttcggtttctaattctgttgaccatttgcagaaatctctcctccaaccatcttttgggtgccattcctatcgagctatctcggattggtaacctggacacattggacatttccaataataagataactggatcaattcctgcgtctcttggcgatttggagcatcttctaaagctgtgagtttcaacaaattgtttcaaataaagcccttttgcacctttgaattcttttgctgacacacggtattcacattttcaggaatttgagcaaaaaccatttaacaggaagtattccagccgagtttggtaatctaagaagtgttatggaaatgtgagtacattcaacaattttgagtttatgctatttttgcttgttttgttatgtaacgcttatttcgtgtgtgtttgaattgcagagatctttcgagcaacagccttgcgggttccataccaccagaactcggtcagcttcagaacttgttttcactgtaagttttcatttgttgatttcattgtacttgaccgagactcattgcccacaacatgatcctaagcaagctcttgttttggctgttatttttcgtaggagactagaacacaacaacatttcgggtgatctaatgtcattgctcaattgcctcagccttactctactgtgagttattcacaaaattctgcattttccttcttttctttctgtaatgcaatctttctaatcgaaaaactcgaatgtaatccacacagaaatgtatcgtacaacaacttagcaggcaatattcccacaaacaataacttctcaaagttttcaccagacaggttagacaacaatctttgttttgtatatagttttcggttttgtttctgtgatttgtactgatgtaaattatgttttacagtttcattggaaaccctcgtctatgcggctactggcttagctcatcatgtcatgtgcctcatccaaccgagcgaggttagtactactttcacttaagcacgcttaaattctcttttcatgtttttttcggtctgattttggttcccattctacttgttatagttactatatcgaaagcagctatcctcgggattgctcttggtgctcttgtgatacttctcatgatcttagttgcagcatgtcggcctcacaatcaagtacctttccccgatggttcgctcgacaagccaggtatgcaatcaaatcataagactatcatcttttgttaagtttcatgcgattttgtactaaatttcgatgcatttttgtgaaacagctgtttattactcaacaccaaagctagtcattcttcacatgaatatggcgcttcatgtctacgaagacatcatgaggatgaccgagaatttgagcgagaaatacataattggttacggtgcatcaagcacggtatacaaatgtgttcttaagaattgcaagccggttgctatcaaaaagctttactcccattaccctcggtgcctcaaggaattcgagacagagctctcgacggttggaagcatcaaacatcgaaatcttgtcagccttcaaggatactcattgtcctcttctggttaccttcttttctatgattacatggaaaatggtagtctttgggatttccttcatggtaagtttctttgttaaaagacttcattttcagtttatggtaaccagaggagtaaccagttaccttatactgtttttctacaggtcctagcaaaaagcaaaaactcgattgggatactcgcctcaagatagcgctcggtgcagcccaaggactagcctatttgcatcacgattgcagtccacgcataattcacagagacgtgaaatcgtccaacattttgctagacaaggatttcgatgcccatcttacagatttcggcattgccaagaacttatgcatcacgaaatcatacactacaacttacatattgggcaccattggttacatagaccccgagtatgctcgaacttcgaggcttactgagaagtctgatgtttacagttatgggattgttctactcgagttactaacaggaagaaaagctgttgacaatgaatcaaatctccaccatttggttagtagtagtagtcattgcttaactcgatcgagctttttattctatcaagtttttgaactaattaaactctctgttttgccttagatattgtccaaaacagcaaacaacgcggttatggagactgtagaccccgaaatcacagctacatgtaaggatctcggggcggttaggaaggtatttcaacttgcattgctttgcagcaagaaacaaccaactgatcggccaacaatgcatgaagtaacacgagttctcagcagtctcttgccaactaaactggcttctacagcaacagcgcaatgcacactctcttcagcaggaggtgcagccaaagtttcgggctatatcgatgagtatgcaaatatcaagacaccccacattgtcaattgcccatcaatgagcacatcagatgcacaattgtttgtcaagtttggtgaggtaatttctcagaatagtactgagtgaaatcaagaaaagtaaaaaaaaa

SEQ ID NO: 219557 - DNA, 4942 bp, Cannabis indica
tttttttttttttcttaatcaatgttttggacaccgattagacccggacacaatcctctcacgaccttggcgctgaacccagcctctgacccgaagccgaattcaatcttggacttagacccgacttaaataaaataaaaaaaataaaaataaaaatgagctttagagaacatatttttactttacagaatgtattttgattttcaaaaacaaaatttttagattttgtgattaaagtaagatttttttttattattatttttttttttaggtaagttaaagtaagatttaacttcacaaaaatctgatggataattttccgttgagaagacaaatgaaatgaccccaaagaaaaagaaagtaaatttagatagagaagcaagattggacggacatcgttgatttctcggcatcgacggtgatgtactttctctctttagtttgaactttgaagtatagtcgtcgatcctccctccgttcccttcattctataccctatcaccgcccaaacaacccagctccctgaaatccgtaacggcaactacggtactctctcactccagatgactccattgcaaaactcaaaatccttccaacttgttttatttttcaatggttgatctttgatcgcttcataacacggtttcacttcgcaccaaattctctcttaactttttttttttcttttttcaatgtcagaatgattagattacaagagaatagactaaacccccaatggttttctgcttcttggctcctgagtttttgctctttgtgcttttgtattgatcctagcttcatgtgccaatttaattatctaggttgagggattgaaatgtcactaatgacgttttctttgctagtgcacttaactttgtatatcgtatttaagaggctgatgcttggtttcatatttgaaaacaatcttataatcaatcacgtacaaaaatccttgattgatcattgttttaaaaaatgaaattaatatctaatttttatgttttctttttggtgtatattcaaatcccttcttattagctacccatcggccacctttccagtttcttttcctttcattttgtcttttctcatagtagcaattctaattcttcttaataaaatgttttggattcttagatataagaactcatttgttatttgatatgggttactgctgatgatttgaggtttaaccaagatgaaattttttgcctaattgtttcttgtatgaatttttattaatcattccccatattatattagtttcagttaaagggaaatgcagtgattagtttctttattctgtggatttgaaagatgcagaaattgggcgattttaagctacctcacttcttcaattacccaccttacttcacgtaatcttcttttctctttcttaattttactggttcttaagcatacgttgtggtcttattttgctcccgatatatacatacgcatatgatacacagacatgtttaaaattattctctcatcaatagtcttacctatccacaaataagaaaagaaggggaaagcaatatgcataatcatcaacaagacaacttgtaataaggagggtcaatatagtcttgaatcttgtgttacttgatcatttttataatttagtttctcgtgctgctaagcagaggttcattcttttatcttgctcctagtactctgttaaatgcactatttcatgtatatacacacacatatatatgtatttatcgttaaacgggagaaacattacatggactctgtatgttttgatgttcatttatattatatgtatggtctactgtatatatttgtgtgtattcatgctcttttgctgagtatgctaatagaaccttaaaagaaagcattgtttgctgtttgccaaatttagatagttagaaagctataagttgaactagcctagttattgcaatcgaatatctgctagagtgaatggtgtttatttatttattttataaaaggattctttatcttttattcctttttttcaaagggtgatatttgatcaaaagacacaaagttcatgcgcagaaaagatctatttgcagtatttttcttctttcttacacgtaacttccttttcgtcatgtttcttgcaattatctgataggaattttcttgcaattggtatggaaagtaggaaatacaggaaaatagtatagtagttaatatattgatatagatgataaagagaacaaggttgctgggtattcgagagacccaacactctcccaagagctaatgctcacttaaccgaacaattctctcctctcctcttcccttcccttcccttcccttccctactcactcatatatatatagcaccaatccctttcattacggttacccaatcaccctctttatttatcttaaatcattgtcatgatcattaggcttctcacaaaagtcacgattttgtttgtttttttagttttccttcattttctggtggctcgttttgtcatatcgataatatgttttcttttctccagtttgcagccagtaagggatattcgtgaaaagcaaatacagctttggaaggaacttattctagagtactgtagattccaaaagatatttgtggttggactggaagaagattttcctttattctcaaatgctgtaattgaaagtaagtgatatctttttcttggttgtaagtgaatcgttaaatttcataatttaagaagcattgtgattggtgtagtgtatggattttccatgtctaataatctgaaagagtaaccttttttgagggtggcctcgtcattaagtagggtttacatatcttcttgtagccattcatcttcaaaatcaatttctttgtgtaaagacttggtgtgtttcttgattatctctttagttcctaaccttaatgactttatcttgctcctttagtcaacataaactaaagagttcatatttggttctctcattttctgtcttttttttcttagttttgtgcttggaatctttgtggaccttacttataagttttacctacactgattagcaatctaaatcccgatagacttctggttctgttcatctatgctataaggatcaaatgtgcagcataagctctggagatagttttggaatgacaaaagtggggaaagttaatgtgatgaactgctttgggattaatagttttcacaggattttccatttgtttgaatagaaaatcaaatctttaatctggccaaacctctacttttctatcttttcaaccgaaaatgtaaaattaaaagaaggctttttatttcaattgaaatgattatttttctctgcaatgtgttttgacttactgcctcccacctctaacatctgatttggatagttcaggatttctcagtcatgaagccagggaagcgtttctctcagctgtagtttcagaaggttcctttttttttaaacttcatcttatttcttattagtctctctctctctctctatatatatatatatatttatatatatacatgctttatatacatacatacatataatatatatgaatatttggtgccctttttgcttttaacaggacgtggagaatggttagataaaggacataggaagtgtcttattctctggcatcgaatccaagagtgggctgacattgttcttaactttgtgagtaaaaacttgagtctacaattgagtgctggaatttgttacttactttcaaaataaatttgcttgcatatctgattaggttaaagataatgggctggaggactcagttatgaccgttgaggaaatacgttcagggattgaatccagaggaacaggtactcaagttgtacatttaatgccaagttaaattatatctttgaattgactgagggagctccaaatgtatagatactattgcaattactgatgatcagtttgactttgagaactaatgattattaacttttgaacctcttcgtttgctttatacaagtgtgaaatagtccattcccaaacttcctaaatttattattattctccacaagatgaattacatatcttcaatgcaaatgtttttcatgatgcttaattttgcactaaatttaacttatactccaattcacaatccatttgtgattatataaatatataaatatatatatatatatacatgtatgtataaatttatacttatactgaactaaaggtgtctagtccagaatgagtccccattctctgataagatgaggaaagacagaccttaaaacccaagttgcttcccagaatttgctcattagtactaactacttttttccaaaccatttgatgatgcgtcaactgttacacaaacttattttagttttgcatgctaaaagtttggttcaagtgatactttgtataaggagattatgaaaaggcgattttttttcgggtttaagagctcactcttgctatctttattcctcagagctgcatggtattgatcgcacaattctgatgcgagctttgaaactgctagaacagaaaggaaagctcgccatcttcaagggatcttcagctgatgatgagggcgtaaaattctccttataatcatttcattccggtgacaagttgggttttctacaatttccttggttgcctgatatcatgatcattggaagagtgtttgctggccaaatttgattgttgtttatggatgaactttgtgtagacattcttttgtctgaaattaaacttaaacgacttgggaaaataaataaattaaacttggacaaatttctttcttctagttttcttttctgggtcttgctaattttgttgtcttgctatgttatggactttgaattgttacaattatagtttcacattggaatgtgaaggtagctcatatgccattgctaacacaagcaggagatcatgagtttaggtggaaatatttacagagcgttcttggttatgctgt

SEQ ID NO: 219558 - DNA, 4678 bp, Cannabis indica
aaagaaaaaagaaagacatttctcatatacacacaaccagacattttgcaccttcacgtccaagtgattcggcagtcacaactttcatggcatacatgatttagattacatcttaccgatgattacaaatgtacctgaggtctagcaaggtaaccagccgtcctcgtgttaaagccagccacctcctcatccaccactccatccacaccgttttcattctcaacaaacccgaaatctcttaacctatcagtcagcggtcccagttcttcctgaacaatcataccaacatcagctctctgcctgttgttatcaaaatccattcggattgtagcaatcgaattatcctcttgccaaaatggtacaggcaacatcctgaagaactgttgaaccatcccattcaagcccgctccgagatccgccccagcttgcccaattctattgccaatatcaagaattgcagaaacgccgttgattcccgagctttcagacaccaaaccaaagtcccttttgccaaaactatgagacggaaattcaagatcaaaaagcttcgaattttgggggttgggccacggaaaagggggaggatttatgtgggactggatcaaaccggtgaaaccctgtgtcagccggtccgccaggtcctgaccgtgtcgctgcacttcctcccaagcttcgaacgacctttctaccgacatacttgtcaaagtgaattaagcccagatttcctttatcctaataattcataaaaccccctcttcataacttctgtgccagcatgagctcaaacgtatattagcgaatttaggcgtataacttataataaacacaatcaataatcgaaattcaagagctccaataacaaaacaaaagcgatatccgtgaacttagatcttgcaagcttctcgaacagtgcccagaaattctaaaataacggtttcgagctccaaccacagcgggaaaaagatactaaaatagcgtttcaagtttcggaaatagaaaagaaactgaaaaaatatatcaaataaggcacaaattttgaattttatctgggatttgaaggttgagagttcagattcggaaatctctaaaacttcccaaaacaaaaacaataactttagggagtttagtttgtttccctaaacagataaagtcagaaacagcagggaaagacgggaattttatgagattgagaaaaattacaaagtgtgaaattagggtttgaaattggggacagagaagagagaaaagcagaggacgggaggagagaaagagcaagcggagtgaggccacataagccagacgaaggtagggatactctcatatatgtattgtgtggctaagaccattaagatattattcgaagatgcaggaaggaggaattaggtacgcaacaaatcagagcttcagaacacaaatgttgtcgctcttgaccattaatacaataaaataatgaatacacaaaaataacagattcaaatattacaaatagtatggaattttaaatattttgacagggtcagttattgatttgtaattcaaaaattgtattttttaaaattatgttttggtaaaaaaaatttaaattttataagtaaaaaattatttctaaatatctgttgtagtgtgatttaatatttttgagttttaaaaaattgagtacgtgattaattgagaatctcaaaataaaaaaataaaagaataatttgaaagtttttggattccataatttcaaaacataaaaaatataaaaattgtgttttcattttttaagcctaaaactcaaaataatattcaaattttatttttgaaaacactcaatcaatcaagaattattaggtggagcccactatttcaattttcaaaaacataaaacagtttttaaatcctaaaccattttcatttgttgttatagttattatttatacaaagtattatttttataaaattttaggttaaatattttttttattttcttactgtaatttataaaagtaatacgaaaataataataaaaaaactgtataaaagtaattggaaaatatcatctaaacaatatcaaaataacataaaaataatatacaaaaatattgtgttgacttgaaaatctggactagacttctaagctacagtcactcgctagattggcgagaataagaaaaattataaagcaattaatgagagacacaataatttatagtagttcaccactatatcgcgatagtaatgagactacatctacttcgagattttatttctcacgagatagtaattacagcaagtgtttaagtatcataagcttcgaattctaaagagagaagttttgaccttatgggtagtttttctgaatttgaaaaatgagctaagggagctctccttttataggtgaaggagacccacaaaaataggagataaaatacaaataaagtatttttcatcgttgatggtggtgatgaaaattagcttttggtggtgatagtttatttcttatgactagcgggtcccgctacaaattacccggaggagcttatttttttaactctcttgaggtgaattttgatgacaatagcttcaaaattacgcatggagtgtgagacttgacttgatagagggcttaaatagcttcaaaacgcgagttaaatcgtgtcaatcagataaaaattaagtgagttatggtcgttttactgaaggcagttcaggtcgcaacgcccagattgacatccagcgccgaagttgacattccagagcccaagttgacatatgacgtcaacatggacgttgcataagtttaaaaacgtccaaggaaagtcttttgaaatgcttaagtgatggtttgacacaccttagtccttttatatgttttggtgaagttggtcacacattctcgaatatgttatcttgcagaaacagaagactcaaaacttctggctttcgaatgagctaaaattgaagttctgaatttggttgatctaacttcatggatcattacacttgtgaaaaatttgacgaacggtcgaaacgacatcagattcgaataagcagaacccaacgaataaatcatttgttgacatgggtgttagggccctccaaccgagcattcaggattctatttttgatacttccaaagcttttgaactgaaggtagtgtcccaggttaattgtcaacctgggcactgggccctgtttcaagggacgcaggtttgtggttttctttctaagtttacttgaatcttcgttatttcttatgatggttatgccaaagcactttttgctcaactaacttggaaacagcctaggttgacatgcgtatggcccagtcccaagtgtcaacctgggtgttgggtccctcttctgccccttctgaagttgtgtttggtccccgaaaatagttgattctcaatattttccaaagacaaatatgatgcttgaaagaattctaggaaattccctattatctgtggcccaggttgacaaattgtcaacctaggcgcaggacgaaccctctgtttttgataaagacaaattcaacgcaaaagtctgatcttcgatcggacacttggaaagcggccaaattgacgaattatcaacttgagcgctgggtgctcagggccccgaggcctcggtagctcgttttgtgtgcatggatgaggactcacacaccgaaccatcacacacgcgcacgcaccaccaccgccgtcagttcgaccgaccgtgccgagctggtggacgggtgtggtgtcactttatctttttagagaaactttatttattacattattattttttatttaaaataattttaaacgtgtttaattaattagtaagatgatttatcactttgtatttttagtaacgttcacatgatcaaaaaaatagctttcttctcgttacttcattatgcgtgttcttatataatgcaccagaaccaacgagagaaagatatcattttctcacaaaaaaatatacaatatatatacgattataatacatatgtaatccgagcagtagtacgattattaagtgtggtatttcgatggttctctatcgtgcaatagagctctgatacagtattttcgactgggctgttttatcgtggggacaataaagttggtagtctgcttgcacatttctaagcagtgccgcaaacgtcttaaaatgaacgacttagtccgcgacttaatccaaattttaattcagtaaattcattttttttttttttcgcaacaactattttcaacataatttttaaaattatggtcaaagtttatatatatactaatattgtgttggctcaacaccaaaaaattaatttatcaattagagttgccctgaaatttttttcagaacaaagtttaaagtagaagtttggatagtccaagagtaaattattcctagccctgtgttcattttttacgacgacaattgatattaatcttgtaagagacatgttagaaacattataatattttattagtctcatatttgtttaagattcatagaaaaaattagagttttttttatatgagttataagtgcatttccaataataatattttgaaacatgcttgatgagttggaaaacttaggtgccacaatacaaggatactgtaccattagagataaaagaatactattataaaatttgcattgatgccacaaaaatgctatattttttttttac

SEQ ID NO: 219559 - DNA, 1988 bp, Cannabis indica
gcttggaactgtcgcgggctcgggaataccgcaatagttcatcaattggcgcatcttgtgcaccatcacaaacctgacttgatgatcctctctaaaattcatcttttccctgaaaaatttaacaaaacatgttttaagctccactttatggatacgcattacgtgcctcttgttggtctttcggggggctgggaatgtgctggatgaaaggagtcaggtgtaacgtccaaacatcttctaaattcttaatcattggagaaatttcctcagatcctcctagaataccacagcttctgctgggtacttatgggccgcccaacagtatggataaggagcagttttgaaaaaatatgggagactttgctctaaaagctacgtatctgatacttatgatgggtgatatgaatggaacattaagggacaatgaatgcttccactaccaaggaaatatttctagatacgcttttgacttcaggtgcatggtccatagagcgggattgattgacctgggattccaaggcccgggtttcacttgggctaaaggtgggagaaactcggggggtggaagggctatgaagagggctagacttgatcgtggacttgcctcagctaattggagaattctgttccccaatgcggttatcaaccatcttgtggcctctgaatctaattactggcctttgctgctcgatactatggagggtgctaagtgcaaggggcgtcaatttaagtacgaaaatatgtgggcacgcgatccccgatgtttttgggtggtcaaggaagcttggagagcgaggttacatgccaatcccatggtcaatttccacagaaaggtgaaagccacaagcagaaaacttcagaattggaacaagtcacaattcatgaatttatctcagcaagttcaaagagcgaagtcccaactgcaggaggtggaaaaaaaagagcccatataatcttgatgaaatcaatactacaaaacaactactttgagaagtctctactaagggaagaaattcattggaagcaaaaatctagagtacaatggctccaagaaggggacatgtgttctaagttttttatggcatctactataataagaaggtcggaggaactatatccaatgcatcaaagacacttcggatggagattggataagagaccaggatcagattgcccattgttttcttcataagtttaaggagaacttcaagaaaaaccatcctgaccccgcacctctatgtgaaggcatgtttcagaaaattgtctcggagcaagataatgttctctcgaacgctatcccgcagggggaggaagtgaaggcagcaatttgcgacatgggaaaggacaaggctccgagacccgatggcctttcaccaagcttctatatccatcactgggagacagtcaatgaagacctcacagaaatggtgacccactttttcacacatctagaattgcccaaattcattaacgacacatcattggttctaattccaaaaaaggactctccatcctcagtcaatgattaccgtcctattgctctgtgtaacgtggcttacaaaataatttcaaaaatcatcgcttcaaggctgagatatattcttccaaagattatatctccaaaccaagcggcgtttgtcaaaggaagacatattgcagagaacacaatgattgcaagagaggtggtacactcaatgaacaaaaaaaggggaaagcgtggattcatgcttataaagcttgacttggaaaaggcctacgataagctcaactgggactttgtcatctccgtgctacatcaaattaggtttagtagttctttcacagattgggttaaagcttgcatctccgttgctgaaatcaaactgctcataaatggttcggtggttggaaaatttagtccagagagggtattacgacaaggggatccgttgtcaccctctctatacattgtggctgtcgaaccacattctcggcttctggttagaaag

SEQ ID NO: 219560 - DNA, 3323 bp, Cannabis indica
tgtcatcattcatcaaggagagtatattaaatatacaaaaatgtagtagaacatcaagttgataccatgtgtgagtgtgacacgcaagggcatgatgcttcatttctcaagcatatgctaaatatatatgacttttgatatggagaaatgaaatatataaatgtaggtgtaaatcctgtagaaattgaaaaattgtaagggataaaagttgctataaatgtaatgatgagagtatcattgtaaaaggaatattctcattttttgttttaattgtcagctgtaaatgagctattgttcttatgcataatgactttttgagccttttctctataaatgaaaaatcactcacacaggattgattgagcttaatggagctgagcatttacaatcacgtttattctaaattttgagttagtatcagagccaatcagccccacaataccaagcatcacctcaagactcacttgttgagggatttaaccctactatatatatagccaagccaacatgtgttaatattgaacctagtactattgctgcaacaagcactaacaatgcttaacttcaacaaccaatctctcatcacttcaacaccttagaaaacaactattttctttcaaacttaacagtaacatcaatggcatatggaagacaatagtctccgtaattgtaaaaggccattgacttgatggatttctaaatggaaccattgtctatcctctagagtctatcattataggaagctctatagaaatgaccagatttaccaatctaaactatgaaaacttgattatcaatgatcaattgctaatgggatggttgtataggtccatgacagaaaccatagcctttgaagtcatgggagtagcaaaaataactagtttatggcaagcgttggaacaactctatggtgcacactcaaaatccaaaatgaatgacacttgaacattgattcaactcacgtgaaaaggaaacactccaatgagtgagtatctcaggcagacgaataattagtctgatctattggttctttctagagagccctaccatgaatcacaacttattagtaatgtacttttaggttccgttgtgttacagatagaagatcgaccaaagaatacatggaaagagctccaatagttgttacttagttttgatagcaagattgaaaggctttaagcattgtccactaataacaacaaaaacaccagcagccttgctgatccacaagccaacttttcccaaaaaccacatcatagacgacaaggaagaggttgaaaccattacccccaacatctaagagaaagaaaccctaacatgggaggaggaaatagaggtggttgagaaagaggcatgttcagtggtagaaggaatggctcaaagccaacctatcaggtatatggaaaatatggccaatctgtagctctttgctacaacatatttgatgaaaattacatggagacaggtccaaatggtggcgctccaaacaaaacaaaaaatccatttgcctaagttgcaagcccagagatcttagagagtggtgtctggtttgctgatagtgggcctagcaaccacattacttctgactcttcttcaatgacacaaaagcaagaatatagtggtaagaaaaatgttacagttggtaatggtactcaaatatctatttctcatcttgggaatggaatattgcaaactaatactagtcaaaatcttgtgttaaaataaatgctattagtacctgaaatttttaagaatttactaagtgtctcaaaacttacacatgataacaatgttctcattgaacttcattctgattgttgtgttgtgaagcaaaatgtaacaaggaaggttcttcttcaaggaagcttggggatggtcgcagccaacccgaagcaccatgttccaagttagatcctaaagtttccaggagaatcgagtcaaataaaaacactatattttatggtgatgtcaagtctaagtccaatgtaaatcagtcaaaaacttatctatcctttgtgactaagtgtgatgtttgtcaccatccatcaccaagagtcttgagtcaagttttcaattcatgtcatgttaaactttcaaagaatatgcttgtcagtttggtaaatttcactctctgccatttaaaaattccaccagtaaagccaataatgtacttgatttaatacatagtgatttgtggggagcttcactcatcatcttcaacatttgttgtagattttacatacattttattgatgattgcacaaaaatcatatagacataggcacatggttgctcaagctcacatgcctttaaagtattggtgggaagcttttgaagcctctttctaccttattaatagacttcccacaactgtattaaacaacaaataaccttttgaagccttgtagtcaaagaaacaaagttatgccttttaaaaagtttttggtgttgcttgttttccctgttgtctaaggccttagcaagcccataagttccaattcatctctaaaatgtgttaatttaagctacagtgaatctcataattgatataggtgcctaacaccaactcgaaaaatttatgtttcaagaaatgttgtgtttaatgaacttaaatttcctttcacacctggttttctaaacaaccaaaaaaactagtcattattcaatgttgctcctggaataattttctatctatctctcttccaattagtcatgtttctccctcaaatgctccatcctcgcgcactcaagaagaacaaccttcctcaccaacacattcttagtaaattcttatgaccttgctggtcctatgcactcacttgttgcttcaaccgatgtttcaactccaggaagtgagaggggaaataccccttgttcatttataaggtcctttgctacaagtcatgatgctcaacctagtttaatttaagatgatcatgaccaggatgatgatgtaattcatcctcctatttttgaacatcctcaagtcactggtcaccttataaaaactcgagcaaaggcaggtattttcaaaccaaaagtgttcatgaggtaagctaagtgtgcatcaatcttttttgagccaacaagtgtcgtagagacaattgcacatcctagatggaataatgcaatgaacaccaaagtttatgctttctaaaatttcgtattttaatatttacagtttattatttaattaaatacttatttaaatgcaaaataataaaactggcgttgaaacattttttctgtagctacaaaagacaactctgtaactccagaataaaccaaaaaaataaacagtgcagaaaagtaaacacacacaa

SEQ ID NO: 219561 - DNA, 6301 bp, Cannabis indica
gtaatttctcttatattcgtagaacttgtaattttgccgctcataatgtggctaggatgggcgtttgctcataaggtgtttgggactatcccggtgtcctccttacctgacaacatatttgtaacgaccgagaggtctaatttatttgaatttatgatataaacacttcttttcaaatatatatatatatatatatatgttgactgtatttttttaaagtaatatgtatatgtgactgaattgtttattgattctcttgaatattctttataattttaatttttcaagtgttattattcacaatttttctcttttacttactcttttcgtctacaggatgatactcattgatcaaacgtgtatatttttttgggatctttattttttcatgcatttaaataaaaaatatttttgaaggaaattaatataaattgaattataatggtgaataagtgtaatattacaatttatttatttgatttctttatattttgacttcaaattttttgttcacttgccatttatatttgcattcatgtatattactttgttcattttgtcattagttcaaaaaaaaaaaattgcatatcaaatatttttttacttcatgagtttactatacatattaattggagattgtttgtttctctttccttaatgttatttatttctttgatcttgaaaatttttaaaaggaaaaaataaaagagtaaccatttttaaagaaatttgtatacttatttctttttcttctctcttctgatacatcgttctcattttggctcggttgtttattttttcttcaagcttattcaggaacaatggtgattatttgtacttgtgttgttttttttttttttttctacaagatggtgattttcctgttactctcacattacttgtcgttgctcaatcaaatcttggttctaaaagggggagaaattttatcttagtcttttctttgtttttgtagttcctttggctactttgataaacacaaagggggagaagtttgcacaaaatcctttctggtttgttgtttctgcttcctcttattttgagaggaagttttgtggttttagtttcaaaacttttatgttttattcttgttcttgtatttagggagagtaattttcatatatcactaacatatttgttgtagggttgtgtatttaattttgtctactaaatttccaaagagacatattataaaatccttagttgacatatgtggtaaagatgacaaaattaattatgtgtggtattttcgaaataacgttgaaatcttgtttttgtgtgaaaatattttttaaaatcagattatgttatatttgtcaaataaatatgtagcttctttatttagaatatattatcttgactttttatgtttaaggaaaatattaatatttattttattttaattgatctaatttctttgccaaggcaccaatctgtgtctttaatgtatattttgtttccttttatatacttaaactttgctgaaaatctgcttaggcatactgaatatgtttgaacggattcagtttctttgaatagattttaactttcctttttgggaataatttttcatttattgcctgattggttcattgcttgtaaagcacgacttgtggtgtattaattgagaatgtattcttactcgggttgtgattttatatggaaagactaaattgtttattatgtaataaatactatatttatacatggtatttctttataattgatttatcttattccttttctgatatgatctacattaatctctccagctaggattcgtgatgtctaaggaaaattcgtgggaatgaacttgacttttatgaagtctagattcaaaatgctaaatagacagataagaatttcgtctgtacactttccatatttgttcagacagaatttcgtcatttattgagttgttgtaaggaatctttttaatgacttctctttgtattcaaatctttggagctcatttccgggtgtcatttattcttataaatatatctaaactagtagcaaaatgtggaactcttccacttattaattccttatattttagaagagagtgtttcttttgtaaatgatagttattctgttattcgttggtgaatttgtgtgtctttgtgattacttttatgtgaagtaaatttcaaattgaagaacgtaaagaagaaacttcgggagaaggttcatccaagtcttgcatcgggaggaagcaaacatcggtatcttaggtaaaaaatttctacaagtcttacatcaggttgaagcaaacaccgctatctttggaagaagatttctacaagtcttacatcgggagaaagtaagcatttatcaagttatttgaaggatgttcaaaccttgatgtcttcaagagagtcattcagcaaataagaatatatcaagcttgtaacaaaattattagaaggagtctatattttgtttaagataattactttgtacttgttgaaatttgactaatgaattttatctctaagcgtgaccccgtgaattagtaacaatttgaaaagattgttgataatacgtataaaatatcgtgtcattttaatttttacaattttactttttacaatttaattaattttgatttataaagttcaatttctgatagaacagatttcgttcaaataattttacaatagttccgcattaaaaattatttgttaatttcacttgttaatcacaaaaacggaatttcaaacttttatcctaaactcacactatatagatagtataattgattagaatagtgtaacttaattgatcatacccaggttgataacttttaggttaaataatcataactagaacaccatttttttcagaagtaatcaaattagattaaagacaaattatgtcaaatcacagagagaagctctcatcataaataagaattaacttagtcaactaggaaaaatgtgttcccatggattaatcttatcaccatctatataggatggcggctccacttaattgaaaggctttcttcttcattggttattaaatgcctgttattggtcttaacttagttaggtgttcaatggggccacctcaatggtctcattcatactcattgcttcaactataaaattttggttaagaaacttcaaactatcaccaataacacttcttaagattctcttaaaggagaaatggtgtaacaaccaagagttgacccattcatatgattttttttgttagtactaagattgtctttggaataatattttcttaaaatattttggcaaactaccaattttgaactgtgttggcaaacccaaaacaaaaaatgtaaaacaccacttactgtcttctaaagacaagtaataaaaaaaccctatatattgttggacaaaactagcacaaagcattaaatgaaatgaaagcctcttggtcaaagcattagtgatgattaagcatgcacgataagccataggcagacctaagaagggacattttgtaaaaataaattagaatgattagcatttttacttccataagtttttacactattttgaattgagtcttttatagtatatgatttgttaaaatactcccacaaaatataattattataataacgtagttctactatcacattttattctaattttatcgtgaaataagtaaaatagtgaatgataatttttaaacaaatgcaaattatatttttatttttagtttttcgatatcattaaagtaaaaaaaaaaggataaaaaagtatttgatttatattcatttatcaattattccactaaatcacccgtttcacgataaaattgaataaaatatgatagaattatcatgttacagtaaaagtgatatctcgagagatatttttaacgagtcgtatactataggagcacaacttagtaaagtaagaagtttaagtagcaaaaatgttaaatattaaaaatttatatgtattttggcccaatttaacttaacttttttcataaactattttctaacttttttaattaaaaagttccttcaaagggtgtttgaataaaaaataaaaagtgttcttttttaatttaaatgtcattttgaaaaaatataggatttgtagcttcttctgaaaggagttttgagaagcgatttttaaaattaaaataatttatataatttttaatttactcacaaaatttcttttttttaatgatatccaaacactttgaaaaatatttttcattaaaaaaagatcttcacataataattattcagacggtaaaaataaatcaaagtctatatttattttatacttctagctataaataaaaatagaaatttaaccaaacgagacatttgtaaacttttaaaatacagtgattttttgtaaaaatataaattatatatgtaaaaaaaaaatatatttatacccctcttttacactttcttttatatttattcttcatttttttttgtaaaagaaaaaagttacatttataatcttcttttgtatcttcttttatgtttaattaatcctcattatttattaaattttttacatttttgccttttaattttatttttctttcaccccttaacaaaatttttagacaaggtagtatcatgttgtttaattaatattattttaatacatgttgctggtggtaaatcaattcaaaattgttcattttcacaaatatttgtatatatatatataaatattgacaaaaaatttgtaatgtactaatgtgtttatataaaggggtaagttgaaaaataccacttttattaatcaattaatcaaatttacttctaattttatatttaattgaaacatacatcttcttatatgtattgtacccaaaataccctgacataagacagtcacatggagagtatcttgaagtgacaggggtaaaattggtactatgtttaaaaaaagaggttaaaatgatagactttaaaaaaaaataaaaataaaaaataaaagagaacagtataaaaaaaaatataaagtgtaatttccttttattataaatcctgcaaaaatcacaaacgagaattgagaactgagaactgtgccctttctaagaagaacaaaaacagcataactcatatttttctttcttgtttgttattaaaatcattagcaagaactaaagttaagattacttttcatcacatagttttagatatgataatgttgacatataatattgagtacaagtaaaggatagaacaaaccacaaaattgtgcataacgaaatgttgatgcctctgtgattagtaccaaaattcaatcaaagtggtagctactctaactctagtaggtaagaacatgtataaacaacaaatatgatcattcttaaggaaaataaatttgaagttttgccatatttagagtaggaaaatgttattttcaaagtaatacattagagcatttccatttataaataatgtaaatgtcaatgtaaaatatagttcacttaattaaaattttactttaatagtgtgccaaattatgatgcaaatatgttacataataaaaaataatctaaatttaaatcacaacattgcatgatacaaaatttactatgctatgcttttatatttaccattatatcattttaatattttattattaattttagttaacaagctcatttacattaaataacttgcatcattattattaaattttatatttatctttgcattattagtattatttatattttttttgaaaataatttaatttattaaattattaagtggacattaaatgttatattaaattttgtattaagatttacaattatacattagagcacaataataaaagttgatgtaaaaatgtcacaaaactactttttatgccaaatatagctcaacttttacatcttccattggagatggtcttacatattttagactatataatttataaaaaaaataataaatattattttagactatatttttgtaaaaattatcgattgaatcattttatttgttaaataatttagacaatattttttaaaatggtacataataatatctaaactcaattttagtcatattttttttagtaaaactaaaacataactatcttgagataaccgtctagtataagaatatcttcaatggagtgctaaaaaatagtgtgttgttatatttcagcacacttaagaaaaactactactctaataatgttctaaaaattgtgctaaatttggcacatgctaaaagttgtgtcaaatctggcacaagatatagcattgtgctaaatttagcccacaataaatgcta

SEQ ID NO: 219562 - DNA, 3618 bp, Cannabis indica
cccaatggagacatccgtgttgcgggagatccagcccggagggggggttgccactcagctggcatatcatctgtactgatgcgtgtggaatccatctcggctagccttttgttgatcatttctattaagaagtggactggagtagatcgcccatcatgcacaattctatttctctccctccatatatgttcgaagattattgccgccccttctaaaagttgattgaaattgggtataggccgcctattttcctccttatagaaccataggagccattcatcccagcaaagggtactgttatagcatcaactcgaaccccccagttgcatccaaaccaaagcgaccttgcaacattgcatctccaaaaaaggtggatactgttctcattttcaacattgcatagagggcatttggtatcagtaagagcaatgaatggacttagtttctctttggtgggaaggaagttggaaagaattttccaccacatcatcttaagcctagagtggatattactcccccatattattctccatttcctttcagttttagagctaacatcataattcttaagcaccctatatgccgatttgaccgagaattggccatttgattcaagtagccagagccatgaatcactcgatggactgatagggagggagatattgaggatttcccttgcgtcttcctgttggaaccatcttccgaggtgttggttgtctgttgatccctgacacccatttgtcgaaccaaatggaagtggacaatccatccccaatttttcggcaaaggcctttttggagttcctcacgagcacgtaggatggccttccaaaggattgtgtctgaaggcttggcttccatgtcaaggaagttgtgatgttttatgtatttttcctgcataagttggcaccatagcccactctcctctgtcaatactttccaagcccacttcatgaggaaagccttgttcatcgtctccgttgcccgaaagccaaggcctccccctagttttggtctacaaagccgctcccaggaaactgtatgcattttccttttatcttccgtgtcaccccaccagaaatctcagagtagtttatcaatcttgttagctgttgttgttggaattacatccgaagaggccacataattagatagactcgagcccacagctttaatcaggcaagtctttcacgcactagagagcagtttcattttccacccttgtatccgcttcagaacacggtccactaggaattgagtatcttctgttcttttaatcgatctaaacaatggtagacccaagtaggttgctttaccattcattctctgcatccatagtatttgtgtaattgattgggccttcctgcttgaaactcctctagagaagaaaaccgtcgatttttggagattgatggattgccccgagcatttgcaatagtagttaaggcaattcatgaaccccctttctctctaattgtggcttgaccgaaaaggattatatcgtctgcgaacattaggtgcgttatcggggtcccattgcgagtgagcttgaatccttttaaacacccctgattttcactttcgataagaagacgcgatagaacctcagttgctattatatagagagtgggggacagcgggtctccttgtctcaaaccccgttctggggtaaatttcccgactattgaaccattgagaagtagtttaatttcttgtaccttgatacaagcagtgatccattcggttaatgggctagtgaatccacattgaaggagagccgtgttgacgaaatcccagtcaagtttatcataggctttttcgagatccaacttgattaacatgactcctcgcttacctcgtcttttcctcatggagtgtacaatctccctagcaatcattgtattttcggctatatgtcttcctttgatgaacgctgcctgattcggggatattatattgtgtaacagaggtcggagtcgagaggcaatgatcttcgagattaccttataagctacattgcacagtgcaatagggcggtagtcagttactaaggatggggagtccttcttcggtatcaacacaatggaggtatcgttgatatattttggcaactccaatcgtgtgaagaagtggatcaccatgtcaataagatcctcatgcaccgtctcccagtggtggatgtaaaagtttggtgggagtccgtccggacccggagccttgtccctccccatgtcccagatggccaccttgacttcgtcggctgatggtatagcatttaaattgacattaatctcgttagagatcagttttagcatagttccttcctttagaggaatgagggtggtgttatcctttttgaataaatcctggaacttatggaggaagcattgggcaattaaattctgatccatgatccaatcaccgcccggtgtttctttgatgcattggatgtagtttcttcgtctttggatgatggtggaggccatgaagaacttggagcacttgtccccttcttgcagccactgaactcggctcttttgtttccaatgaatctcttcctgcaacagggcctctgtaagcttcagttttgcttgatcgacttcattgaagttgtccttgtttctcttttctacctcctaaactaaatcctttgcttgctgaatttgttgggataaatgatggaattgtgttttgttccatagttgaagctttttgctagttgctttgactttacggtggaagttgatcattgggttttgatgacgcctttccttccatgcttctttaacaacccagaaggatcggggatcccgagcccacatgttttcatatttgaactggcgacgtttgcaatttacccctcccaaagtgtctagaagcaagggtctatggtctgaatctgtagccgataggtggttgacaattgcatttgggaaaaggatccgccattcagtagaggctaggccgcgatctagtcttgcccgcttcatcttttgtatcccattggagcatccaccccccttagcccaagtgtacactgggccttggaagccaagatcaattaatcccgctctatgaaccattcgcctaaagtcaaacgcataccgagctatatttccgttgtaattgtggcattcattgtcttggagagtaccattcatatcaccgaagagtaccataggagatgtagcattaagaacgaaatctcctacatgaagccaaaatcgttccttgtccgtcttgttgggaggcccatacatctccaataatagccatgatgttccaggaggatcggaggttatttcaccagtaatcaagtatttcatggagtgttttatattacatttgacacccttcatccaacacatacccaatccacccgagagacccataggtgggacatagtgaatgccctcgaactggagtctcaaacaaattgtattgaatttatgaaaaggaatccgaatttctgaaagaattagaactacgggtttatgatggcgcaccagatgcgccaactgacgaactgtcgcggaattctcgagaccgcggcagttccaagctagaattctcatggcgacattggagacttttctgggcaagtctccgtagccccaaa

SEQ ID NO: 219563 - DNA, 2836 bp, Cannabis indica
ttataaaataatttaataatatttcaaaaattactttttaattagtttttagtgacattttttaccaatgacactaaaaagattatagttacatttgtgtttttactcacactcgtatatcttacatatttttcataaatgtcagcaaagcataaatgttagtaaaactaatcaattataacactttgaaatgttactaaatccctattttgctggtgtagtgctaataaaagtatccaaaataaatttaatttgatggttaggtatcactctgctaccaatgataaaaatcctatttccattccagccctatctccttatattgtatttatatagtaaattaatgcatgtaaaactttttagtaatcattttttgtcattttgcaagatcgtataggaaagcgtccagacttgacttgttaccttgtacaaattaagtattcattaaattctttcacacatttatgcacgtgttttttaatctaattaatttacctatttttcgtgtagagtggaaaatatgagggaagttctttgttatttcctttaacccctgatgtgtttgaccaaaattgtagtctagccatggtcgcactaattcagtgatgacatgtatgaattgtattatatatccattgtttgtacttggtcttctatttgaatacagtaaaatattgatatatgcgtattaattatatgcatgtgatgtaacgatatataatatatacattaatttactagaatcgaagacgtatatatacttgtgttaagagactttgaaaatagatgaaataagctcaaaaaaaggcataataattaatggcgatgaaatctcggctctgtgagaagacacacctgaagaaaggtgtatggagtcccgaagaagatcaaaaattgagatcttatattaagaaatacggaatttggaactggactgagatgtccaaagctgctggtacgtatagaaatatattaaactgaaaaattggcaatatttcttacataaatttggcagtatgatctaattagaaattaattttaattaatgttaacataacttcaaggacaatactgagctgatacgattaaatatatatataggcttgaataggtcgggaaaaagttgtagactccggtgggtgaactacttaaggccagacatcaagcatgggaattttagccaagaagaaaaggaaatcattgtcacattgcatgagactctaggaaacaggttagtagtatactgtactaataaattaaatatataatatcatataattaacagggttatatacaatatgaatcatgatattgatacatatttttgttatatatttgtttaatcagatggtctgcaatagcagcaaaactacctggaagaacagacaacgaagtgaaaaattactggcacacccacttgaagaaacggttccagaagcagctgccactgcacagttctagtattagtattagtactagtacaagtagtgctactacaactactactagtactactgtattattaggaggaatcaaatcagaaccaaatttaaatgatgaagcagcctctgataaggacataattgttagcaatagtatttatgaattagctactgatcatcaactactctcattcccttacgagcctttaatatcatcaaaattggaaatcacaaatcatcataaggaactgctttctacacatgatttcccttcagctgcgattgttacctcagcacctacaaattatgaaattggctataatagacgtgatattgaccagaatgaagttgttaatgatactgatcattattgtaatcataattacgggactaccatcaatcataatacatctcaaacatctgaaaaaattcatcattgtgtacaagtaccaggagggtttgaaacccgggaggataatcatgctcatcaaggaacatttgtagatgatcatatgcatccaaattatggtcaagttatgggacctagtagaagtatttctgagaccatgtggccatatgatttatacgaattagaagatgtctgcaatgattggttgaattatatggataacatattctgaaagtgcaaggaatgtaccacacatatatatatttatatatttatacgtaatctgatgatgtaggacttgctagttgaattttagtacttagtctaattaatatatattatacatatgggaccacttgatcgttgcgaaaaagaacaaataatgtgtatatttagacacacacgatactgctgtaatttagaaggttaatgttacactgctgtaatttagaaggttaatgttaccataaaagtcgcgttgtcaacatttttgcttaaacggcattgattaatggtaataaaaaaagaaaatttgctttcattgagagttgaactcaagacctcccgcttactaaacgggtgctctaaccaactgagctatgaaagcttggtgagatattattattacaaacaaaatataactgatgtgaaacatataatacattaataactatcatcacttggaaaaaaataaaatatactagagctgttctctcagaaaaataaaagagataaatgtcagtaaacaaaacagagttgtttcttcttattataaagaattaatagagtacaaggagtaattttaggattattgtttacatagttggagttgtgttgttggattgtcggagttggttatgcataaactcacccaaaactttagcccgtagaggaatccccccacttctttctaaaacttgctgtttcaactcttcaatgttggaaggactgaagtcccactcatctttctccacttcttgcttga

SEQ ID NO: 219564 - DNA, 4101 bp, Cannabis indica
attttttaaacattcgctgcgaagcacaggttgtttactagttattataaaaaagtaagacactttttttctcatataagcataattgttgaattgcttaattatagttttttttatagattattaatataatttgttataaaagtgttattattaaaaatttatctaaagactaccactactatatcttttctctctggagccttctagcaggtatgaggtgcatctcttctctttcattgagtttggttcctctaatggaggatctcgtccacccttcactgttaagtggtggtttgacttattacagatatcaatatttgtctaattttccctagtcttagtgcattaaatgctctagggtttattattgctctctttcacatctaattaatcttactcagagcattaattgctcaaaatcctttctctcttcctttctctcccattttcttcatcattcccttttgtcttctccccatttactatcgatctcccaaatctttacttagaaaaactcccttgaatatcgcaaattaaaggtagacgactggtttcccaatgcctctcaggttttcctcatcattgtggcctccatggataagactagggatgtgactagggcggttctaaggtgtgctcttcgtggcttctggttctttatatatatccaagctcaggtattgttcacttcatcccttccctctgccattttctctctttgttgctatctctgaagtttttctctttgtgaaaatggatgagtttctaaacactgtctctaatgcgttagctcttccccctgatgagtttactgtgtttacttatgatgttggttcttctagttcttcccctgcctcaattagtcttcttcgtaagcttcatactatttgaccttataataggccttctctaatgaaaactctttttggcatctgatcatcgcaatgccgatttccagtcattgtgtctgagcatgttgatggcatgtttcttgtcacttttggctgtgaaggggacaagggtagagttttagagggtcaaccttggcattttgcccagtgtatcactatctttgctactccagatagttctttcccccttactcctgaaaatctgcactatgtttctttttggattcaattgtatggtattctattcatgtgtaagtcctatgaccttgctaggtttatagttatggaaattggtgatcttattgaggtgaataaggatactattaaggagggtactggactctatttgcgtcttagagtccttctggatgttaacctggacattaggaggggtatgaacattaagttcattaggatggggcgtgagtttgttaaatggcttgactttcagtatgagagactaccatatttctatttattctgtgggaaattggatcataccaaaaaatattgtgtagctttcttgcaaaagtgtgatgagattttgaatgaacctctatgtccttataacatccttcttagaggcaaagaaaagatttctgataaatctcagccctttcaatatccccatcctcctactattactatggttaactaccaacctgtgaatctcaacctgccccctcaacatttctctggtcattccatcactttcccttctttccttaacctcaatgctcacttcactggtccttttgctcctcctccatccactgttgttctcatgatgcctacacctttgaatcctaatatttcaagcattacttcacagtctgctaggcccacctttgacatttctttgaggccatttgcttttacctcatactctactgactctcttattgtggctaatagccctgttagccaaatggacactctgtcctctggccctacttttcctgtgtctgttcctgagagttcttcccctgttggtgatcctgctatgggtgataactctcctcagggccaacctgagtctactgttcgtgggaagggcctagcttcagcctctggtgtcaagagaccttctttttcagcctcaacatgttgtggttggaaacttagtgaggtcccaactcaaacgtgctcgttctggtgataaggaggaggaatcttctcttgctgctgctgatatggaacaggcgggtgatgctttgcacacccacccagaaaatgagtgtgttaagttggaatgcacgtggattggggagtacatgtgtattcaggaggctctcccttttagttaaagatcattgcccggatgtagtttttttgatggaaactcgtttgcctatgaaggctgtagatagagttagagtagctttaggttttgataatggttttgaagtccgtaggaagtattttggaggtggacttcttcttttgtggaaagctactgtatatgtaaatattttatcttttttcagtaatcatatagattgtaatattagctttaaaggtaatgaaatgtttcactttactggctattttggttctcctctcatcgttcatttacttggaatttgcttaaaaagactttctctagtgctcccaacctcccttgttttatcatgggagatttcaatagttttttatcttttgatgataaaataggtagtacttactataatcataaggatatggaccaatttgcccaatttctagacaaatttgtctttctccctttccttttgagggtgataaatatacttggcataattgctccgtttgtgagcgtcttgattgggctcttggatctgagtcctgaaggactctcttccctactgcaaatttgcatcatttgcctttttatggcttggaccatcgagccattaaggtttttcttcatgattctaatgtctctagcaatccttttattaggaaaagatttcagtttgaaaacatttggcttgataaccctcatttttataccactgtcaaagactcctggatgaattcctctagggtctcatcccatgaaaatgctctcagcaggtttctttttgtcaagattcctgtgtctctgcattaaaatcctggaataaatctactaaagtgattttccaatctcgaatccaggatactcagaaagagattgctaggattcaagcttctgcctctaatagtagagactctagctttcgtgttaagtatcttcaatctcagctggatgttctcctttacaaggaagaggtttattggagacaacggtctcgagttaatttgctttaagttgatgacaagaatactaagttttttcataggtttgcttctcataggaagaagaataatactattaaatacttaaaagatgattttggtaatagcactaatgatcctgaggctatgtttgatattatgtcttcttttttcaccaatctttttagctctgaggtttgtgatgctgaggctactaatcaaatcttggactgtttagggccttccctgaatgagtctgacattgattttttggctcagtctttcacagtccatgctgttttagattgcttaaataatgaggttgatttctctgatattaatactactcttattgctttaatttctaaaaaacagcatgctaattctttaaaagactttaggcccataagtctttgtactactatgtataaagttatttataaagttcttgccaatcgccttaaagtagtcctcgacaaaattatctctccttttcaaagtgctttcgtttctgggcgaattatatttgataacattcttatttcccaagaaataattcatgctatcaactctaggaaaaatggtaaaagaggttgggctgcttttaaactcggcatgactaaggcctttgatcgtgttgaatggtattttttggaaagtttaatgttccatttcaacttcccaattaagtttgttaatttagttatgaaatgtatttctactactaggctttcttttcttattaatggtgttgttcgaggctctcttaaaccctttaggggccttagacagggagatccgttatctccctatatttttatcctttgtgctgaaggtttgtcctctttgcttagggttaggcaggatgctcatcttcttaacggtattgccatctctaggcatgctccttcttgttggaaattatttt

SEQ ID NO: 219565 - DNA, 2955 bp, Cannabis indica
gagatgtgtgaacgtgaaaatataatacacaacaaaaccaacaaggtcataaagaatttaccatattgacatatattttaagattttagacaaataaatgaaattacaacttgcctctataagacaaatactacttcaaataattaagattatgacctcactaaagccagaagcatgaaccaaaatcgtattgaattgaaaagtcttggtcaataaatgtaaagctaaaataataataacaataaaaatataagaaaaaaaatgaccaatgtgagaattaaactaagcatttcaaatcaaattattatatgccttatcttctatctcccactataagaaggtcaaactattttaatgcacattcacttccacatatacttatgttttttcactaagtcaaaactgcaatagctgaattgataagatatgaatcatatgattcaggacttaaatgctttttgagtaccaactcattttataaacaatctttttctgcacccaaggctctcaaagtttgactataataaatgagagttaaaagagtactatctttctacttagcccacatcagagagttgacttctcaaactagaaagaaatcaacttaaatccaaacagaaaattatgtacttgggaaagaaactaaggcaattggaacttttaacactaaaacggtttaagataataattaacaataaataaggtcattctactaagtatcaaacttaatgaatcaaaacaaaatcaagaaaatatatattacctgagttctaccctttcgagtagctatatgcaaagcagtgttacccttgttatccactatgttaacagacaaaggatctgcttttacaagttcttccacaacctcaagcttctgacctttcacagccatatgaagagctgtttgtccctttttatctgtacgagtagccaaaccaggctcagctctaagaagctctttaacaacatccaaatgcccatttcgcgcagcagaatgaagggcggttttaccattacttctggcaatggtggcgaggctgcttccggtttctaacaacagattcactatctctgtatgaccttgtgttgcagctgtgtgaagagccgttgtgttggatatatcaacagtcattgctagttctggatatgcctccattagtactgtcaaaacatctaaaagcaaatagagcaaaattaataaacatggcctaaaaagaaaagggattctttttcccgaattattgagattattggattcaagaactatcgttcaacttcagttcatgtcaggtacttaaatctctaaaaagttcgggttaaaaaacaaaggagggagtaataaggtacctaaatctccttgcttggcagcaatgtggaaagcatcaaaaccattcctggctttgattccagcatcagaaagatcatagtactgaatcatttctctcaccaaatcaacatatccatactcagccgcaacatataaggcggtttcgccggaatggttttgcttagccagaagctgcttcaattctgttcctcctccggtgccggtgaggatttctctggcggcaacaatgtctccagctctcgcagccgaatgcaacggactgtcatcacgttttccggtcaattgcttggtcattttctttctgggcaaacttggttgaactgtctgaagctgagactgttgctgctccccaactggttcttccgccattgatgaacaatctctttcctttctcagaattttttttttttttcaatctacaacccacttcttcagaaattcttttctcttaattccaacgaaaacccagatcaaagtttgcatcttttatccaaaacaatcatcatttcttcaaaacaaaaacaatcctttgaattataatgaaactcaaagaaaaaaaagctaaagatataagctttactaataaagggttgtcaaatattgaattgcattctccgatgtaacaaaatcatagatgtttaaggtctcacttttcccagcacaacatcagtattcttttttttttttaacaattgagatgattttggataaaatattaaagaaaattcaattatttttttaaaaaaaaatacctgggtttgaaaggaggagaccctttattctcctccattaaacaccaaagaaaaagccatatattcaggccccaggttctagagaaaacagaggatttaataaaatacacctattcagacccctgtgaccaatttatggaatacacataaaaataaaaatgaaaaggagagatttttatttggtatgaagaaaggaataattatagtataataatgtaagatacattaaacacataagcacatgtatgaagcaacttttttggaatcttatataattagaccccagaagctaatatacgaacaacttagccaataaagaagggttcttttgtaaaggtggtgatcatgacaacaaaataaataaataaataaaataagaaataatggctgagaatcaaaataaacaagaaaattgcagaaagaaaagtctttgtgttaaaaaaaaaaaaaaaagaaaaaaaaattaaaagcaagaaaaatgcagctaaaaaaagtctttaattaaacgaaaaagaattgtatagcaaaaagggaggacaaatgaaataacggaaataacagaaccacgcgcattcttacccgtagcagagagtgttgtttgatttaatttaattttttagttaatataaataatttagggtgattctacaatacaacccccttaaaagggatgtactgatgcacccttaacttgtttcggcattcagaagaattttttagtcttaattttttttcatattcatgtacgttatagctatttaagatatcctacaaaattttgaaaaaatcggaataatttacaatatagaaaacaatgttcaaacagtctattttacacgcgtaataaaataaaat

SEQ ID NO: 219566 - DNA, 6514 bp, Cannabis indica
tcacacacatacatcggtccttcctttttagtttgtaatacgatttttgttaattgttttatttctactaaatttgctgcattcacaccagattggagacatacccgatgctgacatgaaacctccggaaaatgttctttttgtttgtaaactgaatccagtaactgaagtaagcgaatccttactccacactttcctcttattatttcttttattttttataaaaccgataattgtatcacaaagatgttgaccatgctactagctgtatttatactattatttgattttaaatttaacaaagcaatctctcacaatgcttccattttaatgcaataccacttgtaaaatgtgcaagatgctgtttaatggctcatttgttaatgcaggatgaggatttgcatacgattttctcacgttttggttctgtatcatcgtaagtgataaattaaatttcttacttaatttgcacatcaggggattactaaacatcccataatgcaattttaatctacgatctcagggctgaagtaatccgtgattttaaaactggagacagtctctgttatgctttcataggtgagtttttccatcgaaatacttcctctcttttatgttttgatcttttttctcttttgaagtttctccattgtcatgcctaatatgcttaatatgtcttttttccttttatcaaatatattgtgatggaattttttcgtgtcgacttttgtcagagtttgacaacaaagagtcatgtgagcaagcctattttaaggtaggttgaaggttaaattcctttttttttcttcgattaaattgtaattcaacttgttcgccaacttcgtgtttgtttgcgggcatggataggttttatggaagaactcatttgtctttctttggtttatgtatgattttaatcacatagatggataatgctctgattgatgatcgaaggatacacgtcgattttagtcaaagtgtctctaagttgtggtcacagtacaggcgcaaagaacacaaaacaggtcaaggtaagcaacatactttgttgggtaagggctgatatgtctcaaaggtaatgagaggttttgaaatagtgttttttctatgttaggtaagggctgtttcaaatgtggtgccgatgatcatattgctaaggattgcactgggggtaccgcaatcccacagcagcatcagaagtacatcttaaaggacgataatccacatcgaggtggaggtgacaattcaaggtttgttgagttaaatatggtcattgatatatcattgtgcctctatttctcttctctgatgttaataaaaattctaggtatgacatggtgtttgatgaagacattcaagaaaagtcctaaacaggatacggggaatcggagccaggaaccagatgtaagagcagagaaacagaagattgagaggccaagtttggaggagtcaaggcatagggatcaaaataaaagagatacaagacacgggcataggaaagccgagaaaagtagtagagaccacagaggtggtgaattgagacgagaacgggatgatagagaaagtcgacctggtggaagtagaagcagtcgagtttatgttgaagagcagaatagagaaaagcacaaggagaggcgaaatgaccaagatgaaagaagggttgaagagcgagataacagtaggaaaagtgctggaaatgggcgccatgaagaaagaagagacgacaaatattacagaaaagcaatcgatgatgataggcttagggaacaaggtgaggacagagattacaggaagagaagtgcagataatgatagtcgagcagagaggagggacgttggagattttagaaagaaaagcgtggatcatcgaagctatgatgacaggaaagatgatagagactacaagaaaaatgatgttcgtgacacaggagatgaacgaagggatagaaaacgaggcgcggatggtgatggctacagagacaggagggaagaccgggaacacaaaagaccggaaacaggtaacgctgatgagcgagaccgtgatagaaggcaaagatatgacaagagaagatgagtgtttcttacttaaaaaaaaaacaaggtggtggtgactgaagtagattttcttttgtggtcattgtggaaccaagttttggttttaagaaaaactatttattgtctccagcattaaaagttcatccttgaatttgttgtagaattggcatttagacttgtttagacatgagacttaatagttgagtaatgatatgtgcacttacaatatgaattttaattttacagggacgtgatctttttttttaaccaatcacagttcttttagaatgggacacattaccttagaaaatggtatttgggtaattcaatttagacaagaaactgacttgattaattaaatattctctaatctaccaaagctatatatgaacgcattaaataataaatatgtttattcccacacactactcagtgtgattgtatatagttttgaactaagaatggaaagttttacaattgtagtgtctagctttggtgtttgggttggctttgtgacacagcttcaatgcacagcaaaaactaggcttatatcaaaagagaattaatgaattgtcacctttctcattatgattatgcaaattgcattgtggttttttataggtctaaatttggtaagaatgcctaaaaatgatattggtgtataggttggataacctgaaatgggcaaatctcaaaggtgggattttgcagattgcagcagactctaaactccaatttactataatggcctatagtgggatcctcatttctcaaccatttgattcctctatctcattaattttcaagctatttaaaccatagataataagccttagcttaatcaagttatgacaaacttgaatgagaagaaaatggcttactctaaaacacacagcttttcacttgttcttgttctccttactctttctcaattctttcaccaacatcctcaccttgccgaagcagacacgaaactgatcgaaaacctctgccacgctaccgaagttccagacacctgcattcagtgtctccaatccgatccctacgctgaattcgccactgacatagaactcgctattatcatgatgagctgcataagaaaccatgctgataccctgcaagttaacatggaagacactgctaacaattccaaaatcaagtctacaaaaagtgtttacaatggttgtgttaaggcatatatgggtgcaaagaaagatcttaatacagctacagagcatttgcagaattatgagtttgataaggctgagaaatatgtggatcaagctatgattaaacatcttgtatgttgtggtgacattcagaacaataaaaacatcactatctcaactgaagtggcttatgagatgaaaatttatgaagagctatgcttttcttcagagagaataattgagagactctagtatatataattatgtaattactaatattagtacttgtcataattcagatgtgtagttgcattatataattttgacaagattgaaataaaatgttgggtgtatttttttttatgattgaattgaaaagtcaccaaaaatatggccaggagaacccaagttcatagagaattgggagtttttcttttactgttttcttttttgatgaaaaactacaacagcaacaagaaaactaagaaaaacaatggaagaagagacacccagatagaattaaactcctcatagtcgcggaacactttagctgtcacctgttgaagctctaatctgcctctaagggaattgctgcaggcccagcgcgcaagatcacgagccacaaagttactcttcaaggcttccaaaggaacacttttggtgggctgaagacacggcttgaactcatctaccactgtcttcgaatcagattggaagataatgttgattctagccttggctccaaggatttctgctgttttgcaaattgtagctgcttcagctaatgtgccatccaaatgccaaaggttccgaagccagatcttgatgatttcagcctggtcactgcgaagaaccgcagcaccaactgattggtctctcctaatggcaatatcatattacagactatcaaatatttcttacattccaaatgtttgcttagtcactgataatggcatccgtgactcacttctaagtagcttgataatgggacattaatctacatcaaagagtaacaagtattagaaaattcaatcacaaaaacatctcaatatggattcaccaataatctccacaggaacataagccctctttaaaatgatgaaatcttttggcatctcgagcaatgatttctcttccaacagctttagagacaaattttatccatgaatgacagtccccacaaactctaaggttcttaaaaagtctgatagtagtagttttgttatcagtcttccacagtgcaaaggctatggccagtttctcactatgataatataaagacctctttttttcctcctcatccatgttttgcaacacaaatcttgtatcaggaatgtaacccaaaatctttaccttctcaatcaaacatcctaatgtatcaagtatctctttagaactcgggtgagaccaatctccagccatgaaagtgtgaacctccttatcaatctcaacccagctcattgcaggattcttcttaaacttcatttctctcattgtgcttttcatctcaataacttggctccaattaccagctgaggcataaagatttgacatgaggacgtgagtcccctcatcgtccggggagagatcaagcacttgctttagagctctctcggccatctccacctctccgtggatcttacaagcactcagaagtgtcctccataaaaccaaatctggatttcttacttgttttaccaacacttcagcctcttcaagtctcccacaacgcccgagcagattaaccatgcaagcatagtgatctctagtcaattcaaaccgttgattgttcttaatggaatcaaataactgacagccttcttcaaccaaccctgcattgttacatgctaatagaacactcaaaattgttacttcatttggttcaaggcccaattctttcatcttatgaaacaatttaattgcttcatgaccaataccattctgggcatagctgtatatcatgaaattcatggacaccacatcatattcaactaaagcatcaaagacagaccttgccatttcggtacttccacatttcccatacaaattaacaacagcagaacctgcatatttatctctatccaatccaaatttcataaccatagcatgaatttgttttcctaactcaagcattgcaagactagagcatgcctgaagaacactagataatgtaaaagagttgggaagaacagaactactaatcatctctttgaacttagacaaagctacctcttctttcccattttggataagagctactaatagggaggtccaagttacctgattaggacacaagaagttgttgaaaacttttagtgaatcatcaatcaaaccacatctagcatacatagtaagaagtgaggttttcgatgccacaactgattcaaggccagatttcaccataagaccatgaaccagcttacctatgcttaaatcatcaacatttccacaagtgatcaagatacttgcaaaagtatactcattcgcattaattccttggcgaatcatttccccgaaaacctttagagctttttcgccatcaccatgctgagtgtaaccaacaatcaaagctgttaacaaaaccacatctttgctcataacccggtccgccactacatgagcttccttcatttttccaaactttgcatacatatcaacaatggctgaaccaacaaacttgtttaaaacctccaaacccaaaacaatagacatcccatgagcttccctccctccattaacaaaacccagttcagaaaaagccttaaaaacacttgagaatgtgaaattatcaggtagaacaccctctgaaaccatccttttacacaacaaaatagcttccttacactttccctgaccaatgtaataagaaatcattgaattccatgaaattaaatacctttgaggcaattcatcgaacagtttgcgtgtatcaacaatgcaaccacacttaaggtaagcatcagtgagcttattccctacgttgagacctaaaagcccaaactttatagcatgagcgtggaccattctggctttggttaaggacttgttctctatacattgttgaatcaaagaacacatacttgtgttgttgaatgagggttcattaatggagttttgtacaatgaaagtcaagaatctacagtggttgatgattagtagattggtattattaatggtgatggccaaattcaagagcttggccaatccaaccatcatcattttgccttttttgaagtttattgcttcatattcttctagtctttgcaaaagtaaaactcaatgccatcacag

SEQ ID NO: 219567 - DNA, 3821 bp, Cannabis indica
attaatttattgtaaactaattgtaaatattattatgcaaatgcagtggttatatggcgccagaatatgcctctgatggcatattttccataaagtctgatgtatttagttttggtatattgatcctagaaattgtaagtggggaaaatgtagatccctttatgatgaaaatagtactctcaatctcgttggatatgtaagttttatatacaaatatacttaattaatgttacattacatcaatagtgaattttttccatttatttatgttatttaatatttgttaggcatggaattcaatgaaggaagggaatgagtttaagcttattgagaagtgcttactaaaaagtccaaatgacaacatggaagaagcattgcgttgcatccacattggccttttgtgtgtgcaacaaatgcctgttgataggccgaatatgtcttctgttgttctaatgttgagtggtgagagattgttgcctcaacccaaaccgccggcctattgcaatagcacatattcttcggatgcagattattcctcctctaatcggccccaatcaggcaatttaagcataacagctctcgaggggcgatagagaattcatacaacaaatcacaaattttcatgtaaattttcagggctttagcatcatttcatttgttatagatgaatggctcctttcgatcctagaatatggtaatcatgacagtaaaagtgagatatttttggagctttcttcaattatataatccattattagatccattcacctactattgtcattgtgatatgttcaacattcatctcctgcaaaggatgatggggtatttaagtttttgttgggttcccttctcttgagaaattgtggttaaatgaatcctctttcttaaagattaatgatcaactccaattacaaagtttaagcctcaaattcctggaagtttcatttttagacagtcttgaattacaatttcttcttgagaatttgagtttgagctactgcggtattataattcaaagcatcttaactttgcgagtcaacacttgaaaagcttcaattttaagcatgctcaatgtgatgaagatgaagatgaaatgatcagtggtgttacaattaattcagctccaaaattaacatccttttgttttcaaggtgatatcatctaattcgttgaatggagaatttcatttttataaggattagggggttgcactgtgacaaaaagtttaccaatatgatgaaatttctttccaatcccaattgttatttcaatttagtattataagtctaacatattatatattagttgatatgtttatatgtttgaattgcatgaaatgaaggttcttatattgccaaaaaaggtgaaaaagatagacatttctcccatgcttaattggaagcatctcaaagtaattatcactgagtatgatcgcgaaagattgttagatttgaaggactcgttgttgtggatttcaccatctttagaaacattatctattaatgaaaatgtgatattttatccccttttgaggttgttattttgcatgagaattaaagcccattgatttatgatatattttcttggcttctaaactcacaatcagttccatcatctatgtttttgtctaaataatcagactaatcattcaagccaattcttgttaacaaaatctgtactactgctctgatcactagctcatctctgcaattgcatactgaattgtttgtctaagtatttggttgtttcaataataatcaaagagaagagaatggaaactattgatttatatgtatgagtacatgtttcacaaatgccttttagcatgcatttctgtttattatttggttgaaaaatgcattgtattattgaaatttgattcttcaaccttttctgataaagaacattattgtgtattttatttgattacttttcattaaaaaacattaatgtttgttaattggaagcatcttcgagttattattactgatcgtaaacctgagagagagtacgacttgaaagattgccttgttctgaaacactaaattggtactttagacctttttcagattttctttgatttattagtaaatttatactaatgaacttgagtactttgcttaagaatgagatattctcttttattttcttgtgaatgagttgattttgttcgattaattaatgagttgatttatttttgtgctcttaaatgttgattttatatgctcagaaaaccatattaatccaaaaactattgctttgttccttgtcctccaaatcatgtatgcacagacattaaaaaccatggcataaatttccttcctcagcttagtttgtaatgtttattagtttatggaagataatcagactgatatggatttgctcagttttcaatcaagtaatgaagaaagtgatcaacactagtgttaatgaaaatatgttgaaaagggtactcatttggtgtaagcaatcaataagagcctcacaattcagaacgaactctcttcctctcttctcttttctgtccaactcttcttgtgtgtgtgtgtgtgtgtggagggttgttaagtgtcccttgtgtgattgaccaagggaacaccaatgtgagatttaattgtaatgacgatcaacatcttagactcaatgagcagtgtatatagctcggattcaatttctctttttttggtttctctttttattttttgattgttattgttcttgattgctgtaactgtttttaattcagtatttgacatggcaacatactagaagggtcagtttttattcctctgtttatttatttatcaattactacatgaaggtttaaaagagagttgagcaaagctttgaggatgatctttaatccatgttaatttttttgaaaggaaatcttgaatcaggtgaaacaattcaattttaatgcagtcttacagattgaagtttcaaacaattaaatgtagaagtagtagtagttgtattaaaccaagaaaagaaagattagttagttagttaagttgttagtgttgataaaggctgttgagctagctgttactattttgtaactgttttcattgttactgtttagttgtaaaagcttaagtataaatacttaatattagctctgtaattcattctcttaacaacaaaaaaaatattacgtataaatttttgattttggacttcagcattactatgagtaatattaaacaggaaataatatgaatatatatacattaatttaacaataaaattagtatatggaacaaaacaaaaataactactaaaaagattgactgattagaattacatacacttaaatcgagattacactcgatcgagctacattttttttttctttttaatttatacttaagtgaggtattgtccagtagaaaacaaactaatgggatcataaccattatataaaagggattcatcctagttagtactctaatcaccttgttgtatgaactgcggttgttgttgttgtagttgatattgaccatcgtgtgaaagggattcttcatcactttgttgtatgaatgtctgtgtttgtggttgcaattgcagttgctgctgtaattgtaattgataatcaccgttgtggaaaatgagttcttcatttgtactctggtcactttgttgtatgaactgcagttgttgttgtaattgatattgagcattgcgtaaaagggattcttcatcattttgttgtataaatgtatgtgtttccagttgctgttgtaattgtaattgataatcaccgctgtgggaaaagagttcttcaattgcactcttgtcactttgttgtatgagcaatt

SEQ ID NO: 219568 - DNA, 6188 bp, Cannabis indica
cttaataattaattttttttctatgtaaaaaaaccgatcttgggcaaaaaatttgttgaaattaaatcaaattttttgtcaaagaaaaaaaaataaaatctattattattatgaagaataacaagaacaacaatgagtgccataatggacatgtaaaacggatggttaaaagtttgaattctctccgtacaagacgttacctttgcgctgccgtactgtaatttcccgtaccgctccgtgcgtccggccgtatggcccagggtagtggcctgctgccctcaagcattgtacaaaatgctttagggttttataccctgtcacaaaaggggaataaggaaaggtattttttactgaatccttctgcgccgtattgctggttttccccttctgtgcactggttttcttctgtgactttccaggttttcccaatctccttgctctgtttttcaaaggatacttgcttcttctacgtagttatggctggccctagtgttcaagcggtggaagagctgatagaggaaacgaaaaatttttgctttgatgatttttccattcaagttgaacccgataatgatgttgctcgtgatactgtggcgaggacggtggtgggccggttttttgccaaacgcggggtctctttgggtactctgcgacgggctctgtccgggatgtggaggctctcaccggggtggcgtctgcaggagccatcgccaaagatctttgtttgccgattgaatagcccgaggaaggccaagtcggttctggaaaatgggccttggagtccgtgtggtggtttcctgttggtgacggccctgcccgaagatggagattggaggtctgccaatcttgagtctctagatatatcgggttaaggcctttggggtgccgtatgccgtttatgacggacgcctgcattgctaacatggcttctcgtatggggtccctcatccaatccaacaaagttcgacgaaatgggatcattgcgaatgacttttttacgattccaggttaaactcaactagtaaagttccgattcttgctggggtcctctctaacttgatgataggaagaagaaatggtggtgccatctcaaatatgaatgtctcccggtgttttgtttcaaatgcagagttattggccatgaggaagaagcttgcacgggtcggaaaagaacggtgacagttcaagatggacgtacagtcccgctttatggcccttggctcagagatggatcaaagttagagaacggatttgcgcttcttgaggttgatgatattagcgacattcggagattggaaaaatccgattgtattgcgccggggtgggtgaggctaatggtggtcctattgaggtggggtccggtagtcgctccggcctccggggcagtgattccctcttctcctgttgccgtgactagagtggagcaattgggtatggaaggtgtagttacccagaactccaaacaggccttttctgtagcttataatgactatgttgatctctccaaattccccaccaatcatgtgctacatgttgctaatatcttcaaggagaaattgggccctattaaatttggtgcgatgcgtgaaaatgaggaggagccgcggatcaatcctctgccgattcagaagctcaaaaaacccaagcttgttaggccaagaggtattcctaaaccccctatgtttggtcgtaattttgacccgaataagttaagtggttccaagaggaagaagagtgttggtaagagcactcggcggagtgagtttgtggcggaaagccagggagggtgttgcatccaggtggttgataagacaggcatccctgaggtctttggggaggttagtggggtgaaccagagccttggtgtctcgaatggatcggaaggcgaggattcagggaagaggcatcgtattgatatggagtgtttgcgatctaaggaaggatcgtttggcttgaatttggagaatgtttgtcaacctatggatgagttcaccccgggtgacaaaattgaatttggttcgggtttccaaccgggtttggcaactgtgtctgctccggctttcttggcggccacggagatggaagcatagtcggttaaatctgatgtgagagctcctaggaagggtcttgcacaagaagttctgaagggttctactcaggatttttctatggccgaggaggcgggtcgtatcatgccccccaacgcctcatgaagctcctctcgtggaattgccgaggattgggaaatccccgggcaaaaaaagctctccggaaccttatccgcgatcaggatccggatgtgctttttctaatggaaactaagttggttcataggcgtatggatggtgtttggcgccggttaggctttgctggtggggttgttgttggctcgagtggagctgctggcgggttgtgcctttgttggaaagagggcattgagattgaggttgtttcgtcgactccttcaaccatcactgctcgcttctcgagggttcttaatggcccggtttggacctgcttttgtgtttatgcccccccttaccgcggggagagggtgaccttttgggagaatctttcaattgaagtggccgcggttgttgagccgtgggttgtggtgggggatctgaacctgattcttgatcaagccgagaaggttggaggctcccctccggcgagatctgattgtcaaatctttagggatttcctggatgtgtctggaggcgtggatcttggcagtgtgggaggattctatacttggtctaatggtcgagactttagccatcttattcgggaaaggttggatagagtggttggtgattcttcctggatcgtggcttatcctaaggcgggagttagatccttggccatcaaagattctgatcatgcccctattgttttggatctccttttagatcgtgagcgcttttctactcctttccgattcttagatgcctggacccgtgaccctggttgtagggaagtgatccgccaggcttgggagattgaggtcaggggttttaagagcttccaacttgtgactagactcgcggagtctaggagacgtcttgctaaatggaacagggaagtctttggtttctgtaaggaaaaacttgctctgttggataaattgctgattgaggttcaggggcggccaccctcccccgatagcctgaagattgaggctgatatccttcttgagatggaggagataaataagagagaccaggagatttgaaagcagaaatcccgtaagttatggttgaaggatggggatcagaattctagatttttccatgcctctactatcatccggcgcaaacgcaactttgtgggagcggtctctgataatggctcggattgggtgacaggacgggccaatgtgggaaattacttttgtaataagttctctgaagtgttcacctccggtaatcccagcttggagaatgaggtttttgattgtatctctcgggttgtgtctcatgaggataatgtggacttgatgagggttcctactgtggaggagatcaaagcggttgtctggtccttgggtcagttgaaagctcctggtccggatgggatgccgggtcgcttctacagagcccactgggatattgtgagtggcgatgtcattgggtcggttacccaatttttccagacaggggagttcgttaggactcttaatcagacttttattgtgctcatcccgaagcgcagtaatgcccagagtttcgatgattttcgtccgattagcttgtgtaacttctcatataaaatcatctccaaacttctagccaaccgtcttaagaagttgttgtctcgccttatttcccctttccagtcggcttttgtcccagggaggtggattgcggagaatggtatcattgctcatgaggttatggactttttcaaaaagatgaagggccgtagggggtttgttggtttgaaactggatatgtctaaggcttatgatcggatggaatggagctttttggacaaggccatggcttcttttggctttgatgtcgggtttcggaggttggtggcgaagtgtgtctcctctgtggccttctctgttcttttaaatggcggcccgcttaagcagatctttccggaacggggtctcaggcagggagaccccttgtccccctatctttttatactctgtagtgaggtgctctctcggttgctcctaaattcggaacatcggggcttgatcaagggcttctctcactcgaggaatgggcttcccatttcccaccttatgtatgccgatgacaccttcattttctgtgaagctaataaggagaatgtgttggaggtccagcggtgccttgaagtgtattgtaggaactcgggtcagagaatcaattcgaacaagtctgctattgttttttcggacaacgtgggtgcggaccttagaagtgaaatcaaggggatgctggggtatagagatttaaatcgaagtgacaaattccttggaaacccgatccttttttctggtagcaaagttagggacttcgggttcattgttgacaagatggctcggaggatcgaggggtggaaatctaaacttctttctctcgcgggtcgcactacgttgatacaatctatggccttgagcatcccaacttatactatgtccaccttcgtagtccctaaatccatttgtcattctttggatagaatggtgcgccgcttttggtggaaggggtcggatgattcgacccggttcatggctttggctaattgggatactatttgtgttccaaaacggtggggcggtcttaacttcaagaagtttgaggaatttaacttcgcccttgtgactaaacttggatggcaccttgctgctggtactgattccccgtggtgccagtttttcaaggataagtattttcggcgattgaactccttctggagtgtccctaagtccaagtcttggtcgtttggggctaaaagcatcatgtccactagggagttcattcggaatgagacttgctttgtggtggggaagtgagcttcggtggacatttgccactctccttggctgcctggacacaattgggagagctatgtagctgccttcaatccaagagtttgtgagaaaggagttatggtcaattccttggttatcccaggacggggtgattggaactttgaggcccttgagagttggtttattccaagtatggtgaaggatgttattgctgtccctcggctcaccatggatgctaatgatgaactattctggaagtcatctccggatggctccttttcggttaaaaaggcatatttggcttgcatccgtgacaggtgtcttattgaggagagaatgtggagtactctttggaaagataaggggcatgagaggattaagattttcctttggcgtcttgctagggacattttaccatttgggagtaggatccaacgcatcttcggcaataactctcactgtgtgctctgtaattcaggtgacgaatcaccaactcaccttttctttcattgtgatattgctgtccaggtttggcgctccggcccttggggttttcgatcggattctatggtgttttctgacactctggacatgactaagtggctactaaaaccatatggtaccccccttgttgatagtgaccttgccttgttctctaagtatgcgatctctctttgttatattctttggaggactagaaatacttccttccatgagggagtgcggcctgtggtggctaacatccagcaggcgatctccttgttggtggaggattggcctaatgaggagacttctgtggtcatgattcggcatgaggagcacaattccagtttgggggagttcttaagggagatacctcggagtgatgtctatgtctttgtggatgcggctgttcggggtgaattcgggattgctgctgtcatagtctgtgatctttcgggtcaggtactcgaggcagccacggttaagaggagagtgtcgtctccgtttgaggcagagcttgcggcaattcacttgggctgctgcagaattctgcagaattcttggccgagggtgactattctgtctgactgcaagacggcggtgcagggactttcttctggccagtcgccggagtggagggttagagggcttttcgatgacacctttctccttctcagccagatgccgaaccaccacctgtgctggattc

SEQ ID NO: 219569 - DNA, 3944 bp, Cannabis indica
agagtgtgttacacttcttgttgccttccaggatgtcttttcttgttttcttcttccctgtctacaggaactaggctaatgatccaatatttggagttttaaaaaataaaaatgaataaatattatcattattagagaagaaaatgacagaaagtgactatgtataccctacttattgatcgatacaatattaatatttaatccaagttgctccttttgacaaagtattatgattttattggattaattttattaagaaaaaaataaaaaagcattttgaaattcagattatgttaggctttgttttatagaagaaaagaacaatcgcatcacatgaaaagaagttctccatttctagactaatctccttatatagatataatttaaatataaattttagtgcaacttgaaatataatgacgaaaatgaaaaatgagaatagttaataaatggattgtggcaaaggcaccacgtcgtagtcgtagacatgaaatattattaagtcacatcaagaacattattacctatttgtggtcgtgcacctattccttcctatactattactatatttacatcattaatgtcatgaaactgaaacccaacagttactggcttttcgattctccaagtatcctctcccatgtggataatatatatggtccctcctcattccaaatatttggagtagactacatatatttcatactcaacctaaagattcatcaattttttttcacttttttttcctttattttttgtcactgagatagatgtaaatcttattacaagaccattagagcattcttactaatcactatagtctataatacatcattctctatattgataatttatggcaaaaacccaccattccactaactcatttattctctatttacttttgtttttattttgtatgaattaaattgagaaattgatatatataattttgtataaattagataaaaaaaaaattgatattgatatagattgattgagttttttggtaactaataattaaaattatataaagtatttaataaaagttaaaagaaaaaatttttacgtggttaggacattaatgagttttactttaggagtcactgtatttatgagaatattgatcactatttctgtttattattgggatatttataggctcataatggtggtaaaataccactattgttgtgtttgtgtacgtcggtcggtttggtcagtttacgttacattttatttaacccaatgaaaagatcgggttagaaaaatctaattagtgcaatccacccaattaagaaaaaaaaagtttcagtccgcccaatgaattggtcagtttagtcgggttaacccgtctaaactgagcactaatgtttattttttttttcacattcaattgttatactttagttattgtgataatgagataaatataaagattgaatttaaagttcaaatcatccaccataaaaaaaaatatagttgtttgaacattttatttttataaatatgtatataaattatataatatatagattatataaattaaaacatatatatatatataaaaacactcttaatcgggttagttgggttaattcgggttgattgggcaggttggtattatttttaacccacccaatataaagattgggcggttatatttccgccgggttatctcggtttggtttgagggagttgtttgggttgggcaatttacaaaaatttatgtacagccctagtttgcaccatacttggcacaaatttcctaatctatttcagggcatagttgactatatttatggtagattttggattgtctataggtgtttggtgggaattgacttatcacttatttatgacttgacgactcatttatgtagtcattgattaatgtatggggtctcgtgaaatcagaaaatgatgggcttaaactcttaaacacgcttgtcaaagtaaggcgtctgatgctcttccccatgccgcatcaaatgcatgtatagtgtcttggtccttgagtaacatgtcacatttcattagtcctctcgtattaccctccagatatacttcactcttggagggtaaaagacgaaagatgctcgcggtctagctggactctcccgaagatgactaatttgtcattactcatttgaaataatagactctgagagtaattaaggcgacatgtcctataatgtgggtcccgttattgccacctagcttatcctgaactgcaatgtattttaaaagaaattctaggcaacattaaccccaaagtctttttttgcaatttcacaagatgggacttgcgatgtgcctcctagagtgctgacgtcatgttgcgcgtgatcattttaaatactgctcattaattttcctcatttttgataaaaataatttgatttctttatcgattctgatgccattaattgtaggatgtcagaaggacacttgagtagtataaccgtcctttttatggttgtccatatgccagctaccactctaactgttggatggtgaggcttttaatctttgaattaagatcgttggatcactaacaatccatgtcgccttagctggtatataaaaacccctcatctcttctttaagattttactctcatatcttttaaaatcttcaaaccagtcaaaacttttagtagcccagattttcttttactttttctttgacgttgtcaagctcaatttaaccgacattttgcaccagcatccacaactactcgactttcccctatttgtaagaactagctttacgagcttctttttatttcatttctgcaacttcatttgataatatgcttgcatgaatgtgttgttggtactatatctgtgattcttggccattttcctaattcgtctttagtttttatctttaggcaagagattcttgtattagggataataggattcgccttttttctttcccatcccctgcaccatcatttttcatcatggtgcagtttgcacccgatgcatagcacagacaatttttgttttcgactatgcttgcatccaaagagggcctcttctcagcggttaggggactcccattcccttttgtttaagatttgatataggggctaactgctttcttgacttttcaaatgagtgacatcttaagggattttcacaaacacaaattctgcactttcgaaaaagagatttagaacatcattcacaaactaggatgttaaaccctgaagctcctgcccaaacttcttcacaagctgtattactacagtatcatgtggtgccactatctatggtgatgcagggtccaatcccggtccctaactatgtacaccaagctaccagttgggaagctaaggagctgcactcgtccatgggttgcatccaccacctgggaaccattatgtgtgagaatggaatcatacccttggactaggggtgtttcaccgtgtggcccgggagacaaagactcctaaccacaactattaagggtttggggcatggagccaagcacacctcatttccagcgtgatgcttctgctccaaacattattttgtaaattttttggttttcgtaggactcgctccatatcagttgataccccaaggataccgcctattgtcaggcttatttattttttatactttaaggagttggtctgctcccatccccactaatattttatactgttatgaacttttttcgatccccaagaagagagatagacggaaggatggtttctactccctccatgctcatctagacaacgagatggtcaacccgttcaacttccaaaagaacgtcaaggactgtcgtcattgagtcttcttttctttcagttttaaagcctttgaacatcctgatctcttaactgagtggactcaggaagagttacaaagacggcagcatggctcaggaagagcttggttggagcttatctgactaggtctcccaca

SEQ ID NO: 219570 - DNA, 2010 bp, Cannabis indica
gtagcaagggaaaatagaaaaatgtaacatgtagtatgtatgtagttaaaaaaaagttaatatgtgtataaatttggaaaagtatagtatttatagggcaagtatcccctagttactaatattagtagtagaaaggtttgagtacaacgtacgatttataaaacacaacaaaatgaaaccatacttcaggggtattctgtggataaaacaagaaaaaggaaagatattagacgtttatcacaagaaaattggtagttgtccatcaaacagagggtcagctgatccatccttactccataaaattatagcaccacatatatttattttgaacgtacaatattctcaaaatttattctatttatagatgtaggtacatatatatagtctctcatggtggagtagtaacacctgaaaagaaattcatgcataggattagggagaataatcaaacttcaaaatccaattataaatttggtagctacctaatagtttgattatcgtttcttaactagaaataaattcacatggagatattataattcatctaaattaattgatatttaatataaggaaaagcatcatatatattataagataagagagtgagagatgaagagaactcactgccgcacttgaagttgcggggaacagtcctaccacaaccttggatttgcttgatactacgttcaacattaacgagattggctaacttgggggtgacataggggcaaacacactccacatgagtctccctcacccgcgcgcagcagttggccgaagggctttgcctgaagatcactgccttgcacgcgcttacgatgttgttccgctcttgcttgcactgacttggactcgtctcagctttcgccgtcggtggcgcaaccacaaacaacgccaccaacaccatcatcatcaaccatgctactatatcacgcctcatcatgtgattctcttttaattaatatcgaatattatcaactactctcaactactaagctacaatatatatgtagtgtgtgtatgggaatacttgccatgccaatgcctttatatatacatagatggagggtaggaatactatattatatgtgtttctagatattgagaaaaaaattccacacaagataatattaatttagaaataatgttggaattttccatagtgcgattgactaaagttcttgacgttgttgctatgcacattcctagtacggttaacccactcaatggttggttcaaccgtctataccattagttagtcttacaatagtacagtgctttaataatagagaaatgctaaagaatattctagcacccttgaatattgctattggtttataactaagtatcagattccaatcgtaaggcgacatgtgtagaaatgctgagcactattaatacccaataacaatgctcttaataatacattgtacggagactgcatattgttactattgtttttatagtgtttaatttacttaaattgtgatagctatagcaattatttagttgatcgtataacattaatgtaactatttaagaacagtttttagtataacaatttttgtaatgttctttttaagaaagtaaaaggaacatttgtttgaaaatatcaaatataataataaaatgataatatttgaggtgtgcaaataagacactgtgtttaaggatttataaagtaattttctaaaattcaacatatcttctattacaataaaagaactaggaaaacagaaacaacaaaataataataaataacctagcaactctcttaaagttatcgtgtatatatatgtatataggagctagcagtgtatgtatattatgttcttcctataatgatacagatatatatatatatattataaagaagaaagagtagtgcactaacgttactattaacgctagtgctagtggagaagaaagtggatcttttcaagtttttaggaagcacactacatgattttgttgtgtaattgtactttcacggaatgtattccgtgatgt

SEQ ID NO: 219571 - DNA, 5921 bp, Cannabis indica
ttttcttagtttcttaatatctcactgttgtatttgtataaataggggttcacaccattggaataaacaactcaaaaattctcattcactttctctttctctcttcatcttcttcttctttcttctcatctactttatattattttatattattttataacagatattttattattagatttattattgattctctccctttgttttctttctttcattttgtattatattttcgtatagaacataattatttatcttttatgacggtatatttttcatagagcatttttcacatgcttataaatttaagaacaatatttgtaaggcaaatacttagaaatttcaagaatatgaagttgtaggattacatgtgttggatttgacagggaaacaaaacaagaaagcacttgagagtatagtgtctagatgttctactgataagttatgcagtgtcataaatggtatgactgcagactaaaagatggttgttaaggagtctggctttggttcccttatgggtatagaaaagctagtagtaaagggtccattaataacatacttggtggaacacatcaacccaaccacagccaaaatggagatatctggaaaaacatatccaattaataaggaggcttttgagcatgtgatggggattgcagatgggggagacgatataagggaaaggggaagatacagaggacatcagacatcactgttaaatggttgtgtgatgtcctaaaggagtcaaaagaagcggatgacatatcatccgcttctgtttgctcgctgtgggttgcatgttttgcctcacagatgcaaaatgtgtgaagggttcgtttctttttgcattataagatgcagagagaataaaagacaagaattggggggtcattcgcggtcgattatttattgaggtctattgataacttgaaggagaaagagagaagcaagacttcaaagagcaagtatttggctggttgcaccatattcctacaggtaaaattccattcatggattttatggataatgtgccaaccaatattattgtttgatggtactttaacttgtgtacataggtttattactttgatcatgtcatatggtttggagaccatgtgaataggccaattccaccattgcactattggagtttggaccgagtgaagagaatatccaattggtggtcgaggaaaggaggttataatgtaacagattttggtcccactcgaatcagttgcaaatgatttgtttattccttggtttttagctgatattgatgtgaagaatgagaaagtcatgatatgggcctcacactaccatccagagttcaaatcacaatgcatcaaggttacacgtcaaatggtctgtactttttcttcctttatttgaatgtgtgaattgtgttttatttttatgaggattaacatctgaaataatgtctcctttttggttattatattcagctgtccactctaataaatcttttagatcatacttttggggttgatcttggcttctatttttccactgtggactagccccatatatgtgatggaactgatgaagcgtttcaagagatggttggaattttatgactcaagtgagtcagagtagttctttccaaccatatgtcatgtagtcaatagtcatgtgtagtgtgtttgagttttaattaacaattttcttagtgttttctcacttctatactattctacaaagtatgacatcttacaaccatttttataactagaaacacattatccgttgtaacattatcatgtattattatctgaacttagcaacactaataaaataggctccatacagatgataacacaaatgttttaaaaatatatcagaagtagatcataagctcataattgacaaggttaaaaaacactatgctgcaagtgaaaagccattgaatcaacccatctcatcagcataataatcttccaataagttatcattctcatcttcaaatcaaatgcttgatgaagaagatgaggatctcaccaaatcaaaaccatccaaattcacctcaaaagccagcatgttctcatcatccaaaaccccatgaattatgaatcccatctttcttcaacatcaaccacttcaatcatccaatttaaagatctctctttcattttggcaatcaaattatcaccagctcgcctagcagaaacctgaagttgatagtgaacactacaagaggtagtacatttcagtatcgaatcctatacattatgattttataaataacataaccaattatagattgctacattggtacagtattagagcatcaatattaatatggaatttcatataatttgatttaataaatagatgactgatgagtctcacacactgtacaaagtacaagtattttcaaaacactcccaatacaaaaacagagttttgtcacaataacaactcccaatatcttatttcactttccacactacaacacccttataaaacattaacatatagttccaattaatatgttgaataatgaattattcatgccaaacatactcactctcactctgattgacaccaaccattcccttgaaattcttgacacctccaatcttctcatcaactgcttcttcaaattgaatctgttgaaatgaaagaacgatgctccgaaagtactagttctttttctcagctaactccacttatgatatgatatgatgatatcatttcaagagacatgccactatgcaaatcagtgaagagaagaattaatactgacaattccctgctctgtcaagagtttgaactcatctttgatcttgttcgttttctcatcattgttctcttgtttctctaagtagaaaggttagttgaggtttttaaggattaattacaacaaaatatactcaccgaattcgcctctcaaaagaatcttcctaagagattctttcacacaacaaattgctgtgaaagcatgaactaatcaaatcatcaaagagtgaaaagtgatttacattcttgagcaataaataagtcatattctgagcttcttagatttgatattgagaaaactctgtttttgtattgagtgtttagataatacttgtacagtgtgtgtgagagtcatcagtagctaagctctctccttacatataattagttaatctacaatgttgatcacaacacaaactgaataaaactaagataagaattaaggtgcattaaaaagtgatcaaaatcgatattaccaattatgaaaattacactaccaatgaatctaattaagaaaacagacagaaaaagagagataaaaatactgcaattttctgaagttgtctggaattgatgtcaaattgggacagtagtcatatatacagacattcccaatggaaggaagatcaacccaatttcagcagtgatgtcaaattgggacagtggaatattttgatagactcaaggaaaaaggaaaggttagatcagaaaaactcaacaaccaaattgtacaaagagatataaagccacacaaaatttaattaattatatctttctttaattaagctacaacatcaaatatttatcttaaaatcattatttaacatgtaagtaaataaactttattgttgcagagaatatatggcaccagagtatgcattatggagttacttaactgataaacacaacatgacatacatcatagaaccttaatggctggcaaaataatttctttaagttcttgatctcaaaaagaaaagaatgaccaaggtacatagctcgattttttttgaaaaagagaaagaggcctttgtctaagactgaccccttccccgttatatatagataacctcacttgtggcggaggaataccgtggttacaagtgcgataccaaagaaaatgctacagcaaaaaaccaaacacagtacaaaaaaagaacgaaaagaaaagattcgggtttgactctaacatcctcaaagtgtttagccttatatacctaagtagctgaccaaaattttattttctcccaaagttcctcttctgaactctcgtcacggccctcaaaaattctagagtttctttccaaccaaacagcccaaattaatgccataatcactgttctccatagttaggtcttgtgtttgctgccccttagtttactcaccatggattcaaatgtgcatgacgattcgttcactgaatgcaaaaagagagttttctcactctgattgactctccaaccattcccctgaaattcttgacagctccaatcttctcatcaacagcatcttcaaattaaaagtgttgcaatgaaagaatgagactcttctttttcacagctaactccgcttatgtctccatcttttttggtctgatcatctttctgcaattcagccaaatggcattgtttctgcccaatctctccaccgtttctcttgtgtccaatcgaaacctatcaaatgattcactcatagtgaacaattaaactcaacaacaaaacaaagtagtatgcatagatagatattagagttgtgttgtaaggagtcatttcttacttagtctgaaacatgacttccttgatcattggacaaccaatctcatattctcttcacagctcacagcctatcttatgattgaaataataaagctgtatatgtacacacaagtcaaagtgaatcaaacatcattaatgagtttataatatgtatacacaaaaataaaaggtactaacataatatcatcaaataattaatttggtaatattctctttttgtacctgtatgaatttatcaatagatatttgacagccaaggatgcccaattctgcttctttatttttgtcaataacttcgatgcaataaataaaattcactgtcaaagccacaaatgaaaactaagttaatgaataagaatgaatttgaggattgaagaagacactgtaataaataaagagaagatgatgagatcatttcaagagacatgccactatgaaaatcagtgtagacaagaattaatgctgaccattccctgccccgtcaagagtttgaactcttctttgatcttgttgttcctgtttaaaaccaccaacataataacaaatcaaatatacacaattacataataaaatgctcaaataaataataatgataagagatgataagctcacatgttcagcaagggaaaacattagttacaatatctctgctccattgtcccgtctcctttcttgttgaactgaacaccacttccgctttgccttttaaaacgtggttagcaggcccccattggttctgttttccagattaatgcatgctttggacataaactcacatagaaacttctgaagtttttatctctcttcaagctttggacagtccataataatagaaccccacatttttctgaagtttcccggaaatgatgtcaaattggggcagtctcttatatagatagacttaagggaaggaaggttatcaattccttccaacactgatgtcaaattggggcagttaaatatattgacagactcaagggaaggaaggttatcaatccctaccagtactgatgtcaaattgcggcattgttctatacagatagaagtaagggaaggaagggtatcaaccccttccagtactgatgtcaaattgtggcacaattttatatcgatatccttaagggcaggaaggttatcaatcccttccagcagtgttgtcaaattgggacaatattgtatagtgatagacacaagggaaggaaggttatcaatccccattattgatgtcaaatcttcacagtaaatgatctggatagagctgagcaatgaaatgtttgggtgagtgttgtgtgccttacttcccctcaacattttaaacgtatcttctaatgccattgagctacttgtacgcagttcaacctttgccatagttggaaacaagggcattga

SEQ ID NO: 219572 - DNA, 2698 bp, Cannabis indica
ctatataataatatagttctattaggcacgtaattgaattaatttcatcattttaccctccccgggtcataattactaaaatacccctggttcaccaatgaggtcttaccatataataaatcatattaattcacatatatcgaactatataatcatataattcctcaattattcataattatctaattagggttttgctaatccatttcttaattctaggatattacacataaggacgtccaaagttgactggaagattgctgcgctcagtaggtttgtttcgaaatcaactgacaaatgcattctgttcttcaacatcctgcatggaagcaaaaaattcgagtggatggaagaatgaaaaaagcctttgagaaactgaatgagcatttaaccaaagccctgattttatccaagctagttgagggagaactgctatatgtaaacttgggcgtgttagatcacactataagtgtcacattagtgcaaaaagaagggaaggtccaacttccagtgtattacataagcaaaatactgatgggcacggagtctaaatatccaatgatagaaaaattgtcctatttcttgataattgcctcatggaagttaagaccctacttttaagcccatgccattaaggtattaacaaaccaccctctctgccaagtactgcagaaactggagtcattcagaagattacaaaaattggctatggagctcagtcaatttgatattctgtattagcccttaatttccattaaaggataggctctagtagatttcatggtgcaatgtactaaaatgaatagtgatttggacaagctagtcctttagtgaaccagaattaagccactctctttccatacctaaagttaatcattcaataagccaggttaattagtttgagaataaaagcatgagctgatatccgcaaggttgaaacgtccagaatcgaaaccccagggcttttaagtaagcatcgcattttacataacttgaaattaataatcgcgaagggttttgatcttatggaaagttcctaagtctggaaagtgtatcaccacccgaaagtggaagtcagaatcaaaggttcaaaccactaatctttggagtcaaaaactcaaagtttaaaaagaagattcacttctcaacacctccaaatatgagaagcatatagaagcacacaaattgggttggtcctaatcaaaacttgaatctcaaagcatacagaagcatatgaatgagctacaacttaggggtgatcaaaatctggacacatttcaagagaacgagtttctcagttggttgaagtcttgagtaagtattattttctactaattttgtcattaaaatacgatttctggtattgtattaattacatttttcactcaatgatagatcaatcaagtccgagcagataaccaacatgttattgttattcttgatgtattgttaacagtgttaaattcctaattgaggtttgggatgacaatcgtaatacccaaaatagtggtatttttatggcttactccaacaagtcgacgagttgacttacttgaaagattatagtgttatcatttttaggtgcaagtggtgggacactaacagtaacaagacaaaaagtgatggttttttcactagtgtctgcgtcacccatcaattgaaccaaaatgaaccattcatacttacatcccaagcaaatttggtatattatattaccgacttaaagaatagatttgattggaagcttgttactgttacaccccttacaatgtctgagatttcccatatgaggatgatgatgagaacacaactatacaagaaagaaactctttgggaatctagttagttgtacaactttcacagctggacaatgtcaaatatgtctgtgatgatgtcgacgcaattgaagtgaagagcaaggaccgtgagcagtctgaccgttaagatttagataatttcatagtttatagtgatgatgaagacactagcgatagtgataatgaaaataacataactgttaatgatgatgatgatgatgatgattttgatgacttttagactttaaagtattgtaatatttaaacacaccgttaattaaattaaatacatgttccttttgttaataggttgattaagtaattatttttatattaacaaatatagatcgtgttatcctttttttgcactatgacgtggcaatgagctggataacatgtgtcttatattttcctacctgggcagaaggaagtactcctagcagcccccgaaggttgatataaatgtaattcgtcagcatatagcaggatgtctgagtagagtaatcaatggacatccgaccaaagtacaatcgcgtgatcaactcacatgcactgggcaggatatgtgagttggaaattttagagacaagccttgttacttccaagacacaaagataatccctacatttgtgggattaggtcagagaataaaggcaatatgccttggtttcccattctttgcattgtaattatagaattaatataatttcttattttattcattatagattaaggaaaaccattcttcatgtaaaagttcataaatagtggtatacattcactatttagtgaaatgaaatttagttcgaaagaacactcaaaagagaaaagaacaatctaaaagagaattactcatagatcaattgtaagagctttagaga

SEQ ID NO: 219573 - DNA, 3833 bp, Cannabis indica
tgaacaaggagagagaataatggggaagtaggactaaactgaaaaagaacatgtagtgaatatcaagggtgtgatatttttcatcatcaaatttaattaaaagaaaatataaaaagagagaactgtcactaaagtgacgacactaggttaaattaaaattttataaaacttaaaatataatataaaaagatatgagtaaaccctgagatgtcacgtgtgataaaaatgggacaaaattttttttcctaaaaaacatagtataaaaaaatattaaaaaagtaataattgtcctgtaacagtaaaaatgaaataaaatggaaaaaaaaatgtataagttgtaaattccccatataaatatacgatccttacaaatatattggagcatgagtgaaaatataagtacatgtatggtatcataactaaaaaattattttttatttttaaaaatagaaaattatttttttaaaaacacttaggcgtgtttggcattgtttttcgaaaactgttttcagaaaataaaattacaaaaatttaagaattttgagaacaacaaaatattattttcagttttaaaaaataattcaattttagtcaatattttttctcctctttatctcacatcattatactcatgattttttatactattttctctctcattgctttcttactcatcattttctctctcatagctttctctcccatcattttctcacactttctctttcattagtttctcacattattttctctctcatcactttctcacattattttctctctcttcatttcctcatattattttcacacattattttctctctcctcatttttagtctgggtttgtgtccaggtcggggtctaagtctgggtctgggtctgagttcgggttcgggtctagggtcggggccagggctggcgttcggttctgggtctgattccatgtctagggcctaggcggaggtcatgggctggggtttggggctggctggggttcaggcctgggacgaggtctggggtttggccgaggttcggggttgggtcggggttcggggctaggtcagggtccgggaccaggtcgaggtccgaggataggtcgggcttggggtctgaggtctggggccgagttagggtccaggtcccaaggccgaggtttgagtacgagcttgtgtccaggccggggtccaggggcgggccaaggtccgggccgggccgagggccggggctggggtccaagtctgggtctgagccagtgtcaagtcttattcatatcagggtcttaaagtattaaagtgtttttcaaaaagaataaaaataaaaattattttttgaaaaatattagccaaacacgacttctaatttaaaaacttttaaaattattttttgtttttatttttaattcaaaaaaataaaaaacaatgccaaacatactttctaattattacaaaattaatgaagtgggattgtttttcctagtagaaatatataaagatgttccaatttagagtctcgtagagaattattctgcaaaagtaaactgtatattttacaagtcacgagaaacataatttatttaattacatacatgaagaaacaaaacatagattgttcatatttaatgtgaaattcaatttttctcaaaaaaaaaaaaattcaattattaatacataaaattttttacgtgagataaacatgtaagaaaaatctacctaatccatgttcaaacacaggtaggccccagtctccttctccaaatctcaaatgttatctaatcatccacaacccaaatcacacaaaactgaaaattcaaccaaaaccctaaatcagaaactgtgatataagaagaattcatagcccgattaaccatggagatttcttcaatttctttatcaccaccaacacctcttccttgtctgcctttatcttcgtcccgttctagcttttacgtaaacaatgtcaacgggaccgctttcgggagcaggaaggtagatgcgttggttttaggtcgaagcagagccaaattcggaaccgagcgagctagaaagggtatgacttgtaatgctttgtttggtcttggtgtacctgagctcgttgttattgctggggttgctgctttggtttttgggcccaagaagttgccggaagtcggcaagagcattggaaagactgtcaagagcttccaacaggttaatttcattttttatactgtttcatttcgtttatgagagaattgtttagataatctttgcttgactgtactcgattgtttgagttatatatgaagctatgttgaaattcaagaaagttctgcattttattccaactaggattcaacgcaagatgtgaatttaaattaaataagtggtgaagaaaagtgagatttgagtgcaaagtaagaggaagagatagaaactcagggcaagattttggttgagtagtgattgtttcttagaatgtttactagtcagtaatgcaccgttaagaaaaaaatttccttttccaatccattatgtgttagcttatctatttgagacaggaatccttcacacttagtgaaattgagggatgacttaacttatgattagttctcgttccttattaagagttagtcctacattgctaatgtgtggaaataaattgtaatatatatgataaaagggatactcctcccattgccaattggttttgggatggaacctcattcatcttattcctcaattctaatcctcaccaaattgtttcgtttgattatttatttgctgtgcttgtttgtttctgttccatcattgttacgatttttgtattgtaaacctttttttgttattgtgttatttgttttttattctttcattacccgaaatcttttctgtacaagtgagcctaaatattgtgctttacatacttttaatctaactttgcatttataaacttaacctagtaatagattgcgtcataatgaatacattgaaaaacaagtaattgttggaatgcgaaagtgtagtggattaagtggaatagggtgagtgtatggtaagatgcatagggttccatctcaaaatcaattggcaatgagaggagtagtccatgcatcttatatattatatggtattaagcttttacacattatcaatgtgagattctctaacagtaattcccaaaattagcattctgcatagtcttggttgcaaatttggcctaggagaaggtgcatagcggttcctgaagtatacttcatttttattttgtaaaagagattaatggaagtagtcatgggcattgtattaaggaaacttgtaaaatatattgcttaaaaatgaatgcatggaaaaacaaatgattctcacataagtatgctgcataatcttggttgccaatttggcctaggataaggagtaagtagctcccgatgtattgttattttgtaaaggaggttattggaagtagtcatgaactgaacattgtagttaggacaagtgaaatagagggctgttattttcaactcataggagggcggctagctgtgggtgtgactatattgttttctttgaacttcgaagaataacatggatttcgaaacttatgtaagtgagagaagcccattgtattaaccttactcagatataatttcaattaagtaattgtagtagagagactagaaatggagttattcactatccaaatgtcttagaaagatttgtgattgatgactgctattttcaacccaccaaaggtggagctagtggaggcaatagtttaagggctcgtttggaacgccgtattaggtcgtattgtattgtattgtattatattgaattggattatttatcatattt

SEQ ID NO: 219574 - DNA, 1924 bp, Cannabis indica
atatatagatatgacctttcgaccaaataagtagaaatgcatctataaaaatatccaacgtaattcttttctattttattactcttaattgaacaaatgtatcctaagaaagttttcaattaagaaataccaatagttttccaacactataaatatgtgagatgtgacaaaaatcttaattgtgttctataatcattatttaaattgttttttttaaagtagaaaagtaaaaatattttagtaaaacatgtttctcttatcattaacaacattgcccttaaaaattctcataatctcattctatttttcgctcatattaattaaacttgagtttataaattatagctagagtagctattttattagtttttgaatgatatacattatcgaaaataaaatttaaaaaacttgttcacacatgataaataattgatatatgtataaataaatatttaaactaatatgggttcctaaattatttaaaatattcaaaaacttaaaccaatagaattcttactacaagtagaaggtatagtggtatttaaaataaattacaatattttttagaacagagagatttcattaaaaggcatcaagccaaaaaatcagaatacaaaagataggcaaatttaaatagcaaaataagagggcaagcccagtcaccacacctgagcctcatctgaatctaacactcgttttgttaaagaatgagcaacatggttctttgaccgactacaatgcgacatagatatgctactgaaagaattcttaatatgattaatatcattaagaacaataccaaactcattgaaacaaggggccctgctattgacagtaagaactacccgctgacaattagagtaagcagtaatcaccgtatacccctacacgcagcaagaaagcccatagagcaaagctttggcttcgacaacgtggggttccaacaaatccgcgcaaggagcttcactcgagaataggacatgccccaaacgattggagaccaaagcccccatccctatttttcggttctcaacacaaaccctagcatccacaaagagattgaactcaccaagaaccagatccgtctcagatgaggctagttgattacttgcattgttagaagccgaatccaaagaagctggctcggcattattaacatcttgatatttctataaataatctatggtccaagcactaaccatgttatcagagaggagtttgtgatcatgcataaaggtattatgcctgttacagatacgcccgccagtcaagggttataaactgctcaagttcttgttgtttcaagatatccatacaccccaataacaactcataatagcaagagggaccattatagattttgtatttttttttttacatatatttaattgtgatctagaaggaactgtttatttaaaaatttggtaagatcatatgcaaattgcttgacaaatttccaaatatcatatgaatttgaatggaatccaacagacatacatagctttttcatgactcaatatatatataattttatttatttatttttacaaattttctcttaattgtataatctgaaattgaaatctcccataactaatgatggtaagctaaacactcaaaaagcacttatttggttgactgaaaatagagacacaccatgtgattatttgcagccttttgggtggggaaaacaataataataaatgtttgtgaaattttaattattgggtttaattagtatataaattggaaaaaaaatatatattaatttgtacatttttataaaatattaattaataactatgagttttcatgactttttgtcaacaattgataggctattcacactgtcactgcatatatatttaatgttaagtacgtatatatattaattacagagctacatgacatacctctgaaaatg

SEQ ID NO: 219575 - DNA, 6731 bp, Cannabis indica
tgctcatattataatgtgtgcaactatcttttactttgattataatatgtaaaaaaaatcgaaaattgcgtatatagtattgaaaaattctacaatacacccccttaaaatgggtatagacttttattttatacgcgtgtaaaatagacggtttgaatattgatttctatattataaattattctaaatttctcaaacttttgcaggatgtcttacataactaaaacatacatgattatgaaaaaaattaggctaaaaaattcttatagataccgaatcaattaagaattacatcagtacattttaatatggtgtattgtagaagcactcaatattattttgaaagaaaatggtcaatatcgttgcaaattagtaacaaataacaatactaatataatctattatttactttttgactgcagaataagagaagtaaaaactattattttctcgtaaaatattttgcattaaaaagaaaataattgtaatgcacttttctttctctttgataagaagaaaaatttacttcaagaaatggcggaaaaaaaagaaaaaacataaataattccttaaacaaaattaagtttaaggtttgataagaagaatttgctttctttttgtattttaatttcgagaaaggtttagcttgagggaaagtttacatagatatttcataatagagggtggaatttcataatttcaaatataaaagggaatttagtcaaatggatgcaattttttcaattctctacatctataatttttgcatacataggtatattttgaatgtttaaatcgattaatatcattaagatgctctatattttgtcatttccttttataaaagaccatatgaagtataaattaatttggtggagtaggattgaaggaaatgaagattttgttagtgagtttgttcacctaatatttctgaattctgaaaattgaaattcacatctccaaaatttcattcacaatatataatcacatctaccataagggtttattattagtactattttatcttaattttatcattttcttattagtttcctattgtaaattgtctattatttcaatatgaagaaaggcttaataagtagtcaaaagtcagttgctttgtctacctaatttgtttttaaagttgctgaatgatcgtatacgtacacaaagctatcaactgaacctgttttcccttatggtagatttggtgaacaaaggctcgaataggaagacttctaaactattttacaacacaaaaacaaaacgttctgattaaaaattaaactgccctccaaatccattttcaataattattttgtattacaaagcccttattggctactattataattatattaatattgagaaattattggaaaacaatattttgatgaggctaattattaggagaccataagataagggagtggagtggagtaatttgtatgacatgatcatgagctttagcccaccaacttcacttcggcccatcatctttacattttaccactcttttcttacataaatgaaaataaagaggggtacttttgtcatttcagcaggcatattttcttgtttattaattttcaaatacattctatccataacaattgcgcaacactcgcgggactttatggtcaattctcaaaacccaaatcaaacggacacgttcgatacgtgtcagcgtatataaagcaagagaccacaaaggccttttctttcaaacaaacacaagacaaagaccaagcctttctaattctattctctctgaatcacaaaagagcttctgtttacattaatggatgcttccgacgatactggcattgacgagtcttacaggccactccctgctctttacttggcttttctctctatttggcttgtctccgcttgttcttggactttcaacacctacaaaaagcgccattttcaggtcatctttttcaaaagttttacttattgttgtttatttatctgttttcgatttggtcgattgcgttttctgatttgcgttgagatttaaatgagaaattgtgtggttttatatacattgagagaactttgacgtgtaattcggtttcagagaagactggaaaataatactctgttttactttaaccaaatattacgtcgaacaactgatccattttttcgtgtgaatttctataacgtcatcgtattttcatcaattctggagatactcttttcatttttattgctctaaattatgattcgcaaattattcaggttgatctctttttttgtatttgtttcatttgtttgataactgatcttacatgtttaatagatgcaactaatttgctctaaagcaattctgagtttggtttaatttcttattttgtaatgttatggttgaactagagcagacgaataatttgcagtggacactcgcaattgttccattgattaaagctttgcaacttacgttgtcgtttctcttctggtacgctacgctctcctcttctcaatttgaatagatactttcattttatatcctcagaaaaaggaaatatttcattccttttataaggcttattattattattgtcctctcttgtttctaaagtttaaactgtaaaatttatatgtaggtattcatgctttcatctcgagatatgctcactatggatgtcgtttggtgtctatgtaactggagtgttattccaaacggcgtcgtttgtgtctttccttcttattgctcatggctattgcatcatgtctgagcgcctatcagtaactgagaggcgtaccactgccagtcttggctgcgtattttaccttactcttgttggttatagagcttccgtgccatatttctctgtaagatttttgattgaagagctcctctgttcactgctactttgtttaatttataatgcaccgttaatttggttactaaataatgcttgtgatttaggttctgctgctgctgaattatgtaattactttctacgtaatattccaccacacatctcagaatctgttagttctaaggaatcaacttagttatatcgaggacgaagatgttcaagcaatgcatgatgcagtatacactaaatacatcatgtttaagtacgtattatcccaatttacattgcatatttctgcattatatccaactaattataatcacttttataaagttaaaacttacattaatgttgtgttttcggtacggtttgtataggaaatttcaaggtgcaatgcagattgtagcgatggctgaggcagtggtaaggcactaggaattttctctactttagagagtcaaaatacaatatttaccatcttcattacttacaagaaggatactctggttttcagatatacattaacttcgatgactcgtcagaaaattactggattcgcttactagtccgagaatgggctcagttatgcatccttgtttacatagggtatgcatatattttgatactgaacatattccattcacataaatgtaaaaaccaagtttagtaagtaacctacataactaaacctctcttgtaggtggactttcaggtcacaagatttggcaccacggttttcagtcatgccaactctaaaatcaaaaggggagaccatagtccctccaatatacagcatagtaagaattcttaataggttctgatttccaatagttctacaagttttacgattctaacatcacgccactgcaggaaatggatgctgcaacgtttaaggattttagatgccatgaatggcatattggtgtggtaataaaggttttccctatgttcatagtcatatattacttatttcgtatattgagattactaaagggtggattaatttatattacttcaggcaacttcaacctatgatgagaagagcaaagatccagtcattgtaataattcaacagcctcatgcattgcataaacatactccagtcgcaatagcgagttctcttcctttaccacaagctcaacagcagtagaaaattttgaggcgagatatatacaatttcattatacacttgtcaaaagttgcattcaatttcaaggcacaaagaaaagaaagcccaatatgtatttaatgttaaaattacgactacaacagagaaaaacctgacagaggattctaaatctctttaattattttgtgtactacatgtaacaatgacatacgacacgaggcattgtataatccgacgaaatatagagaaaaaaattgtaaatactagttcgcattattgatctactttattttataattatattgagtatagagcaccaagcaattatatgatagttatccttaggtttatgtgattttttaaacattgaaaagaaaaaggaaatatcaaacataaaatagatgaaaatactgggaaccaaaatatgaaaatatatcaagatataaaagagaagtgagaaaacataacctaatcatataaaaacaattagaaagaaaccataaaaggggaaataaagaatctgagcatcagttttaaaaagctcgaatttggaagctccatgtataggtcagaactcaataccaatttttctcatcatatgctcagatctttaatttcttatgcaagaaaaagaaaacactaagtaaataggcaaataaatatgaaagtaaatcaaccatgaaaaagtagaacagaatcccctacgattagaaaaggcgcaagagagaactaaaaaatagactagaaggaagggttaggtcagaacttaagaggccgatggaagagaccgctgtacttagtgaagtgaactaaagccaaaggcaacctatttataggcaagggttaaaccctaatttgagttatttcatagtacgacgccgttttccagttaaataaaaaaatatataaaaataaagcgttattcatcttcttaacgacatcgtttttttttttgaagttaaacgacatcctttaagtctagcattcatctaaacgacaccattattcatctaaacgacatcgtttaataccatttttagtttttttttttcactcgaccattgcaagacctgaaactgaaagtgcaatttctctcagttgcctgaaagctcccttatggcgaatcttgtatattgaatctcagattgtggatcatttatcaacaaggcttcaaaatgagtgcaggttctctctccctctcagcgttgattatatattattatcatattttaggttttttctttcttcttctcaactttaatctggctaattttctgtgagaatcggtgtcttaaaggagaagagtctcctgtgattgttttgggttaatctcaaaacttgtgaacatgaaacaaagcagaaaatgttgttaattggttttatgatttttatggatgaatccaaaattgaaaccacttatattgtttcaatgtcttctatgttattgtaaaggacagttcttgaaatcatatcctacgatgtctctgaacttgattggtaaaaggggattaatgggttgttaactttgacgctcatggcttacaagacgattgttttacttttgtttttatttgagatcaccaaaatttttgtttggttgtagaacgaaagtttaggtcaatcttaaataatgttgtgtcaaatttggataaatgttatttcttgtaggtggtgcctttggtggaaataggggactgagaccagtacctccagagaaaggagtcttccctttggatcatatgcatttgtgtgacttggtaatggtgcctcttcatttttcccaattgaaattatttcactattttgctctctgagtatgaaaaaaacacaagttcttcaaaatagttcctctgtgtcacaagtcgaggctatatattagaaaaaaattgtacatctgtgtcccttacttgccttaatttttgttaacgctcaactgccttataaatctctttttccaggaaaagaaagaatatctgagctgccttaaatctctaggccatcattctgataaatgcagaagcttctcaaaaaagtacctcgaatgtcgaatggagaagtgagtttgttgttttcagtgtgctatgttgatatttttcaatagctagttgtagaccctatcgcccttcattttgactttgagtattagtcttaggcccgttaggtggataatttcattattagcaaagttgctaagcaccatcttgtcacttttgctgacacaaacgatctactttagaaacttaacactcatttcttgtgttatttcctattctagtaatggatgtcttgatgtggaactcagacctttttttcttgagttcagttattgtgttggagtacttattacaattatacatgtcatgactttttcatttatatcttgcaggaatttgatggcaaaacaggacatgtctgaacttggatttggaaaggaaggtgacacggaagggtctaaagagaaagccactgagagaattgatggccagagctaacaatttttctggaaaatgaccatagaaattatttttacccccttaattcttgagtcttcattccaaatgtatctttaatataagtgataccttctgtgttatgggttgtcttgtaaagattacaaaatataatttttatcacgtcttataattttaggcatagttagagtaagaaaactgagtatacttttaggccccgtttggttggggtaatggaaagtaacgagctagtaatggtcctaatggaattaaagcactggaataatattctaaaat

SEQ ID NO: 219576 - DNA, 2806 bp, Cannabis indica
aaaccttgaaagacactataaaaaagaagcttgacgtggctaagggaaaatggatagacgagctacctcaggtactctaggcccatcgaacaacaaaaaatgacatcgagacatactctattttcactggcattcagctcataagctatgtttcaagtagaagttaacatgttacacccaagtgtgaattttatgactaggaacaaaaccaagaactactcaaaatatccttatatatgcttgatgaaaaatgcattgagtcgcaagtcataaatgttgcttaccaacactgaatcacaagacatttcaacaaagagtttgaaaaagaatttttaaagtaggggatttggtattacgatgtgtttttgctaatacacgagatcctacagcaggagtatttaatcctaactaggaaggcccttatattgtagaaactgttgttgaaacatgagtttaaaaattagcatgcttaatggtcgctgataaaaaatacctggaacaatgagtacttaaggccctattactagtagtgaattttgtttttattctttaattatgtaaaagtaatgtattttaatgaaggcatttatttcaagtaactataaagtgtttctttaaaattacttggggaacatatcatcagtgtaaaatcaaactttgataaccatggtaaacatggacaaagaattcaaatataaattgatgaataaaagctatgaaattttgaaatttttcataaattcacaaagttcgaaaagtccaactttagatgagacgtgaggcgaatgcgagcagaaaagaaaaatgaccgcagaacatttttagcaagtactttaaatgaaatcatataaattgattctggaaaaatggtacacctaaagctatgtacgatcagaggaataattgttcgtacgtatgatctgtaacatcaaaatagccataaattggttgtataagatgttcaagctcattttattacttgaggaaataacgagtaataacaaatgagaaatttgtatgacttggaattaatgatgaatatgaaagatttgttagaagactgctagaaaaaaggatataggcacgaccaaattagtgccaacaaactcagtttttagtgtcaatggatatgtaggtgcgtcaaattgtgtcctttatgtcatgcctaaaaattggtgcctaaaaactttaacgggcaccacaaatagtgtcatgccaattgactgatcaaatggcaagagacacatgtggtgctcaattggaatcaaaaattctatcagccatatgtttaggcacgactttgttgtgcccagtggatttaatttttttttttaactaaaaataattttgtattttaagattaatttatatttatatttaaaaaatataattatccaaaaccaataaaaattaatttatataagtgtcttctaccatataaattggcaatctaaactacaataaaaccattcaaatacctaaatacaataattaaaataaatgttcaaatacacaatacttatattatcacattcatacaattacaaataataatactataattctaattgcgtggactcctcctcatcatcatcatcaccattctctccagactgtaattatagaatttgcagcatttgcgaatagtatggtcgctgcgatagttctggcatttgtgggtaatctacctgctatacgtgtggcatctactttattggtgttaaaaatatgtgcccccggttaataaatcatgtcttcttgtatttcaacatctaacacatggacataaattttttccactaaaatctctatatttcgatgcaaattcgataaaggcttcaacacttttccagtaaatatgatcacaatgacttttcattattcgaattttatcgatcgccatctacagaaaaatttaaatgaagaaagttattaattttttttaactcatatttaaattatttaattttaaaaatcttatactcccttatgatgaattatcttttataattatgaattcattatttacttaattaattattttaattattaagcttattcattatttttcaatattatgaattagttttctacttaaattgtttttttttaaattattcaaaaatgatcaaaccttttaatttgattaattaacctatcatatattttttctattttaaatagttataatgactattatgatgagtcatttaattatccatatttttagtaattataaattaattttgaattcagttatttataataatttataaattaattttgaattcaattttaaattagttttgtatatttcatattttatattttttcattataaataatttatgatcgcatattatgataaattagacttttaattaattaatagctatgcaccatactaactaaaatattattaactattaattgttatttttagcataaattaattattaaataaattatattgtaaaaatactaacttaatagattttttaattatctacttaaaatttaaaattttaatgttttattaagttaaagatgaagtttaaaattaatttacaatttatttttttctaccacaatttgaacaacatatcaactatttacaaatagtaagtgatatatttacaaataaacattatgtacatatgtatatatacaaagtcattcatattcatatgtactaacatacatatatacacaatatataatcaaataaacccaattattttataactttaaataaacatcaaacatgaaaaatcgtgtttttgcaaatgtcagttgtatataagaa

SEQ ID NO: 219577 - DNA, 4243 bp, Cannabis indica
aattaattacattgtagctttccaaacgcacccaaacaatcgtataatactacactggacactactgatactcaataataacggtcttaaatattgggcttgtgcaatttatgacattgatgataaccggacagcattgccagctgttgggatacacgataccacacatgcatgaaatgatgttgagttaaacataacctgagttaagcaattttggaaggttagtttatgtgaactaagatgtttggttaaggtggagaatttttattggttgaaaactactataaataggaatgtaggataccatatgtgtttcatccaaattatatatctaagacttggcaaggcttctactcatccacaacaggtatataaatatatataaatatttttgtaatattaattaaatcatctcttttgttttttttttctttgttatatatcatatttatataatgttattagctattgatattccatagtactataattacatatacattaatgcactagcaaattatactatatgtagtcttattaagtaataatagtttatatagtttctgagcatttatattaggtgaatgttataagataacaatctgtttaacaccatttcatatgtcatactattaatactataattatgtaatcgagttccacataattaaatataaatataaatatttgataataaggacaaaatattttagatttatataaaaaaaggaagatgacaaaaagtcatggacttagtaaatacatatagtgtagatgtggattggcttagcttatttaagctacttttgttttaggggtgagggtaaataagtgaactttgtattgcatcatcaaactactatttcatgagtagctgtaaattttcaactcaatctccaaataattatttaaactaaatttatctcctattttcactatatctaagctttgaattcttataatattataatcatttgaacaaactttacaaagagaaactaaatgttcatttggtattatattaaaaaataaatttttatttttcaaaatagaaaattattttctaaaaataattaaacatgtttgatattgtcttttgaaaactgttattagaaaacatgagattttgaaaaaataaaattataaaaaataagaattttaataacaacaaaatgttgttcatgttttaaaaagcaattcatttggtcaatattttttctccactttatctcatataattatacttatcattttcttatattattttccctattatatatcactttctctcttatccttctctctcatcgctttctcactcatcatttgttcgcattattttctctttcattattttctcacactttctctcttattactttctcacattattttatatatcattattttctctcttttcattttctcatattatttttacacattattttctctctcctctttctctctcatcctctctcatcactttctctctccacattttcggtctgagtcaaatccagggccaggccgaggtcgggtttgggctcggacccaggtttgggagccggggtctgggtcgggaccgggttcggttttgggtatgggatttgggtccagctggccggagctggaccggggtgttggtccaaggacgggtgcgggtttggggtcgagtccggggtgcaggtctaaggccaggttcggggctggagtgtgggtctgaggtcagatggggctctagggctagggttgggtctggggtttaagtttgggacgaatccaagtttcaggtctacggtcggggctgggtccaggttcaggtccgggacgagtctgaggtaggggtcagggtacgggtgcgtgtttgggttcaggtccaagtctgtggtctagggtgtaagatgggcatgggtctgagtttgagtctgggttcgaggtgggcttgggttcgagtttgagttcagggatggtacaagtccgggttcagtcccaatccatttttgagtccggggtcggggtcgagatctaagtccgggtccgattcatggtggggtcttgttaatatcggggtctcaaagtattgaagtatttttcaaaaagtaaaataaatttaaaataaaaattgtttttgaaaacattagccaaatgtgacttgtgttttgaaaacttcaaaaactgtttttgttctcattttttaaaacactttttcgaaaataaaaaacagaaaacaatatcaaacaaacttgtagcttctccaaaataacttttgaaaaattatttttaaaattgaaataatttacctacttcctaatatattcacaaaagctattttttgttttttcatccaaacactttcatgagaagaatctctataaatgaaaaataatttttttaatatattatataaacactaaaaataaatcaaaactcttatttaattcattcaacttttaactataaattaaagtaaaaactttagttaaacaaaaatctatttctttgtgaactaataacttcatttcaacaatgttttaccatgaagtaggtatggaaagtgagaagagtagcatcgccttcttcacaacttatagaccaccggtaccgttggacatatactcacaatatatattgaacgaaaatcctcatgaggttcacatgactgatggtgtgtcctataactacaatggccgacctattccatctaatgctcttcagacaattcataaacgcatttctggagatagcgacgacgatgttgatatctcctcgggcttggtttacgtatctgaaagaaaaggcaacctcgaaacattatacattgctctccactataataatagtgattatcctgaagttgaaaccattgattttgctcatgaatttgggacctttgatggtattcgaatggaggatagtggttgtattgctggtgattatcttgtttatgtcactactaaggataatcctcacaaacatcgtttcccatggacatcagtttacaaaacaaatcttaagacttcagaaactcaacgactcactccacaggtacgattaataatatatattgagaatgtgaaagtgtaattgagaaattaagatatataaaatgaattgtatgataaaatgtatagatttcatctcaaaattagttacctatgagagtaagctatgtatatcttataaatataatattatgttctcacacattatttatgaatgtaatatttttttaaataatatatatatagacatgattttgtcctgttattgtactttcacggaattattccgtgatgtacggcagccgttagatgagagaattatttgatatgagggctggggttgatctaggagtaattagggttaaaaaatggtaacgtatcctgagacacatctaatataccctgaagaaccatctaatgtactacgaaatacattccgtgaaagtacattacgggacaaaatcgtgtccctatatatataaatttacatcaaaactgctcattataattagtaaagttgtaattaaatatttaattattattttatatatatgcttggattttaattagaattccttttttttataacagcttcaatttttatattagcaataaattaattttctttaactaaatagtataatttatataatatataaattgctactatttttgttcttgtcacaatatcttgttgtaatacttttagctacaagatgtagtgataatgcatataataatataattttagtcctttttttatatttatttttagtcataaattttattgctattaaaaataaaattttatgtagtaattcaatatttatcattcatatatatttaacctattcttttctttcatacattgtatatcttcagggaaaagctgatttaagtccatcagtatcaccatctggaaagaagattgcagtggcatcatttaaagaacaaggttgggaaggggaaattgaagatctaaaaacaaatatttatgtgtttaatgtagatggacctgatttagatcgtaagatggttatagagaatggtggatggccaacatggggaagtgaaaacattttattttttcatcgaaaggttggaaactattggggtgtgtttagagctgacattagcaatggttttacatcggacactcctcgtgttactcccgaaggctttcatgcaatgactccagctgccatcgacgaaaccactgtggccgtcgcaactattcg

SEQ ID NO: 219578 - DNA, 4342 bp, Cannabis indica
aaattaatttaaattatttttacataggtacagtctattattttttttagttatgtaaatatctcaatttatttttatctcttacataaatagttattatttttgttaagtctctaaaaaaaatctttgatgctcgttaaaatatcacaatatatataaaaggaaattaattgtctaaattttatacatctttaacccatatgaataaattttgaattttttatttttaacaaaaatattatgtaaataaaacataaatttcacaattctatctggttaataattcttctatttggctcgacctatctttcagctatggcagccattttcgaggagagtgagtgtgaaattaaattgtgagtggttttaaaaaaatagccattttccaggtgtgacagctactatttaacacacagatgaagatttacgcactagtgttactttatttttaactgaaaaaatcatttaattataaaataaattatgccactcagagctagaaacttcattccgtaataatttgttttatttcttttttctttttcggtaataacaaagtccaatgatgaaaggctaaaaccagaaaaaagaaaacaaagcagaaataagacttggcagttggcaagaatgtaggcatctgagtttagagtcctttgagcagtggaacattggatagtgaaaggagtttaatttcctttgtaactacttataacttaaggtaactttccagcaatcataaaagccttgtaacaaacagacctgaccaaattagggccaccccaagcactcttaagctcctcaacaacctcttcacatagcagatccacgcctagactcttagcagtaatcacagcagaccaagacttcaacatcttcaaaactccatcaaacgaaagctccttaggaatatccagatccaatggattaccctcacgtcccaacccaacctcttcaaatggaaacggcatcgttttgtacccatcgaagatgtgcttaatgttactgtcccaatatggcagcgtcgtgtcgtggaatttcttcaatacagcgtcaaatgaggagctcacaactatgtcgttgtagccccatacggcaataactccacctggcttgcgcagaaggcgactgaccagagagtagaagctcggtagatcgaaccagtggatggcctgagccactgttatcaagtccactgagttttcacaaccgcctccaattaacgacactatttcgttgtcgtttgtggtcagtggagtgtgaatgtatcggactcgactgtggggctttgctcgctctagctgagactcgctcacatctgttgctattacttgttcgtagtgctttgctacctaattcatcataaaaattgcatttgtatatatctgaggttttcctttcacttaattccagattttttatttcataaaaaaaaaaatccagattttgtataaaagatatatatagaccaagaggagtcatgtgatcaaggattcaagaacgagatcatgggaattaaaaactaaaaaatccaaaaataatttcaagaatgattgtattaattaaaaagaaaatgaagtgagagatggagtggagaaaagtacatcgatagcagcttggccacttccagtggcaacgtcccaggccaaggtgtggtgagaagtaagagcagccaactttgaataccattcaattgggtaagtaggccgagcatccgcatatacatctgcttgcttatcaaacaaacccgccatggatagttgactttagagttcttctaaatccaacaactgattctatatatattaataaaaccttttctttccacaatattataaaggctttgtacctaaggtctttaaattatagttaggcccaaatttttcccccaaactttatattttagtaaatgatcctcaaatttttatttctttaataacattaagtccccaatattaaatattaacatttttttttgaataagtgttctttattaaaccgagcaatcgctcgcaagaatagacaataagtctgagggaacactgttgatagggaacatacgttcagctagagaaacagagtgtcgggcaacaaagtgcgtagcacaattcgcagaacgtttaacaaatacaattgaaacattggacaaacaattaagactatttttgcattcatctaccagcagcccgaacgcaaaaacaaaagcttctgcaccactcctaattcagcacaaacaaggctatcggtctcgatgatggcctgagagaatgagtaatcctttagccagctcaaggcttcccgaatgcccattatttcggccaattcaggggccacagaaccagaaaaaacccctgcgaaaacagaaaccaaaccaccagcagggtccctgaccacacacccgtacccgtacttgtgaaatgaatcgaagatggcagcgtctacattgagtttgattcctgaaatcggtttaacccactgctctaaaccgtctccagctttgagaggagacatcgagggaatattaccctttccttgagcattcaaccattgatcaagactcgatttagcaaacgtcaccacatctttcacacttctcgcacggtacttccaaacaaggtcatttctgactgcccaaatggcccaacagggcatcactactctgcccaaatcctcattgccgaccctgttagcagtagcttccaaccacaccagtagagaagaaaatgagtctcttccaacaacagccaaaccagcatacctgaagcaagaccaagcaaaatgacaagataccaatacatgccattccgtttcagcaaaaacaccacaaaagggacatgagctatcaaccaaaacctttttgatgcataagtttcttttggaagcaagacaatttgatgccgccctccacacaagatccttggccttaggaggcactttgagagaccataatttcttccaaaactcatttacctctgaaatatccgaatggtgtttaagttgttggagcgaattgtacgcacttcagactgaataaaaaccattcttttctgcaatccaataccaggagtcatttacaatgttctggtttaaggagatgcctaggatgatagccgcatcctcaggggaaaatagatccttcacaatgtcttcatcccattttcgggtattagcttcaaagaggctattaacattgaagttgtcaaggccatcaacaattgggactggtgtaggatgatcaaaaacagggagccaaggatcagaagttatattcacagttgcaccagagtcgattcttttccttaacccatgtttgacagtatctctagcaacataaatgctactccatataaaactcgggtttgacccaagctccgcagttaggtagtcaccatgtgggtaatatctagctttataactttgctggccaaagaatctgtattaaataggagcctccagccttgtttaccaagcatagccaaattaaagtctctcaaactacggaagcccataccaccatcaaacttatgcttggtcattctatcccaactcatccatgtgataccgctgccattgctattaaagttgttcgatttccaccaaaaacttgccatcatcctctctaattctttacaagtactgattgggaagaggaagacgttcatagtgtacgaaggaagggcttgaaccacggttttgataagaatctctttcccagctcgagataaaaatctaccctcccaaccattgatcctcttcctcattctctctttaaggaatcccaacatagcgtcttatttcgaccaactatacttggaagtcccaagtacatgctatcactgcccgcttcttgaatttgcatcaagttacagattcgggtccttgtagcagctcttgtgttcgagctaaagaaggcagatgatttatgaagattaactttttggccagaggcgtgttcaaaggtctggagaagtgaaagaacatggcttgcttcttcttttgaagcttggcaataaacatagctgtcgtctgcgaataatagatgagaaatagtaggtgcgcccttagcaactttgcaaccggtgataagtctagtggcctcatagtgacgaatcaaagaagaaaagccttccgcacaaacaatgaacaaataaggagatagcaggcagccttgacgaatgcccctagtaggagtaatcgtccccattctctgactactattgataacatggtatcgaattgagttaacacagctcagaactaacccaatccaccgaacattgaatcccatcacccgaagaatagactctagaaatccccactcgacacggtcatatgccttgctcat

SEQ ID NO: 219579 - DNA, 3487 bp, Cannabis indica
ttttttttttttttttcggaattgcatgtatacatctccttaaaagtatatatattattaaacaaagactggtgttaagaatgtttaatttggattggctacaaatgctactaataatgatgatttgcatcagaacattttattcattaaaaggccttaaccaggacaaatttgaccaaaagaaacaaaataatcaattatatacgaataaagaaactactagcaagtccaaaaaataagtatacatacaaacaatttcagaatttacagcagagaatgctgcaacacttcccttggcgctttttcaatggtctcttttcaggttttaccatttgttccgggcttccatgccattctgctgccaatctgcttatgtcataaaccaaaaatgtgctttactaagtcaacaattcccacaaaacccgatgtaaattgaaagtaaaaattaaatatattataaaatttgtaagaactagagttgaatgagagcttaattacatagggaaagcgaaagagcgtgaactagtagtgctgctgtttgagcgatgagaagtacttcggaagcttggtgatgcagaaacttggtgcgacatgaggcctgaaggatgagttggctcttcattgcagtacttttggtgagattgaccttgttcagtgaagctttgtgagatttcattttcatggcgtctggtggtgtgtcctgtttcagcaagctgctgatgacaaactgcaccaagtggtggctcctctgttccactggttgtggctaaatcactaccacaagagctctttccactcttcacctctttaaggatggtgacactgcttgtttggctagtgtccttgtttttgttgttgtcaattgtcaaagctgacttttgaacctatgcacgctcgcagaatgagagggtatcatgattttaaatgcattataaactagaccaaacaagaaaatgcaaaaccagatgacatagtactacatgtttggactttgcatttggctcaaatgcaagttatttcttgacaaagtaacacaactagctaattttttacgatcacttttcataacacattacttaaatttaatttatcttatgttattcaagaagctcttcccaattttagaatcacagaatcataattctttttcctttttttgtaacgtttagatactgaaacaaaataaaagtaagtaacgtctcaccttttgaaccacaagttgcgattcaggtataatttctttcgttgctttacgaattgagatcccatcacttgcactagaatctaaaccttctgtcaccaagtttgtaaaaccaagctgctttgttccatcatcaccatgatccttttcttggtcagtaggttttgatgctttcaaaatgaatgatgacagcggttccattgtttgttcaactggtttgctttgtctgtcagcatcagattcaagtacgcaagagtcaaccaaacacttttccttagaaggaaatttcttgtcaatactcatgtccttcacgaaattgtaactgctctcttgaaagaaaacaaccagttcaggtaactcacactccatagaaccttttcttgtaagctgactctttcttcttttgctatcctccgagttgttaggagcacaagtatgctctcccttgtggttctcattgagattgtcttgagtaacttccaatgccttactggttacatttccattctccttttcatctggtggtggattatgagtcagtccacaatcttcactcctcacatcacagatatcgtgctccaccagaccctttttgtcaactgccttagcttccctcataccctcatttttggcattaaatttgaaagttttgtaatcaggactgtaagaaatagtaggctggctgcacatggattcaacatctggatgttgcatgtaatacaaatcttaaatcacataagaaaaaaacattggcataaatagggtgagaagatgtagaccaatggttatatcatactgacaaaagctagtacaagagtactagtacagtcatttaattaatcatcagaagtactataagggatttctatgagagactattctaaagaattctttacaatgtcaaagtaaaatggtaagagagagagccaaattacagccatccccactcttccacaaatttgcagagccatggtttgagattaaaccaacatgaagtatgataaatgagatgcttaccagcttacatgtgtgtaagtgggatataaatcttatatatctgcagaccaaatatgaagttttgtacagcaaactcagcaaccacccttaaataagtgacccataaatctgcacatacaagagaaaattgcatgagcaaaatcaaatgagggagatgaattttgaagaaataacaatgaaaccaactcatcaaaatttgaactacaaccttaacatcagttattttaaatgatgaataaagtttgttgtttatggaaaccattaaaattatctcgtttcttgcaaggaaatgaaataaatattataactaatggtgagaaattgcttcaattagattgcttttctgaaagggtatatgcttttcttttagcatagacattaacacatacgaattaatgactttaggtgcatatagcttactcaagcaataggtttgttaattctattttcaactttttcattagaaaacattgtgatattgtatacttttctggctacacaagaaaaactataataatgacaggaaagaaagaaaaaggaaatttcttggaaaggagagaataaagactaaagagtaagagaaacaataaagtatcagacaatcgtatatataattaattgatatgctaatatctctgagttgtgaacttgattttcagccattaatgaataataaattttctgttgaaataaatataataaacacctttactttctccagagtgttttataaatatactagtctgtctcatctaatcatccaaatagatagaagtaatatataaatgaaaatattgaaaactacttatgttataaaatattattatggatatctaatattaattattattattattattattattattattattattataaatgcttgttatatttcatttatttaattttttttattattttagtcatatttttgtatatataagagttcactctattagaataaactattaagaaattttcatttaatttctctttctctctcatttttcttcttttcttcttatctattttatattattcatattaattttataatacattattagcattagcacgagtctctacccacggtaaatattttttttgttaaagttcttgaattatttcaaaatcgttatacactaaatatatatttatatatatactcatctgactgaaataatttcaagaaccctttaactttttctcttctttttctttgttatttatatgttatactaggtagaagttacgtgccgaggcact

SEQ ID NO: 219580 - DNA, 4745 bp, Cannabis indica
atcaaatgatattgagcatgtttcccatctcttctcgagaaacaagtggcttatttttttttgcaaaattgtgctcaatttcataagtagcaatttcggccaaaatctcttctttggttggcggaagaactcgaacgaatcaagtttcttgaggaacatatcgagagagaattaaattttaattagacaacttggtttgaaaacaagtctccgaatttaaaaatagctcattcatcttatatatagtattgttttatgatacattagctgggattatttgtaataacaaggataaacacaataatgtgaaaccatactttttaggttaaatatgagataatccctactttcactaatgtttttagattatgaattatatgatgtggttttaattacagggctgcaagtaagttggaatggggattgttgtatgttctagccagagatgaagagggttttctctctaaagaagcagtgaggagaatgtatgatggaagtttgtttgagtattgtgctaagctcaatctgggtgatgaggataaaatgtactaatgcttgcttcataaatatatacctatatatatagagagagaagtgtgtagttgcaagtggaataattttgagaggaaagttaagaagtcaaaaccatttttaagtttagttcatgtttaaagtgtgcttgttatgtaactatgttcatatcagcttccattgtattgtttttatattctaatgtaaaagctttgccaaatatttattaagagagaaatgttgaatggtacaaatatcttatgtagaactagaagtagcaaaacataagccttattaggcaatcaatttttggttgaatcaatcttcaaacacccaaaaaataaataaggtttcttttgttttaacaaacatggtacattgggttgggaagtttaaatgttctctttgcatttggaattccctcaatgctgctgtattggtcaccaacaataccccaaattctgtaccctttgttgatcaattcttttctagctttagttttgtaatcttggacagaggaaagttcatcttcatgtgacctatatatacaaaaatataaagacaattaatttctaatcaaaaccatgtaaagagttattaaaggcatttctttttttgggagagactaaactgaccttagtatcaaattggtccatccatgaatatcaacactcaaaagattcttagttgtttctgatctgagatgttctcttcttgaagaaatcaaaaagatctgcaaacctcttgattttaactcattgaagagtcttagggagtgatccaaaacaggtgctttactttcactttgccattcttcaaaagaggtcatattcagtttgtctcccctgtaaatatatacataatttatacataaataatgataagaattaatgataaccaagatagaaaaactgcatgaacttattacccataatggtgttttttgtagaaagggacagtggacaaaagggtatcatcaatatcgaaaatccaagcatctttgccatctttcttcaaattgcaacttgtgctgagaaagactatgcattcctctatggctctttctgagtcaactttgtactgagttgaagtcacatactttccaatgtaactagcacattcttcggggacaacttcgaagcctcgaatgttgtgaagctcgacgttcattctccagctctcgcagtagtttctcagtgagatttggagaccatttttggttctttgattcaaaatattccaatctgcaactgctatgctaaggcaaaggctcaaagagcataacaagaggatttggcttcttcccattctggttttttaatttggtttattgtaggaagatagatttatggagaagtatatttatagagggtttgtttgtctctctccaacattggatttggattaaggggattaaaccgagtcacatgggatttggtattctgtaatgaggtatcacaggctgtttaagagtaagcaaagtagtggagaagaggtgatcttggaatgtattgtaaaatgacattttaagtactgaaaaagataatactaaattggattagaacatgtgttatgttaattaataggtttacaataatatgcaattatgcagttggccttgtgagattgtccctttttggaagtatatgggaacatgggatgagtgagtttatgcaactctttagatagtcaaatgatgaggaagcaactaaagcttaataataatataaatgaattttttcagcaaaaaaaatatacataatgtatatataattgaatttgagctatacaatttaggcatgtcatgtgtggtaggtatgtttgactaaatattgccaactccccttcccacttatatcatgtttccacgttttgttttgttatttaattttgaaacccttgtttccacatcatttgacaactaagaactgagaagctaagatctccattaaattgaatgaagtttcttataaagttgatcaaagtacaaaagagttgaattacattgaaattattggggggttttatgacataacattatgattacctaaataaatttagttgtctataatttgctttttcatgttaatagtttaacataacactacaacactaaggattttgtaccaactattaatgattaggcttagtttgttatataaatgaaataacagtcacaaaataataaggtaaatttcaacttcataagagagtggtgcatataaaatgcaggacaaaaacaagtaggataactcttgatcaacaaaacttctttaaatgtataccaaaccttgctaaaaaaagcaaaacgagtttgaatttcacaaatgtctgcaactatcctaaagaaaaaaggctagagtcaagacacttaaacaatagcattggctgcgctcgcgatcttggccatagatcagcacactcctttccgataggaccggtaatggcagaccctaaaaaaatcaacaaaagaacaataagtaaagctagaatattatcaaggaaaccatataagaaaacctcatgccaatgtgagaaacttggcatttcagagaagataactgagttttagttcatataactatacctttcatttctcccttggggttgacaataacaccagcattatctgcaaatgaaattatagcaaacaaatagttagaatattgacaatgaatcacgaattttttttaaaagcatcaaggaattgacttgcaaaagaatgagtcttcaaaaactaagcagaagcaacttataaaactaaaattaaagaaaacaaatgtagaatcctaatggagcagatgtgagcattaaaaagccaaggcacacctgtaacgatggacacagttgattttccagaaatgtaaccgtatcagccgtaaatgtaaaggatgatacatgacttatgtctggttgtatatacactaactagtactccaatatttgtaaataaaaagacaagataaaagtttcattttacaaaaagaaacataagaaaaaatttgttaaaacacaatgaaagtagtgggaaaagctaaaatatcccaaccttgacagggatagtaaacaaaattaccatccgggtattggggtgaggttggtatttacaatattgctgggtatgggaagtgtgaaggaacagttatatacaattctccacaccacatcaccagcaatacaactatcttaagtttacaatagacccaaaaacaattactcacacataataaattacttcaaaaatgagaatacatataaaaaaattatcaaactgcaaaaagcaagatactacaaggggtgcattcaatgaaatattctgcaaatagatttagctggttcagaaagtatcaacatcatagtacacatagcacactgaatagtaagacatggatgtacacatgcatcaggatagcacataaacatcaatcttttcttcgaacaatacccaaaataagcctttagattcatcctcacatttagatgagtaaatagaaaacaaaatatcattatcttacttggcatcaactaatcaaactttacttggaatacaataacaagagacaatccttaatgaacataattcaaacagaccaatcaaattcaatcggaaactgcacaacacaaaaatttcctacaagctaattcaactagactaactgaacaaaagcaaaactttaaacgaaattagaaaattgttagcaaataacttactaaacagctgaaatacaaaattttaaaaagtataccttcaaagtacataaagacaccatcctttcggcgccatggcttgcgctgcctaactatgacagcaggcaaaaccttcttcctcagatcaggctttcctttcttaacagtggccataaccatgtcaccaacacaagcagatggcaacctgttcaaacgacccttgattcccttcacggaaatgatgtaaaggttcttagctccagtgttatcagcacaattcacagtggctgccactggcaaacccagtgacatcctgaacttgttccctgcggaacctccacgccctataccaaaaaaactaacaggttataatgtattacttcaaaatgaaaaccaaataccgcttagaaaaatctacagtgtaacaaattcctctgcaataaaagcttttaaattttccattataacttccttaattgttaataatcaacaaaacccacctataaaacgtattcaaagctcacatt

SEQ ID NO: 219581 - DNA, 3796 bp, Cannabis indica
ttcatataccttactagacactcacttaatttaactttctaaaatctaaaccacactttcatattccaacatagtatcagagtcaaactaaatttaaataagtatccgattcaaatcaaaaaatcgattcaagagtcgttgtgagccaaaaaaaaaacatataattttagtagtgtaaagctataataaagactgtataaattgttattttgagagagaaatttcttgagaatttatttgagactagtaaccaagtagtagatttggtatttgtggatctcaattattggtttcttcaagatcaaagtgtatttaacttttctagtcttttcgtatatactatttagtagggccctaaacccacatgggatagtagattaaacatgccatcttgtgatgaaaaccctttggttaacatagagaatgataaaagcttctctctctaagattagggtttgctccattttcttttttccctgttttagggtttttggtgcttgggcgccgctagccgaatctgactggtggcgcctagagtttaggctcctcgctacagcaggtagaaggtagaggttccttcgttggatagctgttgtgagcagaggtgatcaacgtctgccttctttctctctccttaaaccggctctacgatgcccgaattttcaggcaagtagtcgtcgaccatggtgggatggacgtatctgttgaggtgtctcaagtctgaggttggtggtcgtggatagctctggtctcatggactggtgggaggcgacgaatgtgggtttctctgggctatctccctttcaattttggggacggcgagttgcggtcgcctttctcaggcaagagcttgggctttggagcgttgttgtcttccttttttctcagatctctatcccttgggttactattcaaacgtcttggctccagtgcacaatggctcgtggttagcttttggagtgttgttgatatagagggggggactcaggttttacccaaaggaatgtgcttcccttgtcctagcgccctcatcgttcaggacctcattggatggcaaagtgtaggcctttgtatgacctcctatgcacgatgagaaagtcttatgaaactgttttatgttatgtttttatttagtttgtttattttattttgtttagttttgatggtgttgttctttggggtgttggccttaggtcttttttggggagtttatctctttagatgctcctgcatgagctatgagcttattgctccttttattatcggtgtggttggccaacatttgagtcatcttctagtgagatttgtgtggttcctccatcaaacatgtaaagctttagcctttgcttaaccttaaatgaagattccctttcaaataaaacatgaagaatgattggtattttaacattaatacgtcaataattctcaatttatgtacaatttttaacccaacacaatctatcaggagtgcttaaaaagaataagtatggaacctcatcaactccactatcttggagaaccaccaccaccatagaaaataaatatattcctatatatatttaggcaagggcatcactttatttcatagacatttttttatttttagcacttagagaaattttgaataatttattcacaatatcgaaaattaagtataaaataatcaattgcacactacattagggaaaccgctaccttacttaataaatacttagttatagtattaatggagaagtggtaattctccgtctaatatattagggaggactgctaccttttgagttagatgcaaagctcaacatctttcttctcccgcatgtcaaccctaataatgtagctttaagttagattttatcgcgaatcggacttaataggtagttaaacatgagttatttatgatttgagatatatgttttgggcgtagcccatgtgagctattgggacctacaatctttttgttactgactcataagtgggtttttgatatatttcgattattgagcttttttgtcggattagactaattttttactattacgctaatattattttgttataattaaatgaatttgtgatgataaaggtataatagtaactacattgaaatataatttaaaagattatacttctcacttaattagaaagaaacataagcgcaaaagaatcaccatagtactctataaaataacattaaacaaatcctataggattaagagttcatttgtcaatgtgtgattatgtactattttagcattttaaatagttatgaacaatacaccaattaaagaattaaaaaaattgtgattagataaatagccaaaacaagaaagtgaaaagtcatttttttaaggttgtaccgaaaagtccaaaaaaaaacaaaaaaaaaaacttttttaagtaaatgaaataaacttcatataaatactaaaaataaagatagatgacataataaaaatgaagataatattgtattgttataaatattataattcatagcaaaacatggataatttgttaagtatttatttattttagctccaccaacaaaagaataagtgtgcccacgtcaagttattagtttgcaacctatcattcttccatttcttattttattcaaatactcataatcatatacaattatacattatttgtttctaatataattattcttttcaattctttgttatttttattttgacattttcttttaaaaagataacctatttaactaaaaacctattatccattatccataacataatataaaaataaaatgtttctatcacaaaaaatatattaatttttttaaaagaaaaataaaattatttagtaataggttaatctaacaaattttatgatgatccaaaattaacaaagatattgctgaacatctccaactatgctctctaaatacattatttagctaaaatagggagtgacttaaaaaaaataagcttcaactatataaaaaacagttctcgaatagagaatgaataaagagctcttcacttttttgctaaattttttaatagtattttaatcaaaatattattactttttcattattttctaaaattaatttatatttgacaaattcaaattataaaatattattaaaataattaaataataactaaagtatggagcataattggagcaacaataataaaaatgattctctattttagttttttaattaaaaaagaataattagtaattttgccatctgaacttttgctttacttaattctgcctcctaaaattaaaaattctctctgaatttttatatttacaaaaatttagttattatgttaggttttatctcattatttagtttaaatgctgacgtgtctatgtaaattaacaaaattttgtattggttaaagtttaatgatagaagaaacataacttaataaaatgggtataattatgtaaatgctatattttaagaaatttttttaacaaattatatattttaagtggtaagattagtaatgtcaaaagtttaagaacaaagacaaatcaaatagcatcttattacctttttttttttcttttcttttctttaattcaatttgaagtctttttcccttttctaataataataataataataaataaataaataatttaatttagtaataatagttttttttattataagatttataattattaggagtatttatctaatttaatctacactattttgttttattagtgtcatctgatccgtactaagtgtagaatttatattttagatctaatctaatccgcacatatatagctcaaaatt

SEQ ID NO: 219582 - DNA, 8754 bp, Cannabis indica
tttcattttaatttaagttttttgttttctaaaaagaaataaataaaatagtccagtctattcttaaaccaaacacaggattactttcagcataatgcaatattgtccaatctagtccaatccttttcagtccaatcctgcgtaccaaactagaacaaaaataaaaataaattttgtaaaatttaaaactcgatataagagaattacacgtgctatcaatattctttcaaacacaattagtctacaggatcacacccagaaagtaaaatcaaatagtgaagtcacaaaaataacacatacagttgacttaaataagtttagacgatccctctaaaattttgctgcaatcattcgtaattttctttgctaatgtgacttttgaacacactaaacagtgaactcccttcaacttttgatgtgagtgtgctttttttctcctgaagtaagtcttcgacaagtcttatctcaaacacttttttttcttgttcaatgaagctctttaccctattctaaaaacagtgaaagaacaataaaacataaactaaaacctagtgagaaatactaaaatgtaccagtggtgcctagcaccctcctatttgttaatattgctattactcaaactaagtatcgggtcccatatagtttgatgtaataacttttagagagtatcgctagctaattgcaagacgacatatctagaggtgttaagcagcactagtgcccaatagcaatacttagtagaactctagattttctcacaaattaaaaatactcttcacacaaatatgaaaatataaaataatgagacttgaagagatgaattcgtttgactgctctctaggtcctatttataacaaatagaaaccctaaagaccgtcatacacataattttaccgttgtacaaaattttcctaaaataaactctaatttgcaacaacatacacactctgcaaccttagataaaatcaacatattttccatatattaagatcacgatcttgcctttattttttgctataaaaagattataaaatctattatattcatagtaaaataaaaaaattaattaccatcaaatcaattatattatatataaaaattatttaaataaatttttcataaagagaattcatttttttcttataaaaactttcataaataataaaagacagaatcaaaaaaataatattttatttacattaaatatttataataaattaaaaaaaaataattttgataactaaattgtaaaaaaaaaaaaaactatacatccaacaacacgtggcatacaatttaaatcgaatgttaaaacaaaaatatgagactcaatattaaataaaaataataacaatatgttatattgaatactataaaatgagcattgctattggacactaatagtgcttagcaatttttaaacgtgtcgtgttgctattagctagcaatactttaacttatataaaacccgatattaatatataaaaaaatacttataccactagtactttttaacatttctcccataaaatacccctaacaattgtcctgaaataatataggatagggagagctagagaattgtctgtattgattacaaaatgtaaaattaaataattagtctttctttggaattgcagtcccattatatttcgaaaacaaacacttgactataaaccaacctatactcttacttacacaattggtttccataaacattattcactctattcatctgtcttcacagcctcttacaatgtctacaccattagagtaagctctctctctctctctctctctctctctctatatatatatatatataaatacacacataatagtagtatatactagtatatgcatttgatgtatgatgatatgattaagaaatcgtgtatcaaaagaaggggcttttttattttttatttttctttcccttattgttgatggtataactaatttatcatgaattttctggtttatttatttatttattttgaatgtagatattataattctctaccgccagttagcaagttctatggaatggcctgtttaatgaccacgtcagccctgtatctccaactctataatccttggatcattgcacttgattatacccttgtcataaaaaaatttcaggtatagatacatcatccaaactcaattctttattagctactatatatttacctaatttattaattgctagcttcaacaattggcctgggccttagaacttttgtactcataaaacatataaatcttcatatctatatacaaatatgttacaacgatcaatttgtgaattagaaaataatgaagccatcagcctctaattatttgtacataatgtgtcatgggcctttaactatgtgttttaaccacaattacaagtaaaatatatctagattgcaaatttaaatttggattgtaaatatctaataactttctaataaggaaattataaggttattattgagttattatgcttgagcaggtcaaataagaccccagccacttaaccttttcaaatttcagggacaacattactcattaacaaaatcaataaaaaaaaactttatctatattaagtaaattaatttaggtaattggataaatattgtatttggtgtaattaatagggttgttcatataaatcggaaaattacggtttaaatccggaccacgacaatttaaagttcgaaccactgtaaatcgtaaaccgtaaaccgaagaaactgtttttggtggtttggttaatccgaactatttacggcataatgattcggttgcggttcataataaatagttaacggttaaaccggaccagaccatttacaataaataattgatttatatatatatatatatttttatatatgactatatgtataattttaaactttttttgtgtgtcaagttttttattttatgaattttgatttttttatgttatgtttgacttttgagaatacttttatattgttatttataggttatagagttattacttatcatgttaaatacatattttgaaaaataaaattaaaaatttagtaaaaatagtacaattacttaaaaaatatgaataattataaattccacttaaaccgtggtttcgaaccaaaccaaatcgttcttaataatttagtttggtttggtttaagaaatttattgatatggtttggtttccaatattcaaaaaccgttatacttgtttggttcgaaaattatgaaaatccagagcaaaccaatccgtgaacacccctagtaattaaaactatataaaaaaaattaaaacatacccatgtttgatttgattgatttaacatgcttaagctccacatgtgatcagcaacaacagtaagttctcatactcataaacaattattgagaacagttaattaactaattattcagttagaaaagttagttaaaaatacaattagaaggttattagctttagtcttttactattttgactgagctattgtctatgaacttctgtattagccttgttaattgtaagcgaaatcattttctccatttttgtttatgtgtcaacatggcatcagagctagaaaacctctgatctgtccttgatctttgtcctcgtacttcgtcatcaccattttttgcttctctttgtcccttacttctttcaacaatgtctagatcatctttagttacagagatacaaattacagagaatttatttcgttcaagcatttcctccaaactcgatgaaaacaatttcttgtcatggaaacatcaaattctcactgtcgttcatggtcatcatctccaacaattctttgaacctaactctgctccttgatcccaagtacgagactgaagctaatcgtacaagcaatataatttctcaaaattacatagaatgggaagtacaagatcaactccttctttgatggatactttcctccataaatgatgaccaaatgaatacacacatgatcgggcatgagacctccacgaatgccttgatcgcgctttaagaattcttcacaaatcaaacaaactctaagataagttaattcaagactcaactttataatactaagaaaaatgcttcctccatcagcgattacttactggaaataaaatcaattgtggatctgctaaatgccattagccatacgttctctatagctaatcatgtggaggccattttcaatggtcatggacctaaatatgacatcttctacacctcctacaacatacataaagaaaaattcaccattgctgagcttgaagctctctcatggctcaagaagcacgtattgacaaaggtataaaggatcttgactaggactaaatattgggcgggtcgaccacgggtttcaagttgacaggttttgagttcgtatgtttcgggttaaaaaaaattgtacccgaacttggcctatttacgtgttgcaggttgccgagttttgggttcacggttggcgggttagggttgggcgggtcaacaggttgacccgatcaactcggttaaaattttttttaacactttcctaattatctataaacatacctaattataaataaacatataactaaacctaaatgcttacatattatatataaatatataacaaaaccattaaatttaatgagacatatatacatataaactttcaacacatagaagaactgtatttatattgtattgtgtaatttttttaagaatagaaaatattattatatttgaagtccaatgtatgtagagtacaaacttttattattatttgaggtcctacctgaaactcggtcacttgaaaaatcaaactcgaaacccacctgaaaggtgtaccgggttgaacccgactcacccgaattgaaggggattctttaaatttttgggttagtcgggtcgggttcgggctggttggccaggttcgggtcaagctcggtaaaagtgctcagccctaatcttgacatatcctatacagaagccaatcttgctcacaatggaagaggaagtttttcaaacaatcgaggaagctatagtggaaatcccccttcaatggacaacaaactcaaggctcatataacacttctcgtgatggctcaaataatcatggaggcagaggccaccctagacgtggaagatgaacaaaccaaccctagcaacaacaacaaagacctatttgtctattgtgcccaaagttaggtcatgttgctcttcaatgctactacaagtttgacaagtcatttcttggaccaacatcgtttaatactcctccttcgaattcctctactggagcacctctacaagccttgatagccacacctaacacagtccaagactcaaattggttccgtgattttggtgccacgaatcatctcacaccagatgcttagatcttggcaagtagctcaaaatatattggtgaagaacaggtcatggttggaaatggtttaggttttcatactagcattgatcattctgcattcaattcctcatttcattctaaatctctaatacataaaaatttgttgcattccaacaatcactaagaactttatgagtgtttctcaattcgcccatgataataatgtcttctttgaattctaccctaacacctgttttgtgaaagaccatgtatctaagaagatccttctacttggcaagcttaaaaatgacatttatgtgtttgaccacactcaaatctgtgatctgtatgctccatcttcatctggacagtcttcaccaagttccttccccttcaatattgttgcttttctttctgatcaaaatgtaccttctaatcttcaactttggcatagtaggttgggacacccaaccactacaattgtacaaaaaataatatcattgggtaatgttcctttaagaaataaaactatttttgacttttgtcatgcatgttgtttgggaaaatctcacaaacttccctttcctaactcacaaacagtttatactcaaccattgtaaatgatttacattgatttatggggccatggccctcacacttcctagaatgaaaatacctattatattacctttatagatgcatacattaggtatacctggctatatctactcaaaaccaaatctgaggctttcccaacttttcaaatattcgaaaagcaggtggaactttagtttaatttacctataaaagatatgcaatctgactgtggaggtgattttaaaccctttgataatattttgagtagtgttgtatcctccattttcaatcttgccctcacacacatgaacaaaatgatgttgtgaaaagaaaatacagacacataactgagattagcctctctcttcttgctcatgcacatatgcccttaaaatatttggataagggctttagaatagctgcatatcttatcaacagactaccttccccaaaacttggtccatattctcccttttagattctattccacaaagaacttgattacacctctctaaaagtctttagttttgcttgttaccctaatctctgaccctacaataaatgaaactagatttcaggtccactttgcacattcctaggctacaatctagttcataagggctataaatacttaagttatgatgggagaatctatttgtctagatatgtcacattcaatgaatatatttatccattcaacacttattccttcatgccttctctctcttctgcctcaacagagtcttcaattccaactacatctcccttaaatattccctcacctccccctcttccctcattctctagatacaatatttcatcatctgtcaaatgaccaacataataatatgtctaccactaataccagcactagttcctctagtgtttctccttctttgcatacatgtaccaatgttcctccagatattgcaactgatgctgcaccatctactgcaacaactgcttccagtgacattcccacacatgctgcagtcttaaatgatcctataatagctctagctagggtctattctagccatacataaccagcatctcgtgctcaccaggtctaagaatggcattataaaacccaaaatctttatgacaactattgtgcctatcaaagttgcagaagcattacttgatgcaaagtggaactcagctatgagtgccctaaaaagaaacaagacttacacattttttcctctacttgaaggttgcacccccattggtagcaagtttaaggctcgattagtggcaaaagggtaccactaacaacatggattcgactactttgaaaccttcagtcctatagtcaaattcggaaccataagaattgctctaactttggccttgtccaaatcttcgaaagttcatcagcttgatgttagcaatgccttacgaatggggaactcactaaggaagtatatacaaccacctggctttgaagatccatctcaacctcaagcattttacaaacttttcaaggccatctatggcctcaaacaggcaccaagagcctgattttacaaactagcctcatttctaatctcattttgttttcaatcgtctagagctgatcaatctctctctattaaacatcaccttggtccacaacaaccattctcatctatgtggatgaaattcttgtcatagacaattgtcattctctcataacaacattaatttatgatcttcacaatatttttttctctaaaagacgtaggtgaaatcaagtatttccttggaattgaagtcctccacactgatcaaggcttgcatctctcataaacaaagtacctgaaagacttacttctcagagaaaaaatgcaatatgccaagcctaattccacccccatgacctctgttcttacattattagcataaggaagtgatccagtcgaaaatgctcaatttttacaggcctgttgttggagggttacaatatttaatagcactcgaccagagatagcctatagtgttaataaagtgtgccaattcatgcaaaattccctccaatctcactggtttgcagtgaagagaatactcaaatacttatcaagaacaacggactatggccttcacattaaaaaatcaagtgctctcgagctggtggagttttgtgatgctatttgggctactgatgaagtaaagtctaattgcttgggaatccaagaatcaacaaacagtattgaggtctttgactcaagccgagtttcgaagtcttgcaagtgacaatagagatcttttggatcatctctactcagtgaattaaaagtgactcttcctattgttccagtagtatagtatgataatcttagctctgtgttactaacaacaaatctaatacttcaaactaggcatattaaattggatctctattttggaagagaaaaggttttgaacaaggctcttgagattaggcatgtactaaatagctgattatttaaccaaggctatccccaactccagattttctcttcttagagataaactcaaagttaaaagctcttctatcttgtgtttgagggggttattgagaacagttagttaactaactattcgattaggaaagttagttgaaatactgttaaaaggttgttattagctttaatcttttattattttgactgacttaagactcattgtatataaacctctatattagccttgttaatggtaagtaaaaatattatattcctcttcattttgttgtgtttgctacaataaacgacacatgtcgtgtactgtaacaactacattttcttttcttttcttttttattattttattatattat

SEQ ID NO: 219583 - DNA, 2899 bp, Cannabis indica
tctaatttcattcaatttcactagctatttttgtaattgattatgtacgaaaccatgctccccaaactttgatatctactaaatcatgtcgctctaactttgacatgtattaaatcatgctcctgaactttcatcaatatattagacttttttactaaaattggacaaaatccaacaatcttaatagctcagggggcatttttaacgaccttaaaagttcaagaggcataatttggtacatgtcaaagtttaagggacaaaaatcctaattagccttttactaatgttttagtcaatatgtattggataataataatcaaacatatatattatttcaagggcttagcaaaaaatcatatatttacattagttgattaacttctaaaaaggaaaagaaatgtaaaaaaaaaaaattattagaatttaatacccaacacatgtatattgttagaccaaagatatatacattactatctagaacactatcctatactgcaattttggggatttttttttcatattcagcatggttagataaaaaattcatcaatgtgttgagggacgtcatatgtaattaatttatatttttttaagaaaaaagtttagtaccatgttggtcgccgtttgccgctattaatccctatattttcggctattgactaatagcggtgggatctattgctataattagttggtcgctattaattagaattagcggtagactgagcatccaccactaataattattaatagcgacaagtattagcagcgggaccacaccactaattattagaagaattaataatgttatgagcattgagagtgcaaggtttgtagctccaaattccaagtactagttgtcatcattgagttgagaagcttgagttgaattggcctgttcttgaggttgatcagaagctagaagcactcttgtaaaattcttgtcaaacttatagaagtagtcaattacagtatggtcaagcttgtgaaaaagttggaattgaggatgatttggaggaggaggaggaaagcgacatcctcgactgtgattgctggtgctagctcctcgagtgaaatcaccacaaaaatttcccctagatccaaagaattgagagaaattagtggagttgaatgtgtttggagcatataccaacctcaagagtaaggaggttgtctgaagttgcaattagtttgagcaaagtatgcctccatggatagacttgggatcttttgtagccacattcacacttggatcaacaagttcatcaatctttttaatctgagactccgaagctagaagcaaagcttcgatttccccaatccgagtattggtagagattatgaacgtgtcatgttcactctaggcaagcctttgaatatggcagcaatgtgaatgagatttgagagaacctctccaacagatgcaagaaggtcaacatgctgcttgactttgacgagataatcgtttagagtcatcgttcctttcctgagtttttagagctttgttcaatatttaagaattttttatgagacttagagtattgaaatgttgttcaagagaattcgagatctgttgagttgagttacatccaaccattcttgtgagcaatccttcaaacattgaggaagccaagaaacaaggagttggtcttgaacttcccaagaaaggctgaattgtagttgcgcacagcttgatcaacatcattgaggaattgtgatggaggagttgtatcctgaatgaaattctgtaattgatttccatgaattactgttaagattttgttgggattaaactcacttaacctgtcgagtcagtatgtccatctatttgctcatcaaatgaatttgaagaaagctgctgcaagttataacagttggctttaataccaacttaaaggggacccaccgacaactatatataggggtttctctattctcaaatgaggtctgagttgagagttttgatctctaatctccaaagctcatacgttagatacagtttagaaagagagagtccaagattatagtgagtgtggagggatgtaaaatggagtatcactcttgaagtgatttccctcgatgtgaggcatttctttgtaatttacttactgtgttgagttgtatgttgtagttgtaagtcttgtgctcattctattgcgttaactctggcatttcatatttaataagatccaccattcattcattatcaagttaagtttttttttcttatttcaattaagtttaagttttgattttgtgattggttttagttttgaatttatgtttcttgaacattgttactgatgtaacaacttgttttgagggtgaggattcaccacagatttgttgcttccacaagagaaaattgtgatcattcagtttgatcggaacaacgtgattgaagtacacaagagcatcatcatattctctgtttcgatttcgagctggtggaagttgagagatatgagtcccaattggaaaagctgagttggtcggagttgttgaagtcatatgtgccattaatggagaaaatggttctaataccatattgcaggtctttaaaacctcttagccattaaaaaaccattacagaaagcagatggaagagagaaggaaagagaacagaaaggatagacaaagattagaagagagaaagaaatctctggcattgattaggcaatgaattatgattaggttaatttagatttttgcctcatgaattttgacatgtactaaattatgcactctgaatttttttggtcgttaaaaatttcctctgaactattgagattgatggatttaaagatttttgtccaatttcattcaattttgccaatttagtgattgttcatgtactaaattatgctctcaaaattttaatatctaccaaatcacaccc

SEQ ID NO: 219584 - DNA, 4382 bp, Cannabis indica
gattactaatcagattgtaaagagttttatttagggcataaaacctaacagtatctaagcttacagtctagctataagataattatctttggcctcatggtaactcctcccaatatcccctataacctctctgttaaacctcttgatagcatgctttaacctcatgagcttgaggaacaaagcattcattccttcaaccttcaacggtctattccaatctttaagaacaacttttttgaaatttggatgatcaacccaaaagttgtagtacctgaaaggtttgaacccaattttctcattggtagccatcgatataacacacacacagtgatctaaaattgtctcccagctgtagtaagcttttgtcattggaaagcaatcattccaatcttcattcacaaaagtgtgatctattttagaataggtcctcttatccccatcttgattattagtccaagtataactcaaaccagtcttcaggagcctttcattgtgactttgggcaagccagtttgtagcatctcttgtatcattaattgtaacctttttccacccttcctatcatccaaatcaaaaagagcattaaaggcccctgttataagccacatccctttctgttccttgacaatattgaaaccatacacaaatgtgatgctcatagcattagtttggccagcgactttaacatagcaatgaacaaattgcagttcttctctaacaacaatcactcgagcaaagcacttcctccacaaagataagaattcgatactcaatcgtaggactagaataataatgccaattcgagaattttctatcaaccatttctctaattttattccccctaagtttagtttccaacaaaccacaaacacctattttattcacgcagcaaaactcataaacttcattctgattttcaactttatttattctcctcacattccagcaaacaatattgttgttatccatggccaataaaaaaggtacccgattcagtttgttcagtggcctcttgatcatccactctttcttcctgttgctcctgcaaaactgtaaagatattgctgaactgctctgtcttatcccctgctgcttcagtttgtggtttaggcttcagaactgctgtcttttttggtagcacccattccttctgttgttggcttctacttacagcactttctttggccaatttcttctctttctgcctatttttttcttgttgttgctgttttccttccctttctttctgaatttcagcatgtcgacatgttacttttgtgtggccaaacttagaacagctagtacactttgcaaggagccattcatactctatactctgatcttgcaactatccatactcgttgatgtacgggatgaatcgaggtggtgcatctgtgacctccatttccactaagattctagcaaattgtaatctcgtcctatccttggtgtgttggtccaccgttataggtttcccaattgtgctcacaagagcacttagacttttggtaccccaatattgaagccctaagtcatgaaatttaatccacaatggaacagaatgaataagattcatagcatttacatccgcagaccatggtcgaattattaccggatttttgtcgaattgcaccactcctacctccagaacttgatcacgtgttgcttcatcacgaaaccacaccatgattaaccccattgacatcttagaaacctgtacaactcccagatgtccccaaaccctcttgataaatcctttgaatatagtaattggtggattagcacccaaaaccttgcagataatagcagatttccagcagttttcctcttcacatacctcctccaagtcaacttgtgttatcttgattccatctctgatcaacggttttgtgaatagaagtctttgatcccgattcaaggttttcccccttatgaaactctcccagttcttctttgctgagttcggagattgctcaacattcgatgttctcaccagttcttcctcaacctctacagcccagctttttgctcgataaatcgcagattgttcattctcctctgtaactattagatcttgggttttcatcagatctacaatcaaatttagcccctcaaacgagcacttatcatcgacatcttcagcttcctctgtaactccagaaattgaatcgtcgattgggattcgagtaactggctttcgtccacttttttcttcctcgccatggaaggagaaagtagatcaacgaaagttttacttaaaatttttttattgttactatttgaatgctattttgaaccttaattttttggaaattcttgtgggttgccttgaagttgtggtgttcaagcttttgtataggggattatgttggttttggtgtaacttatgttgcttgctttaattcttgtggagcttgtaatagttgcatatattgctgttggttaaagcttgaatttttatttttaatcccctgttagtgatggctataatctgtgaataatgattttgagtttgagcatgtttttgttgatttttggtatgtttgggcttgaatttcggttagtgaaaagtggtattttctgggtttggaacccaagtgtcgcggctcgcccacttgaaatcctgggtttttcaacccaggttctgcagcatgcttggggagtgtcgcgacccgcctagggatttctgggcagttttgaatgttatttttgattgttcataacttttcgctccagactccgtttggggtgttccatatatcgttggaaagctcgtttcgagctctatatgtttatttgtatttgaatgccaattttatgattatatggaagtgaatttagggattaaccctatttgtgaatcctaggaatggtgactaggactatcgatagtcggcacttgttcaggaacacctagtgatttggaatctccacgtatttgggacatcaggtaagacagtagttagcacgtagagttaagcgcggtgacgctcatgtttaatattatagtggtgatttattgagaactaggattagggttattacattaaagtgtagttgttatatggcctagggttattaccctagtgattaatgattttaaatgcaatgccatgttgtatatgttgaagtaaagaattatgcgttcaaggcataatttggttagactcggtaattagaactgagataaaccattataaggccttattgtgataagacgtgtgagcgtgactgattaatagtgaaaaatatacatttaataagcttaaagtttaatataaattaaatataaattaatattttcatgaaattaataagatatatttttatgttgaaaatatttaatttggatttaatttattatcttttttattgtaggaattaaaattattgggtgttttgaagagaattgaaaaattgaagaaaagagagcaatttccttaaaaaggaatcagattttcggctgaagatgaggcccactcgcgccagcagccactccccatcccagccgtacgtttgatgcatcaatggcccagagggacgcgtgtcgtccacctccagacagggcgcgtgagggcctgtctctcctgctgccagccgcctggtgacatcacaaatgggacccgcctgctgcatcttgtcccccagccagctccatcaagccgccacgtatccaagccgccagcagcctttttctccaccaggcaatgcatgggcgacacttgtcactctctccttcaatccgccaattttcaaattattttgaaatgcaatttcaaaataatttataattttatattgctttgcatttatttagctctctttactatttcttttagccaataaattacattttgtatattttatcattttaccctcacttacctcattgccaagaaatctctaaaaaaaaatattaaaataattaatttattaattattttaattcatccattttggctataaatagggaaaagatgagacctcttgggacaactcctacacatatctctttagtgtaatttttagaatagagaaactatagcaaaatttctcttcacttttcttctcatatttctttatgggagtgattagcataatggtctaatcttccttgaaaggttagggatgatttcatatgcaaagtgaggttattttgtatctttgattcacttataatatttatttgagcaatgcaagttcttgtttcacttttattttcttgttcttcatccatctatattaccatatatgctattatatactaaatatatacatagacttagtcatgctttttctatatatttttatttagtgattctagtaatagtagtatttatctttttctatcttttatgttcattcttatttacttttgttat

SEQ ID NO: 219585 - DNA, 1402 bp, Cannabis indica
aaacaagatatgaaaaatttgatcagtaacaaaaatatatgagaagaaatatagaattattggtcaccgagtaaagttcaaccggggtactgggccttatattgattatattgagtaattcagcttttgcaaggtcatactttttggacttctccaaaaactcgttgatattttcttgagactgattgcaagcagcagtttcaaccaaataatcataaacctaaagcagagcaaaacagaacacctataagatatcaccctcaaagcaattacgactaatataatccactgaggtgaaaaaagacaatatacaaactttatactcggatggtgatacatccgcaagaaccctagatggatctttagaggctcctctagatttcagaaatttaattacttcaaaattggtaagtggaccagcattggcctctaatctgcataacaatgtggaaaaaactcacttgtaaaataccaaataaagtaaacattacaaacaaaatcaaacatgaatattcaaaaacgtctagataataataaagtgaaaacatacatcttcatttcccaacaatcaaatggggacacagttcaatccacacagttaaaacctcctttgctcgatcatatctgacaagaaacaggggatgtgaagatagaatacattcacaaaacattcaaatagtcacagttgatttttagttcccaaaatatatcacatcccaataaatatatgttatgagagattgtagtggaatgcagttttaaaagacaaaccagatacagaagagcccagcaacatacacgtatcaactgttaaatcactcatcacccaataattgtaacttagaatattaaattatctctaaaatcatcaaggtattaattatatatataaaacaactgtttagggagacgcacatagtagtgatcatcctcaatctcatcatattgtgtgtgtgtgtgtgtgaatgtgcatgtgcatccgtccgcatggattgaagagtaatttgattgaagtttgacatcgcaacactattttctaaagattgtaaaacacgaaaatcattatttagaacaatgcatgacttaaaatgtggcaaattacatgttgaagactcaaactcatgatataggtccaattcaatattgcagtaaggctgtcatgtgttgaaaatatcgatataagaagctttagctatataattaacccatgatagacgcaaaaatatagtaattttcttctttcaaaaaaaaaaacataaaaaagcctgcagatatagatgaaagtaaaaaggaaagaaagacccgttattccgatcaactacttcttagaaaccccaaaaccatactgttgttgagaggaaaaaactggacagcaaagtgataggcgtctgagattagtcac

SEQ ID NO: 219586 - DNA, 4462 bp, Cannabis indica
gtactctttaataatttttttttattttattatatatttttttgtggagaaaaatatgattaaagtttaacatagaaaacttctttatgcaaaaagataaaagatatacataatgcacatgttcatggcattattatactttttagtttttagatgatatatatattacagtctcactcatcttcttttttccactttctgattatttataatattttctaatactattagattagacataattacacacgtagtaataatcataacacttagttctatttccatattatattatctatcttgttttgtaaaattctgttgtacgtacatgctcctataagagcattcataacagtgtctcttttaacaaatttaaaaaattaaagattctaaactcatttatttaaaaaaaaaaaaattaatatacactattcatactctacaattataaaatattattcattattctaaatatattttattaattattttgaattttaataattattttttataagaatatatgtatataatattatatatttgaaatgaataaaatataaaaaaaaataaagaagtagaattttggtgttatattttaaagaagttaatgtatagtgtaatatgaaaacattatgaaaacaaaagttaaattttaataatgtgtttaaagaataaaataaaaaaaattattaagagtactctaaaatagtacaaaatttaaggaagaacaacataataataaaatgttattgaatatatttcgactcgttactaatttattaacttcatatagtacattttgaagaacagctatatgtattttaaatagaaattatgatttcatatggaggcaaaagccaaaacaaaataacaaaggacatacacatgtatagatctctctattttgtacctttctagttaggttttcttctttataaaattcagcctgtaagagttgaaagaaagagaaggaaatattgaaatggaaagaattagtcattgattttgaagcaacataaaatggttgctttaaatacaagaagaaatgttaggtgttacatgaaattaaactgtttattgagattttcaaaaattaaatgaaaaaagagcttaataaattagataagtaattaagtaatgagatagagagtttttacgtgatttgggtattagtaaaccctagtccacgagtcgatgtattagtctaagaaggcttgatgatggatcttataattttaagaaccctaattcttgctatattattttttctctttaggtttctcttagcaaaagaagagagcttgtgatatggctcgaaatggcaaccacagcagctctgaaagtagcagacaacctgtgataagaaatgacctgtgaaagagggtaagtattggaagctggaggatcaaaattacccacatcagtactgatctcaagttgatcagcactatcaacaaatggatgaggatcaggaacacatggattagtattggctgaatcattatcagtagaatgtgtgttggtctgagaattaagagaaaatttggatggtatttcagagaaaaaattctgatatacagttggaaggccacctgaatgcacaaaggaaaaaatgtgttcataaaagtacacatccctggaatgaaaaattctattggaactgaggtcaagaagtctataggctttcatgcctgtatagtaaccaagaaaaacacatggtgctgatcttggtgaaaacttggacctacattgactcaatgttgaagcataagctaagcagccaaatgctttcaagtgtttataggctggtggtttagaatgtagaatgtcaaagggagatttatgtttcaaattagtcgtgggggttctgttaatcaaatatgcagcagtggctatgcattctccccagtagcacaatggaatgtatgattggaagagaagagcactagcaacatttagaagatgttgatgctttaatttattctctccactacaaaattttgctgtggtctttgaatacacgaatgataatgcatgatgtcaaggtctttaaacggtacatcaaactgtaattccttagtattattagatctaaaggcttaaattaccaattttataaactgttgaatgacagtttgtgcctcagatttgtgcttaataaggtggatccatgtgtacctagagaaatcatcaacaatggtgacgaaatatttaaaaccctcaggtgtgatagtattaaaaggcccccatatatcaacatgtgtaaaatcaaaacaatgcttagagaaattgtgattggagatgaaaggaagtctcctttttgtggcataatggcatatgaaacaatgaaataaagaattagaatctgaatggaaattcaaagttttattcaatggatgaattttgatacaagagggatgtcccaacctataatgccttacagtgtttttattgattttggaattagaaatggaagaaaaaacagaaacataatgatcctcgtggaactccattacatttcagaaaatatagattgtcatacttctcacccatcccaatcaccttgttcctcataatgttctggatgacacaatgatcattagaaaacatgaatgtgtaattagttcaagctgttagagaattgacagacaataaattgcatttgaatgaaggcacataaatcacatttttaagaactaagtcatggtttaactcaacagttccaagacaagaaccatgtgtatgtaaaccatcaggcagtaaaacagttttgagactagagtcatgataggtgattttgaataatgagatgttgtgacacacatgatgtgtgtccccgtatctatgatccaattttcactatgaacaaagaagttcttatgaaaaaaaagagatattatgggctgctcatcaagtgtattgattgaactgttttctgccactttttgagcaagcaaggtcataagcttttggcattgaacattagtcaagctagaaacaagatctttatctcctggtgcatcttcaaacttttcctcatcagttcccatagcattagcagcagcagatttgggtgcagcatttcgatttggaatttttccatatagcttgtgaccaggtggataaccaatgagtatgtagcatctttcgatagtatgtctattcatgccacaatgagtataattaaatttagatttgaatggctgaacaggaccagcaaactgtctaggattgcctgcaatagatttttcaatctcagaagaattactagggccactagttagtccacactgcctttcttcttaaatcacagtagcataggctttattcacatttggaagtggatatcacataagaatttgagatctcaccatactataagaaccatttaatccaacgagaaattcaaaaagctcatcttcttcttgatattcacgaatcactctcatagcaccacaagaaaaaataggttgtggtctatattccctgatctgatcccacaaggcctccagtcgagtaaaataagtagtaacactattcgatccttgagtaagactttgcataatcttcttagcttcaaagattcgaggtgcattcctttcataaacctctcatggggttcagatcagatttcagcaacattatctagatacataatagtgttagctatttcattagaaattgcatgtagaatccacgatatgacagtactattgcatctacaccagctatcataatcttcataatcatcatctggttgaggcaatcctctattaacaaatttcactttatttcgaacaacaagagcaatcaacatggatcctctccagatgctgtagtaaggattagtaaggtgtaacaaactcactaacaaatacaaagctgttcacacaaatccaaaccatattaactaacttctaatcgaactctaaccaacttgataattaatcgtataattattctgagtattttctagtttagttgaatactcacaattttgtacgtgagtattcttgcttagtttgaatacttgcaatttttgatgttgtttaaattcttctaacaaccataatatattaattttcaaaaatatacttttttttttattactttatgtaatggtttattattattttattttatatttatatttaaatttaaatttaaatttttatttagttatcattaaaatatattttaattttgactcaatttttttttatatatatattttgaaaaaatagtatccaatattcctattccaatcatgtccgatggattgcccaatctaattccaaactggtcgagaaagagagaaaacaataacatattcagtggtcaaagaatgagccgagccgagccgaagctcagatgaaaaataaataattcaatacgttttacgtgatcgtcaaatttcagaaattgccctgctctttctctctctctctctctcttcatt

SEQ ID NO: 219587 - DNA, 2291 bp, Cannabis indica
acattattaatgatgtagaattttgtgcatatataatttgatgtgtcattaaagtaaaatggtgtacaaattctacgttaatttataaccttaaaagttaaaatacaatttggaatttactttgtgtagtgtggggtttataatatataagtgaaattaaaaatgatttattatcatctattgtttgaatgaaactaatttaataaactcaaaagtatcattgtacgtgtaataaggtaaaataggttaacttaaataatcctttattgttcaattcaattaatatcagttttaattgttggtctagttttctttgtttaattcaaaaacatcgagcaaaaaccacatgtgcatagagtgttggtgtaaattcttataaattaacacttatatatatatattttaaactaacgtctagctagctcgataaaatatagaaagaaaaaaaaaatagtgtttggtattacatgacatttttcttctttgtctcatttgcaccagctcgacgactttgctactatgtattttcatactttgcattaatattattgactgtaatttttattaattgtttgattgttcttgcattatatataactcatgcatctaaatacgtgaatttttacatgtatgatatgtattatatattatgcagattgtactaatgtaaatatgaatgaatattctttaataacttgaatctcaaaaacaatacagttgatctagggaaacgtatcaaaacttaaatctaaaactcattaagataatattagatggcttatactttcaaaaacaataaataattttataatacagaaaaaattatttatgtatatgtggtttgttgtgggaatctactcgaatctccacccccacatggaactgacacctgtcctgcttcgatttttctttcctatatttttttattgattcccaattattaaaatattgatatttatgatgatgtaatgaactgaactactggcaaaaaacaataagagtgttaagattttgtttaaacaaattattaaaacactataatactgctggtctactattcttcgcataaaaaaaaaaaagaaaaagaaaaatcataccataacataacataacataccgtaccatatactatccaaacaaaaacataaatatatattctcaattatcatatacatatatggatagatacatatatatacacataacacatttgaggattaataaaaagagaaacattggatataatataatgtcgtaagccgatataaaaggctaaaagcaaaaatggatgattcaacaaaggtgtatcccacaaacaaaattggtataaaataatatttgtgtccattttcatagtgggtttctcttctattttatttcaaatatgtatctatttatatcaatatattcggctttttcctctctgactctgttaacaataaataataattataagaaataaacaacattaaaatgtgcttacgtttgaaaacaataattttctacaagattctttaatttagaagttcttggtattatatcagcaaaaccccaccacacacttaatatttaattaaaacaaaactttgacgaaacaaacacaacaacttgagatacccctctcctctcctctcctctcttactaccttttcattctaattgactgcatttgtacgttacgtagtgcaacttgcaattttattatttatatttttcaattgtgttgttaaagagggaccactccaacatacgaaagttgtccctttagtgttttaccaaaatacccctccttccaaaggctgcaactgagagtgtggtgtccacggttaggaatttggattggtggactggattgtagttgtcaaatccccaagtacaaattgcttccatgttgttgatgttgttcccaaaatttgcccatcttcttcagaatccattttattttatttattttttcttaatatatataaagagattggagattttattgttacctaaaaattgctataataataacaatactaataatgatgatgatgattatgataatttgcataaaaatcaaatattctgattctccatatccgggttgactggtataaaataaaaactaggattaaagagagagatatgtacggtatcatatgatataattggaaaagaatagaccaaaaacagatcaatgaaaccatatataaggcttatctattggttggctgtggtgctcaaattgctttggtattcttggtgtggtgccatgtgtggtgagaaggtagagtaattatctaagt

SEQ ID NO: 219588 - DNA, 2529 bp, Cannabis indica
gtgatgtggttgctggctccactgtcagcgaaccacacatcactctccaagacttcaggactagcaacaaaggcattgtaattgttctgaggtggtttgttccctccatttgactggttagggtcagttcccatgaaattttcatcgaatcggttgtagcaaattgcagcagagtggccatacttgccacatacttggcaagttggtctggttgtgttagtgcgtcctctgccacggaatctcccagaggtgccacgacttccagagaaacgaccaccagtaccagaaaattgattgtggttgttatgattgttcgaacctcgtcctcgacctgtagagttggatcctgtgttgtttttggctgcaacatttgcttgaggattaatggagttgctggtttttccattaatgttgagagtttgtaatctctcaattttgctgtcaaaactcaggagaatatcctgtagttcctgccatgttgtgtttgatcttccttcgatttgaaccacaatcgataggtactctgcatctagtccagacagaacgtttgcaaccaggtgtgcttcaaggtacgggtcacctgcaagtgcaagaatgtcagaccaatttttcttttgcctaagatactcacccattggtgtagatcctttgcgtactgtctgaattagggtcctggtgtcatccattttagacttagaataggcaccatacaagctttccaaagctctccagagaccagctgctgaagtggaacccataacttctgtagcaattccttcagtcatggaactgtatagccatcccatgagaagttgatcgttgattatccattgttcatactcaggatttgtttcaagctcaccttcatatttagcctcaccaacaactggtacaaactctggtggacacagtttagtaccattgagatactcgtgtaatctgtgccctcgcacaatcgtggataccatagttttccacaatgtaaagttatttctgtcaagtttcaaagagaaaggctggttaagggttgtaggtggctgggagaaagtatttgggagttgagatggagctgcaccatttctgttggtgttgacagcagagggagtctgtgaccctccttcgttagtctgctgttcttgaggagtagccattgacagaggttaagaatggctctgataccaagttcgattttaggtttgatactgaaatatttgctcaactcatttcaactatgagccagagcatttgtatttataagatgtagaaattgttacagaggaaagaaaagagcaacggctctctacaggtggcaatcccaaatcccaaagaagattacatagaaaggaatattcaacagaattataaaagggaaatcattaatcattatcccacaatcttggaccacaacatgagatgacacctgtctttagagaagctgtaatcagcagaggtgaaatgcacagatcagtaccagggtctgcataattctatttctcaacaatttctccttataaaaatcttatttttagtcacaacaaaatttataattaaaaaataaaaaaaaaattgtgactaattataaataatcattcatgtgttatcgctaaagtttttgtagctaaatgtattagtcacaaaaattacaatttgttgtaactaaatgtgttttaaaactaaattagtgacaagtacgtacttgtatctaaatattatgttttagtcacaaagtcacaagtaattctttattatttatcatgactaaattaaagtcatatttagtcaaaaaattatgttatactaaaagattgtgaggttattttttttttattttttatttttgcagtgcctaataaatatttttgggtgagtttgtgtgtaaaagtaaaactacattaatattttgataaatacaagattgaactattatatgtctatgtcgacatctagaataaaagtaggtgtaggaaatttttacccaaaggaaactatagataattaactttattaatttgtaaaggtgttaggcaacataacataaataaagccatattaatatatgttttatttgcgtgatatatatatggcaagtatttatttaaaatggatttttatttcatcttatttaatatttatagcaaaacttattttatatatttttttaaaaaaatcaatatcacaaaaatacgaggatatatgctaatcacaattattattacaataaaaaagaaaaaatccaaataaacaatgatggttagaatatatcgattattataattacattaattccatatatctcctaaaacagaacaaaatttgcttctaattaatatattattatgcttaattactatagtacatgttttgacaaatacaaactgaaccaataattagtattgttattatgtcaagtagaggacctaaattgtcattaatattattaaataattacaataagagtaattaaagtgttaggcaaacattcctcacaaaaaaaaaaaaaagtgttaggcaaaacattgttcaaaaaaa

SEQ ID NO: 219589 - DNA, 7717 bp, Cannabis indica
tatatatatatatatataagctaatggggacagcttaacatggcacacaatatagatgtaaggattaatatattatttacaattgaatcttataatattattacattagttgattaattaatatatagtactaaatactaatagaaaaattagcaattcatcattaatttcaatgagagtaagaccccctttaatcaaacaaaagctacagtatatatagatgcaccttccgtcatcaaccgctgatcacagtgacgtttttattggtttatttaacaattaatttcaacaaaggaatcaccctatttggtttattatatttagatattaatgtgattattattaatctcatttgactttgaatatttagaaagaaattataattaaaataagggtcctattattattatatagtctattgttcatagctccataattaagtacctaaatccccccaacttgtcaattttcgtatccctaaaaaatattgattaaacccaactagaccttaagccgtccaatctttaaaacattgtgataatataaatatattttgtccttttgcttccttaaattaagctttttctcactgttttaagtatatatgattaagacataacacatggaatgagaaggaggggtttttcaggctaatgaaagcaattactttgtctttgaaagaatcgtaacgtctcggttcggttaattaatatattttcatctttttatatttttctagtaaataataattaaacccaattgagtctaattacgtgtttatattcatatttaatgtttatgcatcttgtcaaaaaaagaaaaagtcaaatgcatgcattataagtactataagtctatgtctacaaaaaaacgaaaaaaagaagaaaagattgtctattttattttattaactataagtctatcaatatagagaaatgttaataattaaggactttagtggtaactattcaacatttcaacagtagcacaacaatttgtattatatataatataatgaagtatggaattttatactttttaatttaatatttatcattaattcgtaaattaaaaatcactttgaagtaatctcagatacttttactacctactagctcatgaatatatagaatattaattgattgatatttgacattttaaaatgattaacatatgtcattttataattaattaataattttttatttattttacgaaataattttttatttttttattaagttaaaatataaaaaatttcatattaaaatacactaacaataatatattatttttcttatacttggcagcaacgactttatcatttctctatatataaaaaaataaaggaaacaacttcttgaaaaattttatggagcaccttgatacatcctttatataaatttttttaatctgtgatgtataattatttaagatattttatgaaatttaataaattttaaaaaaaaattaacacgtcaaaaataaggtacttgagacaatcttttgaacacatgactttttttttattttattttatacatatagtgaataaattatttaaacatattttcaatattataaattattataaagttcttaaaatttacaaaatattaaaaacgtcataaaaaaaattaaactattttcttttatagatactaaaatagtaaggatctatcggtgtaccttctttccaggatgcaccatagaagcttcccattctagggatgtacattttttccatgagaatgagatcttgcgggaattcgtccctaatgaagcaggagtttcgagtctaaatggagaacagagcacgaactataattattttttatcccccaatattaaacagggtacgaacggggataggatgacactccccgctccgacaggaacctgtttaatattttattttatatttttgatgatattttatattttttaatttataattgtatttgtttagtacaattatatacttttataaattttaagttgtatttttcataataattaatttgttgaataataataaagatgtaatatttgatttttatgtatttttatatttttatatatttaaaattttgttataagttttatttttttattaggagattcctcaatttcattctcatcctattttcaatgaagaataagcaagaagaggtataaaatccttaacggagttagagacagaggagcacttgcccgccaatttttccatgtgcaaccctatattataagtattatatgtgaatatgaggctaggttattttgagataactccactgtctctcaaacaagggtaatctcattgggactccaatacctttgatttttaattactttaaggaaatgtttcatatttgtaattattttatatgtattatcgtaacttgaagagcttagatcttgtaataaatataaaataataagaggaacataattatatatataaatatgtatgactgttgggcaatatactatactatatagtaggttgaaatttaatattccacacagcctgtatgtcatttatgttttaaagttcatagaaaagacaatagttactatactatatcttcatttttgtttttattttattttccatgtgacccattcttattattttctaataatagcatataaccgccttatttaaatatgataaatgaaacaagctatacaggttagaacaactattctgatacttagtgattttttttaggataaatacttaaattctaattaaaaataattttcatttaagttgagagcaaattgagtcaaatcgtaaactgctatattaacactacatttgacataaccctagaagaaaagagaaaaaaaaaacttgaaatgtctacaattacatcatgaaaagatgagatttcagtttgtgatcttaagctagaatctgtcataggcatgttatgttagttggtctgtttgttaggttgttcataacagttttctgttatgtttgttatttccaatttctgctctttatccttgtataaatacatttttattcattaataaaaatcacttctattattttcactaatatggtatcagatgcttaagaattctctcctcttcccatcatctaaaactttctgttctgccattgatactcaaacatagttcgaactcgtgctactggttccaggaattttggccaaaatcctccgcctaattcctcttctacgattccagatgcaccacacaatgaagatccgatcattcctccagctcctgtgatcactggagaaaattctacaaaccagaatcgctccatccgacctgctcatgaggatagctctagcccttactatctcagttcaggggatcatcctggcctaaccttggtcactcctcgtctctccgatcataatttccaagcatggagacgcgacttcgaattatctgttggagcaagaaacaagactgtgtttcttaaaggaattctaccccaacctccaattgaagattctctccataaccattggcttcgctgtgaccaaatggtgatgtcgtggatccttcactctgtcactccagaaatcaagagcagtattatgtttcttgatacttcagctgagatgtgaactgaacttcattcacgttttgatcaaggtaatggccccagaattttcgagctccaagaaacgcttattacccttcgccaaggtgaggattctgttacttcttattttacgaagcttaaatacatgtgggatgaaattcaggaattaagaccacgaattccatgttcttgtgtcgcatctattgataacctaacattcttgaatcaagaacaggttttacaatttcttacaggattgaatgaatcatactttcctgttcgtgcacaaattcttctcattgattcgtttccctctttgtccaaagttttctccatggttatccatgaagaaagacaaagaaaatttaaaaactctcatctcccttttcttgcttctgttcaagaccaaagccaacctcctgctgcattggttcaaaatccttcagcctctgcagcctccaccaatccccgatccaacaaaaagatgcgcccctactgttctaacagtcacaaaccagggcatttaaaagaaaaatgatatttcttgattggtttgcccctggttatggtgacaagaagaaaactgaacaacccacagtccataatgcctcctcttctgttgatcaatatggtgtccttgtcaaccttaccaagcaagaagacattcaagcaattatttctctcctaacatagaagctgcagcctactacaacagatgcttttgcatctaatgtttctggtaacaattctaaacacttatggattgtcgacagtggtgctccacactacatttgctgtgatttttctcttttttctaatatgcacaaacaccctatagctaatactgttacaccctatagctaatattgttacattaccaaacaccctatggattgtcgacagtggtgcttcacaccacatttgctgtgatttttctcttttttctaatgtgcacaaacaccctatagctaatactgttacattaccaaatggatccatcattaaggtatctaaatcaggtgatatcaatttttcacccaattttcacatatcaaatgtactatatgtgcctacatttcaattcaaactttttagtgtatccagttttctaaatcacactgctaacagtatgctatttaccaaatctttttgcacattacaaagcacaatgaacaagaggattgggacagatgaaaggattggaaatctatatttcttgctgcaatctacccgatctcacagcaattctctttctcttacatgtaatcagtacaataactcttgtaatagtgtccattcatggcactctagacttggacatccttccatgttcgcaacaaattttcttaataaacaattacattctgcacataatgatgtttccccttgctctatatgttacttagctaaacaaaaaagaataccttttcaatctcaaaataacattgctgatttttgttttgatctaattcatttagacatatggggtccttttcatgttcatagtagaaggttataaatatttcttgacaattgtggatgaccatagcagatataattgggtttatatgttaaaatccaaatctgatgtgcaagttctaatcccacaattctataaccttgtttttagtcaatttaataagaacatcaaagcagttcgatgtgataatgcaaaagaactcaatatcaaacctatttatcttcaaaaaggaattcaaatttacaactcatgtgttgagagacctcaacaaaattccgtcgttgagagaaaacatcaacacattttagatgtggctcgagccttggcttttcaatcatctatagccttggtatattggcctcatcttatcaacaatgttgtgtatttgataaatcgtacacctacaccattgctaaaacttttaacaccttaccaattgatgcacaataaaccacctgcctatgaccatttaaggaactttggatgtcttgcgtatgcatcattcttaccaagtactaggcacaaattttcccctcgtgcacatgcatgtatgttcattggatatcccaatggtatgaaagcatacacattactcgatttgggctctaataaatttttttattctcgagatgtggtgttttatgaataaatttttcccttaaaggatctctcaacacacaatccttggatcatctatttcctgttcaatacacctcctctcctgatacaaaatctgtttttccatctgttgatcaacaacatcccacatctgctataaatccatctcaacttgcatcacatacacctacatcagtaccttctagtgttgatccatcacaggcgcctcctgaccacaacttagcacctgtctcacgtaacaacacaccagcaaaagctactgatatatccccagcttctgatgcaacaactacagttccccagcagcctttcattactaaaacaggtagaaaaacttccacccttgctcatctcaaagaatatgtttgtcattcctctaccaatcatcctttggttaaatacttaaactatgacaaactcagtgttgcttttcgcaatgccatcttccacgcatatactgagttggaacctaccactttcaaacaagcatctcaatttattcaatggttaaaagcaatggatgctgaattctttgctcttaagaaaaacaacacttggtcagttgtttccttacctcttggttgtaaacccattggtaacaaatgggtatataaaataaaatataatgaacaaggtgaaatagagagatataaagcacgcctcgttgctaaggggtattcacaacaacaaggcattgattacacagaaacctttgcccccgttgcaaaattcaataccctcaaactattcttagcattggttgccatcaataattagactctataccaaatggacattaataattcctttcttcatggagatcttaatgaaaaagtctacatgacactccctaaaggctatgtccatgagggggagttacccccaaacccggtttgccttttgcacaaaagcctctatggtcttaagcaagcttctcggcagtggtttgtcaaatttagcaccacacttattgaacatggttttcaccaatcagcatatgaccactccctctttatcaaatctaattcatcttgcttccttgccattttaatctatgtcgatgacatagtaattgtcagcactaatgacaccgaagcaacaaaatttaaagcattccttaattcaaaatttcagataaaggatcttggccacttaagacttttccttggcctcaaaattgctcgatccaaggcaggcatatctgtctctgaacgaccctttactcttcaattactcaatgaaacaggtctccttagatcaaaggctgtttcatcaccaatggatgctaatctttctcttagtaaggatgttagtcctcctgtcaatgatgctacttcatatcgcagcctcattggaaaactattgttcttaacaatgaaaagacctaacattagctatatcgtcaatagacttagtcagtatctcagtgatcctcgtcaaccgcaccttaaagcagcatatcggattgttcagtaccttaaacgcactccaggtcagggacttatgtttcactcaaattaacagcaacaacttcccatcgatcgtttgcttcacctccaggcattctcggacgcagcctggggcacctgccctgatacaaggcgatcaatcaatggtttttgcatattcctcggtcagtccctcatctcctggaaaattaagaagcagtccacgatctcaaaatcatcagctgaagttgagtaccggtctcttgccaacactacctacgaaattttatggctacacaacatcctctctgattttggaatttctccttcccaaccaacaaccattcactgtgacaaccaggctgcaattgacatctcagaaagtgtcgtattccatgagcgtacgaagcatgttgacatagattgtcacatagtacgggagcaaatcaacaagaacaaaataaaattatcctttgttgcttctcggcacaacattgctgacataatgactaaggctttgtttccctctcaatttggttatttgttgtccaagat

SEQ ID NO: 219590 - DNA, 4858 bp, Cannabis indica
aattatttcggatgcaaaaacagataagagtgaatcaatatatccattttaaagaagtgcatggtagaattttccaataatttattattacacttgtggttaaattattaattttatttttgacactataaattatttaaatcttaaataattataattctactaatttatatttgaacaatagacagccaaagttgaacaatgaactacctttcaataatttttttttgttttggttgcaaaataatattgttttatttgggttaaaaggtatcatctgaatttgaggaacaaaaattggaaaagtacacctagtttgaatttattttctttaactgcctccccaaattaaaatctgcattggataaagtttccccacttgtttgttttttttttgggtcttctgtctggtcatgctacagtgtagcacacgtttaagacgcggaatttgccaaagtgctgtcgttttatatttatcttcttctttatttatttatttattatttatttgggcatagtcgttttatatttaacaaacaactgttttattttctctttagggatttttcttgaaatgttcgtcatgggattcatttaacgaacctaacttcctcttctttcgttcactttctagaaagaaaaattaactaaataagaaaaataactgaatattttttttttctttgaacaaaaatatcatcctttataaacaaaaatcatactaagaatgcaattttttttttttatataaatcttactattttttaatagcaatcaataaaaataataatttacaattcaataagaatatctctcttattaaagacatagtcggaattagaattaaaaaaaagaaaaaactaaatataaaaattataaataaaattatagttaaacttaataacacctagtatatttatctcaaatgataacaatgataactactgcaataacattcaatttcgtagtttaagcactcaattatcgtgtaaggtacataactacacttattaacaatttttttaatcgtaggaaactcgttattcttaacctctaacatcgatttgatagagtcatcgaaaaataaacaataacaaaaaccgaaacaaaataaaacaaaattatatcactcaaacaagactaaaacacttaaaataagactaaaaacattcaaagctatattatatataacaaaaattacaataacaaaatacaactctgaccaaaccgcacttatatctaactggcaaggcttgttagagaaaaaaaaaaactcgtgtagatataaatttaagaacgaaaaatctttaatttattaagtatatcactaaaaatacattttagctaacatgccataaggagttttggtaattagatatttggactaaaatttaaataaaaaaatactttttaatattatataaaaaaattgacacgtcacaaataaccaataggatgctactaccagtgccaactaaaattaataatgaaaaatttcgcaccctttaaaactgtcacttttgttcgaacaaacaattaaacaaacaaacctcccctaattattttattatttctttttaaataatatttatattaattaatatattttctccttctgtataaatatcacacctcctgctactctttttttctctcatattctctctcttctgaaaaaaaaaaaatctacccaaatccggaacgatcagaatcaagaaagaagaaaagaatgagttatcaacaacctccagtcggtgttcctccgcctcaaggtcagttctttttttttcttttctttttccaatttctattatgattttcttgaccgaatgttgtagatttctattgtttagatctgttttaagggaatcaaatcgattggtttattgtgtgatcggaaattttatattgaatatggttttggtttttttgaatattggaataggttatccaccggaaggatatcctaaagatgcttatccaccacagggatatcctcctcaaggatatcctcaacaaggttatcctccacaaggatatcctcaacagggttaccctccaccttacgctcctcagtacgctcagcctccccctcaacaacaaaaacaaagcggcggcttcatggaaggctggtaagctctctatctctctctctctatctatctctatgtttgtctctgtcactcggtacctttgatttgttgaaactcgcttcgatgactcagatctgagacgatctggctcgtacgtcttgagttttgagcgagtcaactctctctatctctttggacagcgcacgatagagtaactaaaatgcgcgtttcgttgtatttgttgtgttgtggtgtggatgatgccgtgtctctctccactgggaggattttagtttttaaaaattcccaattttttttatttattttattttgtttggaggttctaaaataccctttttctattattagcaaatcaagggtggaattgatgccgtcctttttttctttttttctgtcattgcaatctgaatctctgatctttcgatgtctttaaggtcgtacacgacaaattgttcaggctcagatttctaggaagaagataatttttatattttatttggcgtttctattaatgtgtaatattaaatttaggtaagcagtaatattggcttttaatcatgtcttgtagttaaaatcttgtttgtttatgtgagataattcttatgatcaaatctttagtaccctattcatgtgatgtgagacccactataatagtgggttagttggttgtctttgtatctaccaaaatttatgtatgttagcaatatatatttatatgaagaatctgattaaaaacatgtttgttttggtgtttatacagcttggctgctctatgttgttgctgtctcttggatgcctgcttttgattcggaaggaatgcccatcattctgatttgaaatctgagattgaatctcaagtcgtacaaaaaaattctattggcattattggttgtcaaaaaacaaaaacaaaaaatgttccatctgtctcgagtttcatgagttgcatctttatttgtctagttctctattctcttttgtttactttgtcgattgtttaaattgttaaaagtatcatgtcacatgaaatgaaccttctttgcttccaatgacatatccttttgtttacttacatactttgtgaatcaaatttaaatcaaaagtgtttttccaagtacataacttatgtgaatgtgggagattatttcatgtgtgcaagtacaatggacagctttacaacatgtgtggtgaagtagtaggaaagcttttatgacatctttacttagattaagagttcaaatgtctactattgcttttcattgagagggagttatcttattttggcgatctcatatttaatgagatggggaatcctcgtaaagtgtatatcgatgatcaaattaaagcatgatgaggtataagacttttattattggcacggggtcatcaagattgttttacaatcgaagggatgggaaaaaaatctgtaccacattatctcctttttagttagcaaaaaaaagtacaatcgacagcttttagttcttggttatgctgttcgacttagtttggtttggttggatttgtgtctttttgggttatttgctgagttggttgaggaatttattcgttggtatcatgtagaattaggaatcgaaaacgtgcaaggaagagaaacaaaaagaagataccattcaatataaagattcctcgaaacatatgatcaacgatcgtataataaagcccagctaagctatgaaggggtatctgtaccattaaagaaaatttattaagaaattacaaattccatacgagttgtgattattgcaactctcacatctgaattcaatatcaaaattcccaagtcatggaatttgtaggagtggacacaaggcctgaaactgtggagcccatgaaatgctcttgaattggtcatgagtcattactcgtgagtcattcaaacttacagatgagttgcttcatctagtaaatataaatataataatgaatgcacatggctaagattgggtaagctataatacaccaggttttggtacaaaggaaaatttttaatttattagtttttattttataattgtataccttgtataattatttatgaccatttataaattctaaaaaaacaataaaattcaatattaaaaataaattttaaatattttattacacacttatctatttattttaaataaattatttcaatttactttcctaaataagttaaagctgtaccataacatcgcttcttaactataattatataaagtgtaattgtaatatcactcatatgcaattatcttaatttaggggattatttggctaaaatagtttcctcttctttttttcttttttgggatcctatctagttcattttatcatttacttaaactcatcatacctaacattttatgttcaacatgctgacagcagcctctaatttacctttcatttgtagtttgcaactatctcttatttttaaaatatattatttggaagaccatcactgcaatacaatgaatgatgtaaattatgtgataaatttgaatatacaaaatataacatttttttattatccaaattttagaatatattaactaaaaaatgccaaatttaacatatgttatactttgtaataaatttgactcaattattataataccattatagaacggtatacctcacattttttgcactgtattggagtctgtgatgaaaattttctaattttcacaataactttacatggtgtttttgatattgaaacattattaagaatatttttttgg

SEQ ID NO: 219591 - DNA, 4768 bp, Cannabis indica
gagttacatcttggacatactaggcttagagggcttattccctcagagcttggctctttgactaagctttcattgcttaatctcgaaactaacaaactcacaggagaaattccatcttccttgggaaatatttcatcacttgaagagttttatgttgttaaacaatacaattagtaaccttttattatattacttaattggtattttctagactaaggacacgtgtatgtggtcactaaggacacgtgtatgtgatcctcttatctgttgtctatatattacaatgtacagaacattttctaattcaaggaatagaacaatactttttccttcttcaatattttctttatggaactagagccactaacagctcaatggcctcacaaattagcacatctcattcagtctcccaaccaccaaccacgcctgtaccatctgaacctcttgtcccatccacacccacaccttctccattaacacccatccaaaacttaacttcttcttctcctttacccacccttcctttcgtaaaccagcctatttctgtaaaattaaatgaacacaactttgtggtctggcaaactcagatgctcaatattattattgctaatggtttggaggatttcatcaatggcttatgtccatgtccggtgatcaacaactcagatccggctgctcaaattaatcaagaatttcagaattggcagagatacaatcgtttagttatgagctggatttatgcttccataaatgaatcaatgttgggtcaaattgtgcgatatactattgccttcgacatttggcatgccttggagcaaatttatgcagctgcttcattctctcatctctcggagcttcgtactcagctgcaacatatgaagaaggatggactcactgcttttgcatatatccagaaatttcggggtctttgcaacactcttgctgctgctggagatccagtctcctacaccgatcaactgatctatttcttggatggattgggtcgtgactacaatgcctatgttacccctatttaggcacgagctgaaaaccccactatggaggaggcatatagcttacttctcacctatgatgctcgtctaaatcgtcaaaactcagttgatacacttagctcccttcaagccaactttgctaatctttctcctcacaaatctaaatacaaacaccactcttctaccccatccactggttctccatctcaaaacccccatcgacccccttcgttttcatctcctcctcccagatcttctcctacttggaccactacacagtcctctcctaacccatcacctagatcttcaaatccaaatcgacccaagtgccaaatctgtttcaaagtgtgccatactgctaatatttgctatcatcgccaaaacttgaactatcaacctgttccatccccacagagaccatttaatgcttttttctctcaacaaacccatggcctccaaccttcttcatcctcatcgagaccactccctaacttctctccatccacttctggtcttctgccttctccatctactcctagcaatttttcctattcagatccatcctggtacatggattcaggggcatctcaccactttaccccggatctgaacttgctagagagcgcccaaccattcacaggcagtgatcagattgcagtgggtattggtaagcatgcttcgatttctcattttggttctgctcatttgccaacatataattctgttatcaaattatctactgcctatcactctccttccctttccaaaaatttgctcagtgtgtctaagttatgtgctgataacaatgctttcgttgaattttatccccattgtttctatgtcaaaaattaggtcagcaaacaaactcttctgaccggtcttcttgctaatggcatttacaaagtcacgagtccatcctttacttcctctgtcactccatttcaactgtttcaaacctccacttctgatccgaatttgtggcactctcgtttgggacatccaacttcagatgttactaatcgtgttttaacttcttgtaatttttctatttctaagaatactaagctttctttctgtaatgcttgtcaacaagccaaatctcataggcttccttttccaatttctgtatctcgggctacaaagccttttgaattaatacacagtgacttatggggtccttctcctgtttcttctattactggtgttcgatatttcatattgtttattgatgattattctcgatttacttggttatatttactctactccaaagatgaggccctacctgcatttcttacttttaaacaaatgattttaactcaatttgacactcccattaagcatgttcgcactgattggggcggtgaatttcgctccctcacctctgtttttgcctctcatggcattattcatgaactgtcttgcccccacactcctcaacaaaataggagagtggaacgtaaaaatcgtcatgtcgtcgaaatgggtcttgccttgcttgctcatgcctctgcccctttgacgtattggccttatgccttcacagctgctacctatcttattaataggctgccaacccgtgttcttaatctcacaagtccacactttgtgttatataacaaaccacctcagtatactcatcttcgtgtgtttggttgtgagtgttttccttttcttcgtccttataatgcccataaattagagtttcgctctcaatcttgtgttttcctcggctatagaagtcgtcataagggttatctttgtctaaatcttgcctcgggtcgtctttatgtaactcgtcacgttgttttcaatgaacaccattttcccttctccactgtccaagcttcaccaactcaaacacctcactctgttattacttctcttccctttattcctccacatcctcgttcatctgctccctcttcattaccttctccacccattcatatacctttagtgtcctctccttgtccaactgcaccagtatctagaccttccatgtcctcaactctaccaccctcctcttcttctccaactacaatgagtaattctactactgattcttctccatctaatccacctgttggcaatgatcatccccaaaatgagcaatcttgcataccccataatactcattcaatgattacaagggctaagtctggaatttttaaaccaaagttattttctggcatccttaagagtgtgcctgtcgaaccatctagctttactgaagcaactaaacagaaagtctgggcaatgaatcatgaaatgattgcactacgttcacagggcacttggatccttgttccccctcctccaaatgctaaaattgtgggttgtaagtgggtgtaccgcattaaattacatgctgatggaactgttgagcggtataaagcccgcttggtggctaaaggctaccaccaaactcatggtcttgactttcatgaaacctttagcccggtgattaaacccactactattcgtcttgttctcagccttgctgtgtcccgcaattggcctattaaacaattagacattcaaaatgcatttctacatggggatcttgaagaaaccgtctatatgagccagccccaaggatttattgatcctgaccgccctactcgtgtatgcaagttactcaagtccttatatggtctccgccagtctcctcgagcttggtttatgaaacttagcaatgccttatttcagtggggttttcaagcttcccgagctgacacttcgatgttttacttctctgctggtacttcttttcttattgttctagtgtacgttgatgatatcattatcacaggttcatcttccaccaccattgcttctctaatgacctatctcaatagtcaatttgctgtgaaagatctcagtgatttacattactttcttggcttggaagttcatcgttcctctgctgggttacacttaagttaaaaaaaatatttccgtgacttgctatctaaatctggattattggattccaaacctttgtccactcctcttgctttgggttcactttctttacatgatggaagtcctttaccatgctctactgaatatcgaagtcttgtcggtgctctccaatattgtactcttactcgacccgatcttgccttctcggttaacaaactttgtcagtttatgcactctcccactgatgttcatatgcaggctgtgaaacatgttctgcgttatttgaagggtacaagtcaccttgggttgctggtacaaccacattcagatcatgctcttcatgccttcactgatgttgattaggcatcatgtcctgacgaccgacgcagtacaagtgcttactgcattttccttggacataatctcatctcttggtcctcctcaaaacagacagtcgtttctcgctcaagcactgagtcggagtaccgcgccatggccaatggagctgctgaagtttcctggatccaatctcttctgtccgagttgggtatgccgttgtctcatcctcctgttcttcattgtgacaacattagtactttacatttggcatccaatccggtcctccatgctcgaactaaacatgttgaattggattgtcacttcattcgtgattgtgtgctcaacaaaactctcagcctatcctacactccctctgatgaacaacttgctgattgtcttacaaagtcgctggcatctcatcgttttcatgctcttcggaccaaactcaatgtgctacctcgcccaatgagtttgaggggggatgttaa

SEQ ID NO: 219592 - DNA, 6532 bp, Cannabis indica
ttattttttctttggagtatgtatttgaagctttctttatgattgtggtaattttttctgtttcgactactatctttttaatctcttagttttttttttttttattaaatatatttatgtatagaaaatttatattaaaaaatatgatagatagttcacataaaaaaaattaatagaatagaaaggaaggaaatttaggaaatagatatttaaataaaaaagattagaaaaaaaatgagaaaaaaaaaatagtactttctaccaacctattattttctaaaaaattttattttctgttgtgttttggaagaaagaagtatatcatcatttactaaattgaagcaaccccatactcgattttatcgttttatcaaagtgatcctaagtcaattcagaacttgaaaaacacgtgcccatctactttggccgtcttcacccacctggccgcccatccccgccgcacaatttctttcaccaaatactcctacggcgcacgatagccttctctctctctctctctttctcacatgtaccactcctcttcttcactacactactcagagacgaaaaaccctaatgtctctctctcagccctaatctgaattccttactgaatttcattcaaccttcaccttatttacgattttcactgaatttgttccaattcgaggtgtgggaagatgatgggttccgagaatcagagcttccaagaagctcatctctatgcctccaaagaagatatggaaaatctcgtccttgacgactccttgaatggcaataaatcgtactcaaattatcgtagtgccttgtcgtcaatttccgattcccaccatcctctttccgctccggtggttgtgacgtcagtcgattccgatcccctgcttgctcctccatcgtatcgcgatttccagaatcctggtcctgccatcgcttccgccgccccggacaactcctacctcgaccctccgtcttatgccgatgttatttttagcccctttgatggaaataatttcaacgacgctaacggtgtcgatagccccagcaagagatcagacaattcggggtctttttcgagatcgtcatcttctaactccgaatacattaaaataacggtttccaatcctcagaaagagcaggagacttcgaattcgctcgttcccggaggcaatacatacgtcacttacctgattagtacgagaacgaaccttccggacttcggcggatctgaattcagcgtccgaagaaggtttcgggatgttgtgacattgtcagaccggcttgctgaatcgtaccgagggttctttgtgccgccaaggccagacaagagtgtggtagagagccaggtgatgcagaagcaagagtttgtggagcagagaagggtggcattggagaaatacttgaggaggttggctgaacaccctgtgattaagaagagcgatgaattgaaggtgttcttgcaggttcaagggaagcttcctctgccgacgaccaccgatgttgcatcgagaatgcttgatggggctgtgaagcttccaaagcagttgttcactgagagtgcggtagcaccccatgaggtagtgcagcctgcaaaaggtggaagagatttgttgaggttgttcaaagagctaaagcagtcaatggccaatgattggggagcttcaaagccacccctggttgaggaagataaggagtttatggagaagaaagagaagatgcacgacctcgagcaacaactaagtttagcttcccagcaggtaactgatattttttgctcattgcatttgcagttgcttgaactttttaatgtcgttaataaaatcatgaatggtcatttgaatttttcttcctcttatgctgtggttataggctgaatcacttgtcaaagcccaacaagacatgggagaaacattaggagaattggggttggcttttatcaagctgactaaatttgagactgaggaggctgtttctaatgctcagaaagtccgggctgctgacatgaaaggtctcgcaactgctgctgttaaagcaagcagattctatcgtgagttgaatgctcagactgtcaaacatctggtaattgtgactacttttgccatagattatttgtttcatttgtcttgttattacgtactttatttgataatcggaaagcttgcttattgtatcagtagttgaatttcatttgaacttatctgcttgcagtcatcggatttatagtaactgaacatttgtagcttttgtttcattttctggctttattctcatcaagagtccttatatgtattgcaggatacacttcatgaatatcttgggttaatgttagctgtcaacagtgcattttcagaccgatcgagtgctttacttactgtgcagactcttttatcagaactagaatcattgcagtcaaggactgaaaaacttgaagtagcatcatctaaaatatttggtggtgacagatcaaggattcgtaagcttgaggagttaaaagaaaccataagggtcacagaggacgccaaacatgttgcaatcagagaatatgagcggatcaaggtaccatgtactttgagtttattcattttatcttaattcagcctttttatggtaatttaaactttcatcttaactcagcaaagtccataagttatgtatttgtgttctctattgatgacagttctgttttaccttagctgaactttttgtggggtattacactatacttatttatcttaatggaaacatgttctggttatttctcattgcttctttaattgaaaattccttaccttccatttttcgagagaacattgaaagaattaatttttcccagcttattactgattaagctgcatgcttgctcacaatttgaagtatcttggcttcaagatactctgcaagcaaaactatacaaaagccttccctgaatcttttttttctatgtgacttgtgatagtgtagattatttgagggtttatatatgattgaatcgtgaatttctaaaggtttgactcttaaccagatgagtttattgatacctgggttatagaagaaacgtattttcattcttaggttttaggttcactgttgagaatttgtaagaagaattactgtataaagctgacttagcttaaaatttaataaacaactggctacccgtacttgagaatttgtaatgatgttcagggatttaataagtattataagaaagtgggtgtaaactgattaaacagacccaagaggggtagctcaaatggtgagcatgtagtttgctctcactagcataacaattgctatagtttcctagctcttaatattgtagagttaggtggggatcctaatttaaaataatactaataaaaaactaagtgatttaacaggatttcacaatcatacattcttggtaccatttgcaattgttttctccctctttgatacatatcttacatgtaaagaaatgagtttctgttcatctttgtcgggatagtgagatgattaaagattagactcggaagggtaaaatttggctgactacttggttgagtgcgtatcttgtatgtcttgtatgtaatagtactttcattagatgggtcctaggtagccaagtaagcgaactatgtggcgttgtttaagagtgtatatatcagttggtttaaatttgaagcaattcctttagtgtataggctagttttgtgctctgtgtgtttggctgttctgtatttcccttaattgaagggattctccgtatctcctgttattttcaatgtggtttttgagaaggatgctgaatggcttgaggttgttaatgttttttttcttctaataaatatgaaatttcattaatttacaagttatatctttgctataattgctagagctaaaaatatcattctggtatgaatataccaattgcttagtgatgtgagggagccaaacctgtcatactccacctgccataagctataaataatataaataaacgttgagatagcatgaatatcttcatcctgttattatatctccgtttgaatcaattgcctttcttttatcattcttcaatgcaggaaaacaataagtgtgaacttgaaaggtttgacaaagagagagattctgacttcttgaacatgttgaaggggtttgtcctcaatcaggtcattattcttttattttttccttctattccacacgatcttattcattccttcattcatttgatttcttttcacaaagcagctacctctcagcttattttgtctttagacagacacaacttcactgtccttatgttttttctttgatatgttatatgataaaaacatgggtttttgctatgcaagtgatcatataattatgttctcttatgcaattcttcttgttattcgtctttgttgcttgtcaatttctcacaggtaggatatgcggagaaaatcgcaaatgtgtgggcaaaggtggctgaggacaccagtggttatgcaagagaaagctgttgaacccaaaattatgtaaattcagaagttttatttttaattatttatttttcttttacttccaagttcaaatttttattgatatcccacccaattgaaatagcattacatggaatggaaacaataaacgacaaaatgggtgcacttggttgttctttgcctttctcagtttgtaacagaaagatttatcgacacgtatttgatctttgtaaattacagtgctaccttactttacttgttttgacatttaatcttttaactttgagtaagttacatttattttgctataaggtattgtgggatcatagactcatagcatacttaaatcactcacacaatgatttctttagtcataagcacaatttaattgggacttggtattttaaaaaatagtgtatattattattattattattatcaaaatgcaaattcattacttaagtttgaatctgaatacaagagttcctgtagagcaacatgaatattagactcattcgacgatcgagagctactgagagtgcctacagtcttgaatgatgagaccaaaactagaatatatttgcaaattactaggaaaactgtgagcatactatctacttcaatctctttacttgctgccattgcatgtctttgacccaacttaaacttcttttaccaccatagcttcaatcacctccacagccagctgcccgtggtgacaaagagtcagttcaaaaattgcacctgaagcatctctagcaactatcccataatcatacataccatctccttcaaatgtgacaggatcaacattgactaagtgttaactgcgggtttagtccaagactcaacgatatggaatattgccactgccctgagttttccattgttctaaagtcatccttgctgacttcaccacatcagccacaaaggaggttttttggttccaaataagcttattaggagcattccaaatagcccaacatagcatggctgccatacaaattttattctcatcaataatgtcaaaagtctgagcaaatcatgtaccaaaagaagttgtttgacccgaaatagtaggcataccataccagcatgattccaacaggcagcagcaaaagaacaacaacagagcacatgaggaaatatccacatgtttagttctaaattggaatctagtaagaagacattactgccctccattcaagattcttcacctttggggatatcttgagttgccataatttgtcctaaaaatcagaattattgacacaccaattctttcaactttttgatcttgcaacatacggattttaaaaatcatagtttgtgcgtatattattaagataaatgaatattcatatttagtgatataagtgtttgtttagtattgcactagttgtatactgtgtaatgtgcccctcaaaaattatttcgaaattagggctcttgagcatcaatcaaattaaaattatttcttaattttattagagcagtactaggtgcctaacatcataatgatatgatgcgttttaagtagttaataattttctatattatttattaatcaaattgtgtgagtcgatattgatttgcaccaataataatatgtcacctcttgtagtgcttgaaacattaaggtatctcttagcattttttattgagttaattgcggcgaaatccttaatactttcattttgcttgtacttaactttcaaaactcaaattttaacagccaaactctcaatactcttgttctgatagcaatttaatatttccatctattttaggtgttaagtgccatgttggactgtctatatgtacatctacgtggacatagtgtacacattatacaattttattagtccatgtaaaaaattatttaaaaaattaaaaaaaattgtaaataattttttttcttttcagattttttttccatttaaaaaaattaaaataaaaaaatcattaaaaaaaaaaattttttttcttttcttttctttctttctttttcttcttttcttcgttcttttttctacgatctctctctctctctctctctctctctctct

SEQ ID NO: 219593 - DNA, 3618 bp, Cannabis indica
gggtgtgaggtgatttgtggctccactatctgcataccagctgtcatcattcaaaacttgtggtgtggcaacaagagcagtgagatgagattgtttgtcactctgctgattgttctcagattgtggaggctgacccataaacccttcatcatatctgttgtaacaaatggcagcagagtgcccacatttcccacaaacttgacaagtgggtcttgagtttcctcttccatatctgcctctgcctctattgttgttgttactgttgttgttccttccaccaccagctggataattcgaattgtttccatagccacgaccagagttgttgttatatccaccacctctaccattaaaacctcctctgttgcttggatgagtaggcttttgagcaaatgcagcagaaggacttcccagtgttttgttggtaggtgaaacagctcccaatcgttctagcttactgtcaaagctaagcaaagacccttgtagttcctgccatgtgagatctgttttatgttcaagtaagagaacaatagaaagatattccatgtccaagcccgataacacatttgctatcaaatgtttctctgggtatggatctcctgcaagagcaagagaatctgcccaaacccttttttgcctcaagtagtcgaccatggattgacctccttttcgaacagtttgcagcttggtgcgaaggtcatccatattagctttcgagtgtgcaccatatagttcctctagagcagaccacaaaccagacgcagacctgcatcccataacttcggaggctatgccttcagacatagatccatacagccaacccattagaagttggtcatgaacaatccaagcttcataatctgggttggcaagtaactctgtagcagcttcattgttgtcattttttgtttcaactgtaataaactcttgaggacatggtttctgaccatttaagtatccctccaatctgtgtcctcgaataatagtgaagaccattgtcttccacaacggaaagttgtttcgatccaacttaagagaaaagggctgactcagagtgttactgaaaggagtcgccaatggaggaataacagctgccatggaaggttgtgtaccggagcttccttgcgagttcccatttcctggtctagcaggagagacttgagctgtttggctttgctcagtcgacatggtagagccgtgctctgataccaagtttaatttaacagagataacaaattgatggaaaactcagctcaatagagagagtgctacttggatttcattaaatagacaaaacaagattacaggggaaataaaatgaccaatacataagtaacacgtattacacatatgattgcacagaatcataacagaaaggttgttagagcagcaaatgattgcacaaatgatcacacaatatccctcgggattcccctcattcacaatgacagatttgccctctgatgacacctcatcagtatattcaaattctttgacaccacccctcaaacgaaagggtgactctgtcacatgaagtttgtctgttaagaatttgaacctggtaggagacaggccttttgttaaacaatctgcgatctgatcatgtgatggaacatagcgaatttctaactctttggccaacactttgtctcttacaaaatgcacatctagttcgatgtgtttcgttcttgcgtggtacaccgggttggcagcaagtgcacttgcacttaaattatcacaccaaattactggtgcagagggcagcttaagtttcatctcagttagaagactctgcagccaagctatttctgcagctagctgagatagagcccaatactctgactcggtgctagaccgagctacaacattttgtttctttgaagaccaagagatcaaagattcaccaagaaaaacacaatagcctgctactgactttctgtcatcagggcatgaggcccagtcggcatccgagaatcctaccatggagagattgacacttggggcaagatgaaggccatgatgcatactacctttgagatacctgaggattctcttggctgccccccaatgaacatctgtaggttgcttaagaaactgactcaatttgtttacggcaaaggatatatcgggtctagtgtgactcaagtatttgagagctccaatcacccttctgtacaatgttggatgtttgagtggttcaccatcactaatggacaggggctttccagcagtgattggtgtaacactcggctttgtgttttccatttgaaccttttgaagtagttcagcaatatacttgccttgtgagagataaaaaccagtgttgtctctgaaaacctcaattcccagaaagtagtgtaatgctccgagatctttgagagaaaaggttgtattaagtttgtcaatgaaaacattcaattccttggtgttgttcccagtcacaattatgtcatccacgtacacaaggaccatgatgacatagcttgtttgtttcagcaagaagaaagaagtatcggctttagaattctcaaatttccactgaatgagagttgtcttgagtttgtcataccatgccctcagggcttgttttaacccgtatatggatttatttaacttgcacacgaagtgtggattgtgttcatcttcaaagccaggtggttggcacatgtagacatcctcatcaagaactccatttagaaacgcgttattgatgtctaactgccttacttcccagtcatgagtggctgcaatggtaagaaccacacgaacagttgcagctttaacaactggactgaaagtctctccaaagtcgattcccggtctttgatgaaagcccttggccacgagacgtgccttgagtctttgataactcccatctgcattgtacttaattttaaaaatccatttgcacccgattatattgtaggcatcagatggaggaacaagtatccaggtgcctttgcgtttgagagctccaaattctgtgttcatggctgcattccaccccttatgttggagggcagcagccacagtagctggttcgacaacagacagatcaaaacgagagttagccatgaacattctgggcttgaaaatacctgctttacctcgagtgatcatagggtgagtaggtacgataggagcagtggactgttggtgtgtaggcctcggggatgaatttgttgtgatgggagaagatggtacagatggtaagacagatggtgaagtgggcacatgatcaaaattatcataaggtgaataatgtatgggagatccagagaaagaatgttcacttacattgtgtgttggagtctgtggagaaggtactgctgtaggaacaataggcatgacagtggaagaacctgcaacactagattgatcagtaggaagaacaaaccaggagtgaggagtggacatattgacaaattgttcaggctgctgtgtgttaagaaaccagtttgacaagggaattcagcttcgtaaaaattacatgtcgagagatataaatgcgcccatgtggactgaggcatttataccctttgtgaacatcactatacccgagattaacacacttaagagtgtggaattgaaacttatgggtctgatatgtgcgaatac

SEQ ID NO: 219594 - DNA, 1298 bp, Cannabis indica
tatttttttacaaaaaataaaaagaattgatggacataactttagaaatgtcgtagtttcggaaagataaattctatttattcttaaaattatgcttacgtgtgaaatggtatattaagtacaaaataaaccaatgctattccgatgataaactttgatttttagggaaaagaaacctaattgatggcatatcaaaacatggtttttgtagttaaaaaacaatataaattaattcaatgaaaccacaatagtctcctaagaactagatttttgaggcaaaatcaatgaaacttgataaaacttgggtacagaacttttcactagtttaaagaaatatatattcttttaattatgataattctttcttcaagatatacacattcgaaaagagtacattggagcaaaagttatgcctcactaacgtttttattgaatcttatcgtaaattataattttatattattttacttcaaaattaaattttcatgggaccatcataagactatcgttaagcatcaattttccataattttctacctaaaacaattaatttgtcatgttacttttgttaaaagtatcgttaaacgtcgtttttttaacttagtcaaattctcaaggcactattcctaagcataattttttttattttttctaaaatgatcaaattttaatggcaccattgctagattgtcattaaaacattgattttaatcaaaaatctacaattttcaaagctccatatttaaaaaaactttctacgtaagtacttaaaacttgcaaattaatatcattagtgattatgttgttgagtttgaaatgaaacaaaaatattgatgaaaaaaattggatagcgttaatagagaagatgtgtggttctatgaagagagaaaagggactttgaatgaaaaaggcaattttgttgagaaaataatatatcaaatttgtaagcggacaaaaaactcaaactcgaaaacatttagaaaactatgataaatgtagctaaaggttcacgatagaacgatcgacatctttagcaaaacttgttctttctttaaataatcactatgtttggtggtctgactattctaattgtattagtgtctctttgtaaatggatctttattgattaatgttattctctagtactattttccttttttagatttctcttgaatttacttaagaggttttaatgaggtcatttcttaaaaaaaaatgttataacaatattatgttgggtaaatatcattttggaccctctgttttacaaaagttatcaattggaccctgtgttttgt

SEQ ID NO: 219595 - DNA, 5046 bp, Cannabis indica
agattttttgtagtgtaaataaatgagttatagacatatcttgtgtttctaagatttgaattagctatagctaagaacaaagaaaactcaatatgtgttaaagttagttgggtaaatactattttggacgtaaaagttactaattggaccttctgtgttttgttaaatgataaaatagagcatgtattttttaaaattgtataaatagaaccctggactaattttttgtcaaaataaaactttataataatttgatatagagatgttatgaccaaactgattacattttctgtatatgttcgtgttaaaaattttcttaaagttagtcatattaaaaaataaaattattgaaaattgagtccaaggtcctatttttactattttgaaaaatataaggtccattttgtcatttaataaaatagatagtctaattgataacttttataaaatacatggtccaaaatagtatttaccgaagttaattttacattgctaatgtatagatttaaattaccacatataagatgaataagctactcctctcattgtcaattaattttgagatacaagtctatgtaccttatcttaaattctaagatgatatcaaatagatctaaaaagctattatcccaattagaagataagacttgttccaaacaaaaataaaaagataagagacataaatatactattttattaacaatatttatatacaaattaccctaaaaaatgtttataggaagctcctaaaaaaaactttatccatccaatataattaacctttttatctcataatacatctctaattgtgtgtctattgggagattttcgacaaatgggacaagaagcgttcaatctgagccattcatcaatgcaatcagaatgaaagaaatgttgacattcaggtatggtcttcagtgtctcattgggtctatactcagacaaacatattgggcatgtgttgtcattgggctttggcaatcgcccgctctcacccaacactatctttgggtaagactctagagttggcccatctaggcccataatgattatgggctgtggagccactgtagaattgaactctggaatggatccatttcttctagtaatggccttaaccctaccgaatatgaaacatagtaggcccaatatgcacaagattgatggtatgccaacccctactgccactgcataccgagcactccttggaattcctggtcaagcataaaattagtttagttacttgtaaaacaaagctaataagaaaactaatcaaagctaaaaaaaaatgtgttttatgatggatttatttatttgtatgaggggtgctaataagaaaactttttatactctcttttacactttttcttatggatattaacatttattgagttaagaaattgaaaatatacatataaatatattagaatatgaatatgaattttttcaccatcaaattcagtttggtattttagaatatgttagatgaatagaaactaagtagtcttccaacaaagtaattgtcaaaattgattcataagatcaaaacttatacaaagcatcaaaaattagaaatagggttctaagtttttcatttattaattatctagtttttttttaatgaatttagcttatcaaataacttggtttataatagataaattatcattattttatcgccttcacgaaatgattagagttaattaattaatttataatggatcattattataaaaaatgtgtatatagcagaaaaccaaagccatatcttataatgttagtatatataggatccatatcttataataaataaaatccatatatctaataaaaacttacaacaatcaaaatattgatatgcacaagtgtttgtactttctagctatagcactcaatgttatttcaatatttaaattataaggaattgaatagaactattaatatcaagaaaatgataattattaaatgcactatatatatttctcatatttgttaacactgactatattttaggaaaattttcaaaaatatttttttatgtttaatttatagtttaaagtttttatttataaaaaatactcttctaaaattataaaattacaaaaaatatatttttttttagcaagaagtaaaaaaataataagaaatcaacttcaccgtaattataaattaattataaataaatggtaaaactactaaaaaaactaccatgcaacaagtatataataaaattgtgaataaactataaaaaattttacgttcatggtatttttgtaaataaaattaacaaatcgtaaattttgtccgtattaaaataatttggtaaggtttttttaaacctttgatggaatatgtaaattttagggctgaacatctggcgagtttaccaggttatgggttggcgggtttcgggttcaaaaaattgaaaccgaacccggacccgaataggacacgggttggcaggttgggcgggttgaccgagttggcgggttgacccagtcaactcggtcaactaaattttttgtattattatttgacaattaattaatacaaccaaataaccaatcagaattaactcttataatacagatgtatggtgagttatagaactagggttgctttcagtacactctgagtgccatattttgaggacctgtgtttgagaaaaactttctaaatcactgtatattctgtattatcaagtcatgaattatatgaaattttaaagtatgaatttaaacaaagtcaaacactacaagatccaatgtctaaaaaagtcaaagctatgattgctgagttggaaaacaagaaaaagcaccaaacgggtgaaccagagcaatgctacacatattttatctgtaaattaattattaaagtagtttttttataaaagaaaataaggtaaaagtaatatttataatttaattaagtgaataaaataatttttaaaagtctaagacttgttggttcaattatattgcaattagtaataattaaagtactatagaataagctctgcaccactaataaattttaataaaatttaataaaattaaaaaaaaaaaatcaatacattatttttctcaacctatctttttcacttgatataattattgaataaatttttgtgatattgaaaagcatgaaaatcttgacattattttttaaaagtatatatggaagagtgtgtacatgaataaaatgatcatcacaacaaacaaagatataatgaatataaatagtggcgtgccttattattttgtgataatatttaaatatttgcacttgtagaagttgtattagtcatcatatttatactctctgaaaataaacaaccattataattctatatatataccaactacactacaagtaattttcagttatttatccttgtcaattctaaatatttgagaaataaaattacaaataaaattttataaaaaaagggaaaaaaaaaaagtttgacataaatacaactacaacaagctaattattacttgctaaaaaaatttgtactttactattttgtttggttgataagataagatatatatttttttttttacgtttacataattttttttacatttttacggcattctataaaaacaacacgaaaacaacaaaaaaattatataaaaatagtatgaaaataacatcaaaataataacaaaaattaatctaaaaaatcaacaacaaattaacaagaatacaacataaaaagatcgtattttctgtaaataaaattaaaaaaaatttgtacaaatattaaaaattccgtaaaatcgtatttttataatttttttttattatttttgtgtatttgtgaaaaaaaccatttatatatatacataaattacaaaaaaattattatttttaaaggaaaaaaaaagtgtcacaaatcattaatgatatacatacacactcaaagaatgatgattaaaataaatgtggcaatgctagataaatataaatcaattaatttcttacgtagcctagaggcatgacaacccaatgtataagtcaattctattatattatcatatcatgttctatatatctacttaaatgaattttaaaaaatccaaaaagaaaaatactatattctcattttctttgtattttgataaataattatcaatatcatgtcctttctattaatattgacttacaatccctcctgatcaagtaattaaaataattttttttttataattttaagccaaattagtaattttttcctctgaactttgacatgtactaaatcatgtcccctaaacttttttagccgttaaaaattcttcctgaactattgagattgttagatttaaggacttttgtttaattttagtaaaaaaaattctaacatgaatgaaagcttaagggacatgatttagtacatatcaaagtttgaagggcatgatttaataaatatcaaagtctgaatagcatgatttagtacataaataatcactgaaacggtaaaattgaattaaattagacaaaagtccttaaatttaaccatctcaatagttcaggcagaatttttaacggcaaaaaaagttcaaaaacacgatttaatacatgtcaaaattcaaaaaaaaattactaattaacttaattttaaagtaattagttaaacataaaataaaaaatcaacttaaaatgtcatattttgggacacatatcatataatattgataagggtttattttataaatatggcttttttgtaagtggtttagaaatatatggagaaataaaaaaattttataaaaactggaaaaacgaataaaaaatttaaaatatggaaataactaattagtatatataatctctctcaactaatgatttagaaagttgagaacccctattttttagaactcccattttttccagtgttttgcttaagccaagatttttttttttttttttagtcaacaatcaaattattttttattgagtaatagtctaattttttgtttgacacccaataacaaatttctaaagtttttttttataacttttaatattctacacaaa

SEQ ID NO: 219596 - DNA, 6005 bp, Cannabis indica
aaagagaaagagaaaaaaaaaacccagttcaaatctgtcaaacgcggataataaaaagatcaactagattagaatttagacccagacagaagaagtcttcgtttcttttcttttctttctaaaacaaacactttgatactgatatagaatacccatgaaaaaagaaggaaactttacatggaaaatataaggagctcggcctgaaaaattagcaacataaaatgaagaagaagaaaaagaagagagagagagagagaggaagttgatgttaacccaaaagctgaaactgtgtagaggttttagtgtattaatccaaagacctccttcttctccttcttcttctcctttcgaattttggtttgatgtagaaataaagagagacacaacccactactctctatgttggatttattacctgaattaactgaaaattccaattatatctatttctcccatttttacattattgcccatctttatttaatcatttaccacccaattaactcctttatttgatttgttttctccttagtatgaacattaatgtaataatatgttattcacaatcacacaaaaaaatcaaaatcaaaatcaaaatcattttttagtgagaaatgctagaggacactcatgttccctaccacacttatgaggtgtaatatcttagtacaactcaatatcaagtcaaactttttttactttcataaatattgcaaaaaatccctaaacaattataaagagacacttcatcgtgatgctaagcaacatatgtgcctcatagcaatgttcttttttattagctctcaaacttttgtgtattaattatttttatttgatagaaaatggaaacttccattaatagacaaatcaaacgaattttattacacaaagatattgctccatgagcaaaatcaacaataatatgcataactataatattcaaagtaaattaatgcatttaatgaaatatcgacgaaccaattgagagcaaactcaattccagaataagagttaattgcggcatcatctccaaaaattttattttgcttgcatttaattcctaaaatctaaattttgatagcaaaacctccaaaactactgtgctattagcaaaaatacaccttgcccccgttgaccccgttatttgcctacgtggcttagtccagccaatgtcaggtagactaatgcatgccatgttgttaataatttaatgatgtgacatgtgaggaaatgaaattaaaaaaatgagtttattttttttaaacgaatggctaattaaattaaagaaacaaataaaaataaaataaaaagaagaataaaaagaaaataaaacgggagatagaacaaaacaacaaaattaaaagcatgaaactaaattaaaactaaactataaactctaaatctaaacctaaaaagagatagagcaagtacttggtggtgaagtcgacaccttaaaaatcaaacttaagagttattatcattttcgtgagaaatcgaaggaaatcgagaaaaacaaaaccttttaaagaggtagagaaagtacgaaggggaaaaacttaaaacccagcaaattgaagaagagattcatcattctcgtgggaaatcaaaggaaacccaaaaaatttgtggaaggagaaggtttttgaaatggtgtatcatcgtcgagtgaagaagatcctcttcccgactacagtaagtaccagatccatatattctaggattttttgagttttttaaaaatattgatgttgtttgagcaaatctaagcaaaatgagttaatggggggattatactaaatttctatcagtagtagctttaatggtttatgaggtttggagcttgtggtccatatcgtgtatagtagttggatatgatattaaagtagaaagtttcaaattattggtaaaaatagattaatcaaaggctgttgagtatctttggttgttgtcttctttaatgggaatattttcacatgtttatatgtatatatatattatttcttgtctgtttgttggcattgggaattaattgctattaggggttaagtgaaaatgttgggaaagtttaattggttttgcctagatcacttgtaagtttaactgtgtgattatatattaactttgcaggtttgaatttagataattttactatgaaattattccacggtagttattagatcacccgatgtggcaataggaagtatgagaatggttgaattgcctactttaatttctatagtttcaatagattcagcaggctccatcttgaagaaatagctcaagaattgggatacctattcctgtttggttttctttttaagccaaaagagaagcacctgaatatgggatttagtgtaattgaggaaaatgaaattgatatggtgttggatgatttgaggggtaaaaattacaaggaggccaacatatatttggtgttgccagatccagtttatgcagttgaatggagactggatgaggaggctgtaagacatgttccccaaccatcatttgctaaattagacaagtgcatcccgaaggagttgccatttgacagtgatttagtagcagatgttgttgtcaatccaaaaggccatcatgatcgtaatgataatttcttcaacaagtttttacaatggggtgatttagcaacatagtggattgatgaagaggtagagtctcgtgagtgcagcctccaacctggtaatattgtgcatgagacagtgattatttcatcctcctcatcatcagaatcctgggaagatgatgatgatgctgctgctgatgatgatgatggagatgatgatgatagagatgatgatgatggagatggagatgatgatgatgatggagatggagaagttgatgatgatgtagatccacatggtgagtcagaatagtttatgaaattatggactgggatgagggaattttgggcattttgatgatgatgatggaggcctaccaacatatctattgtcattacagtaaatttcccctgaaccacaaaaccccttctgccagatgtagcaccagcagcaacctaggttagaatttaattgtgtgcatgtttctaatttataattaagtgttacaatatgtgtgtattaatgttagttttacaattttaggttcagaatatgtggggggatgtagaatcaggtccaacaatattccaatcaaccctaatgttgtaaaaaaaagtggtaaagttgcagattcccctaagattgaatttcaattatattttttcttatcgtttaaagttgtgttaatgaattttagttatggaatgccataactttattccaaagattggatttcagttcctggatataactttgcagttgttaattttgataatattgcatgattttgactttggtttcttattttataggatcatgttgattcaccagattccccagaagtaaagaacattggctataaagagattgttgaagaaaatccaagagccaaaagacttaggtagaggaggatgaggaaatttggtgcccaatcacaaccctaccctaaaccaaaaattgaaccaaaaccccaccttaaaccagaacccctccttaaaccagatattataacccaacttgagtttgagtttccctcttagtcatcacaacttgaacctcaaacccaatcaaaaccctaccctgatctagaaacccaacaagaattcattcccccataccccaaacccaacctgaatcacaaccccaacctgaacctcaaacccaatcagtcaccgtttccctaacaccccaaacccaacctgaatcacaaccccaacctgaaactcaaacccaattagaacctattcccccaacaccccaaacccaacatgaatcataaccctaacctgaaactcaaacccaacctaaacctcaacccaaacagatctgattttgttttgcataaggagaaatactgtggtgagccagaagtagagaggcatggatacacacagcttgacaattgttcctggtggggaagacacaccgaattggttcatcacaaagcaacaatgtttgtgaaattcaagaaaaacatcattatcattagttaagtttggaaatactaactaagttttttgtgatttgaggaacatgaagaatggactttaaagctaaggaggaattgggtaagaaggttgaacctgtgtgggaaatcattaatttcttaccatctccaacagctaaactctcagtgctagtgtaaggggtggattgatcaagttgagtgccatcagatgtgacatgatgagtagctcctgtatccgcaaaccattgagagtcatctccaaagtcttgcaccatggtagaactatatgcgatcggatcaaactccagttcttgttcagtaagatatgccctcggattgttggtgacaggtttgggaacttgccaatttttatcgaacctgtagtggcaaacaggagcagtgtggccactctttaaacatacttgacatattactctgttgggaggaaacctggagtaccctcttccccgactttgagtttgagaattgccttcttgatttccaaatctggttgtggaataaggtctagagccacccgatcttcctgagtcaaaagcaagattggcttgcattttcatggacaggtcattcatgtgttgatgatgttccaacctgctttcgtgagagagtaaaagggcttgaacctcatcaatggtgagattgtcacttcttgaattaatccaggatacaacataatcgaactcaggtcctaacccatttagaacttgaagaacaagatcttgatcttgaataggagctccagccacagtaagagcatctgcaatgatttggactttttccacacactcagcaatggaaagattgcctttatgaacgtttgaaaactgcccttttaactgaagcaatcgagctttggtttgactggtttgactgaagagttggcaacagaagcaagaatcacttcggacattaaagaccgaagccacgaaagcagaagttggtccttctttttccacaacgtatactcaggattaacacctccattaacaagatgctgagttggatgttcgccgatgaagaggatttcatctatgtcatgaccaaagacagtcggtataacttgggattttcaagaaaggaaattgttacgatccagcttgatcgtaaggttcgttgtgagagaatgggagaaaggattccaagcatgaatcgaagaagttggttgtgtagccatagcagcagcggtagtgattctaggatcagaggttgaagatgacatattgaagaatgtcagttggcgattgataccatgttaagtgtagaaacaagaacaatagaattctggtgcaatgcaccagagtagaaaacagagaaaataaaaaacaagagagtaacaatgcaactaactgcatcctctcataactaagctcttatttatatacttgaagtaatacacagggaaaaaggaaataacagaaaagttttaactaactttctaacagaaaaaattgaactaactgttaatactaacaagtattactataaattcaataattgtcaagaatctcatttatgttaataaaattctgaattaacatgtaccttataattttatattttatgtagattataactattaaatttaattgactcacattaatatttatattagtagcttttttattgaaaatattgatgatactctcactaccatcgccattgctacgcccactacttaagttgtttttactttatcagcgcaattaattttagttagatgatcttattagtcatcttacaaccgacagatctaatcacaactgttccaatataattggatattcaataataattggatcagatcaactgtaatttttgaaaattcaaatggatcagatcggttgttgaataggacatccgattcaatagacaatcgtaccaaattgatctaattattatctatttgccatctaatgatacttatatatttt

SEQ ID NO: 219597 - DNA, 2717 bp, Cannabis indica
taaaaaaattaaaatttttttagtttgataatttgataattgtagaccaaaataatagaaaagccccccataaaattaaataaatctagtaagagtgattataatatatgtataaatattttttaatgataaataatccctcacaaagtaaaaattctgggtccgtcactatttagaattacccttaatttttcaaaaaattctaaataatttatcgtattaaaaatgaggttcaaatatttgttgcatgtatgacttttttctatatactcgtggagtaattttttagactttatttttgacatattaaactattgaattttttttgaaaatttacatgtaattttaaaaaattataatactatatacaatcatgaaaaaaaaattaaactagttagaaagctcttctgaatgccgaaacaattgaatgatatattttgaaacaatatttgaagagggtgtactgtaaattcttccttaaaaataatagatttgaatatttttttaatagaaaatcaagcttcattaagcatcaaattcagttagcaaaattgataacaactcagttggaatattcgtaaattgaaactacaatcaagataagaataagaagctctaccaaaaatataagctagcacattcacatatcgtttaacaaataaaaataagacaaaaaataattcaacaagcaaagttttacattctttaatttaatcaccaaataaaaaaaaaatcatgctaataaggctctgtaacgcttgcaccacaactaacaatcagtctcaaagaagaatctctgccacgaactcgaactccatttgatccagcttagagcttcacgaaagctcattgcttcaacgacttcaacactcactttcccataaaataatttggtgtaccattcaacaaacaaccctttatcttcatgggcaaccatacttagcttgaaaccattaagatctttaaaaagagcttcatttacattaatcttgacgttattaaataatagtaaacaatctccaaagcactaatagttttgtggttctacactttttcatttcgggcaccctagattacctaatagaggattgcaatgatatattgtcgttcattttggagctgcgaaaaacacacctcaaaccatctcaaaaaaccaacagcgaatggcacaccggtaccaataccaactcgattccaacatacttgagcagatggacaagaaacgagacaatgcaaaatatttcagcctcttcgtgacaaataagacacttaagattaatcgccacatgcttggtgtgaagttgtaccattgtatgaagacaactcgtacatgtctgcctaattaagtctttaatcttaggaggagtttttatttattttatgtataaaagaatatttttttttttttaaaaaaaattatataatagattaaaaatttataaaaaaaaaatacaaaaacgtgtcaacatggaaaagattctttattactctttgagttttttttttatttacaaaagtacctcttagtataaataataaactatttttttggttgttttataatttatttatgttgtcatgatgttgcttttctgaatatttttgttaatttatatcttatttatagttccgtgaggttaaattttagttattttttagttgtatttttactttttgttgaataaagtgtatttttataattttaaatccatacaagcgtatttttataattaaaaattttaaaccgtaaaattgtaaataaaatataaaaaaaataatatttttaaaaatttaccttttcttttatttacattggattttgttgggaggtttaattattctactaaaatgataaggaattgaattgaattgatttttagagtaatttgcggcataatatcttagtttaactcccgtttataaataaatatttaagtttaatttttgacgataataatatttatttaagttataattctagaactgtgtaagtacctgatcgtatgtcaagtcatttttcacatgtcattttcttattggtatatttaaactattttttcaaaataaaaatttaatgacatgggctaatcaaggattagcacgtgacaatttacttaaaacttaacagctatgtacttacagaagttctagaattataacttagatattattaccgttaaaaattaaacttaggtatttatttgtaatcggaagttaaacgtacttttttgtaattaaatgaagcaaccaaattgattgataaaaaacgaataatttgcagcataaatatttaagtttaattctcggttgcgaataaatacttaagtttaatttttgatgataataatacttaagttatatttctaaaactcagtaggtacttggctgtaaatgtcaagtaattatccacgtgtaatttttttattggtatatttaaattattattattgcccggttgcagattcctgcgtcgtaaattcatgagtgattctaatcaattcgtcaaaaaaaattattattaaaataaaaactcatgacctgaactaatcaaaaattcccacacaataatttacttaacacttaagtattattagcgctaaaaattaaatttaagtatttatttaaaattgagaattaaggaaatgcttcaaataataatagggtaaatagtggcataagtactcaaagttttatgtttgtaagcggcataaacccaa

SEQ ID NO: 219598 - DNA, 5792 bp, Cannabis indica
ataattttatggtttaattattgctaaataaaatgcaaccacacgcttaatactaacatagtaacacttttataaaaaaaataaagaaaaaagaaagaaaactatgaacagtgacccgacccggaaatagggtataagataaaacagaggaacaataccaaacgaaattcgagttcgaggatctctcagaactcgtacatttgattcgaagccaagctatgtatcaatggaggaagttcgagtttttcgaggagaaattggcgggcaagtgcgcgattcccgatgacgtccaaggcaagatccagtgctgctccagcggaagagggaaggtcgtgatcggctccgaggacggcgccgtaagccttctcgacagaggtctcaacttcaattatgctttccaggctcactcttcctctgttcttttccttcagcagctcaaggtattttccccctctttctttagttctgttctgattagtttataggaaagtgtagtttgaaaagaattagattatgtcgaaactcttatgggtctggtctactctgattaattttgaatcaaggtaagtttttttgaattgggttcgggtattaatatcttcccaatgttgtaatttgttctgatcacgacttttttatatcattattaatttagcaacggaactttttggttaccattggagaagatgaacaagtttctccacagcaatccgctatttgccttaaggtttttgaccttgataggatgcaacctgaagggtcaagctcaattagtcctgattgtattggaatcttacgcatattcaccaatcagtttcctgaggccaaggtagtgaaggcactacatattggttcacattaagttacattttttaatttgaatctctacagtgatgaactttttgatttacttaaattttgtcctacagattacatcttttttagttcttgaagaagccccgccaatattgctaatagctattggcctagataacggtgatatttattgcatcaaaggagacattgcacgggagcgtatcacccgtttcaagcttcaggtggatggttcttctaacaagagtcattcctcaattacaggtctggggtttaaggtggatggtcaaacccttcagttatttgctgtgactccaacctcagtgactttgtttagcttgcaaagtcaaccgcctaaacggcagacccttgatcagattggatccattgttaatgttgcaatgagtgatcgttcggtatgcattttgcttttgtatctatgcttcaatattgtctgcttttatggttttatgttgctatatgtcaatattgctatgtgtctatattgttacttctagctgaaaagtcataaatggaaaagaaagaaatattatcgtgattggaaaggttatacttatagtatctgaagcttgtggagtttttatttcatacattggaagtatttattttgttataactagaaaaaggtactggaatgtaactgaaagaaaagaaaccaatcagtaatatcattaaagtttcatttatgcaataactaataaaataaatgagaagatatagctcggatacagaacaaaatttgtttatatgtatcaagttatcaaggggctcgtttaactgtaatgggtaggaaacaacggagtgtttctgtttacatacactgatgtgtttacttagataaatatgcaactatttttgtgcactctacatatattccttgaaatcagttaaggaaaagacaatccttgttttctggttttattgtttctcatttgtttttaaaacatttcacatgattaatgaatcgagttttgataggcagtttttctacttcttcttcttcttcttgtaatcaggaattaatagttggtagacccgaggccgtgtacttttatgaagttgatggccgtggtccttgttgggcttttgaaggagagaagagattccttgggtggtttcgtggataccttctgtgtgttatagcagatcaaagaaatggaaagaacacattcaacgtatatgacctaaaaaatcgattaattgcacacagccttgtggttaaagaagtttctcacatgctctgtgagtggggcaacataattctaattatgtctgataagtctgctttatgcattggggaaaaggacatggaaagcaagttagatatgctctttaaaaaaaacctttatactgtagctatcaaccttgtacaaagtcagcaagctgatgctgctgcaactgcagaagttctaaggaaatatggggatcatctatacagcaaacaagattatgatgaggccatggctcagtatattcttactatcgggcaccttgagccttcttatgtgatacagaagttcttagatgcacaaagaatctacaaccttacaaattacctggaaaagttacacgagaagggactcgcttcgaaggatcacaccacccttctactgaactgttataccaaattaaaagatgttgaaaagttaaatgtctttataaaaagtgaagatggtgttggagaacataagtttgatgtagaaactgccattagggtttgtcgtgctgccaattaccatgagcatgcaatgtatgttgctaagaaggcaggaaggcatgaattgtacttgaaaatcttgcttgaagaccttggtagatatgatgaagccttgcagtatatttcaagccttgaaccaagtcaagcaggggtaacaattaaagagtatggtaagattctcatagagcacaagcctgttgacacaattgagatactcatgaggctctgcactgaagacagatcatcagccaagagagaaagctcaaatgttgcatatttatctctgctgccttctcctgttgattttctgaacatcttcatccatcatccagagtcattaatggattttcttgaaaagtatactgacaaggtgaaagactcacctgctcaagtagaaattcacaacacactcttggagttgtacttgtccaatgatttgaactccccttcaattttgcaagctaagaatgatgttgacttaagtctcatggtaaaattgggaacacatgttttgtcaagagcagagtccaatgggaaatcagttgatgataacaaaaacttaaccaaagaaaatgatcttttgaaaaggcagaaaaaggggctgcaattgctaagaaatgcatggccatcagagctagaacaacctctatatgatataaatcttgcaataattctctgtttaacaaattcatttaaagagggacttctgtatatatatgaaaagatgaaattatataaggaggtgattgcttgctacatgcaaactcatgaccatgagggactgatcgcttgctgcaaaagattgggggattcagggaagggaggggacccatctctttgggcggacctactgaaatattttggtgaacttggcgtagattgctctaaggaagtgaaggaagtcttaacctatatagaaagagatgatatcttacctcccattactgttcttcaaactttgtccagaaatccatgtcttacgatctctgtcattaaggattacattgctcgaaaacttgaacaagagtcaaagctaattgaggaggaccgacgagctattgataagtatcaggtcagtggcttattcattcagctgtagtgggtagtttataattatattattgtatccattttgattttcaatttggtatccattaaggggggttattaatcaaatgttttgaagggcttctttggaaggccaagtgaaaacaaatttgtggtatttgaaataatcatgaaggtatcataatgaacataaacttgaaatctaccaacaatggttgcacatatttaataccaatgtcaatgtgggtaatagaggtgttggagtgaagaaacaaggggaaattaagaagtgataatttttttattatatgctgggcaatccacattttatgcttgtcaatagggctttttgggtttagtatttacataattcttgattgtagatcttaagttcacgtaagtaggtaatcggagacatcttagcaatgaccattttaataaaaatgaagccttcaggcacaaatttggcaggtatgctgttaaacgtgatagagcatgcctgtttaaatgcgcaacgttaatgcctgtatgtttcaaacccgaactgtctggatgaggattggtctttgttaataaaatttttgaggaataaaatcattctcaggatagcatcgagatgtattttagaagatttttcaaatgataaatggtggaagtctaaacaaatttcttaaattgtgcaggaagatacaacgaccatgaggaaagaaatccaggatcttaggacaaatgccagaatctttcagctcagtaagtgcactgcgtgcactttcactcttgacctccctgcagtacactttatgtgtatgcactcgttccatcagcgttgccttggagataatgaaaaagaatgtcctgaatgtgcccctgagtacaggtctgtcctagaaatgaagagaaacttagagcagaactccaaagaccaagacctattctttcaacaagtaaagagttctaaaaatggattttcagtgattgctgagtactttgggaaggggatcattagcaagacaagtattgcaacctcaggtacttcgcaaacaggtaacacttcatccgctagcagcttctaaagtttgtcatacgataaattatacacctgccaagcccatccaattttcgaaatatggggtttgattgtggtttgtgtgaggttgagtttcggttttgtgagtattgtactggaaattgatcttcctgcccaacctttaggctattgaaaagaatgagaaatggtatgatttattgattgtgtttaacacacagaggaagtgttggattttttttttcatctttgaatgggcatgtacaatgatgtaaaatttatttatttgttatttttccccaccaacctagtgtgtgaagttactgtgagcaatttatttatttgtaaaatctattattgtctatcttccttcagatgtaatcctttcataacacgatatacttccttctatagcctccacaggggcactgcctaataaccactcataacatattattatttctttttgtcaactctctaactagacgagtgagtaggctatgaatagcttcatttctggaattgtcatgttaactatcttgcttgggccttttgtaaagagctattttatacatgacagtctattctagcagtatcaatgcatggtttttcacttcaaaaggaaacacattagggttggtaacaaatcaaaacaacgacctcataattagtagtcatgtcttgacaagaagggtttgagccaaatgaaaaatgttatagcagtaggagtagtccctaccaattttcccaaagtagaggtttggttgtgttttgcatagtctttttgtgaaatatgaaagcttgtgccattataagccatgccgacagtggttggtacgttatctttgaaagatcttggttggatttttccaaataggaacctctcaattttgattgtttttgctttaacaactcctatgaattttactccttgtctttatactaggtgaggatctgccactaccaaatcagtctataataattgtgtacaaccttaactctgtttgatgttttaactccaataaccgactatttgacatgagtacatttatgtgtaaaacgcagtacccaaatatctgtgtattgtcccagcaaaaatatatatat

SEQ ID NO: 219599 - DNA, 3506 bp, Cannabis indica
ttggacatcaagcatgtatcttttaatgataactatttatcaggtgcctagcaccttctcgacatgttgcgttgcgattggttagtcatactctctaaaaggtacgtattatattaaattatatgggatccgatacttagttggatcaatagcaatattgacacataggaagagacaccactagtaccttttagtatttccctatatatatgtcacacctttttttttagtaaaacttacgtactcatttaattgaattttatacaattattttcccttttcacttaccaaacatacaatatttgaccaaaaacattatacataaattatatattaactcctcaactctacttaagaattaaaatcctcaatctacatagctagggaaaaaaagttgaacacttccaaattaatatttaatgagataatttaggacacttagtttgaaaaccaagaactacaaatttaattatttatacataattaattaataataagtttattggaataaaagatgacatctctaagtacgtatctttatattctttcaattaatccaatctatataatatgcctacgtgcggtatggtgagacagtttggaataaatcgaaatctaaaattaaaaaataattacaccataaaagaacatggtttgtagttttcattacgtttctttaattattaaatttaaatgattcaatgaatgattatatataattaattaactataaaagttgatgatttggatatattccactaccttcctctcataaaatattatttaatttctttgatcaaaatatgtatcacatttctctacagaattaaaagatcttttaacttattttattttaatttaaattaattttctcactattttttaaaggaacctggccaagtctattttttaaaataataaaatatatagtggggcctttttgtaaatatgaacaggaatataatagaatggctttaaagcaattcgaactaaaattgggcacgttttccttatttataataacaagagactagaaactgttctatcaactaattaaaaaaagtgacatttggaaataaataaaatctgaccaaaaataaataattattttattgtgtgaaacatatatgagaagcaataagttatgaagagaggaataaagaattaagaacagtattggtttattattctgttcaaatacttggatttattagttttgaacgtggaatgtgatcgaatatatatataactacttttcattgagaaaaaaaaagttatattcatttgaggaaatgaactataaataatttatttaatgtacaaagttatatttgttattttcatggcacacaaatattttacgtgttaattaataaaaataatatcaataatatatcaatcaagtagtgttatatatatatactacacaaaaaaatcattagttttaacatgttaagaaagattttttataatttgtcacaattgttttacatttaattataaattatattgaaactaaaaaaaaaataaaatgtaagaaataaaatttaatttatatatattaaaaataattttatattattaaagtatgaaaagattaaaccatatatagataacacgaataacttattttattgtcaattgataattttgagacgagaagcaggaaccacatacactttctcatacacttgcttattgtttttacaaagagtaattttcttcattgtgttttatttgtgctaatattttaggtacatttaaattgcatgtaataaaagatcactttcaagtgtatatgtatggcgctccatttgttacactcaaattatatttattaaatcgtaaagtatgacaaatattatggtaagcattaatatgcgatgctaaaatttgaacaattatgaaatggtctaaaacctcaaataaagttgtgtacacatttcattacaatctttgttagggttctattgtaaacttaaaagctaattaatttagggtttgttgtatttttttttattctcatcggttggggtgctttgactatattatatgtgaattttaatattactttaatcaaattaccggtgaactgctatttagtattatgagtattattttttattttattattaattaactatatcttaatatatttttttttccaaaatagaggcttgagcggtgggaagcctaagacaactgcctccttcgtttcacctcaggtcagccatgtatgtgaatgatatgctttaactgagagaaagttggtgttaattaatacaacatgactcgatcgaatatggtggaccttttactgtgacctatttcacacagtgggattcttcttcaatggtcttagcaatactatggtgagtttgagagctttaggttttatggagattgagcatcattaaggtcaattattgatcataaaaacttaatacctaaatgaaaaaaaaatagtttttaataaaatctagaataaaaaaatattctcccccttgaactttgtaacgtatatgattgtgccccttgtaatattagcattgtcgaaaattttccttaactttgtccgttaataaaaattaaaaattttattaaaaaattataattattttgcctcttgacacgtactacaaaaaaacttttacttttggtaataattttttagccacaatataaattttttgtgattaaatgtgatttttagtcacagcaaaaatttacttgtgactaaaacatattatttagatgtaaattgtcactaatttaattttagtcacaacaaattgtaatttttatgactaatacctttagtcgggaactttttagtcacaacatagaaatgctgatttataattagtcacaaattttgttatgaccaaaaataaaattttttctagtgtaaattttatcacttttataattatgccccttgtaatatcagcgtttttaaaaattcacctttaattttatcaattagtaaaaattaagacttcttaagcttttcataaattgggctgacaatgtacaacataacatagtgaataataaattgaatgtctattcatgtaattgcttatgtggttgaaaaataaaaaggtaattgaattttaaaagtaagcttaatgaaaaatacaataaaactaatatataataaaaaccccatttaatgtaaaaattagatttgtaaactaaattttctaaaaacaaaagagagaaactttaaactaatttcattactaaagaaaaaaacaacttaaaaacataaaatatattataaattaaaaataaaataagtaaatgagatataatttttagtgacaaaattcaagaagctgcaaaataattttttattctaaaatctaataaggcaaattaatatgaaatttcaatctgaattgtattagtatttttagtaagtgtttaagttaaaattaactacttgttagtattttaacactaagtaaataaattactgatttgccttactaggaatcttg

SEQ ID NO: 219600 - DNA, 4146 bp, Cannabis indica
gcagcaaagaagcacattgatcaaagcacaaccatattggatgtgcaaggcgtggtatgtgagaatgttaaattaagatattgattcgatcatatggttataattttagaatgtataaatgaatggcattgttaaaaagcctttgtttcagctcttgtttttcacttctcataatagaaatatgaaccattgagttaatgacacagggacttaaaagttttaccaaatctgccagggatctgatcactcaacttcaaaagattgatggtgacaattatcctgaggtacgtaccatcaactttataagtaaaatttacaatataactaacatctttctagcatttaatgattgtgatcataaattgatgatagacttaatgtttgtgttgatttcagaccttgaatcgcatgtttatcattaatgctggttccgggtttaggatgttgtggaacactgtgaagtccttccttgatccaaagaccgctgcaaagatccatgtgaggattatatattatatgtagtttttattattgaaaatttgagctctgatcaaaatcttatcttttatccatgaaatgtgtcacccaccaggttcttggaaataaataccagagcaagttgctggaaataattgatgccaagtaggtgtttgaaaattgatttgtaactttttgttatcgtcatttccattgtactgatttactgttttatttgcaccagcgagttgccagattttctcggtggtacttgtacttgtgccgaacatggaggatgtatgcgttccgacaagggtccctggaaggacgcagaaatattgaaggtaccatgtttaattggaatcagtgttttggttggcatcttaagtttacgttgaactttaattcatgtttgttcataaatgaacttacagatggttcaaaatggtgatcacaaatgtaaaagtaaatccgagagtccagttactgaggagaagacagtaattgaggaggagatagttcaccccaaggtacatttttggaggctccataccattttaatcaatatctattattgaatgaattgatttcatattctcttcttgctgctacttggtattgatgagttatctgttaacttaatgttcttaaaccagggatgtgattctcaccatatggagactactttagaagtagctgacatagcacacctcgctccaattcttgagaaagtaagtaaatagccgtcgagtttcttaattgtaatcgcaataattaaacagaatagaagaattataataagagcattgctattaagtaccagtaacgatatgaaactttgggtttcagcatttctcttatattaactctttagtagcacctgaaatatgtatgaagtagcaatatagagttcatttaagtgggttgcattaacaatactcatatcccacgttggtttgtgacaaggtaagtatttgatctgcaatatgtaacttgtcactgttattagtaggcctcctatgcttatttcaatagatatggttgtcattcatatgcttatttgagaaccaaatctcatactctttctctcccttcctttttttcttcaataaaatatctctaactttctttttcctttattgtgctctgaaaagataaactctcagattcatgttctgagaaaatcccaaaaatttcgcaagtacgatgactttgctccaatggttgacaaaactgttgatgcaacatggcaaaccgtggtggataataataatttttcccaaggtaagtttcattttctcattgttcttcaaacataatatttctacattatcatatgatcaacctaacaaacatgaatgagaattttgtcatcagaaaattgcattaccaggcaaggcagtagcagaacatcagaagggcttagctcccatattttaacaggtgttatgaccgttgtcatgggaatcgtcaccatggttcgtctcacaaaaaacatgcccaagaagctcacagactcaaccttctactctagccccacttactgtgatgatgatagccaaatagtttcacaccagttgcagggcaaccccatgtccaatgcagactgtatgtctgtgttgaaacgaatggcagagttggaagagagagccggtgttttgagcatgaaaccggttaccatgccaccagagaaggaagccatgctgaacactgctttaagcagggttgatgctttagagcaagagcttatggcaactaagaaggtatgaaaattgttattctttcattgatatttcttaacacaatactgaggctatgtttgaaagttggatttaggtaggaaaagaaaaagtttaaggaaaaacaagtgtgaaaaatgacaaaaaaagaaaagaaaatcaattttttatgtttgatatgaaattttttgctgattaacttgctttttttcacacaagtttttccatatcaaatatgagaaattgatttgttttcttattttccacagttttttctttcctacagctcccttaccttttttttcccattaaaattcaacttccaaacataacttaagaaaaatggaaacccaattgttgatctttattttgcttttttttggtttaggctttagaggaatcacttgccagacaggaggaggtctttgcttatcttgaaaagaagaagaaaaagaagaaattggtatatttatatgtcaccaacaataaccatgaaatttctctattaaattttataataattaccattaaaaatgcattattattaaatcgagactcttatgttgttaatgcagatgatgatgccattcggctggtagattattaatcaatattattgggaagatgccaaagacccttataattttatctccaagcaaagttacctttattattatttttttttctttctatttatgttgtttattattccttaattattaaggcttgtatgaatcacaaattttggtcaagtatatatcaaaagtatccatttcttcccaaatatatatatttaataaataaaaatggccatcttatatggattttttaatttgcttagatttcctcaaacttatatatattgatttcttattatgtattcattagattagaaaacataacaaatgccagaaaataattggggtttaatagatttattgcaaagttgattactcatctttgataggtacatatataaattagtctttcacaaattttaaaaattaactaaaaatctcaatgaaaactagtaacaaaccattaatttattaccaaaattaaatttatgtgtatatacaaaaaattcactgaaaaacaagcaaccacaatctatcaaacaaaagaaattaaatcttgattttggtttgtcaaaagtacaatattactgatcagtaacctagaacagaaaagaaaaaagaaaattataaccaaagttgactttaaagtttgaaaccatattatgcctacttcttctttgtatagtattatatattgactgtcaattgaggtgagtttttttcatgacaaatctcacctcaatagacaaccagtgtggatttaaggcaatatatattgatctcatcattcatctcttttttattagttttttttgtctatatatataatatggtcattaatcaaaaccatttaaataagaggcacatgatagaggtacaagacaaagccctctactcctaagatccaccttcttcatcaattctgtctcttcttcattacccaaaccatgtacctgttttaataacaattaaccaaatatatatttatatcaatatattaattatgtttgataaaaatcgataaatcaaatcacaaaaataaaatttggaatgaaataaaatttaatattttttttcagtctttaatttctatcttattttcaaatgaaataattacttcactgttaaaattactaaccataattgataataagaaaagtatctatacagggacagagacagaagcttaaatcaagagggcctaaacataaaaaaaaaaatgggaggctaaacacataatttttagaaaaataaaatttttaatataacattactgtataaattttttggcgggggctaaggagtcttactggctccgtccgagagttcatgtatattatatttttcaacat

SEQ ID NO: 219601 - DNA, 5075 bp, Cannabis indica
caagttcactcacacttcttcaagaaaaaagttaatctaaagttttgtgtggactatttgtcatcacatggattgtttggtatttctgtactctggaattctgtagttggtttcagtatgatatctcgagcttgcttatgtaagtaggtctaggtctaggtttttggttttgaatgctgcactctggactagagaaaattccatgttctaagcacatccaccacttatattgaagtacttgcaatttgaataactgataagaaaaaccaaattgcatttttggaaatggatgttaatttaaagttaatatctataattccattgagatatttattttttgatgatgctcttagtacttatctgctgcattaaattcttgaacagcttggagttttctcatctcaggtgttccaagattctccacgggataaaatgtggaggaagaaacattgtaatttctgcacttcacttcgaattgaacttcacattgtttttgttgttgtgctgactattattttctcatactgcagcaccaatttatgaaatggagaaacattgcaacatcgaaattgcagcccagatttcacgagtcccatccgcccaaaatggtactttagttctccaagtgtataaaagaaaatttatagttacaattactatctccttaagattatttcccatttcttaaggctggtatataatttagggtatctccagaaccttaagttgcagttccagtttctttttaaaagttacatagaatctttctgatgtatttttaattgttgtcgttttaaaatttctttgttttactaagctgttttgttatcataaattagacggggatcgtgatcggtttcatatagaaggattgatggagagtcctgcagtggatgatgatggggactgcttctcacccttattgttgaatgcgtcttctgtcaacattgaggtctactataataaggcagtgaattataccttgatggtcacttttgtatcctttacacatcattagcagagagcttttgtttttgttttccctttcattgattgttgatcatagatttatgcatattaggtgccttccttaacaattttatcaggtttcatttcttcaagttctgctgttgattcggcaaatggaacatagcaacactcaatctgtaagaaatgactccaacccgttcttctataagaacaatcaatccagcaataaatcatatcatctttcacgtcattcttatgaggacactacttgtctacttagtagttttatgagtaatgatttggtttctgatgcatttttatatcaatgtttctcttcagggagctgccaaagtttcaattctaatgattggccaacaggctatcatggatgcttatctttgcttgatacatctaacagcaggaatacttgttggtaagatagtaaattcttacaaccagctcattttcagtttcttgattcatatgcctgtatgaaattatttatgaaaggacatttttatttgttcaaagtactgggtctctgttcaattcatgggatagctaggaaataatgtgtcaaaaactttcacataatcagcatcttttagacactagaattttacatacaattacaaatgaccagctctataattatagatcctatgtaataattcatcttcagtagctttgtggaatatgacctttcaactaagttctctttaatcactttaaattgcactgccccagccttcgattggagaaatttgtctaagaatgctaatggcggtcttggccctgaatcagaaggtagcagatttgtgtatatacttccaatacttctgtccctatgagacttttagggcaagaataagaatgcacattttcaatattctgatagttgtcgtggtgtgaactgacaagaaggcatcgatgcatgtttttgttggaagaaagaaagtatgaaatggacctctatggaaatctcccattcatcagaaagaatgaaatgccacctctattacttattcccatttatcataaataaagaccaaagttcagattgaatgatttaaatatcatccatattttggactctgtagtgggtatgaaactgactgcatttggacggacagcccatttcaatatctgatagttttggggtttgaaaaagatttattttagggtgatgtggtagtcttatattttcatgtttgtcaagcaggataacgctgctacaaattagattattagtgtatcattgttttatcttcacttacatatttatatcattattttcttatcaatacatttgattaatataattatttaattttcgtccccgctaaaacaaaatattggacttgccaccgactgcagtttgatatagcacaggagtgcatgtcatgttgtgttcatatagtaactattttggctttgtaattatctctgtcagactccactaactgcaagttcttcgattttatcttttttcagagtccttgttcaatgcctttgcaacggctgcttttttcaagtttgtagtcttctcaatttttgagatgagatatctccttgctatatggaaggcaaataggcccatgaataatggagaaggttgggagacaatgaggcgtgagctttcagttctatatagccgattttgtaagtactacttgtacattttcttgttgcttttatgctgctgcaccaggttgtaggttctattgattataattattgtaagtgtttaacacttgaatgcatagagagggatacaactttattcatgcatggcctcctcattcaataaaatttttctctttctgctacttattttaccatggaaggaatagatatatttacatttacttaataatttgtttatgatcctttagttttgggttcttcatattgataaaataggaaacacaatctgtttggtctccaatgtgccttctttttgtttctatatacttgcaagttttcacttagctaaatataggtttacatttgttattatatcttgaattacttctataaatttatggatgtatgactatttttaaatatgtgcagatggaatacttttaggaggcattctgattatgtacgagtttcataattttctgaggcctattcttctccttatgtactgcttttggatacctcaaatcgtcaccaatgtcattcgtgattcaagaaaacctttacatccacattatgtcataggcgtgactgttactcggcttgcagttccattatatatatttggctgcccgaacaatttcatgcgcattgaacctgaccagagttggtgtatttgtttggttgtttttattggacttcaatctgcaattcttcttcttcagcactatcttggatctcggtggttcattcctcgtcaggttagatgcaactctgatcttttataaatcagtgtgataatatgaaattcactcaaccacttactgttatctatctgattgcgtacttgtctcacttaatccagctcatttccactggaatatacttctcctggaacatttttgttttgtttgaatttcccttgttgcttttatggacatttgttttgttaccatggattcattgttgcagattctacctgagaaatacagctactatagaaggttcgatcaaaatacaagtaatgctacagactgtgtcatttgcatgacagccatcgatctcatgcaacgttcaaatgattgcatggtataataccaaaatattcgaatctcaactattactattaataagatgatgttctaatcagccaattcccttgcaggtaacaccttgtgatcatttcttccattctggttgtttacaaaggtggatggatgtaaagatggagtgcccaacttgtcggcgtccactaccgccggcctgaacctggctccttcttctatgtccatattttaggatcaactgacataccgaactcactaattttggtaaaacgctggatggcatgcaagaaagactctttagtaactagcactcaatatgtcactgctcctatatttcttttttgaacttgggagggctttttttttcttttcttggaataccactttctgattttacagaagtgatttttatagtctacttgtatcatgaattttgtacataattggtatataatttgttcaatcgaaaacattttttttttgttagtgtaatcctttttcttttttttttcctcgtatgacttgtattttctttgcctaaacgggatattataattatactgagaagagaagtttaatcatattttttctaatcctcatttagatgccaagttctaaaatcttatcttcatgaggtcaattatatgtgtattttgtttccggctggctatagatttcatactcggttgagaaaatctccgggtaaagagtgatatatatccacttccaaatggtcaaggtggtattacttagggctgtatataaatttttataaaccctctaatccgaataactcgtccaaattaaaccgagatcacccgataaaaaatgcaaattaaaaaattcaacgaaaatataacctgcctaatttttatattgggcgggttgaaaataataccaacccgcccaatcaacccgaataatccgaccaacccgattaagagaatttttttttatatatatttatatatcatttaatttatatgactatgtaaaaaaatataaagttaagattaatatgtttttttatggtggttgatttgaactttgaattcaatctatatacatttatttcattattacaattaattaaaatataacaattgaatgtaaaaataaaaaaaaaactaaaaaaaataattagcggtcggtttggacccgaccaaactgaccaatttcattggacgggttactattttcttttttcttaattggaagggttgcacttagatttttgtaacccgctctttacattgggttaaacaaaatgtagcataaaccgaccaaactgaccgacgtacacccctagtaatactactacaccacccgtctttcctctctttcgttttttcaatttgcatgtattgcgtaatt

SEQ ID NO: 219602 - DNA, 4787 bp, Cannabis indica
ttgcacagcttacccggtatttccccttacggatcacgggactactaactgtgacaccggtaaaacccttcttaatactcatctttcttggattcttgataccggtgcaactcatcatgtgtgctgcaattttgaattattccaagatacttactctaatgattctattacaaatgttaaattacctaatggttttttcctaaagtttcttgccttggtactgttatattgtctctcattcttgtgcttggagatgttttgtatgtaccagaatttcaattaaatttgctgtctgttagttcccttcttgactcaggttcatgtgtgttcactttttaccctaatcattgtgttattcaggacactatgaagacccagctgattgggacggctaaaagaattggcaaactcttccatctgaattcccctaaacacaaaaccaacccctttgttttctttagctactgattctaagatttctaatgatactatatggcattatatacttggtcatccatcttgtattaaaattcatttattgaataaaagtttgcaatttcaaaatgttccttctcctcattttcattattctatttgccattatgctaagtaaaggaaactaccttttgtttctaatcacaatattgctaaagaatgttttgatttgattcatattgatatatggggaccatataacaatcttaccatttgggggcataaatattttattactattgttgatgatcactctagatatacatgggttcattttattaaaaccaaggctgaagctcaaattgccattcccaatttcatccaattaatcaagacccaatacaacaaaaccatcaagggtgtgagatcggataatgccaaggaattacaatttcccaatttatttagttctcttggaattatccactaccattcttgtgtccatagaccccaacaaaactctcttgttgagagaaaacatcaacacttgttgaatgttgctagggcccttctttttcaatctcatgtgcctctaaactattgggatgagtgtgtggctactgctgcctacttaattaatagaacacctacacccaatttgaaaaatgcttccccctttgagattctaaaatctaaaccaccaaagtatgagcatttgaaagcctttggatgtcttgcttatgcatccacaccctctatatcaagaaccaaattctctcctagagctcacccttgtgtgtttttgggataccctcatggaacgaaagcttacaacctattaaatcttaattctcataaattttttgttctagagatgttgaattccatgaaactatttttcctttttataacaataactctatacctgatgaatagtaagttttttttttctggtttacctactggtgtgacagaattttctaatcctggtgttacttttactggtacacctactggtgtgacagatttttctgctaataaccatgctcgtgatcatgttactggtcctaataattgtatgcagcaagaacatcatttggaacaggatgctcaatacactaataatcagcaacaaacacctgacatcgatcctttacctcaaaccagtgacgcacataatgatgataataatcaacaaaaccaaatgcctgatcagtttcataccagacctattagagccaaaaataaaccatcttatttgcatgattaccactgttatcttgctaactctaatttttctactgtgcagcaagaaaacaagaatgtcactccttatcccatatcccaaattcttgactacaacaaattaaagcctcattttcgtgctactgttttggctatttccagttactatgagcttgaaatttttagtcaggccaaaggcattcctgaatgggatagagctatggattgtgaaattgatgctcttgagaaaaacaacacttggacagtggtcacattactagatggttgctatgttattggatgcaaatgggtgtataaaatcaagtttaatgctgatgggtctgttaaaaggtttaaggttcggcttgttgcaaaaggatacaatcaacaagaagggatagattacaccgacacttttgctcctgtcactaaactagttacagtcaaacttattttagcccttgttgccattaatggttggtaccttcaccaactagatgtaaataatgcttttttacatggtgacttacatgaagatgtgtatatgactttacctccagggtatagtgctaagggggagattccaccaaatgcggtttgtaaactcaacaaggccttgtatggtttaaagcaagctttaagacaatggtttgaaaagttttctagtgtcctaatggaagaaggctttcatcactcaacaaccgatcattctctttttatgagacatgttggggccactttcatcattcttcttatctatgttgatgatgtgatattggccagcaacaacttagatgagttagaaaccttgaagacaaaattaaatgacagatttagactcaaagacctaggaaatctcaaatacttcctaggattggagatttctagatctgccaaagggatttttatatctcaaagacctcacgccttgtaagttcttgaagatcttagtcatttaggttgcaagcctgccactacacctatggaagccaatcttaagttgggtcaagatgagaagggagacaagcttactgatccaaagttgtttagaagaataatagggaaacttcaataccttaccatcacaaggccggatatttctttttccgtgaatagattgagccaattcttggccattcctaaagctagacacctaaaggcagctgaaagagtgctacagtatattaagaattgtcctagacagggaattatttttcctgcaacatcaaaagttaagctcaaggcttttagtgatgcggattgggcagcttgccctgatactcgaaaatctactacagggttttgtatttttcttggagactctctaatttcttggaaaagtaagaaacaacaaaccatttcgagatcctctgctgaggctgaatataaggcaatggccaacacaacttgtgaacttgtgtggcttttgtccatccttaaggagctaaaagttgaacatattggtcctgccatacttcattgtgacaataaggctgctcaacacatagcagctaatcccgttttccacgagaggactaaacacatcgaaatagattgtcatctagttcgtcaaaagtttcaacaaggcatcataaaaaccagtcatgtctcttcaaaaggacaacttgctgacatttttactaaagctttatttccaaatcggtttaacaacttgaaggacaagatgggattaatgagcattacatctccatcttgagggggagtgttaagttctgttttattagttagaaaagttgttaggaagttagttaaagattgtcagactgctgttatttcagttgttctttttctggttttttgtcttcttgagcagtatataagacctgctctgttttgtactcgttcattcgatttaatgagaagtattcatctctttcattctttcctctttttctctctttgataatagagagtacacagaattgtgaaaattttaataagtgtggaatttttggcaggtggagtaatgggtcaaccaaaaaaagcactttttctgttatgcataaactgagaaacaaaatttcacaagaagacacgttattttgccaaatttattcggtcaaattgaagttgaagtctgagttgcagcactagttccgctgagtctgcttcaatattgggggaaaaaaaactttgagtgcgctcattagcactgtggagaaaccgataatggtagataagcacaccaaggaaagaacaagagttcaatttgctcgagtccttgttgaaatggacataacggagaaccctgaacgctcattctagtttgttaatgaatatgggcagcttttagaacaaggaatagaatatgaatggcttccggttaagtgtaaacattgtggtaggttaggccatataatggttgaatgtaggaagattgagaagcctaaagaggaggaaaaaaagcaagaaaataaggtagaaaaggatggtaatgatgctagtgctcctgttgtaattgagcagcctactggtgagattgctacttctagtaagggtgaggctgaggctactacccctgtgatagaggctgctgctatggcagtaataaatgaaaaaacagttgatggccaaggggaaaaagctgctgtcaaaacagttagtggggattggattgctccaaagaacagtgggtctaaaggctctggttcgacaaggagagatagtgacaagggtgagaaagtgcttaggaattcctttgcaatattaacagggggacagcatgaagaagtagagggagagaatgactttagcttgtgttgttaatggatttttgcaatatttgttggaacgttaggggtttgaataaaaaggagaagcaagataaagttgctgaagtttggagagttaataaagttggcattggagcccttgttgagaccaagattaaaggagaaaaaaattcaaaaatgatggcaagtagctttttatgttgggacttttatacaatcaataaagtggaaggtcagattctcctgctctagaggaaaaattttgttaatgttgaaatcattgaggaatctaagcaacatgttcattgtcatatcaaaatgatagggcagaaaaaagattactttgctaccttt

SEQ ID NO: 219603 - DNA, 2460 bp, Cannabis indica
aatgttagcaaggaagggcgtgaaacagcttggaagtggttgaaggtactatcaaacataagtcaattcacttttccttcaaataacagtgttaatatctaatgtcaacaacaaaacatatggactcgtatgtattagtgtgtaatatcttaacactgcaaatgccctcataatattttctatttactaatgattccgaaatgtaggataactgggagcacatttcaaatacttggggttctagtcctttaataacccgtttcatcaatgcaatcgtatcgccggtttgttctctttctctacatctcatttataatatttgaaaagaactcgaatcacgctcttttcattccaattttcactcctcttttttgacagttttcttcgatagaggatgccgaggaaattgaggatttctttgcgaaccgcaccaagccgagcatggctagaacattgaagcaaagcattgaacgggtacgcattaatgccaattgggttcaaagtattcaaaatgatgaccaacttgttaagaccctcaacattttgacatactaccactaaggttgggtcgtgtaatgtcattatgttgtgtataatatgtttaaagaataaagttgtaaatatagtaacctaaaacaatcacgtgtaataaatatgcactctttaatgcatgattgggttgatgttacggggcgggaaactagcgttgagcacctttccgtctttgttattattttgccaaaatccctttaagtatacttttatttgttagttacatttcaacataaaataccaattgtaattgcctttgtgaatatgtgtataggtgatactaaaaccttggatccaataaaaacacaggtatacacagtggcaattcagcatatatttaacggtaaaatttagctggcactttaaaattacaaacaaaagtatacttaaagggattttgctgccaattaccaaaaagaaaaagagttttaatattgggcaccagtggtgcctagcaccttctagacgtgtcatcttgtaattaattagcgatactcactaaaagttattatattaaattatatgaaacttaatacttaattaaactaataacgatattgacacgtaggagtgtgctagacaccaatattatcttttagtatttctcaaaaaaaaaaaaaaaaaaaaagctaaaaggacacctatgatgtctagcactcttgtgatgtgtaatatcactattgatgcaattcaatatgcctatataactgaattcttgtttatgaaaaattcatgggtgactttttatttatatataataaaataaaaataaaacaaatcccattaatatcacaaaaatattagctatgaataacctttctctttgtaccagctacatgaataaccaccgcttttcacgaattagctaccggaaccgccgcttacctatttatttatcttcatacttctccacctttcaaacccaatctcactccttttcacttctccctctagcctctactctacttataccccaatcgccatggctgaaggtatactctgcttcatctcttcatcattacttgttttctattcaaaaataacaattttttttactgaggtttaggttaaattttccaactccttccctctttctcctatcctcacgcaaacaaaaaacagtacagagaatcacagatatatttgtattagtttaattgcttattttgtttctctgtgcataataataatggcgaagtatattcaaatacgagaatttgacgatgatgatgattgagagtcgaggtgtattggtatcgaatcattaaagaatcactttctgggttgtatttattttacaattttgtttcaactactactttcattcggtgtatgaatcacggtttcgatagtgggcacgtggcggtaatatacaatgaccctttttgcttatttattttgttagaagtcatcacctcctcgaaatttctagttattacatatttgatagttaatttaagacaaagcccattgtaattgccaaagattagtagaaaagtctaatagctttcttaaaaagcacttttaacttttctaaaagccaccccaaacgggccctagataaatgtaagaaatgagtagaaaataattttctagaaatttttagaaacaatagtcactagatgtttctagttatttgggacaagcccaatgctagaattctctagcaaattgaagtggcttcatcaaccaaccatgaggcactataaatagacccttggtctcatggatgtgggtgcacaaaacaagtgaagtcttagtgtgtgataagttatctatacacaagtgtgtgtgtattcttaataagtgtctaaatacaaagtgtcccaaaagtgtgagttatatacaagtgtgtagtaaaggtgtctagtgataaaataaaagagtaagtatttggtgtattgtggt

SEQ ID NO: 219604 - DNA, 4440 bp, Cannabis indica
taaaataagttttatttagagcataaaaatccaacatccttctcctttgcaataaaaataccgtaagtttcgctctttgcatttcattggagtcactccattatgcaactgatgtattattgtgttactggtagcattttgattattgtagaactttgaattccaactaatattttgaagtaggagcattacaaacaggggatttagtaatattctcagttttattaaatatttccttattattattttttttgaaagaaaaatatttgcttattaataaaaatataaattgtccctattttcacaagcaacaatcataggatgttcagaattttatctgagaatcttctcataattttgagccttgtgaaaaagtatattcaagtttaacatttttccttcattcattaagaaaatgacactgaagtcatattagttatttgggttaaactcatcaatataatatgaatcttgatttcgatatccatatcaattccaagaaatgtaacactatgtaacataaccatcattttgactaaatgagtatataatcttgtcctcaggtttttcatcgaactttttttcttcaacttctctgatgaactttgattctataattgggcattttgaaaaactacaaatatttaataaatcaatacattgctcaattaaattcttatcgcaaatttgagaaaatatttcacatgtataacatattgagatatgtaaaaaaataccaaaacaaacatatccatgtattctaaggttaattttctatatatttttcagataaccccttgttgctacaattttaactttgggttgtttcataataataatagtaatagtaataacaacaataataataataggccaaaaaaagtttctagtagtgacaaagtttggtttgactcattgtaaatagtatagtattttaaggtcctctattttttagttgaggatgcttgtagagttgtacaaattgattgttggagtaatgaaattcatcttattcattaaataataataataataaattgtatgatgtagttataaattttttatatattcatgatctattaataataacagttattgccatgcatggaagaactttgatagtgttgtctaatttattttgtgtgttattttgtgcttttttttgttggtttgttttgtgcctttagttggtttatttatgccatttcgtagtcaaaataaggtagcattataagaaaaacacttggaaaatctaagacatatcatttttttaaaatttatcctttaatatattcaaaagattttgaataaagtaattaataaaatcaagaagcagtaaaatatacttcaacatgtatagtactatatatttgttatttatatagtattgtttgtttgccgaaacagccaagcgcgacaaaagcttcaccgcccttcttccagctcgagctcacagacctcttagagtcgattctaaatagaactaagaaaaagattactccttttgaatgatttagtgctctttcaaccaacgcgtttggccttatcagtgctttcaaaaactatataaattattagtttatctcggttcaagcaacgatagagtaaccctattgactgagaatctactactagtttttgttgaagaatcatgagtagctatttgaaaagtaaaaataggttgtttaggttgaggttgatcaaatacttggttgcttaacatggaagctacattagccatagagggtctatctgaagcaaggtcttgaacacatagtagcccaatatgtatgcatttcatcacttgtgatttatcatatgattcacccaataatttttcatccaccaactctaaacctctatcttcactccacaattgccatgcctgatgatcattttaataactcaaattagttttcacaacaaaaatatacaatttgcatcgaatgaattagttgtgcatgcaaacttacatatgcaataaggctctcgtattggtctccatataggaagctagaattcttttttccacttattatttccagtatcaacacgccatagctaaaaacatcagatttttcagaaaatattcctctcattccatactctggagacatataacctctgcaatatattgttgataataaccattaataaatagctcaaatgcatttatgtaattagggacaaagaaacaaaataaagtaattacatattatactatttcagatttgttaatatgaaacttaaagtaattcatataattgtcttaaaatgactttcagtaacaacattatacttctttctttcactacccaaaaaaaattatctttaattagtgaaaactttttaatcacaatataaaagttacttatgactaaaacataatatttaaatataaattatcattaatttagttttttttttaaaaaaaataaaataaaaagctattgagattaaaacttctcactctttaacaataaaaaaaaagctttatcatgcactaaacaactacttaataagttacaataaatagaattctatagaaacatatacttttttactttgacatagattccatatatccctcattttcagacaataactataatatagctaggtacttatgccactatttaacctaaaatatataattacatagaaggacaattttcttttacttagacataggttccaaatcccttattttcagaccatataactgtatagaaacacaattacttagacataatttcacccttgcatgtactataactctaaaaccaatctagaaataataacactttaatatatattctatgttaataattaggttaattagtgtaaagaataacttaataactaccttcaaaatcttttataactaatttataaataatctcaaaataatatttatatacaaattaaagtagaggaattaaagatgcttacatggttcccaccaccctatgagtgtttgcttggtttaatgtgtcttcaaaaatccttgccaatccaaaatcagatattttagggttcatcttctcatccaatagaatgttacttgcctttaaatctctatgtataacccttaaacttgaatcacgatgaagatataaaagacctcttgcaatcccatcaataatcttgaacctatgctcccaatcaagttttgctcttctttctttatctaatcaataattcagaaatattatgatcattaatcttaattaatttgagataaaaaagaaaaaaaattgtgaagaaaagatcattaattaatattactaaccgaaaataaaagtatccaaactcttgttgaacatgaactcgtatattaatatcttctcttgattttcaatgcaacatccaattagcttaacaagatttctgtgttgaagttttgatatcaatatcatctcattcctaaattcttcatctccttgtgatgagttgctacaaagtcttttcactgcgacttccttcccatttagttgtccctgcaaatttccaaaaagcatattattatttaactaattaataagttcgctcacaagtactccacgcctacatctagaacattgttatttggtaccaatcgttgttgaatatcaaaagtggaagaaaagaactcattgaattgattgtgaagagcagagctcttatatacaagtacagtactcttgaagttagttaaagaaagacttaactaacataacagtaaaaaagtaactataaaataactaacttcactaactacttaacacccccctcaaactaagcatggataatgaagccaggctgagtttatcacgcaacagtttgaatcgaggtgcagaaagagccttagttagtgatatctttcgaatggttagtgatattgcatagtgttattaaattatattacgtgagactcaaatacttaattctgccaataatgatatgacagtgtagctagtatagttcctccaaatgaaaaggtctccataagtttgttcttgtaatgaaaagttagttgtctcctggaagtatgttcccgaaaagctaatttgtccatttggaaaaagtctcgtggaatgatagtttccatccgggagggagtttccggatgactatcatgtccactccgtgtatagtcttcaggaaaggtagtcttccccagaacaggtattctgaatggctaagggttcctcctagaagagagttccaaatagtcaactaaaactgtctcttttcctatccgtgagtcccttctgtatacgcttcagtactctgtcccagtagtgtatgtctcatccaaaagcacgtttcttttgctgacgtggagattcttaagtttgttcagtcggaattactaacttaacaactcaatagttgcagccaccgaccttaagatctttatcctcaccctatatataaatacaacccacacttatcatt

SEQ ID NO: 219605 - DNA, 2355 bp, Cannabis indica
taaggttgacgttcacactcgagaaacagttccaattttctcttggtattgatattggtctctcatatttcccagaaaaaaaaaagtatcagaacctatttatattagtttaataaaaatattaaagaactgctaatcaattagaaaacatcatgctattaggttcattaataccccatgctcttagttatatattacgtcaaaaaaaaaaaaaactattaagtagcttttttgctttgaatgttataagattatttgtgattatcacattaatgtaatttgagttggaccaccgtggttcataattaagtcaatattttgaccaaactatattaaaatagctgaaccttttggcttaattaattattccaacctcatcctttagttattagtaaatatagatataaattatattgggatatttaaaaaaaagaagtttatatttataatgtctccactaaaaacgaccaaattaatctaatatattagtatattactactaattgatgtgagaggacagagttattataattattaagttgacgaagaaaattgaatttgattattgatgtgcttcaaaaaacttggataaaacagaacgtagacatctgtcgggtaataagtttgactttgagaaacttaatcaattatggacaatatttgtttatacaattcttttcgtggtttgggcagtatgtgtcacaatttaaaataaagatgatcagcaatagtaaaacagagggcaaaaaaaagtcataaccttattgatggataataatagcccagaaaaaaagttgctgatattatatatattgagtcaaagaatcaaagaaatatcaagtcaataaataatatctttaataatgaaggccgtgtgtggtgtgttgaagtccaatcatggagttgctttgtttcaagggaattttgaaaacttcatcgataatcagtactcgagtgtgtgtaggtgtacgtagctatgtagactctcacttcggttgaagataaaagtgttatagtgcatatatatgaccacatcaacaagaaatgctatagctaagtatatgtatgtgaaaattatttaatatatataatgcagtagtggggaactttttatattaatgtagtctatatgtatacataatacagtactaataaatattttattatgaatgttctaccactatcactaattattatgagctaaatagcatatttacatatgccataattattaggatatatcatgccatacgtatatgcatataggaaaggtagattagataaaagaattttgttagttaatataatgtaaagctttaattattaagggtcaaacagaatgggatggataaatttattattacatgaaaagtgaacaagcttagaagagctgtagcattatattatgtgtgtcatgtgattaggtataaggtatatatatatatatatatatttatatatgacgaagcttttgttaattattaatgatcatatcaatagatgaggtcaagccatgtgatattcaatattttcaattatatatatgatcactttgttagatgcgtgatttggagttggaccacttgtaggttgccaaattagcaacacgaaatctaaatactttaattttcttttgatccaaaggatcccaattcgccacataaaaatttgatatcgtcattgcatgcatattaattcatcgtcagctctctcacttattaagtgtcaacgttatacctatagtagttacaattcgcttaatcatttttcataggcttatatatatacacataaatatttatgcaaagggttatttaatcactcatgtagggatatttgttgtaagcattttactttactttggttatttaaaatttttaccacttatgttattgtatttttgaatttttcaataaattaaaaatgatttatgaactattctgttggaagttatttttacaggtccagatttactaacaataaacatgtttgattacattttataatttaataccctaaacatgaatttcttaaaacaatgaatcaaacagatataaagttatataaaaccttatattggtagcaggagaatattatggctcttttcgtttagatctctaactcttgttccttttagggctgaacatcggtcagtttagtcggatttttttcatgttaaaatccaaattttagtttttgatttggattggtgcaatccgaaaaccgaccgaccaatccaaattcctcctaaaaactagctatttttgtgaaccacggtttggttggttaaaatcgaacttttttattctatgtgtaaaaaagaaaacaactttctcacaacacacatgtaaaaaa

SEQ ID NO: 219606 - DNA, 3513 bp, Cannabis indica
taaataaaaaaaattataaaaatgtgaaacaaagtccgtaaaaatgttagtattcgttttgttagacgatcagctaaccgagtcgcccatttcgttgctaggcgtgctcagtttttctctgatcgtagcatttatggtggtgttgtccctaatgatcttcaaactcttttgtatgatgaatgctaaatttcaatgaagtagacatttcattttcaaaaaaaaaaaaaaatctgtaaaaatgtaaaaaaataaataaataaatacaacaatgttaagtactgtgtaaaattgcaagatttttacattcctgaaagtgaaacaatggatttgtgggaacaatctcactcactaaactaattcactcatttttttttctttcctgaacaagacaaattcgagaatcgaactcggtataccctacatccacaagactcaagccatcagggggtgctggaggagcagtggcgcgtctgcatgtggcatccataagctttatcaacgcgtcttcttctgcgcctgctgcagcttctcttatcgacgttgccacaagaacccgaaccatctgttaaacaacactattttagattgtcatgtcacccccaagttaatcaaattctgaataaccgagaagtatgtagaaccaaccttccttaagaaccgattagctaccaattcgatacacataactcttgttccttctgtgcaatcctataaaatatgaatcatgttaggttcttgcattatataacatgaaattgcaatgaagaacatcactcaatggagagaaaatattaactgaagatggcaatctggtttcggtggctctagcatggtagagaaaacactccgtcggtggacctctggcatacatacataggcagatttagcatctacaaaatcaaatcaaagcataggaaatcgcatagaaaaaatgacgtctttgtatgttcttactcatttcgagaagcttttgtatcacgggcaaacatcctatatgatagtaactttccttctagttgctgtaaaagctggttcacccggttcacactaaatgtctgtggtttcttcccactttctaactcttccttctcatcattacctaccccgtcactgcaattttcattgcttccatgatcttcgacgatctctccattcccgttacttaattgactctcgtcctcattgcttaaggggaaaatatataggtaccgcctccattttgcagagaaatttggatggaaggcacgagatacctgcattgagttcgattaagcaaagtatggatagaaaggcaagtaaagaacatcagaagatctacactacctcagaaacagatttgactttgagttttcctggtgccatactattgattgcgtcttcaatatctttacatttattatcctttctccaagtatctagagacatgaaaaaagatgaggttagatcaaatatttcttgatgttttattgacaaaagaaaaatgtaacacatgaaacttaatccaagaaaatgaatggcacaaagcgaaattcccaatgaattttaggcttttggacaagaatttaacatacaaaaagaacaaacttgttgaagggctgtgactcctttgtcagtgcgtcctgcaacagtgacacagccttctaccggtaaagatttgtctctcagcagctgcgctttatcctcatcgataaaatttccaatagatttttctaccaaactgtcaaatagaataagttaatagcttcagttatacaaatgagtcatgaacataaggactgcttaatgattacttcttataactagaatataagcaaaaatcagacaagtgaagaggttcaagtacaactgagatgcttaattcaactaggcctatgtttcacaactataccaaagttgatagcttcagtcaagtaagtgaacatatattgagcattgttattgggcaccagtagtactcagcaccatttagaattaacgtcttgcaattggttagggatactccttaaaaattatcacattaaaataaattatatgggacctgatgcctaattgcacctatagcgatataacaattaagagggtgcttagcattaatcaaacacataagtgggggaaatttttgaaatatgaggatgcttgttattgatcacttcttagaaatcaacacctacaaggaacttgatcctaaggccaataataaatgacaaaatttgaagcaccaatccctttactactacaaatgaaaatccatgtaatccaaattaaccaatataatcccagctctcttaatattatctttgacataaagtaaaagagacacaagaacttgcaacaatgcctttagtactattaatgaaaatcatcccaaatctcaatctatgacataaagtaaaagagacatgtttcaatcactcttggcttgatcaaattcaaacaatagaactcaatcaaaaggtaccaacaacttacccctgaacagtgtttaatcctggttgcttttgccacccatcaaaagaagcaccgtgataagcaacatcaactttgaatgttactcttgcccacctactagactttttatcaagcaaaacacgttctaattcggttttattcgaaaaatcaggaaactcagcatcaatgccatcatcaacaacatcacatttctgccaaatcaataaaacaacagaaataagaaaaaatcaatacaatacaaagtatttaatttcagaaaaaaaagaaaaacccacttgtgtcccaaacaatactgataaagacacagttccattgacaagttgggaataaaaatcaagaacttggttccatggtcgattgtacatgaactcatggctttccctacaaaaaacccacgtttcaattacaataaagattgaaactttagagcattagctttgatgggtcagctcaaaaataaaagagaaagagtaaaaacctagcattccatcgcaaaaatctgcaggggtcagtgtggtcgtaatgagcatattccttcttgggtggcttgagttccattttaaatttgcgaatgagttgtttgggtgagaccatgagattgggattgagcttcagctcattattttgatgatggtgagtttgggatttagagatgaaaagtggtctcttctgtgagtgtggactcaaattccacaacttatgatttgagctctgaaacattgtcgttatactttgttctgtcgacagattcaacagttctaaatctgctgggttgaaacgacatgtcgtatacaaacaactactggtttagaaaacgacatgccgtttacatatgactattagaaaactaaattacattaatagtaaactaaatactattttggatcatgttgtaaaaagttataggttagacgttctgttttcttaaataataaattagaccttgtgtttttcaaaatggtataaaatagattctgaactcaattttcgttaattttttttactataactaacctaaaggctgaaactagtttttagcacgaa

SEQ ID NO: 219607 - DNA, 3002 bp, Cannabis indica
ccactatagtactactctttcgtctttccttctaagtgttataataatgagattttaagagataaaagtatgaagctttttttcaggttttgtgtttatagaactttaaggggtttcttatatgtgcttttgtcataaaatgagtcatgaaattcgagtgaaaatattaatttgttctatgggatagaaatttatgaaattgaaaatacttaagtgtatgatttatatgacacatattttggattgaaaagaattgcttttgtctggggattttgctattgctgtgttgtttgagttaattagctgattatttatcttaattatgaccatggatgaacatttttatgtgtatatatattaatcattgtgaaaaccttgtaaaaaacaaactaaaagtttgtgcatataaattttttggaacaacaatcccaaacactccatcaacatgattctccatcaacatgattgaagagctaactttgttcttgaaataaaataaaataagaaaaaagttattctatatgtctattctctcacaaaattttatcatagaaaaatctagtcatgaccacatcatgaccaatctcgaagcctccatcatatatatatgatataatcttaaaacaaaaccctagaattctatatctttaaaaccacacacacaagagattatacaaacaaaaccttaaaacaaacactataagattatctttcatagatctaaaagaataaaagagaaaaaaaatgatattcaatgaaattaaaatcattaccacaagatgaccaatcttgtcatcgttcatatcaacactttgagaagcattgaaagatataggatgagcatcaaacacaatatcctccacaggtttagatttcaattcttcagctacaatctgtgctcaaaaatcaacaaaaattatattcaaaaacccttttttgaacaccgaaaaatacaaatattcatagatctaagagtaaaaataaacatacattgagagtctgcttaaccgatttcttaagtggttcacgcaacacaccatctatccatttcataaaaaaattgtaatctcgtcttgggacatagcgaactatctcccaacctttagtctgatgattgtttacacgtctatgttgacgatattctactctatatcttgatccactttcatcgtcatctgatgagtcttctaaaagtttaagtacgaccatcttagcagagattgaaagtgataataacgaagataggtttaggagattttttaggattattacaatgaagctagagagagagcaaaaataaagagatgaagtaagagaaagtgagaaatatatagagagagtatgggtatgaaaaaggagagaaaagagggagagagagaatgaaaaatttgattagacagagaaaattatagttaggtgtgttttttttttttaattgtgttaggtctaattcaattttataattaaatatttggtatatagagaaaaaaatccaataataataaatttgaaaaactgaaagtttgtattagtacacagttttatactaattataatttgtcattatctttaaaataacgtaaatggaatatgtaaaaatagaaaaagaatatccttttaacaaaatttgaaatttgtattggtgcaaagttttaccttttataaatataagaaacgttttcttcattttctcatattcttcaatattaaatgttatgtcaaagaatttcctcctacattaattatattttgataaaaattattcaaatattatttgtttactatgtaaaaatcaataataaaaaaaaaagatttattttcgcataaatgtacaaaataatatcactgattatgatgcccccattttttaagagaaaattatacaattacttaattttgtttagttcttgtttattggtatgttaactattaaatcaagtctcataatatatagctactaagaaccatcaatgtttttattcagtgaaaacttatataaaataataataaaaaagattaatgaatgaatatgtattaataaacataaaaaattacatattgtctactttaataaaaattatataattattttttaaattatagatatattttgtgaggcttaattattataaattaaaaatatatattgatgaagagtttttattaaaatttgataaaaaaaaaactagtatataaattaaaaataggacataatatatatttttaattcgtccttttgattaacatttagcgactatatataatatattttcttttcgtaattgtaagaaatcagatcaaattaaatgttctataaacaaagtttaagaatattgtaatataatgactaatattgaaggaaattaaaatagtctatctaaaataatttaatatcattgtaatgtttaatagcgcagcagttaaatgttaacaattattgtactcaaaaaaacatgttaacctttacaactacttattttataagtataattggtggaaatattaatccatccaacaaataatatcaaaatcttatagaagcaatttaactaagatgaaattataactatttgtattttaatgaataatgcataatgtcttgtaattaacagctaaagatagattcttatgttttaaattgtgggagcgaaatctaatattttacgtaaacaatcaagtttgcatgcatggataaaaaaaagaacgtaaattagtatatatcgtaaagtttaatgctaacggataacaaaaataacagtattttgtattattttccttatcagttggggaatacaaattaaaataaagtgacttatcgtaatgcttaacatgtaagagttaacatccaatcattaatttgagagaattgaatattcatgtatacggttagagtttcaaatctaggtgaaagaaaaaacttagggtgtatgtataaagtataataatatgtaaccatataattaataattctgttttgatatatccataataaaagtaattac

SEQ ID NO: 219608 - DNA, 2317 bp, Cannabis indica
caattaaatataaaattaaaagtttattacaaaaaaaaaaaagtaaatttgattaactgattaataaaattggtatttttaacttagctgctatttttctacaagtgctttttcccataagacataaaactagccattaattcataatgttattggtacagtatacagactaccttttagcatttctattgaaaattatttgattaataagaaggttacataaagagattttgcaagatctcaaaagtcagtccagcagataaatatgatcccatattctaacaaaatatttcacatttttcaaagattttagttttacatgaagaaattaatataaaagtcagaggagaaagaagaaagtaaataaaagaatcttccatgttttccctaaaccttcccataataacacacaaagtcaaagacaaaaggatataaaacactccaacctgcaaaccaaaacgtctcaacttctttcctccaaaattaattactatctactctatcttctaatatggcaacgcctaggttcctctacctcttcacggccgtactaattctaacactcatcatcgactcagcaacttccatagagcagtgccccaactgcggtaacaaaacggtgccgtatccactcagcacaacttcaacatgtggggaccaatcctacaagatccgctgccaaacaggcacactcatcttcgacacactcaacaactcctacccaatcacctccatctccgcctcagcccaacgcctcgtcatcgcgccctcacagttgttaccctccacctgcgtcacatctgatatttcccaccaaggtatccaactcaactcgtctctcccattcaacgtgaccagcagtaacaccatcatgtacctcaactgctccgactcactcctccgttcccctctcaattgctcttcctccagtctctgcaacactttcctcaactcatccgacggcggaggctttgccacgtgtagggacaggtctctcatgtgttgcacgttcagagccgggggttcgtcgaactcatacatgatccgagtccgcgagtctgggtgcagcgcctacacgagcttcgtgaacttaaacccgaccttgcctgtgggtcggtggcccgacccgggattggagatccagtgggtttcgccgagggaacccgtgtgtgggggccagtccgattgtgcggtggatggagggaagtctacttgtgggcccgatgccacgtcagatggtggtgtcaatcgatgcttttgtaacacggggctcgtatgggatcctattcaagggttgtgtactaaaagtgagttgtcatttttttaaaaaaatttttttttttttgttcttttctcactattccaccgctgtgtcatatttttgtttgacgttttggaattaaattaatgttttgactttgaatttttttcttttgacagatgttacgtgtcaagatcttgacggttgcagcaattcaaagcggactgcactgatagccggtgagccgccacttcttcttcttcatctaattattattaatttttttttgagtaaatctaattattattaaattatttacaaagataatgtattttgagtcgaagttatgtcgggttagtgctgaagataatattagtttacatgttctgtatgtacgctatttcgactgtttttctaggaacgcaatggacaggggatttttaccaagtatatatagtgcaaactatgaacgtaatgaatattaaatataataaatacatttatttatataatattatacataagacagaaatgggtagaaatttggtaatacccttgaaagagacagcatttaacttaatttaatcagtattttaatgttgacaacgtacggtcaacttttttacattgtgagtgggttgacttagggattggttttgttttgtatcacacgggtgtgggtgtgggtgtgggtgtgggtgtatatagctaatgaagatatgcatataattaattaatacacgtaccccatatttgaaaaaacttatttatctttattatatcttctaaaagttattcttataattctttcaataattttacctaatgggtgtaattaaatttaagagtgttgatatgcacccaaatttaggtggactcacataacagtttctttcatcgtaataattgggattttgggacttaattaaatattgactgtatcttatatttaggtggggatattctaattctaacaagtgtttcacccaatacttgattagtactaataaatattatgcatgtaggtttgacttccggtattggaggagctctgat

SEQ ID NO: 219609 - DNA, 2785 bp, Cannabis indica
cgtttatttgacaaggacacgacaggtttaggtttgtaggggagcaacgacgtttgtgttttaagggtcgacttgttttggttcgttggggtcgataacattttgatttgcaggggatcaatggcgtttgggtctgtagagggtcagggatttggggttgtgggtttgggaaaagggactagaggagggccagagcacaatactcctagttcgtccgtagccagtgtcgcacaagtagagagaaagagagagattaacaggagaggaagagagagagagaaatgatgattttagttttagaattttcaattaaagaaaaagagaaaaagaaaaaagaagaaaaaattattttaatttttctctttaattattttttaattttaaaatttaatttatttttaattattaatattggtgggactaatgaaatcatgctacgtgtaattttggtacacgatggcagtctacttggcacttaacagccaaaaattaatagaaggagtacaatacaaaacgattgtagaggttagggagtttaggttaaaccatgccaaacttcaaaatttaaagaatgtaaccacaaattacctttattataatattatcttgggtttagcaaaagagaacagaaatatcacaaaagatctatctaaaataagaaagcaccagtccactaataaaatcaaaaaatcattacatgcaaattaaaattggaagttaacatacaaacgaactaaaaaaaagatacattaagaaaagaagagaaaagccaacactactgcttaattaagagaaactcattctacatggccttcagttgtggaattctgggttctacaaatggaaagcaaagcttcatatgctagagttacgatagaaaccacttttttgagtatgcaccatacaattgttcgcacaacaatacaataatccatgacttgtttacgagggacaggtacaaaccttataatgaaaccaattggcaatgctaaggaagaaatgccaatacataaaccccaatgtagccatgtcaacttcactgtgtctgcaatgagttttagaatttccactaacaatgtttgaagtagaattataaagccagcagtcacccagaagagtttattagcatgaatcttttcgaagacattcttcgtgtctagtttccttgaattgatctgattaaatacttgacagaacacatatgcattgaagacaaaagtatcacgtaccttatcaacatctatagggtaaatgaattcatttgttatcaaaagaatgagagcagtttcaaataaagcttgtggcaagacgtttctaaacatgatgttggtgataagaggatcagtgtttcgcaccggtggcttcttcatgagctcttttgtaggcctttcattggcaaatccaagacaagccagtgtatcagtgatcaaactcacccacaacagttgtatagttgatagtgggaacgattcagccacaaacactccagcaatgtttgataaaagagggacagaagatgcagttagttggaactgaataaatttctgtgtgttgctataaacacatcttccccacttgaaaatcttagtaagagagcaaaaattaccctctgatatgacaatgtctgagtgttcctcgataatttcagtgccttccttccccatgtagattccaacaatggcttctttcattgcagatgaattacttgttccatgtacaacaactccaacgacattcccatcatctctcaaacattcaacaattaagcgtttatcttcaggggatgaattcgccatgacacatatctcattagccattttccttctttgttttgcattgcatcttctaaacttggccgcttctacaatctctccaccatgttgttcaagtatcccacattcttctgctatagcttttgcaatgaaaatattatcaccagtgatcattttgagttttactccagcattatgtaaatctttgaccacttccttcatcttaggacgacatggatcttcaataccaacaattcctaagaggatcatattatcctccaacaatttttctttgtcatcatcatcttgaacttctttggtttcgactttatgtgccaaagcaatgcatctcagcttcctggtagccatttcttgaataatttgatctagttcttttttttgatcgtgatctagacctttaacaatgccaaaagcatcgtaataccgtgaacacacttctaaaattaactgagcagctcctttcaagtgtacttggattgtcttatcaatctttttctgtgcaagaatccaactctgcttcttctcaggagtgaaggccccgatgtgaagaatgtcaatatttgtttttatgttgtctatatctattttcaaatcttgcagagcccatgttttgattgccgcttctgttggactaatagagagagtattaagagcaataccttcttgtagcaatcttataatcttcggagaaattgatgagtacttttctttagccacacaattattgtctagccaaaactctgagaccttcatctggttcattgtgagtgttccagttttgttaatacaaatagtgtcgacaaagctcatattctctatagaagagagcttacgcaccattgcattttgttccttcaatttcttcattgcataagcacgagtaagcgtcaacgtgagtcgtaagggatctgcaatattcaccacagatgttatcaatgtcacaatcatgctcactataatattaactttggctagacctttagcaggttttt

SEQ ID NO: 219610 - DNA, 4602 bp, Cannabis indica
ctgactctttcatcattgaagacgcattgagcaagagttgtctttcctattccccctaaaccaacaatacaaaaaacagaagtatcattgcagttgattgcatcattaagaagaaacccaacaactctctccttgtcctcgtctctcccatacacatgtggttgagtaataacagaactagtctgacgactttctctaatctgatttcgtctctccccaacatcaacctcccgcaagtgaaaattcattcgctcatttccaatatgatccaatctatccccaatctctctcatctttctagcaataacgtgacgaaagtaaagatgtttaggactcaaacaagataaagaagattgtaccttacggatccatgaatggtcatgtgcaaaactctcctccaatcgaaaggcctctacttcacaatcatctaaaacatcctccaactcagaagaaacatcttccaatttttgcagccaattcttgataggaagatttgttgattgtctctcttcagcatcttcaatgacagcagaaatggttgagaggatgctacacatcttctccatctctttctcgacacccaaaacagatccaatttgcttttggatgagtgagctcagattctcaagcacaacagtgagaacagcttcagccataattctcaaatgaggaaagcaaataataacacagagcaagagagtgaaattaagaacacaaaatgagaaagcttaggccaatggttttggtataattattacaagaagagcaacaaagtcaagtctctgaattgctttacacctcttttgaccaagaaagtgagtgttaggtgcttatcattatcgttgttggactgttaacataatgggttattagtttcttggttctttccaattaaaccatattcatatatagttctcttctctgttcacaaaaagcataaaagtcctaaactatattcatatctaaaaattctttactactcattaatcacaaaatagaatggcagtaatcatacatgtttgattaataattagcaataataataataataatcaaacactcactcaatccaatgtaatgcaatagaccaaaatttaatcataaaaattggaaaccaaaaagttctaaatcttttgatttctaaagatataatatttataaataatgtttctacataatttgactattatgtgtactgtgatgtgagtcatcagagtctaattttatttataattattatttttatttgtgcattgttatatagaagcagttttttcatattatagaattcaactgaatatattatgagtactagttgagtaagagtggtctaagtctttcccatgaaacttactatgaaccaaaaacaattcatacagtcacacatataaatacatatttagattaattttcttctaatttaattggtgatttattttttattttttattttatttttttgttagagaacttttattccaaccaaacacaaaactacaaagaatgagaaaaacaaatatatatatattatgcaatacaacagagccaaaaggcataaaacaaacacactgacactgcaataccctttcaaatatacacaaaaggctttccatttaaatccttaacagtacaaagaaggaacaccatcagccattaacagtggcattaagtctgaggcaagatcaccctctactacaaaaataccatcagtgaaagtataagcagctcaggcaagccaatgaatgtttaactaaaactgggacctcatagaagtcttgaaccaccaaaagggcagtctgtctccacctcagccggctgctgagaacctctctaatcccaatcgcctcagccagtgctggttcatctctgttgctcttagaaggttattcaagatttcctgtattatatgaaacaaatatgtcatacttagaattccaaaatctcaatgcttttctgcaaaacattccaaaaattgtgtcacataccttagacaaatcaacattaatatcatatcggtatggtattggaccctttaaagtgcttcacaactatgcttgtggcaaaaatattggaattggaaggcaaaaaaacggtaaatattactatttatttatatactagtttggaatttctttgtgaacacaactcctttggtaaaagattaattaatttgttctaattttattgctgaattttgtgctgtattgacaattcatacaatacacaaattaaaactcgtaggatacactgagaatgagaatgagaatgaatgtttgatactaaatctgaagttagatacaaagagggacctcatacaagtctgagattgaccattagatattagatttaatgtctaaccatatagtgtaattaacaagtcatattttcacatacattcatcataatcatgttggcatctccctttggctccttctcaccatctgaacacagagtagcaattcaatggtttagtaccacagtacaacagtctgattatatgatggaatgccaaatgattatgattttcttcttaattggaatacataaacagtttcttaccacttatttgatagttctactgtacaacaatcttgatgaagaaaggattttagtgttccaacttcattataaagctgaaaaagaacacaagaaaggtataagaaaaataattttaatcttgcggataaacatagtagaaggtgattcgagatttcctgtataagatgaaacaaacatgtcatacttggaattctttgagctccattggatcatttaattctaaatattatgagtctgcacttttcagaaaagagaaatttcttttgagttttatttacctgataacataggatttgttttcattctcttagaaggctgagaacatgaagattctactcctgttttggggctatatatcatccaacatctcaatgcttttctgcaaaacattccaaaaatcattttcaaatactcaatttcaaaagaaacccagctcatctttattgttagaaacccatatatagttatctcttctcaatcccagaaatgaaaagttagcaatataatcaaccatatatacagagatttacaaaattacagtaaaaatcacataccttagttgcagtattttaaagtttcttcttctctttgtagatcatcctctgctggatcatctcagtactctcacatctggaatatgagatatgttgtgccaatcctcccctacttccttttcacatctctgctctagttttgggcacttatgaatatacaatgtctttaggttggtcagcctttgcatgctcataggaatacattccatatccggacaacatatgatgtttaactctttaagagttgtaagatttccaagccaatcaggcaacgacgcaagctccgagaacatggatattttcaaatgttcaagtgaggaaaggtgctgcaagctttcgggcagaacaggcaacttttgagaagcatcataggagcctcctctatatagatgttggagagatatgagttgattaggaccacttggaaagccttcttcaattgctggacaattatcaagttctagatggttaagcatagtaagattctgaaaactttcagatagtgatcttaacttttcacaatcagcgatgcagattctctgcaacgaacaatctcggaacattccctctggtaggcacgtgagttcaggacaacttctgatttctagaaactgtagcgaattaaggttgtgtagcatattttggggaagggaagtcaaatgacaacgctccatgtgaagctgagtaagaccatagagattagagatggattctagtaacacttgtctcccatcatccaccctcagagatttaacagatcctagtttaggtaagctcaatttcgggcatatagtcacttccaaggaagacaaacatgggaacatttcatttccaacttcatgccttgaaaatccttccaaatttggtaaattcacaatctcaagactttctaaacatccaaagctacttcttaagtctccatgactgtgaataaactgcactaacttcattcttgatacttcaagatatcgaagagatgttagtttaccaaaatgcagaagttctctacagttatggcaataagataaagtgatgcgaacaacacttccaaggatgtcatcacggaaccaagacgagaagtgagcacctttgtaatagtgaatttccaaccatttcaaactcgcgggaggagcaagagcttcgagtacctcttttgcattctcttcagattcctcttcattgttattccaacataaatacagtccttctagacttcttttggctgatagattagcaaatctagcttcaattggattcatgatcacattttctaggttcctgatgtgtagaacacctcctatgttcaggtctttcaattcatccaattgacaacctttttttttatccacaatgaaatttgtcaaagtctttaagcaacttagcttcccaatgtttggtggtaggtgtgataatttgtcacaaaaaattatgtaaagatggcgcagacctttcaagcgaatcatgtgtttgggtagcttacgaagttcat

SEQ ID NO: 219611 - DNA, 5697 bp, Cannabis indica
ggaattccttgaacaacagctttgagaagaacctctttcccaccaatagaaaaaagttgttctctccaagagttcagcaatttccaaattttatctgtaattccactaaacaattgagtcttatccctgcctgaaaatgatggcagccctaagtactgttcatggcatggttgtataggcatattgaggagttggtgaaagaactcttgatctgaatttcttgtgtttggtgaaaaggagagcacacttttgtcaggattaatcacttcgccagaggcacggctataaagatcaagacatcgatgagtagctctagccgaagaccgagaagcacgacaaaaaagaacactatcatcagcaaaaaatagatgtgaaattgagggggctgatcttgagaccttaagaccttgaagtgcaccagtagattcttcatattgcagcaacctagaaaagccttccgagcaaattagaaacagatagggtgataatggatcaccttgcctgatgccacgctgaggtgtaaccgacccttgaatagaaccattcaacaagaaagaataagaaaccgagcttatacagcgtagaatcaactctaccaattggataccaaagcccatttttaacatcacatattctaagaaataccattccaccctatcaaaagccttactcatatcgagtttcattgctgcataaccttgattcgctcttttccttgttttaagtgaatgaagaacttcaaatgccacaaggatattatctgtaataaacctttgagatagaaatgcactttggaattcagatataaccattgcaagataaggttgaagtcgaagaactattgttttggagactagtttgtataatacattacacaaactaatcggccgaaactgagtgatctttgttggcttcttgactttggggataagggtgataagggtcttattgaatgtagagggatcactaccattattgagaacatccaacacagtactagtaacaagaggcccaacaatatgccaataattggtgtagaacataacagacatctcatctattcctggactgctgtcttcagtcatagactttaaggcactaaatacttcatcagccgtaaaaggaagagatagagcagtttgtgaatctggtgtaatggcaacttgaattgtatcaaacactgcctcaagagcttgctcatcaacaccttgagaagtaaaaatagcagcaaaataaagctcgacctgctgaagaatgtcactactgctggtgtacacactgctaccgtcacttattgtttttttaattttattgttggagtgtctagcattggcacattggtgaaagaacttagtatttgaatcactagattcactacaagaaaaaggggtctttacctaattatagttgtaggtaaatatacctattcgtagataatttactttacttaccaataattaattggtagagatgtgtaggtaaaagtttgtggagaaagagtatttacctacggttattgacattggtaggtaaaataattagtggaccccgctaagttttcaaacagatgatgactcataagttgatgtggatgatgacatgtcttcctgcatggctgctactgtgacagtcacgtggcatatattaatggtgccatttggcatttcatagttagtcaatttatcatattaatattatgattaacccacatgtcaagtggtagcattatgtaattagttcacagcacacttgacatttcattattttaagaattatatataaaatttaattaaaccgtaatcttatataaatgaatatcataaaaaatacgccaagtacaaatattgtaaattccaaaattttaaataaaaataatacaatacataataaaaaattacataaaataaatcttcataattctcttccccacaatagaaataacttggaaggttttaaaagtcaattctatccttttcttgtaaggctggaaatgtgatgtgtcctctagatttatctttgatttgtatgccaggctcattccttcaatagaatcaagtttctatttgggagattcgcttgaagatgaactacaaccatgtccaacaattagaggttttcccactaacattctcatattctgcaattttaaaaaaaaaaactaaattacttgatgatacatcggtgatcgaaatttaccataataggaggaatatttagcattcttgaaaatcaccttttccgagcgccatttatcctagagaggggattttacttggtatgccaacctctttgtgtaatcattatgaggaaaacttagtgaatgaaagccttatctttatcatcgatggcctatttttactccactgatatttttcttggctaaagaagaactccactacaatgcaatgcagaatgttttaagaacaagaaatatattattcgaataacttagtttaacatatatataaaaaagaaaaatgactaatttctacttccaccaatctcattaggagaattttctgatattacagttttctctgtttttgaaatgacctatagtattaaatagaaagattacaaaaataaaacataaaagtaaacatcttaagagatgccagaacaccaaaatatatcattattaatctttatgctcagtggggtaacaagtatgtaattttatctctgtctttctgattataattatatataaaaattatatatatgtacattgtagatgttcaaccattgataatgagataaagagctcttccttgaccctatattacggcttaggttcaaaaatttcacacaacatatacaaattacattcataaaccataaaagtattactgtacaaaacataaaagatcaattcaagagtttctaccttaaaagaggagacattacttctgcagtccagcagcgtagaaagaagagaatgataggtcaaaacaaaagggcagagactagaaaatggtttgttaggatttaaagtgatatattccacactcaaaactataattattgtaaaaattaaatatatgtaatttacctcttaagaaaatgggtataaatttagtgtgtctagaattacaaatctaattaaattataatatatatatttttagttaaattataattttatatacagtcagaggtggctttttgtaatcatatctataatcaaattaatttattagaaaagaaaaaccccaattttttttttaaagaactgaagatagttcatcgcaaaagataatttggaatcacaacaggggatccctccctattaatgtattcattacattacacatgatttctagcccatctagccaaggcatcacaagctgaattgtcttttcgggaaatataaaaaaagttacaaacatcaaaccttttacacaaatttaaaacctccattgataacggctttaacgtccacatgggaggacactgtcgaacatttagagcattgatcagcacctttgcatctgaggctcccgcaaaagattggaaacccttttgctccgctaactccagagcccatttaatagccataatttcagcttctgctgcagaggaggcttggtcatacttggcataccagaaagaactattgttccgtctatccagcaagccaacagcaagacccaccttaccctccttccaagatgcgtctgtcatacaaaaaacatcagtcgaattgcacaaaactcttccattcgccgctgctggggacctaagaacatttctgcgctgtgctatatcatcagcatcttccaacatcagatactcatagtatcttctcataattgagcttctaatcaaggcaatgtcaactaatcctcctctaaataagcattcgtttctagccttccaaatgccttcaaacagacagccagtaaaagagaaaaattctcaatgagatccgtggggagggtcgacaaaacccagaccaaccattccttgactgagttaccattcccagtcccatagttgataggaaaagggctgctaaaccacaatgctctcgcacaatggcactcccagaagatgtgcaaggctgactcaatagccccatcacaaagcgacaactcttatccccaactgaactcgagcctatctctagctggaacacagcccatgacagctctccaaatcatgacagaatgcctataatggacgttcttactccaaactttcttcaacagaatgccatcttcatgtgagctgcccccaaaagtggcctcataaccgctcttaactgtgaacctcccatcactcgcctccttccaaactaccaaatcgctattgtcatgaggaagtcggttaattttgccaattctctctcccaacacatccccaaacatctcttttagaagctcaatattccagcttccattgggattagacatgtctgccacagaggagatatgtggataccgcagcttcactcggttcataagctcagtaaactcgtcataatccagccacgggatccatggttgtgtcacacgtctaccgagtcacctctccctaccaaagtcgtgcttcccttacagataatatctctggcattcaggattcctttgtaaaaggctgaatctctatcacgagtattaatactccaaaaagactctgatttgcaatattttttcgagaaacaagacacccatggtctatcacatctaaagacaaatttccatgcgagctttgctaagaggaccttgttcatatgttctagtttcctaaatcccaggcccccctgaaccgtaggcttacaaagcttttcccaacctaccagagccaaataacgatctttttccgtagtccctgtccaccaaaacttccttatcattctatcaatataccgacagcaagagaccggtagtttgttagtagacatcgcatacaaggggatcgatagagcaactgatttcactaaagtagttcgacccgcaaaggaaagaagctttgttttctaaccttcaattctttttacgaccttttgttttaggtacaaatactcttctctcttcttcctcttaaacacaaaaggattccagagctgcttctcttggccatcgcactctttaacatccaggatgctcgggatattattttcaagagtgtttcccatattaccggaaaataagacttccctaaactacacttctggctagaccaggattcgtatttatggatacaatccagaatattcgtcgccaccctctcatttgcacgtgcaaataatattgtatcatcaacaaacatcaagtggctaaccaccggggctgatctagagattgagatgccctgtatctgccccctagtttgctgtctcagaatcaattttgaaagaacgtcatggcacagaagaaataaaaaggagacaacgggtctccttgtcgaagacccctatgaggatcgaactttttctgcggaacaccattcattaaaactgataaggacaccgtactaacacactccatgattaacgcacagacaccactatcaaagctgttgcatttgagaacctcatgaaggaaattccactctattctatcgtaagcctttaacatatctaactttatagccataagccctcccttccctttccttctcttgattgtatggaccaattcttgagttaaaattgatgattccgcaatccatcttcctgttgggttttatgcc

SEQ ID NO: 219612 - DNA, 4316 bp, Cannabis indica
tttttatgtatttttctttatatttttaagctaatattgaaatttaggtgtgaattggatatccaattaaaaaaccgatcgaatccaattagtaattggattggattggattggattggattggattttaagatctaattggattgtatcggataatgattttccaaattcaattactaattggattggatcgaatgtggaaaaaaaggttggattggatcggatgcccacctctatttaaaatatatgtaaatgatagaatttaacttctaattttcatatgtaagcctaaattagctaaacattatacctttattaaaataaagaataagaattttctttctctattttggttgcttcaaggtcaattttgttattttatgatgtttttgtttatgtgagtacaaataattgcataagctaatatatatttctataaatataagaaataaattaattttaatattaagataatatcaaaaaaaagtattatagtatagtgtactataacatatcttataagcaataaaatgtcttatagcattaattataaataacataaaagtgtacttgtaaatttgtaaaaataacacagcaaaaatcttattattgactatacaattatacaatgtataattataaaaatgtgttatgcaaagtggcttgacctatgatatcactctttttcttaaactctcataaagtgttatggtatgatttgataagcctaaattggtcttactaaaagtagtttttctgatagaatttgtacaatagatgaaaagtaaaacaacaaagttcaaacttcataatatagagcatcaaccgcttgctgactccccattcttctctagagttgttccagtgtagttaacatctccatcttcctagtctaagcatacagatattttccctgaatagtttgtgtcgtttcgaattgatgttacatcttctgacactgtctcagacaagatgacagttgtaggttgaaaatcctcatcatcctgctcgactggtattatccaggattcgttaagggatctagttacaacacaaactcactggcaagacattatcagtccaaccttttgaagattttcagtactaaacaaagttctctcatctctctctctctctctctcatgcatctatctcaatcagttggcatcaactctcctcttcatgttaattagaggtccatgtaatttgaaagggccaactttttggaaagttacgtgtctcgacgaaagaactgcagtgtagaaatattccaagtggtaaagactacagttaatttatctaatgttatctatgtatgggttgaactggtggaagcgttagaagctttcttctttttcgagtaggactttttttcaggtcacaaaggaagttaattattttggggggagttaggaaaggccaatttctcacgcggtgaaatatgaaaaaagcagcaaggattctatagccatttagattaatttgttacagacaaactccaaaaaaatatgctattgatattaatcattgatgcaagggcaagtaaccaccaacattcatatggaacctcgacaaaacactatagcaagttttttgagagccattaggactaccatatcctggttgttggatgacagttttaggaagacaataataatctcgagttaattgagcttgatgtttagtaagagtgctaaacacaagggtcttagtctaaaagtctgatctctcaagtcatcacattcaattgcaactttaaggagtctagctgccattaccttcccaccacacgccttttctaagtttgtagactttgacacagttaacttagctctaatgaactaagccacatggggatcatatttatgagacaatcctctacgatctcttcatccaagccatggtaactacaaaatttcaagttgcttacaacttaataaactttttattttttgaaaaggagatgttcaagtaaattcaaaggaagaaattttcaatttacaatgatggtattttggaatttaagaggtcttgggaaaaatattcaaaggtttttgggagtttgagacagcaagctcattaaaaggaggagaagaagaaatttcttgacaaaaaaatcgtcaccgagaaaaaataaaataaataaatcctaccttgaaggataaagagcacttgaaaattttatgaagatgaaaatctatatttttaataaaggatttgcaatgggtgatttgaaagggtagtgtgagagatttgagtgaaaggtctcttatttataagtgagttcaatctcctaatcctaagcaattgggagtcttttaaattcaaaatcttaatggagaaggtaaatgataagaaaaagataaaaatatatcttttcccttctcctttaagctttaaattcaaaattcctagtaaaataggaatacgcttttaaatttaaaatgtaacatcaattcctaatgctaataagattaaggaaaaattagtgattcaaaagaaaaaaataaataataatcaagagatcaaaggtcttttctcatcttcttttttcctctgatttttataatggcatatgtaaataagattaagattcaaattcagttaatcctaatgtcacaaggaatacatgaaatttcaagtttttaaagaaaaatataaaagataagtgaaaaaatgataattttttcctctttttctttcttacttaatttttgaaaaaatcccacacaaaagagcaagggatttaaaagtactaattctattggaaatgcttgaagaatagaaacaattgtctacaattatcaaaattgatgcccatctggtagtttcaagagatacgagttcgattcacatcatcaagtcaactccacagaaggctaaaggttacttggggggaaatgttagcccagaaaaatttcttggtgacaggcacatcaatatttgacacgtgctcagaaatttgacatcatagagtttagtagaccaaagtaataacaaccaacctgggagggatctcttgcactgtgtgcaggttgaccttgggaactctgggatggaagttcaaacttcaattacttgtttcgaactcactatctttttgttggaagttattttaccaagatctagatttactaacatgtatgtttgattatttgctttaatctaacaccctaaatatcaatttcctaatacgatgacaaaaaaacatatacaagttacaaaaaccttacattgatggtagtggaataataatgactccttctgttcagatctctagccttttcgtttttttttttctcagtcgtagagcattatcaagatctgaacctagatcttctctcgttcggtttggttaaccagagtgttctatactatgattgagtagttgacttgctatgagttggcatggtactctatcactaaaggttcaaaatagatgaagaacaatagaaggggattttgaaataaaaaggaaggagctttcatttaccagtattctgacaaagaatgaaaactaggttatttaagttggatgagaaagagagccatcttattctttgtaaagtattttaactatgatttaggatttaattatatgaattaaaaaaagataaaataataagcaaaaatcaagcttaagtggctggccatagtagtgggcctcactagttacaatgttgccattttatttcataattcatcttttctttcaataatgccatatttattaattagttataattaatagttataattaattatcaaataaaatttccatttaacttatttattaattagaccttacaaagtctcttaattaacaaataaatcttaaaactatttttcttcacaactaagccattgcttagtaaaaattcataaataagacatagtctaattttaaaattataattaattaattaaaaccaattaactgagtctacaaacagtattatctcaactagtgcggggaccattggcctatgtaatcaagcttacaataagtagatccgaaatttaccaagtaaatttcctaacttgtttattcctccttgtgccactataaatttggatattaactcttaattacatagaacgcattattaccaaaaatagatgccatttgaattacccattgtttcaatctaaatagtcaatgatcctctatagatgatctacatcaaatagggacaaatctactgttctacccttcgatgtattttatccttaaaataattagctacctataaataatatttcagttaactaatataattattgaaataaagcctcaatcatttatctctactaag
